United States Patent Application Publication US 2026/0103690 A1 - sequence listing, part 98

SEQ ID NO: 486580 - protein, 419 aa, unidentified
MSFKILKNNCCGLDVHKTWIFACIGITDSHSRTEYKQARFSSFSKGLQELCNWLAKYNCTDVCMESTGKYWIPVFNILEKNNIWVTLSHPKYTKPQKGNKTDRKDAKWICDLYMCGMVKPSFIPPADIRELRDLVRYRYKLTCMITGEKNRAQNCLTVSNLKLDDVFSDVFGKSSRSITEQILQHHGETFDVAPFVDSRCKTPIEEIQAAVDGAISTEQAVKLRQCLNHIDELEMHKAEIEREIFRLSDKYEEALTLIRTVPGFDKNPMTAIQVLSEIGGDMSVFPTAKNLVSWAGCCPRNDQSNQKIKSTRISRAGSYFKPVLVQVANALIKSKKNPEFTTRYRRIKARRGHKKAIIAICRMLLTAIWHILTDLKPYTPEGFLESRPVNESKVLTTSQALNLLKQRGYIIKNDIIPVS

SEQ ID NO: 486581 - protein, 345 aa, unidentified
MSEYFLGIDLHKRSSVWVLLDASKTIVQTESIVCTKQAVEEGLNKFNVDWHSVKAAIEPVCGWRWVANHLRREGLDVRIVNPFKTRLIAENRLKHDKIDATILAELLRADFLPESYWAPDEVCRLRELVRHMAYLVRLRTSVKNRIHGTFGRNGEGEEIINPLRKSNSKKVEPLLTEELRNLFSLLNEFSKKIKPLDLEIAKEARRHSVARLLMTMPAVGPITALTIAAEVGDWERFDTPAQLTSFAGLVPRQRSSGQNVRFGRITKAGSRILRYSIVEVALRIRDTYDIRLNSFLARLKETHGAKQARVALARKMLSIMWYMIKRNEPYKDEVSQESSVKPVIS

SEQ ID NO: 486582 - protein, 408 aa, unidentified
MEVRYPRCAGLAVHKKTVVAAVRIAEGRQVRPEVRRFATTTTALLALGDWLAAEEVTHVAMEATGVSWKPVWHVLEDAVELVLANAAHIRQVPGRKSDVPDAQWIAELLAHGVIRGSFGPPAPVQELRDLPRTRKQLGRELTQHNLRIQRVLEDATIKLGSVISEVLGVSGRAILDALVAGETDPGRLAAAAKGRLKCAPEDLVEARRGRVTVPHRFRVGQPLQLGDSLRARMAAFDAESERRREPFPPAVERLTTIPGVSEGAAQAIVAELGVDMTRFPTVSQLRSWAGLCPRLDESAGKRRSPRIRKGAPWLKAMLGQCAKAAARAQGTYRQAQYQRLKSRRGGKKAAVAVAASILTAVYYRLRDGVEYRDLGADPFTRRDKVKIAARLARRIRDLGYEVDIRQAA

SEQ ID NO: 486583 - protein, 349 aa, unidentified
MTQFSRIGLDTSKALFTLHCVDAAGKPLLRVNLRRSQLLGFFKRHAPTVVAMEACGGSHHWARKLMALGHEVRLIPPQYVKPYLKRGKNDRNDAEAICEAAGRPGMRFVPVKSEEQQAEAMVLKVRATLVEQRTQLINAMRGHAAEFGVISGRGTGKVTALLAAIAADTAIPPAAQEMLALLGEQIAHLDCRIKALEVKLDAMHKANATSQLLATVPGIGPIIGLSFAIDVDPAAFTSGRHLAAWLGLTPREHSTAGRQRMGGISRAGNERLRALLVNGATSVIRAAERAGSKLATEWLVKLLARRPRKVAAVALANKMARMIWAMMTTGEAYRRPVTLAAARLAAVVS

SEQ ID NO: 486584 - protein, 424 aa, unidentified
MSKKKSRVAGLGALYARACGLDVHKKLVVACVRILDAKDGTVQSTLRKFGTMTADLLELRQWLAELRVTHVAMESTGVYWQPVFNLLEGHFKVWVVNAQHIKKVPGRKTDMKDAEWIAQLLQCGLLRPSFVPERQQRELRDLTRQQTKLVQQRNAVDNRIQKVLETANIKLGSVASDVLGVSGRKMIEALMAGEKDVTVLAELAQRKLREKIPQLQRALEGELTEHHRFLLRQLLRQYDFLEKEIASVSERLGAVAPPSFRAAVEQLDAIAGVGARGARALLAETGTDMSRFPTHKHFASWAGRCPGNHESAGKRRSGKTPAANRHLDAVLTEMAHAAVRTKNSYFKAQYHRLAGRRGKKRAIGAVKHSLLITVYFMLRDNRPYKDLGVDYFDKLNPQQRIRYHVRRLRELGQGVELSPIADAA

SEQ ID NO: 486585 - protein, 355 aa, unidentified
MESVKYIGLDVHQSTISVAVLNAEGKLLMQSVIATKATAVRDLLQGLRGVLHVTFEEGTYSAWLYDVVVRHVARVVVCNPRKNALLKSGNKSDQIDARKLAELLRAGMLSPVYHGEQSTRTLQQLVASYTALTEDTGRAMRRIKALYRSQAIACAGKKPLGKRHRGEWLPRLTDSGQRRRAEWLYQELDAVQILRREAKHAVMVECHKNPAAKLLRSMPFFGPLRAAVLIARVQTPHRFRTKRQFWTYCGLGLETRSSADYVEKDGQIVRRRKPVYIRGLNWNYSHELKNVFKSAATTASAMDGPFRAFYESRVANGMLPAMARLTLARKMAAIALILWKKGETFAAEHLKLQAA

SEQ ID NO: 486586 - protein, 349 aa, unidentified
MNQDEVILGVDTHLDKHVGAVIDVTGRLIGTQAVGTTTVGYLQLLDWARSLGDLRRAGIEGTATYGAGLTKFLRDNGIEVFEVNRPDRAARRLRGKADPTDAESAACAVLSGRATAVPKDQSGAAYAMRAVSVARRSAVKARTQAVNQLRGLLVSAPQEVRERLLQTKTEDCVTACARIRSLGETTLLQSLTITLRILAKRWLALRDEIKILDSQLEDLTKTHASRLRQEFGVGAQTAAVLVCVAGDNPERLKSEAALAALCGVSPLQASSGKTTRHRLNRGGDRAANNALWTIAMVRMRSDPRTRAYVARRTSQGLSNKEIQRCLKRYIVRELYPLILADLKHLTATS

SEQ ID NO: 486587 - protein, 352 aa, unidentified
MLPGIERQPRKKLEPSPERLLAVLHRWRDEAVKAGRTITRIAVAFEAGRDGFWLARWLEARGVEAHVIHPSSVAVSREHRRAKTDRLDTELLKRGFLGWLRGERGHCSMARVPTIAEEDAKRPSRKRDCLVGERTRIVNRIKSTLARLGIRSFKPTLRKAADRLATVRTPEGMPLPPNTLAELQRDMVRLDLVVSQIREIEEARQKRLERQHETGPHAMVRLLARIVGVGVETADMLVHEVLTRPMRDRRAVARYAGLTGSPDESGAQRREQGLARAGNARVRRGMIQLAWRFLMFQKDSALALWYRARTADSRIGTRKTMIVALARKLIIALWRLVTTGEALEGVVLRPAS

SEQ ID NO: 486588 - protein, 441 aa, unidentified
MAMRTREDDEVYPNAAAIDVGASSHWVAVPRTADHQPVREFGTMTDDLNAMADWLLACGVDTVALESTGVYWIPVYEVLEQRGLTVWLVDARQMKYVPGRKSDVQDCQWLQKLMSLGLLRAAWRPAGEVCVVRAVVRQRELLLTEQGSWVQRMQKALVQMNLQLTEVLTDVMGTTGQAIIRAIVAGERDPKVLARFRHSLVKASTEDVIRALTGNWRDEHLFVLAQALAMFDSLAERILECDAKTEALLVPLGRHDVELAGPDKKRQKNTPRFDARTALARWAGVDLTRINGLSVATVMTILSEIGPDLSRFASVKHFCSWLRLCPATKISGGKTLSSGTRRSANRARQALKMAAMSLSRSDSALGAFYRRLCARMDKPRANTAVAHKLARMVYFMLTRGEAFVDQGQQHYEEQQRQRSIAALRRRATALGFQLQPNPPTP

SEQ ID NO: 486589 - protein, 339 aa, unidentified
MEIRRIGLDLAKNVFEVHGVDEAERVVLRKTLKRGKVLEFFAQLPACVVGMEACGGGHHWARRLIELGHDARLMAPQFVAPYRKSNKTDRNDAEAICEAVGRGSMRFVPVKDEQQQAVQMLHRMRTLQIGERTALVNQTRGLLAEYGIVVAQGIGRLRARLPEILEDAENGLPGLARELFADLRERLVALDAKIGEYDRRIEQLARDSEVAQRLMGLEGIGAVTATAIIAAAGDGRQFANGRQFAAWMGLVPREYSSGGKIRRGRISKRGDAYLRTLLIHGARVVYRHLGKREDRKSQWLRQLAARRGVNKALVALAAKHARILWALLSRGGEYQPVAA

SEQ ID NO: 486590 - protein, 447 aa, unidentified
MKLRLGIDIACRSAHDAACADESGRIMWSGHRFHTNVDDLEVLWGRLPADAEEVMVVMEPTRNAWVPLAAWFRRRGALVVMVPSEQSSDLRDYLSKHTKTDRLDAQLLARLPVLHPEGLHPAEHLGPGDPLKRAVKIRAGLVHRRSTAMHRLDSLLEILGPGWTDALGTKMTQTTFRFLTLYANPHQVKRLGAARLARWFQHHTRKAWGPERAQAVIDAAQATIALWGNDGLDFEALAADIAAEATIALAVSEQIALLDRRIHDLYTEADPAGIVLSAPGVGDILAGQILGRLGDPHRFTSLAAARSFSGLIPRRNASGITDHAGGPTKQGDACLRAALFQAADRARKVDPQLAARYQRLMRESGRHHTSATCTIATVLLTRIVSCLRNGVHYQLRDVDGTPITVQQGRAIVVERYQIPTDVRAARRSISNPHSTNRRDERVKKGVA

SEQ ID NO: 486591 - protein, 326 aa, unidentified
MNTIRVVGIDIAKSVFQVCVWMVDGFVAWNKKISRQKLLDTLRQFEPGTLIAMDACSTSHFWGRTLSAMGFSVRLIPAQHVKAFVRSQKNNANDALAICETACRPDIHFVPVKTTEQQDIKALRNTRQLMVEQRTALANQLRSLLAENGLILPVGIQRLQQQLPELIDDASNDLTFTLHRLLSSLREDMQALNERVTCLDKEIAALSSQQKAYRHLLTIPGVGPLIAAAFISEVDAVQFSNGRELSAWCGLVPRQHSSGGKQRLSSVTKNGNRSLRTLVIHGARSVMRCVKKRDDNLGLWLKRFEARRGFLKTTVALANKLTRIIW

SEQ ID NO: 486592 - protein, 371 aa, unidentified
MKDLLEISCGLDVHKEKIVACILTGPLGKPTRSEIREFSTLIPDMIALRNWIVSKNCHHVAMESTGIYWMPIYEILEDAFSGDITLLVVNARHMKNVPGKKTDMRDSEWISTLLRAGLLNGSFIPEKRIREFRDLNRYRKSVIRDITSQKNRIEKFLQSSGFRLSSFISDIFGASGRNIILHLIEHGQIDKTALDSCLKTKTRNRIDEILMSVNGTLSEHQKAFLRILMTHYDSLKKHLAEIETSLEEDMAPFALQVEQLNSIYGISTTASCAIIAEIGIDMKPFKTAEHICSWAGLCPGNNESAGKRKSTSVTKGNPYIKSMLCEIAWVIAGKRNTYLSAWYWRIKQKKRSQKKRLSHLPENFLSSSTQC

SEQ ID NO: 486593 - protein, 363 aa, unidentified
MEHYTSIGIDVGDKTSRICVMTKAGGQRRVVEERAVATTREGLSEYLADKDRSWPVTFETGVHCRWMREHIAAMGFKVYVANPAKLKQLTESDTKNDRNDARALARYTLADVDMLHPVFLRPESHQRMIRLLEARQVLVRTRTKIINELRGFAKSMGFRIPRKDAGCFHRLDRSAWPAALQDLAWPMFGVLEVVALKIKAYESQMRELADSAEFREDVGRVRQVVGVGFLCSAAFVAFLGGNYGRFAKARDVGPYLGLVPRQDQSGDVDRQLPITKKGAGMLRTLLTECAQVVLKDGVRETDLKLKGLRIFGRGGANARKRAVTAVARGLAVTMAALLKHPEREYVPLSERARELAGQAEVAI

SEQ ID NO: 486594 - protein, 351 aa, unidentified
MLILGVEYHPSEQYSALADTETAECGERRLNHSAGEAEKFYRNLQQRAASVRVGMEATGYSRWFERLLAELGSELWIGDAAEIKTKRVRKQKTDPNHARLLLQLLLEDNFPRIWVPSPENRDLRQLLWHRHRMLQMRTRIRNPLQALAMNQGQRRKKKLWNEPGRAPLEKLPLAVWASRRSTDLLELLDRMNPPIEGLSAAIEREARKWPEVLRLMTHPSVGPLTALAFVLIIGTVERFKCGKQIGSYVGLIPCEDSSAGHQRLGHITKQGSSLLRFLLGEAAQAAARCDADWRRRYLHLALRRQRNIAKVAMARRLGVPLYWMWRKGWEYSEWVKFGSHAGQLGTGDGVQ

SEQ ID NO: 486595 - protein, 338 aa, unidentified
MKLYGAIDLHSTNNVTVLIDEQDEVVYQKRLPNDLPLILQQLSPYASSIQGIVVESTYNWYWLVDGLIEKEHVVHLANTAAIQQYEGLKYTDDHSDARWLAHMLRLGVLPVGYIYPKGERAVRDLLRKRGQLVRQKTANLLSIQNLITRNTGSSISANHIKRLSAEEVEGLLTEADVALAVKANLSVMRSLEAEIATLERVVKERVKLRPAFRYLLSVSGIGPILALTIMLETGDIRRFSTVGNFASYCRCVGSEKISNGKRKGSGNTKNGNKHLAWAFVEAANFAVRYEPQIRSFYQRKKAKTHRVVAIKAVAHKLARACYHVMRDEVPFDVTKAFA

SEQ ID NO: 486596 - protein, 411 aa, unidentified
MQVINHRCCGLDVHKRSITACRLKWLGSAWDREVRQFGTMTKDLLGLADWLAQEGCTHVAMESTGVYWKPVYNILEGQFELLVVNAQHLKAVPGRKTDVRDAEWIAELLAHGLLRGSFVPPVPIRELRELTRYRSSLVRDRARTINRLQKVLEACNIKLANVVSDIDGVSARQMLEALVAGERDTEQLASLAKGRLKEKREQLVEALSGRLKAHQSFLIAEHLAQVDYLEGAIERLSQEIEERLRPFEQEIGWLDTIPGVSRRTAEVLWAETGGDMSRFASARHLASWAGMCPGNNESAGKRRSGRTRKGSPWLRHCLVEAAHGAAHTKNKYLSSQYHRIGARRGKKKAQVAVGHSILVIAYHLLTRKQPYSDLGANYFDERDRQAVTKRCVVRLERLGFKVSLEKLAVAA

SEQ ID NO: 486597 - protein, 320 aa, unidentified
MPVDYLGIDISKGDFHAHLLQSGSSAKRTFPNSSAGYGQLQRWLSNRKASGVHACMEATGAYWIGLAAYLYHHSVCVSVVNPARIKNFARSQMRRTKTDDVDAHIIAQFCQTQAPVLWKPPAKEILEIRAILAYRNQLIAERHRVRQLASTIHEARVVQERTNSHIATLNDLITGVEQQLNAAIKQTPAIADAVQRLAGIPGVGQLSAAAIVAQLPLDHLRNSKAAAAYAGLCPSDRQSGTSIHGKSRLSKMGNADLRRALYMPALCVLRTSSSLAQFAARLRSRGKPGKVLVAALMRKILTIAYAVLKSGKPYIEALHA

SEQ ID NO: 486598 - protein, 355 aa, unidentified
MTSTKYIGLDVHKESISIAVLNFAGKVVMECVIETKASTILQFIHGLRGDVHVTFEEGTWAVWLYDLLKPYVTELVVCNPRKNALLKEGSKSDRIDAHKLAELLYMSKLSSVYHGEHGLRMLKELSRSYLTISKDLGRVMNRLKALYRGWAIPCAGTQVYAPHYRSEWLAKIHEAGVRRRAELYYQQLDALRLVRQQARKELLAEARKHRATKLLRQIPGIGPLRAAHLVAVMQTPHRFRTKRQLWNYSGLGLETHDSAQYRVVEGQLQRSKKPVTLRGLNDNHNHDLKDIFKGAAMRASTAAGPLHDFYEALLAKGRKPTMARLTLARKIAAITLIVWKKEVRFDANYLKQQAA

SEQ ID NO: 486599 - protein, 352 aa, unidentified
MGIVVALDVHRKQITYKTLDRETGEVKRGRIAPAARADVRAWLARFAGCEVEFALEGTTGWRFVVEEIERAGHRAHLADPAETAAKRGRKRRAKTDSADCDLQLRLLCAGELPESWIPPAHLLELRTRVRMRKTLVDQRTAWQQRLQAQLFHQGVPAGLRPRTRAGREALVRAELSPAGRELVSLALRMIDAIDRELAPLDRQLCSFARRQPGCRALIARLYGVGPVSATAILAELGDCRRFARSDDAVRHSGLDVTVYQSDEKRAPGHLSHEGPELLRWALFEAALSAARAGSPDHGYYLQVAERIDHNRACLSVARKLCRRAYHILRELGDEALAPVEGDPYAEEAIAAA

SEQ ID NO: 486600 - protein, 319 aa, unidentified
MAQVDLVVVGIDVAKDKVDACIRSLPLRQTCPSTAQGQRKLVAWLRKHKVNKAVMEASGGYEREWVRVLHQAGIEVRIVDPKRVRSFALSAGRLAKNDAIDAEMIAWFAETFSEAPSPTHDAAHEELQALVKARKGLLDLKIRLQNQNEHAAPGPVQRAYARILKSLAAEIAKLEAAIAVKIKATPDFAERAEIIESVPGLAETTSATIIAGMPELGQVSNKISPALLGAAPYDDDSGHRRGERHIKGGRRWLRNAIYMPCLGAATQNNPVLKAFYRRLIAKGKEPKVALIACMRKLIVILNTMIARRQKWDPSRYALN

SEQ ID NO: 486601 - protein, 413 aa, unidentified
MSHYKQYHIYVGLDLHKAHHTAVIINCWNERLGEIQIENKPSAFDDLMKFVKKHTPKGLTPVYGLEDTGGNGRALAVHLVEKKQNVKEVNSALSYSERMSHATTQKSDSWDAFCIAKVLLARLDELPDANPQDLYWTLGQLVARRNAIVKHASGLKNQMHQQLSYHYPSYKKFFCDIDGKAALAFWEKYPAPHQALTVGVDELAEYLREASHNTCSTRKAGEILDLVKQDGETKRNFQEYRDFLIVNMVKDMRRSRELIKQIEEQLRQVLTQTDYRLESMDGISTVTAAELVAEIGDIRRFPNADKLARFAGIAPVRFSSGGKGKDQASGQGNRVLNAIFHNLAVQQIQVAKGDNKKQRNPVFYEFYQRKLAEGKTKKQALICVMRRLVNIIYSMMKNKTEYRAVSLTERQAS

SEQ ID NO: 486602 - protein, 377 aa, unidentified
METVAENRGQGKDIFCGIDLHDKSMLAGIAIDKGEIKYHQFDTDEGGGMLELIGLLGELRSRHRGASVHASYEASGSGFRLSDVLEDHGFECWVLAPSHLPVSRKSRSEKTDQKDVKRIMSVIRSHVLAGSDLPAVWKPDIELRDDREIVRQRLRLGEEITKVKNKIHGLLKRNGLRKPEGMKNWTRSHLRWLEDTAADCGRGLGATLQSLVRELGFYVGEEVLVDKAVLELSGRERYGSRVKALRRVKGVGVLSAMVYLTELGDLGRFRNRKALGNYLGLTPRSYESGDDDDHKGHISRLGPSRVRKVLNQCAWAVVKWDGYWRDWFLARTEIAGLSAKKQKELRKKMITAVMRRLGIWLWHAGVGAGLGCEVAAA

SEQ ID NO: 486603 - protein, 386 aa, unidentified
MSRVIHTSPARTDSRPDSSITAVGVDVAAYELVIVVRLGDTNLKPETYKNDKRAHNSILKRVIALKCPVRVCMEATSTYHLPLARLLCRKGESAGIEVGVANAAKVKHYANSEEHRSKTDQHDAAIIAEYAQTRRFKRWHAPSDTALALFFIGRRIVDLVKQRTAEMCHLHSLSKAGIKDTCVEKSIKRNIAAINDGIDRLKQDAKKIIMEDPEGDDLHLKFRLLQTMKGIGELSAIRLLCELSVLPPDMTPRQWVAMAGLDPKKVQSGMNKGKSRISKEGRAHMRAILYMCAIVAVKCSPEVKRFYLLLQSRGKAKMQAIVAVMRRILHKIWGMFKNKAPYDPSKFYNFPPDATATAPVTVLSPVVASSPTPVRVPDPVPATKSA

SEQ ID NO: 486604 - protein, 337 aa, unidentified
MTLYCGIDLHANNSVVAVLDEHDQTVFEKRLPNDLATIIDVLSIYQAELDACVVESTYNWYWLVDGLMAAGFPVSLAHTSALPEYSGLKYSNDFSDARQLAHLLRLGLLPTGYIYPRQERALRDLLRRRLLLVRQRSLHHVSLQSLIARHTGRRLNTHQIKTLMQEQLADYLQGHALLSGEITHQARCWLDRAVRRIEQELQLQIKPREDYQLLQSVPGIGPVLGTTIALETGTIKRFASAGNYASYARCVKSEKISNGKRKGQGNKKNGNKYLAWAFMEAGHYGSIWSPRIKRYYQRKKARGHILVAKKAVANKLARACYHMLNRHEVFDVTRAFS

SEQ ID NO: 486605 - protein, 347 aa, unidentified
MSISMIGLDTAKSVFQVHAVNEAGKVEIKRKLRRSELIAFFEKQESCTVVMEACGAAHHWARMLTGLGHTVKLIAAEAVKPFVKKGKKNDAADAAAICEAASRPDVKFVPAKNVEQQGILALHTARSLLVKQQTMLANAMRGLATEFGITVPKGMRKLNELMTFVDTDETIPKQAKQAITGLHDYCKELSEGIETFEAEIVAHARHDETARRLATIPGIGPITASLIAATVGDIGLFKTARQFAAWLGLVPGQNSTGGKTRLGRITKIGNREIRRLLVLGATSMVHRADGWNSAVGAWLRNILERRPVRLVTVALANKMARIAWAVMTRKEVYRPKGGVTVVASVAA

SEQ ID NO: 486606 - protein, 370 aa, unidentified
MKKKVLYVGLDVHKKTTDVAIAPGRSNGKVRSYGKIDSTVDALNKLIKKLQVDDKELRFVYEAGPCGYQIYRHLDANGIDCSVVAPSMIPRRSGDRIKTDRRDALNLARLFRAGELTSIYVPTVEDEAMRDLIRCRDDIKRFERKARQRLLSFLLRHGYQYSGKRNWTKGFYNWLATVKFSHSAQQVTLHEYIEATNECSQRIKRITEQIQVHAEEWSRARFVKAYQALRGVSLIVSTTVAAEIGDMRRFPNPKQLMAYLGLIPSEHSSGKTVRRGPITKTGNSHVRRALIEAAWTYKMQARISTVLLKRQQGLPKSVCDISWKAQTRLCARYRRLMARGKTKQTVITAIARELSAFIWAIDQEMQVAHE

SEQ ID NO: 486607 - protein, 370 aa, unidentified
MSKRSTVFVGLDVHKNSISVAYALENSRTEPVFVGSIGSRQYDIDKLVRRLQSKGSGLLCAYEAGPCGYVLHRHLASKGIECLVVAPSLIPKKPGERVKTDRRDAVELARLLRSGDLTPVYVPGVEDEAIRDLCRARQDALIDLKGARQRLKSFLLRLGLHYTGRANWSDAHRRYLSKLVCPTPVQQIVFQEYIRAIDQHLERVDRIEQQLREVVFSWRLLPLVEALQALRGVQLITALTIVAELGDITRFDSPRQLAAFLGLTPSEYSSGDSRRQGRITKAGNSNARRVLVEGAWAYRYPAKVSPLIRKRLEKLPQPIQDISWKAQVRLCSRFRRLTRRGKHPNLVVTAIAREMAAFMWAIARQLPVTI

SEQ ID NO: 486608 - protein, 350 aa, unidentified
MTVYIGVDFHARVQTVCWCDLADGEIQVRELHHQEDDIRGFYAPFQGEVIVGVEASGYRTWFEEMLHELGYHVWLGNAREIRRLAKRRQKTDRRDAELILDLLLSDEFPRIYQPSPQSREVLRMLRYRHRLVKMRTMAKNSVHALAISVGLPLKRRLLTKGGREMLLAAPMSPVMSQQREQWLSLLTELDQRIAPLDAWLQEQAHGDPRVERRRTHPGLGLLTSLSLVHTLSPVQRLATSRKVVAYVGLDPMERSSAEKKRYLGISQEGSRLRRFLLVEAARASIKVDPELNRFYRRLVYRRGPQKAIVAVARKLLIRAYIMLRDEIDYAEFLRRGVEARSARSVHRQQA

SEQ ID NO: 486609 - protein, 429 aa, unidentified
MEVVFSRCCGMDVHQASVVACALLDEGGRKPKKVVRTFPTMRQGLEQLRDWLASLAVTHVTMEGTGVYWRPVYSTLEGHVDIALVNARHVKALQGRKTDVNDAEWLASLLRHGLLRKSFVPAKDVRAIRDLCRYRRMLVQSQTTEKNRIIKLLEIIGIKLATVASDVFGTSGMLMLRAIAAGSCTAEQIAPLAKGRLRSKLPELRLALDVLVEEHHRVMLSDQLARLDQTAAEVARYDSLLEKQVAPYEESLALLCTIDGIGRIAAIEIFAEIGPDVASFPSAAQFASWAGTCPGQHQSGGKSFSTRRRKGNPYLQSILVEASLAATRKKATYFTDKYRRLKSRRGSMRALFAIAHKLACAVHRVLQTHEPYRDLGGNYLDLRHKRSTAHALAKRLQSLGYDQNNVVALFERLKPVASTTQLSPEISEG

SEQ ID NO: 486610 - protein, 335 aa, unidentified
METVYFLGIDVSKKKLDSALTIDGKNYQQDEIENTANAIRVFFQNMKKMFGMKSSQMIVCMEHTGIYCLPLLDFLTKNKIKTCLESAAQIKKSQGIARGKSDRIDALRIAHYAYKNREELHYWAPQRGVVQQLKALLVTRDRLVKIRTQLEVPIRECEEFVVESIRKDMMKNCRRTLKAVGLDILGIEQAINDLIGSDPGLAEQVKIATSIPGIGTITATNMIIATGEFTRISVSKKFACYTGVAPFPYKSGTTIRGKTRVSNLANMNLKKLLHLAAMSAIQCSEELGTFYKRKVQEGKNKMSVINAVRNKLISRVFVCIKDKRMYQKIYRRELA

SEQ ID NO: 486611 - protein, 389 aa, unidentified
MAIVDARGQQIVRATVEHSDAGLRGLLRLLGKHGVGEVGIERPDGPVIDTLLDAGLTVVVISPNQVKNLRGRYGSAGNKDDRFDAFVLADTLRTDRAWLHPLTPDSPATITLRRVCRARKDLIAHRVGMANQLREHLKRVFPGAVGLFADIDSPISLAFLDRFDCQDRADWLSAKRLAAWLASVGYSGRTDPAVLHARLIGAPRGVTGEHGTAESHVTRALLTVLSTLTEQIKVLSAQIDEQLSLHADAHNFTSLPRAGRIRAARLLAEIGDCRARFPTPESLACLAGVAPSTRQSGKIRSIGFRWSCDKQLRDAVCDFAGDSRRANPWAADLYDRAIARGHDHPHAVRILARAWIYVIWHCWQDGTAYNPDQHGALQRLIQSRNATAA

SEQ ID NO: 486612 - protein, 380 aa, unidentified
MKNVRFIGMDVHAETIAVAVAEPGGEVRSLGTIPNRPEPIGRLIRKLGKLEQPRVCYEAGPTGYVLYWQLSELGVRCEVIAPTLVPVKAGDRVKTDRRDAEKLARCYRAGDLTPVWVPDAAHEALRDLVRARLAAKRDQLRARNRLGKFLLRHGRHAPQGITAWGAKHLAWVKQQSFEQPAQQATLVDYLHEVEHAAERIVRLERSIDMAIETLPEKMRAVIEALQGLRGVAKVNAVSIMAELGEVSRFENPRQLMGYSGIVSREHSSGERTRRGGISKAGSAHLRRIVIEAAWAYRHRPGLGTTLLARQRDLPEEIKAMAWKAQHRLHARYTKLLARGKAKQQVITALGRELLGFIWAIGVAAERSQSHAPRRALKRAA

SEQ ID NO: 486613 - protein, 395 aa, unidentified
MKANELQVAVDVGARMHRVAVGNGSGQLVAEFDLAHTAAGLAGFFTRIERLRGSRSAPVAVAMEGFNGWARPLDRQVLDRGWKLYNVNNLKLARYKEIFPAPAKTDAIDARRILELFRLRGDLAIARGVLQEIVATTEEAERLKRLTRRRRQLVNEKVRVLNRMQSDLQAVCPGLLAITAEADNLWFLSLLGAREDIRRLAGLRPTSLLALEGVGRAYCVKIQAWQREALFSHEAEWAGPMIVADARRVLALKREIAALDQLIEPLIDGCETARRLRTIPGFGPTCSGELAGEIGAIERFATEASLALYLGMAVLDHSSGTHTGTRRPRQVNARAKAAMMTAVARHMEQVPSSRAYYDKKRAQGKAHNQAVRALGRQLVRVIWSMLKHQRDYEVR

SEQ ID NO: 486614 - protein, 427 aa, unidentified
MSYRIAGIDVHKKMLAVVVSDVEIEQEYQFERRLFSSSPEQLRLLAAWLLAQEAEEVVMESTAQYWKPVWEALERYWKPLRHERESARPTSGRLHLAQAQSNRGPRGRKKDFPDAERLVKRLVARELTLSFVPDAEQRLWRTVTRRKYQLTRDHVRLQNQLESLLEETHIKLSSLVSDLLGVSARRMLKALAGGETNPAALAALADRKLRATPEQLCDALGACTDLKPVYRRLLKMVLEQLQFLEQQIGQLDQEMASLLSQHQHRVQRLAEVPGLGVDSAQQIIAEVGATAATFPSEKQLSSWVGACPGDDESAGVNYSHRSPKGNRPMRRILNQAANAAVKTKGSIFEMVYRRLVPRLGHNQTIGAIAHRLCRLIWKILHQEVCYEERGPAVSKRSIQNRTTKMIRQLRSLGYRVELVTSQTDSPA

SEQ ID NO: 486615 - protein, 347 aa, unidentified
MRFYTQQHQYYCGIDLHARTMYLCIIDGEGTVLVHRNMPTERGSLLRAIDSYRDDLVIAVECIFTWYWIADLCAELDIPFVLGHALYMKAIHGGKSKNDKIDSQKIAAMLRGGMFPMAYAYPQEMRSTRDLLRRRNYLMHYQSELLSHIQNTRSQYNLPAFEKRIRPSSNRANLADHFPEPMVRESIEVDLQLLDTLHQILLKMERTVIEQARHHDPVALQLIRTIPGIGKVLSLVILYEIQDVRRFPQVGNFISYARLVKCPHESAGKKSGKRNNKIGNAHLKWAFSEAAVLFLRDHKPAKEYHHSLVSRYGKAKALSIIAQKLGRTVYFMLKRKEVFDPNRFFSS

SEQ ID NO: 486616 - protein, 403 aa, unidentified
MNSVGIDISKGRSTVAVMRPFGEVVISPFEVRHTDSELSELARQLKSLDGETRVVMEATGNYHAPVAKLLHDAGLYVSVVNAKLVHGYGNNDLRRVKTDKKDAVKLANYGLDRWLTLPRYVPEEDTRLLLKNCYRQYRQYSKVQTVLKNNLISLLDTVFPNVNRLFSSPIRGDGSEKWVDFVAEFWHCRCVSEKSEKAFTNKYQRWCKTHGYNFSEAKAHTIHAEASGHIGIMPKSETTKLLVEQAVVQLRATSAALIALKREMLTLAAQLPEYPVVMGMFGVGPTLGPQLIAEIGDVRRFYSKKALVAYAGLDAPPNDSGDVTGRHKSMSKIGASSLRRTLFLVMGIYLQNAPLDEPVYQFMDRKRAEGKPFRVYMMASANKFLRIYYATVKAYLESLEHTA

SEQ ID NO: 486617 - protein, 344 aa, unidentified
MIWVGLDVHKRFSRMGMFDPASGDLQDLGEVTNDREALRVRLEQVASPRTVVLEAGRSSYHMAGLLESLADEVWIIDPTELRRLQHRVAKTDRRDAAALAWWAAKGALKPLWRPDRQVLELRELTRGRTALTRLATQLRNLIRSLLARHGYECPHRDLLSARGRAWMDKVTLEGYARELFAAFRELLSLIQEKADGFEQKVEVAATDFPAAQRLRTIPGIGPVLGLSLAVEIGDVSRFPSPGHLRGYSGLTPAVSQSGEKEARGPITKHGNKWLRHTAVLAAQRMSQMHHPDPSIKRTFLSVAFRHGRNPGKVAAARRLLDLSYHLLKKEVDYQAPRARTAPTA

SEQ ID NO: 486618 - protein, 353 aa, unidentified
MLIIGCDYHPSFQQIAFVDRETGECGERKLTHKEEAESFYRDLNGRSVRVGMEATGHARWFERLLAEQNFELWIGDPAEIRAKRVRKQKNDRQDAEHLLQLLVEDRFPQIWVPSPENRDLRQLLWHRHRLVQMRTRVKNQVQAIALNEGIRRKKGLWSKLGRVQLESLSLAPGSARRRQDLLELLDRLNPKIDELSTAIQQAAEQRPEVQRLMTHPGVGPITALAFVLILGVPERFQCGKQVGSYLGLIPCEESTGGRQRLGHISKQGNTLLRFLLIESAHAVVRYDPDWRRRFLHLAMRRGRPIAKVAMARRLAVRLYWMWRKAWDYQQTLKFGSQGRKLSSHNVVTTGSTR

SEQ ID NO: 486619 - protein, 428 aa, unidentified
MNEIELSRVKEFRQLKKQIQGSETHVIVGIDVAKERHHAFLGTASGRTLVKKLIFENSASGFSELLDRVEAVRAQNGLSDIVFGLEPTSNYHKPLGRYLISKGYHVVLVAGKAVKNNRELLDERWDKHDTKDAANIADLVSRGKCFYYDMPSREIEELRELLALRARLKKEEHSLGLRIRNNLLAKHFPELDSFYSACERETLAIVRWCLNPQKIAAMPFDEFFKRVAPSTRGIAQKLRLQKIHHLAHESIGCPVGGAVQFQAGLLVEKIKQVREQIMQVEQGIQQLCVQFPSYDYLLSIPGFGPYVASKVLATIADPRRFDSAKQVIRTSGYDLCADRSGKRSDQAVPVISKKGNSQLRYALYQAALIASSRHRFFMAYFARMLQGREREQGIRTKMRVKLAAKMLVIAWTLMKKGEPFNPEYLNAQ

SEQ ID NO: 486620 - protein, 428 aa, unidentified
MEPSISTHPSAAVAAYIGIDWADQKHAIALRSAAEPSKVQHQVVEQKPEALMQWIGQLEQRFGAQGKILICLEQSRGALIYHLMGYEFLELYPVNPLQLARYRETFSPGGAKDDRPDSELLCELLYCHRDRLRAWKADSVLTRKLAFLNEGRREAVEQRTGLSNAIKSQLKVYFPLALELLNEESSTALAADLLLRWPSLEVLQKQSASTVRKFFYGHNCRGETKMLQRLELIQQAGPLTQDSALIEPAAFRVQLLARQLKSLLADIARYDQKIAQLFAAHPDRFLFENLPGAGAALAPRLVTAFGSDPTRWDSAQEVATLLGIAPLRRASGKNTGKKASVHFRLACPKFLRQSLHEFAGCSIRYCSWARACYESQRARGKAHHASVRAVAFKWIRILFACWKQRTPYDPQRYQSALKHRGSPFANAR

SEQ ID NO: 486621 - protein, 317 aa, unidentified
MTIKPNIVHIGVDVSKKHLDLSPFDKGPRRIPNTPAGRRKLIRRIQALQSETIVTCEASGGYEQALLEDLLDAEIPVARVNPNQVRYFVRSQGVGAKNDRIDAAMLSRFGEFRHGEGRLFLALKSEEGLADLRGLLQRRSQLKAAIRQEKNRLDPSPCKLVASHIRSHIKYLEKSLAKIEGAMKEWEKEHPVYKELRKRLLSVKGIGRITVLTLLAFMPELGKVSDRRLSALVGVAPYDRQSGDSQMQSKIAGGRVEVRRVMYMAALAAGRSNPILRAFKERLVAQGKAKKLVLIAILRKLVVLANKIAANPDFKPA

SEQ ID NO: 486622 - protein, 282 aa, unidentified
MTQSQIYIYGIDLGKNWFHLVAMDRMGHVLTKQKLTRSQLKQFISTTPPCRVAFEACPGSQYWGRLFQQAGFEPKIIPAQFVKPYLKSNKNDFNDATAIAEAGSRGTMRCVPLKSHEQLALQATHRVRQRFIIERTATVNQMRALLLEYGLTVPVGRKVFERALPAILEDAENGLPDFIRALVLRLRERWQQLDIQIDEMSLMLGQASSASSLCQKVSTVPGIGPIVSTALIAAIGNGSQFKKARDLSAWLGLVPRQYSTGGKSSLGGISKRGNNYLRQMVT

SEQ ID NO: 486623 - protein, 361 aa, unidentified
MLYLSTDQHIKQLTVNLRDEEGQVLVRRQVSTVWDKVRAFFEDLRNRAKDCGGFMAIVEVCGFNDWLLAMFKEYGCKEVVLIQPRESSRNKTDRRDANRLGEILWLNRDRLSKGVPVQGLRRIRIVDSVVADNRRLTVLRIRSTRQQTRTVNRIKQILRRHNLEQHQPCKGIHTKATQKWLRELSLCEQDRLSMNILLKELELFGQHLDQLDEQIHQRIDKCPEAQLLGSITGGKAGFSALALASRIVPVNDFPTARSLANYFGLTPGCRNSGEATQRLGSITKEGSAIARYVLGQLVLHVLKRDPGMRKWHRRIKKRRGSKIARVAVMRRLTVIIWHMLKNNVPYRKCCQAGHPEDGPQT

SEQ ID NO: 486624 - protein, 412 aa, unidentified
MQAIIERCCGLDVHQETVVACLLIGAAGARARKEVRTFRTVRRELEALRDWLTAARVTHVGMESTGVYWRPVYAVLEGHVELIVGNARHIRNVPGRKTDVKDAEWIADLVRHGLIAKSFVPPAPLRELRDLVRYRRKLIEAQAAERNRLLRLLETANIKLASVMSDVFGVSGRAMLKALIAGDAAPEEMAALARGQLRRKRAELIEALTGGVEEHHRFLLAMQLGRIEAIEADIAALDARIAERVLPYSAEMALLMTIPGVNWLVGAVIIAEIGTDMSVFLSVHHLAAWAGVCPGSYESAGKQKSGRARKGNVHLRTILVGAAVSAARTKGSYLRDKFHRLKARRGALRAALAIAHKIVVAAYHMLARGVVYRDLGDTYLDQIGERRIVANLKRRLERLGYQVTLEPKAEAA

SEQ ID NO: 486625 - protein, 343 aa, unidentified
MRKQSYAGIDLHSNNLVVATVDQSGKRLGHRRLPCSLNEVLEYLNNDVPGRIKEIAVESTYNWYWLVDGLKDAGYRVKLANPAGMVQYNGLKAANDKTDAYFIAELLRLGIMPCGTILEPSARAVRDLLRRRQLLVSKRTSLILALKNQYIRTHGQNLPLARVKSSSPEEMAGLFENCHERLAAEITKAEIDHLGGSIMRIEKACWQHAQKVQGYQSLNTLPGIGQVLSGVISLETADISRFASPENYASYCRTVAAKKESNGKTKGENNAKCGNKYLAWAFIEAANLARRYDENARRWFDRKAAKTSKIVATKALACKLSKAAWHLMRNGGSYDPARLFGAT

SEQ ID NO: 486626 - protein, 360 aa, unidentified
MRYSTIVGIDTHSKKNAVCAIVPETGEMREAVLSEDPGQLLAWIVEQDFPKPVGCVYESGPTGFGLARSLVAGGVACTVAATSKLSYRVDRQKNDRADARWLAQQMLAGGVRAVRVPTPEEESLCHLSRLRGEVAADLRKAKQRVSSFLLLTNTEYNLTKKKWSKTFYRWAESHEFDQPADTFAFRCKVSAVLRLEERLAEVEAEIMRVVAASPKLSERMSRFTCIHGIGKVSAFSLVCEVHDFDRFKNGASFASYLGLVPSESSSGKKVSRGAIAKQGNSHLRRVLVEAASCYSKQFKAVKSEDAAVPEAVRAKADRCAVRLRKRRAALKERNVSANKAKVAVARELAEWIYYIAVMPA

SEQ ID NO: 486627 - protein, 418 aa, unidentified
MDLLHEHCAGLDVHKKTVVACVRLVRGGGVEKEIRTFKTTTADLLALGEWLDGHGVGHVVMEATGVYWKPVWHILDDGERELSLANAAHVKNLPGHKSDVSDCDWLSDLEAHGLIRGSFVPDRQTQELRGLLRTRKQAVRERTSNTLRLQKTLEEANVKLDSVISNVIGVSGRRMIEAMIGGETDPVALAALADRRIKAPPEVLCEALRGRVTGHHRFLLGLHLEHIDAIDGMIDKIDQQIEANLQPFRAAVALLTTIPGVNELVGQTIVSEIGLDMSRFPTCGQLISWAGLCPRSDESAGKRRSTRIRKGAPWLKTTLVQSAWAASKTKATYLHAQFVRIRSRRGAKKAIVAVAASILTAAYHMLKTGTPYRDLGPQHFDSRNKEAQAKRLLSRIRALGFAADFDSLKPIPDSVVSY

SEQ ID NO: 486628 - protein, 351 aa, unidentified
MPATASTAIAVIGIDIGKNWFHIVGLDDRGAILVRQKLSRSQVETRLANMPPCLIGMEACVGAHHLSRKLKALGHDARLMPARYVRPYSKGQKNDFRDAEAIAEAVQRPTMKFVATKTADQLDLQALHRVRARLVSQRTGIINQIRAFLLERGIAVRQGQRFLRVELPRILAAPPAVLSPRMVHVIEGLASDWRRLDERIEALSGEIEELAKRDAGCERLMSVPGIGPIISSAMVAAIGTGDGFAKGRDFAAWLGLVPRQISTGDRTVLGKISKRGNRYLRVLFVQAAWVVLAKVKPNRWEGHGLRPWIEAAKKRLHHNVLAIALANKLARIAWSVLARGRAFEASKLQAA

SEQ ID NO: 486629 - protein, 383 aa, unidentified
MKSVCGLGVHKDSVYLCILSEFGELIEKVFGVLTYQLEEMRDLMLHHHVVEVSMESTSVYWIPIWRVLSPHFKLNLANPYFIKQLPGRKSDVKDAQWIAECTMKELIRGSFVPPETIQQLRQYDRRIFDLNEEIVRKLSKLDAVLQRCNIRLSNYVSNVDSKSYKAVVRAISQGITDHEELVKLIHGRIINHHGIDVITASLKGVVSLAEIDMISQLRDELDMAEAHKEKCQARMLEICEREFPEELRRLQTIPGIKERAATSLIAEIGTDMNKFETANHLASWSGLKPRNDESNKKIKSRSITHGNVYLRKTIIECAWAASRTKDCFFSRFSYHQTQVRKKNKMKVLVAVARKMLVAIWHVLHDNTNYIDFTTDRKTSRTRG

SEQ ID NO: 486630 - protein, 425 aa, unidentified
MGSSKQSREKMNTHLLSSEHAEASIKYVCGIDIGSQSCSSCVTRPDKSVVVKPITFVKTQQGWKVLEEKLAQLDAAPDQIVIGMEATSRYHENLYHELEQRGYQMRLLHPGQTHHFHQQRGLRAKTDRLDAMTIARVLLSGEARMGYIPGEQVATYRELVRLHTQLSEEAARYQNQIQVLVVVLFPEFNQVFADPCGQGALAVLKAYPHAQAVAEAGVEAVYQVLRVIPATHFGRPTAQKLVAAAQTSSSSGRALSGRASSLRILCDQLEHTQANLTRLEEELEQLITTDPGTKGLQQMPELGPKTIAVLRAELGEVDRFACTDQAVAYAGMDIRIKESGKFKGKAKLSKRGSGLLRQILYLAALRSIRLEGSAFGAYYRHLVGRGLKKMSALMAVMRKMVAVTTHLMQTGEDYDPSKVWVGGTS

SEQ ID NO: 486631 - protein, 460 aa, unidentified
MRTIGIDLAIKATHKAVVVNANGKFVTPVISFQTRWDEIAQVVARAREGVASDYPLRAVMEPTGMVWLSVATALRRLNVTPYLVNGQRSHDLRRFYKRHSSSDRIAARVLAKMPIVDEESLYPLEIPSAMQFACQRGCKELNRLRGQITAIKNRMRDSDRFAWPGLESVFEDIFSPATRLFRQIWYDPARVVSAGVDEVRRTFRPLADQEEDLAWVEHLLRLATEVLTLYGTDAVDYDLFQREVYRDQRLLVSLEDEADLVWRETVRPLYHRLHPGRHLETLYGVGEQSAAVYTCFVGRAARFPTNRKFRGWHGLVPDSRQSGNAESKGLRVSQAGPDLVKKYAFLGGGVARRFDPQIAGVYYNQMMHKGKHFNQAICACATHLLDRIRVILLQDRPYELRDVDGTPVTPEQARAIIAERYTVPEEVRVRNNRRVRRERAARRAERQHQRRQQRRSRSRM

SEQ ID NO: 486632 - protein, 315 aa, unidentified
MVDVPCFVGIDVVKAQLDIALRPAGERWAVPNDASGIAPLVDRLQALYPTLIVLEATGGLERAATAALAAAGLPVVVVNPRQARDFARATGQLAKTDALDARALAHFADVIRPTPRPLPDAQTQELRALLGRRQQLIVMRTAEQNRLAGASERLTKDITAHIMWLKADIATLDNDLETLLRASPLWRENDDLLQSATGMGPVRAHTLRRELPELGTRTRQQMAALVGVAPLNCDSGTRRGKRTIWGGGAHVRTVFSMRTLVATRFNPQITAFYERRLAAGKVKKVALTACMHKFLTMLNAILKHRTRWQPQEVQS

SEQ ID NO: 486633 - protein, 353 aa, unidentified
MRTYYVGMDVHQASIVIVVLNGAGKVVMELVVETGAATVRNFIRSLQGRVSVTFEEGTQATWLHDLLRPMVDEVIVCDPRRNKLLSEGNKGDRVDALKLAQLLRAGMLRAVYHGDKSVRALKELVRNYNCLVADTTRVMNRLKAIFRGRAIGCAGDDVYRRDRRDKWLGKLKERGAKQRAGFLYEQLGALKQLRQDAKREMLKEVRRHPAYKLLLTIPLLGPVRVAQLIAIVETPFRFRSKRQFWTYVGLAVITRTTAEYQVVGGKARKRRRPVATRGLNRNHNHQLKRLFKSAAMSACAQGPFQPEYDLRVAQGMDESLARLAVARKLAATTLRIWKQGESFAVEKMKPQTA

SEQ ID NO: 486634 - protein, 318 aa, unidentified
MIIGIDISKKTFDIAFFKDHHWHSQVFDQQLEHYQALLHQVGMVGNWFVMEATGSYFLKLADFITEQGGNVCVLNPKTIHHFGKMRLKRAKTDKKDARLIAQYGMDYEAELKKWQSADQDIIHLRQLQSLIALLIQQRTMLTNHQEALAQQPEQSESVNKELAEEKTALNERIKRLEQEVEERVQRKWSDEYQRLISIAGIGKVTATALLVMTYGFSRFTEVKEFLSYIGLAPAPHQSGTSIKGKGHISKIGSPVIRRLLYLCSWTAKKQNPPCKALYERLKNKGKPEKVIKIAIAHKLLRQAFAVVLKAQNFDPKMA

SEQ ID NO: 486635 - protein, 411 aa, unidentified
MRRVIGIDTHRTFGEVVIWEDGRLRHMGRVDMTRTALEGFGKTLLTTDEVVIEATGNCMAVSRVLSPFVKRVVIANPLQVKAIAHAHVKTDKIDAGTLANLYAAGYLPEIWTPDAVTERMRRLVARRYQVVRHRTRIKNEVHSILYAHLIPQCPHADLFGRLGRAWLIRQQVPDDERAAIERHIRELDRLGEDLGVLDREIAEGALSDTAIERLLTITGVNLTVAAGLVAAIGDIGRFSNPQKLVSYFGLNPRVRQSGLGAAHHGRISKVGRSHARAMLVEAAWAAAKTPGPLHAFFVRVRARRGHQVAAVAVARKLTVLCWHMLTKETNYLWARPSLVAHKMRGMELQAGRPQKKGNTRGPAYAYNVKKLRNQEMRVAEQAQKGYEHFVEAWRPRPPKKARGRLNPARLE

SEQ ID NO: 486636 - protein, 359 aa, unidentified
MKIVGCDFHPSYQQVAVLDTETGEVQEQKLMHGNGEAEKFYRELEGPALIGMEATGNARWFELMVERFGHQLWIGDAAKIRASYVRKQKTDKRDAGHILTLLIEKRFPRLWMADRQQRDIRQLLTHRHKLVAVRTRLKTELQHLALNQGVQKKRQLWNEKGRALLQSLPLEGWTQQRRKDLLQLLAVVEPQIEQLDKAVEQTAQAHPQAVLLMTQPGVGPITSLAFAVTIGEASRFAHSNQVASYLGLIPSERSSGNKRRLGSISKQGNVFLRTLLVEAAQSVVRHDPGFRKEYQHRCHHKAKGIAKVAAARKLAVRLYWMLKSNKPYPEVLLIGGSPRHPVAAKAKADQLNGHPRISQ

SEQ ID NO: 486637 - protein, 423 aa, unidentified
MNQNLPPSNISPALFIGIDWADQSHDCYIIDTQGNGQHQSFKQTPEAIDQWVDRMLELSGGKTIAIMLEQSKGPLIYALMFRPNVFLYPVNPKQFAKYRESYPGGDSKSDPSDARYIARMLRERISTLKPWIPDDEATRRLGNLSEQRRSIVNDQVAQRQQLIAHLKSYFPLLLELFGERNQVGLLLKILSRWSDPRQLRRADRQHVDRVLRENGIRNPSRREELIERIRGSKLLTNDTAIIEPLSMVCKLLAKQIEASRRTIQAFDQEIEEALKKHPDGKLFTSLRGAGPTLAARLLCAFGSQKDRWKDADELASFSGIVPVTRQSGKSRVVLQRWACPKYLKQTFHEFADSARKWCPWSKARYRQLRAGGMKHNAAIRKIARSWIRILFRLWQTGQPFDCDRYLTGLLRRNPELINFLPKS

SEQ ID NO: 486638 - protein, 365 aa, unidentified
MGVPTMAQAKTFVALDVHVAKTVAAIIDRESGELTRQRLSGRASEVTEFVAGLPGPVRATYEAGPTGFALARRLEAAGVDCLVCAPGLIPRGPSDRVKTDQRDAERLVRLLIAGELHRVTVPSIEAESLRDLVRAREDLRGDLMSARHRVTKLLLRHDVAFEGSERNWTQPHLKWLSTVRFEHPGTQAAFDDYRGGVDALMIRRGELERQIAEQLPLSPWAQTAQRLMCMRGIDTLTAAGLCAEIGDFERFRHPEQLMSYLGVVPSEHSSGTRRRQGSITKSGSQHARRLLVEAAWHYRQSPRISEPLRRRQAGADPTIVALSWKTQRRLHRVWTRMEQRGKRRTIIAVAAARELAGFCWAISTA

SEQ ID NO: 486639 - protein, 339 aa, unidentified
MKLYAAFDLHSSNSYLAVIDEEGKRQMQKKLPNDAETIVMVLNPYRKKIAGIAVESTYNWYWLVDLLMAKGYEVHLANPAAIQKYKGLKHADDRHDANWLAEMLRLNILPEGYIYPKEERSLRDLLRKRGHLVRLRTSLIISLQHIITRNCGIMVNVNDVKRLKEDRISPLLDGNEDILMAGSVSKETIDYLTRKIRSIERIVEGKIELSSPYRQLLSIPGVGKILALTIMLETGPISRFQKVGNYVSYCRKVSSRWMSNGKSKGKGNKRNGNKYLAWAYSEASELSRRFDTQARAYYQRKAQKSNRMVAHQALAHKLARSAYFVMRDDVPFMAEKLFA

SEQ ID NO: 486640 - protein, 391 aa, unidentified
MFHIGIDIAKHNHEVSIIDDNGKALGKSFSISNSQKGVDKFNTYLDSFNITSENCVIGMESTGHYWINLFSFLVNLKFNVFVINPIQSDAFRKMYIRKTKNDSKDSYIIAQIMRFGEYSSSNISDENIFALRQLSRYRTSLVDECSSWKRKIISILDQVFPEYSNLFSDTFGVTSKELLSKYPLPENMLELSTEELTNLLNKASKGRLGNEKAQEIKESAKNSFGVSFAKETFSFQIKQIINQISFIESQLKELDNEISNMLKELNSEITTITGIGDVLGACILSEIGDISRFEKASQLVAFAGLDVAVKQSGEFTGTEMKITKRGSPYLRRAIWLAATVASFKDPALSIYYKSLIARGKKHLTAIGAVSRKMCNIIFSVLKNKKVYTPNI

SEQ ID NO: 486641 - protein, 345 aa, unidentified
MEIHTIGIDLAKTIFHLVGVTARGEVVVRKKCSRNQLLRFTSNLRVSLIGMEACGGSHFLGRALREQGHDVRLMPAQYVKPYVKTNKNDYIDAEAIAEAVTRPSMRFVPIKTDDQLDLQSLHRVRERWVGRRTAVINQIRGMLLERGITVTKGRRHIEESLPGILEDCDNKLSGALRVLLTELRLEMQYLGRQIEESDQLILRIASELEPCRRLVAIPGIGPVIATATIAAIGNGAAFKKGRGFAAWWGVVPGEHSSGGKQTLTKTSRRGNRYLRKLFVQGAHAVLQKRRTQSTGLSTWLAQLTTRKRIQVAAVALANKLARMVWAVLTKGEAYRPPLLPQPVVA

SEQ ID NO: 486642 - protein, 433 aa, unidentified
MSKRNHLKEHLNEKLQAISFSTLVVGIDIAKKNQWARFVDCRGIEHGKALKFENNKNGFEKILTIIYELCKNDGFKNAVVGMEPTGHYWKPLANYLIKKGLTVVLVNPYHTKKSKELDDNSQTKSDIKDALTIAKLVKDGRYFETYLPHDIYAELRSLTATRTGMLKRMKSIKNTIIAVLDEYFPEYESVFKCIFIGKASRHILKTCPLPVLIKELGEDGVLAEIKKAVKKTVGRKKAKQLLEAAQNSIGIDYGESATPFRIKQYMSELEMMEKQLTQIEEEMKKALEKTGLSEYLLSIPGSGVVSMASVLGELGDPLRFENPRQMSRMAGYNLIEDSSGKNKSGTCISKRGRKNLRCVLYKMALIMVAVNPEMKELYKYLKTRESNPLKKMQALVVVSKKILTMIYTLSKKKEYYNPEQVFGKIRKEQLQAA

SEQ ID NO: 486643 - protein, 350 aa, unidentified
MIILGVDFHPEFQQIASVDTDTGEFQEKRLAHREEAETFYRGLAAAGQKVRVGMEASGHARWFERLLAELQVELWIGDAAEIRTRRVRKQKTDRQDAQLILKLMLKDDFPQIWVPSWENRDLRQLLWHRHRMVQARTRIMNQLQAVALNEGLRCKKRLWREHGRQQLEAFRLAPWASRRRRDLLELMDRLNPTIAELSQAIEQEVEKCPEARRLMTHPGVGALTALAFVLIIGKADRFQCGKQIASYLGLVPLEDSSGNRRRLGHITKQGSSMMRFLLVEAAQVTVRSVPEWRSKYLHLMMRRGRKTAKIAMARKLAVRLYWMWRKEWDYAQWVKFGSHAGQPGNRHGVQ

SEQ ID NO: 486644 - protein, 413 aa, unidentified
MSYSIAGIDVHKKMLAVVVADVSKEGEWQFERRKFGTMPAELDRLHEWLTALEVKEAVMESTAQYWKPVWARLEGEFHLELAQAQSNRGPRGRKSDFADAERLVRRYAADELVLSFVPGPEQRLWRRLSRGKQELTGEKVRLQNRLEALLEEMHIKLSSLVSDLLGVSGRKMLQAVAEGETDAVKLAALADVNLRATPDELRDAFRAAATLDRRYRMVLQQYLDRLALIERHMEELERELARSLKEHEGAVTRLAQVPGLGVDSAQQIIAEVGPKAERFPSAGQLSSWVGTCPGQEESAEQSKSNRSPKGNRPMRRILNQAANAAAKSQGTVFEALYKRIKGRDPKQHNKAVWAVANHQSRVIWKILHDGVNYEERGNRTNIRAMKHRARRLARELRQLGYTVQPPQPQRAPA

SEQ ID NO: 486645 - protein, 342 aa, unidentified
MIVIGIDPHKSTHTATAVDSATNRDLGSLRIRSSFDDYAQLMTWSKQWPDRIWAVENASGLGHHLTQWMISRGEAVVDIPSTATARVRELSRGGRRKNDRIDAAAAACVAFSQGDFRPVAPEGHTDVLRILDERRIDLVKQNGRLVNQLHALLRELFPGGLEREFDTEAAAQQLKAFGPDSGADAMRKNIALDIIGDLRRLRFQIDDLTNRIKTELAACGTTLPKIPGVGTVTAARILARTGNPMRFANEAAFANYTGTAPVEIASADKQRHRPSRSGDRMLNSAIHIVAVTQARTPSSDGYAYHQRKMAEARPHAKQCAASNGKSRNDSGEQCGTTSSGSS

SEQ ID NO: 486646 - protein, 335 aa, unidentified
MEFTYFIGTDVSKNELDFAVMQGKTLLFHKEIVNTQEDVLIFLKELVKLPGFELTKAVFCMEHTGIYNNHLLACLYKKKANIWLEAAIQIKNSSGKLRGKNDKVDSIRIADYAYTQREKVRLWSPKREVVQQLAHLSAARSRLIEAKKMLKTPLKELDSFSSKKIAGPGASICSHTLKAIDADLERADHKMDKLIADDPELRRLFNLVTSVSGVGKVTATQILITTNEFKDISNPKQYACYAGVAPFTDDSGKIEKKARVSHMANKKVKTLLHMSALIAIQHNKDITLYYHRKVNEEKKNKMSVINAVRNKLILRIFACVNHNSPYQNNYQKLLA

SEQ ID NO: 486647 - protein, 466 aa, unidentified
MARKQKSNKSKKHKRPIQSLETIQPNAAGIDLGSREHWVAGPPQEDKVPNVERFGTTTPELLRLADWLTQQGVKSVAMESTGVYWIPLFEILDSKGFEVLLANARQVTHVPGRKTDMLDCQWLQLLHACGLLRGSFRPSDDICRLRALFRERNTMVDQRSDWVRRMQKSLDQMNICVHHAVSDITGVTGMRIIRAIIDGERDPQALARMRDHRCRKSEEQIAAELTGNWRSEHLFNLHQALKMYDQLCTVVADYDSEILSYIQTLQPEDNNDTAVPPPSTKAKARGIAKRGQEPLRQALYRFSGFDMTTIDGIGVDTASVVISELGLDYTMFPEEGNFVSYLRLAPNLSISAGKKVPSKSKASTCTRVASALRMAALTLRNSKTALGASYRRVAWRKGASVAVFATARKLAQLIYRLVRYGQAYVDAGAKAYETRFNQRRLKFYTKALNDMGYNVEPLAAAEANSG

SEQ ID NO: 486648 - protein, 345 aa, unidentified
MIIGCDFHPSWQQVSWLDTETGETGEQKLVHVSGEAKAFYQQVAAPALIGVEATGNSQWFIELVQEWGHEIWIGDAAQIRASYVRKQKTDKRDAAHILKLVVEGRFPRLWTPDREQRDLRQLVLHRHKLVEIRSRVKNELQHLSLNKGMQRKAKLWSQAGQKLLRELPLKPWAACRREDLLGLLGMLNEQIGKLDEAVQQAADEHPQARLLMTQPGVGPNTALAFVLTIGDVSRFPRGKQVASYLGLIPREESSGGRQKLGAITKQGNRLVRSLLVEAAQIAVRFDPGMKKQYLHRCHQKPKGVAKVAAARKLAVRLYWMLRTEKPYPEIVRIESSPRVPLVGAS

SEQ ID NO: 486649 - protein, 363 aa, unidentified
MDTKVLKYSVGIDISKDELEICFKSLQKGQETKVKGTRKFPNTKKGFLQVNNWIGKRYKDKTIPLVVVVEATGVYHEKVSYYLHKSGYCVVIILPNQSNSYLKSLGIKSKTDSIDSKGLAQMGIERKLRIWTPPNAELMELRSLTRHKNNLQKTKTELKNRLHAQQNSEHPSKMVVKQLKSQIRTMDNHLNSIDKSIKALLENQSLFNDKIKKISSSIKGIGVDTVVSIVAETNGFELFRSQGQLISYSGYDIVENQSGKRNGKTKISKKGNSHIRKSLYFPALNMVRYNVEPFTSLYNRVFERTKIKMKGYVAVQRKLLCMVYTLWKKDQTFDPEIFKEQQKSTLYEISIEKCLSSSFCVSL

SEQ ID NO: 486650 - protein, 320 aa, unidentified
MAMSVSRSVVGVDVAKAEVVVYQADTDLLLPVSNDKPSLTKWLKTLPANSAIAIEATNIYHLDTVELAHAMGHTVYVIDGFRLSNYRKGVGGRAKTDASDARLLARYLKNEEQELRPWSPPPKVYTKLQSLLRRRATLVQARVSLTQSWNDEPLLKAAFKQQIAAMGRLDLLIQKKLLDVVKEAGLLEQVKRCQAVEGVGFLTATALTMAFQRGDFASGDAYIAFLGMDLRVSDSGQMNGRRKLTKKGDSEIRRLLHNAAMAASRSKTWKPFYERYLERGLKTTQVLVILARKLARVAFALMKNQSEYQPNPVFGASPQT

SEQ ID NO: 486651 - protein, 406 aa, unidentified
MQVYLGIDWSRHKHDAVLMKKEGAAIAELTFAHDLNGFERLHALREKLNVLPADCVVGLETAHSLLVDFLWDQGYEQVYVVPPRAVKSSRTRYRQSGARSDPSDAYVLADMLRTDRGRLQPWFPDAALTRQIRAKISLAMHLTRDIGRVSNRLRDVLWRYYPQATEIFSSLKTNISLAFLQAYPTPQAAAELSFEAFRAFARVHRYPQPKRLARCFARLQEPHPEPNPATVSAYAQETPLLAGILKTLVDAKKQVLRDIQELFHQHPDAHIFQSLPGAGQLLAPALLAKFGDDRRRFPKASSLQALAGTCPVTKSSGKWKTVRFRFACDREFRHIAQQWARSSVSYSAWACGYLERLRPRVRSMNHAYRCLANRWLAIAWKLWQTGEVYDEAYHLQQIAIRRQPVR

SEQ ID NO: 486652 - protein, 338 aa, unidentified
MKKYIGMDAHSSICVFSVVDEKGTEVNQAKIATNGLLLVEYIRSIKGSKKLVFEECELSAWLFETLHGEVDELIVCNPTRNQQYKKAKTDKLDAQNLARLLRGGFLTPVYHDGSKTEWLRALMSGYQDVVDTGVSVKNRYKSLFRKAGLPARGTKLYDDSSLLEDLPRPDQRFVGHSFYRLLEALEKEREQYVAAIGKLGRTFPEIKLLKGIPGIGDISAAKIIAQVISAQRFKDKHKFWSYCGLVRHRMESGGHVYGSRRGWGNRTLKCVFKMAAKSVLTGENELRAHYDELRAKGTSDKSARNAVSRKLAAITLSILKTRRPYDETRILSQAEQAG

SEQ ID NO: 486653 - protein, 406 aa, unidentified
MIFVGIDWSEAHHDACVLDEQGTVLAKGRVSDDVSGVGRLHAMLADHAEDPAEVVVGIETDRGLLVASLVEAGYHVYAINPLAASRYRDRHAVSRAKSDPGDAKVLADLVRTDRRNHREVAGDSELAAAVKVLARAHQNLIWSRQRQVNALRNTLREFYPGALRAFTTAQLATTEACSVLAMAPTPTWAREKLTLARVRRSLAASGRKRNLDRRAEQILNALQAPELSAPRLVEQAYGDVVGSLVVVIDGLTHQIAKLEADLAERFEGHPDAEIITSLPGLSFVLGARVLAEFGDHPTRYDDARARRRYAGTAPITRASGTRRVVLARVARNRRLSDACYLWAFSSISASAGARRYYDAHRARGKTHHQALRALANRWVGILHGCVAGRELYREEVAWVAPVLEAA

SEQ ID NO: 486654 - protein, 386 aa, unidentified
MQKLNDLSRSLIALEPAGTLIAVIEMSLSSWLVAGIVPGVERQPLKKLAVDESALLKLLHRWREEAEKAGRRIERIVVAFEAGCDGFWLARWLKAHSIEAHVIHAASVAVSREHRRAKTDRLDTELLKRAFLGWLRGERDHCKVVAIPTLKDEDAKRPNRERESLVGEQSRIVNRMKAALIRLGIRGFNPKLKRAAGRLDSLRTPEGEPIPPNTLAELRRDMERRRLVSNQIRQIEEARLERFEQAPNDGPHAMVRLLARVVGVGIETADMLVHEVLSRNMRDRRAIARYAGLTGSPDESGRKRREKGLARSGNGRVRRGMVQLAWRFLTYQKESALAQWFRARTENALGARKPMIVALARKLLIALWRLVWQGVVPDGVVLRPAQ

SEQ ID NO: 486655 - protein, 407 aa, unidentified
MEVFVGVDWGGASHAVCVIDAKGQVLDRFASGHDREGLVALIARLSKHGAPGEIPIAIERPSGLLVDALVEAGFVVTPIHPNVAKACRPRYRAVSAKSDPGDAYILADILRTDGHRLHPLEPQSDAIKALRSLVRGRDELVGARVALANQLTALLQSFWPGAEAIFADVASPIALAFVERYPTPEAATRLGPKRLAGFLARRRYCGRRSPEALLDRLRAAAQGHAGQAESKAKGELVRALARTLQSLVAEIAKITSRIEHTLAELPDGKIVMSFPRTGRICAAQILAELGDVRQRFQTEDQFAAEAGLAPVTYQSGKSRGVGWRWACNKRLRAAVTCFADNSRHQSPWAADVYKRARARGCDHPHAIRILGRAWARVLWRAWTNGELYDPAKHLAAKPFMPAAAASG

SEQ ID NO: 486656 - protein, 375 aa, unidentified
MGDHSEAFVGFDTSKLRNAVAIAEGGRDGEVRFFGEIENTAEATAKLVRKLAGKYERLTFCYEAGPTGYGLYRQITGLGHACNVVAPSLVPKKPGDRVKTNRRDAVSLAKLLRAGELTAVWVPDEGHEAMRDLTRARETAVNDLRAKRQQVSALLLRLGRHYPHKRKTWTKAHLNWLASQKFEYPQQRFVFEEMMLAVRQAQERLTRLEDAIRGAVPEWSLAEVATALMAMRGIDLISAATLLAEIGDLSRFRTPHELMAYLGLVPSEDSTGDTVRRGSITKAGNGRARRMLVECSWSYQHPPRVGAHKQHKVDAAPPAVREIAWKAQCRLHKRYRALIRRGKLKTVAITAVARELAGFIWAINREITTACGAAR

SEQ ID NO: 486657 - protein, 452 aa, unidentified
MSRRKQRKKFKVTDLPEHLQQVNLNAAGIDVGSDRHVVAVPSGRDEVSVREFGAFTTDLHTLADCLTKCGITTVAMESTGVYWIPLFEILEQRGFEVKLVDARQVKNVSGRKSDVLDCQWLQQLHTYGLLAGAFRPTDQICVLRGYMRQREMLVQASSMHIQHMQKALQQMNLLLHNVVSDITGLTGMKIIKAIIAGQRDAKVLAKHRNYRCQSSAATIAKSLVGNYREEHLFALSQAVSLYETYQAKIAECEAAIASYLHSQAKRTDEEPPPEDKASRNRDRLRGGVDVRSQLYRMTGVDLFNLPGLGADTLLTLAGEAGFDMTPWRSEKHFTSWLALCPGTKKSNGKVLSRKTKRSANRAAAAFRLAAASLSRSKTALGAFYRRIRVRVGKAEAVTATARKLAVLYYSLLKYGSAYVESGQAVYEQKYQQRRLHSIQKQALAMGYQLIPT

SEQ ID NO: 486658 - protein, 338 aa, unidentified
MRLYCGIDLHSNNSFIVIIDEDDQVVCRQRQPNDLDVILATLEPYRDELVGTVVESTFNWYWLVDGLEDAGFRVHLANTTAIQQYSGLKYADDSTDARWLAHLLRLGILPTGYIYPREQRALRDLLRKRISLVQLRTSNKLSLQNLSQRNLGRRFSSSELKSLNTAGIQERLDDANLVLAMDSTLQVTACLDQEIQRLEREIRIQTRPHPAFEPLKSVCGVGNVLAQTILLETGEIGRFPSVGNYASYCRCVGSQRLTNYKSKGKGNTKNGNRYLAWAYVEAANFAIRYYPEIKRYYQRKAARTHRIVALKTVAHKLARASYYVMRDLQPFELRRAFG

SEQ ID NO: 486659 - protein, 347 aa, unidentified
MLAGVDAGTGQVFGGRQIAASDDGHRDAVRWARDLDSQRVWAIEDCRHVSRRLEQALLAAGERVVRVPPKMMGQSRRGERQAGKSDEIDALAVARAVVKDGVERFPAAYLDERAMEIRLLSDHRDQLVGERTRIQNRLRWHLLQLCPELEAQLPQGGLTRRLPQEQIARRLRTFGGDARARVAREQLSAIRTLTREINELERELHTLIKAHRPALLAEQGCGVLTAATLIGRTAGAERFPTDAHFARQAGVAPIPASSGRVDRHRHHRGGDRQLNRALHMIAITRARIDPQTKAYLERKRAEGKTKREALRSLKRHLARKIHRLLSMPAVDSDPVGLNAAISGRCLT

SEQ ID NO: 486660 - protein, 346 aa, unidentified
MKHSVGLDVSVKETAICIVDEGGKVVRETKAATEPQAVIAFLNSAGLEYARIGLEAGPLSQWLVNGLAEAGLPVICVETRHMKAVLKAQQVNKSDRNDARGIAQMMRVGLYKPVHVKTLASQQKRMLLTSRKLLRDKLQDMENELRGTLRNFGLRVGVVSPGHFEARIKELVAGQPPLEMIVVPLLAVRRVVREQLAKLDKMVLDQVRGDELCRRLMTVPGVGPIVALTFRATVDQAQRFVRSKTVGAHFGLAPRRFQSGERDYDGRVSKCGDAMMRTALYEAAQVLLTRTRTWSWLKAWGMQVARRRGAKKAIVALARRLAIVMHRMWVDGTEFRWRKEADIAVA

SEQ ID NO: 486661 - protein, 348 aa, unidentified
MNVSTLGIDLAKAVFQLHGVNEHGRVTLTRRLSRKKLLPFLANPPPCLIGMEACGGAHYRAREMQKPGHEVKLIAPQFVKPYVRGNKTDGNDAAAICEAVSRPQMHFVPVNTLEQQDIQAMHRIREQLVKNRTALANQIRGLLHEYGVVMASGISRLRAPLPLILEDAENGLSDVARELIDELYQRLRTLDEQVAQSDRRIQQVFRQDERCQRPGRVEGIGALIATAFLAAVGDARVFHNGRQVSAWLGLVPEQHSSGGKTRLAGIGKRGDRYLRALLIHGARAAVQHAARKSDPRSEWINRLCQRRGKNVAAVAVANKNARILRALLARGEAYRRAARAPMPLEIDW

SEQ ID NO: 486662 - protein, 372 aa, unidentified
MKEHSELFIGLDVSKLKTSVALAEDGRDGEVRFFGDIDASPASIAALATKLAKRGARLHFCYEAGPTGYDLYRQIIALGHDCAVVAPSLIPQRPGDRVKTNRRDALSLAKLHRAGELTPVWVPDVGHEAIRELVRAREGAMEALRRARQQLLSFLLRHGRVYTGRTPWSKAHSSWLCGQTFEHPAHQIVLAEYRHAIEEAEVRLKRLTGQVMETAASWSMAPVVQAYQAMRGVAFMIAVTFVAEIGDVRRFDNPRQLMAYLGLVPSESSTGERVRRGGITKAGNSRARRVLIEGAWTYRFPARMSRLIQGRQDDVPKAVREIAWKAQVRLCGRYRKLTATGKLKAVTVTAIAREMAAFLWAIGQVVAPVLAV

SEQ ID NO: 486663 - protein, 343 aa, unidentified
MKATTIGIDLAKNVLQVHGVDARGNAVVRKQLKRDQVLPFFGNLVACRIGMEACGSAHYWARKLEKLGHSVKLMAPQFVKPYVKTNKNDAADAEAICEAVSRPNMRFVPIKNGEQQAVLALHRARQGFVTARTAQANQIRGLLSEHGIVIPQGLSHVSKRLPEILEDGENDLPGVFRHLLRRLGDHLRELHRQVGELELQIQLWHRQHDASCRLAQIPGIGPLTASALVASVGDAKSFANGRQLAAWLGLVPRQHSSGGKSVQLGISKRGDSYLRMLLVHGARAVIRVAEKKPGYADSWLARLIGRRHPNIAAVALANKNARIVWALLKHDRDYRAAYQPAMI

SEQ ID NO: 486664 - protein, 404 aa, unidentified
MTSSCGIDWSERHHDVAIVDADALVVARARVTNDAAGFGQLIQLLAAHASEPTAIEIAIETDKGLLIAALRAAGFAVFAINPRAVARYRERYGQAGGKSDPGDAVVLANILRTDRHAHRRLPADTELARTIKVAARQHQEAIWARQQAIGRLRSLLQEFYPQALATFPNLTHRAAAVILRAAPTPQAAQRLTPRRVAALLQQAGRRNDPGLAERISTTLRAPALRQPTPVEHALGVAATGLIEIITAMSSAIHALERELAQQFDQHTQAEIITSMPGLGPVLGARVLGELGDDPDRFADARGIRSFAGTAPITRASGRSRVVSSRRVCNRRLGDACHWWAFAALTKSPGARAHYDRRRARGDTHNAALRHLANKLIGKLWHCLQHGLVYDETTAWTDQPVRAAA

SEQ ID NO: 486665 - protein, 342 aa, unidentified
MLYVGIDVAKNKHDVTALNVPGKTVLKPLTFSNNKAGFELLDLSFRQLNQDCLIALEDTGHYAFNLLNFLHEQGYKVYTYNPLLIKEFAKSLSLRKTKTDKKDAHGIALKLLSDPNREQFQHDNRQVELKILARHIHRLKKKQSDWKVQYTRCLDIIFPELDKIVGKHSEYTYQLLTCYPNPQKRLEAGFDKLIEIKRLTASKIQDILSVAPRSIGTTSPAREFEIIEIIKHYKRLIDKAETCVNDLMAEFNSVITTVTGIGGRLGAVILAEIRNIHAFDNPAQLQAFAGLDSSIYQSGQIDLAGRMIKRGSPHLRWALIQAAKACARFSPAFKAYLKTKLE

SEQ ID NO: 486666 - protein, 410 aa, unidentified
MTEIIVAQDAPVLVAIDIAKARHEVLIAIPDKKRRRRLTVLNELADFNRLIATLRDYGCPVRVAFEATGNYHRALGYHLATAGFEVKLVSSVALARTREALNNSWDKNDPKDAQVILHMMEIGNEQFYHDPLVHGTNDIQELSKTHDIVSKSKTELWHRVLTHYLPLYFPEADRFHRSSRSDWFFAFLERYPSPHFITAMGKDAFTADAWGIIGRKVAKERLLADIYETAKSSVGLPVASDSDAISMFRLVLGEGRSLIAQRNQIEDRAVALLKDLPDYQLLTSIPGIGPINALTILAEAGDLRRFGHHRQFLKFCGMDLATIQSGTFRGQTKLSKYGNARLRRTLWMAGQVAILQRTNSFRDKFERYIAKDRQNTHLRRKAYTAIAAKMARTVHGIIKHGEPYRPFFEG

SEQ ID NO: 486667 - protein, 388 aa, unidentified
MIYVGIDIAKLNHFASAISSDGEILIEPFKFTNDYDGFYLLLSKLDPLDPDSIIIGLESTAHYGDNLVRFLITRNYKVCVLNPIKTSYMRKNNVRKTKTDKVDTFVIARTLMMQDSLRFSTLEDLDYIELKELGRFRQKTLKQRTRLKIQLTSYVDQVFPELQYFFKSGLHQKAVYVLLKEAPMPKDIASMHLTHLSNLLVKSSHGHFTKEMARELRVLAQKSVGLNDSSLSIQITQTIAQIELLDSQLFDTELEMANIVTCLHSVIMTIPGIGFINGGMILGEVGDIHRFSTPNKLLAFAGLDPVVYQSGNFQAKRTRMSKRGSKVLRYALMNAAHNVVKNNATFKAYYDAKRAEGRSHYNALGHCAGKLVRVIWKMLTDNVEFNLE

SEQ ID NO: 486668 - protein, 369 aa, unidentified
MKIHKYVGLDVHQDETTVAVADGVRGGEVRLYATISSDLRTVEKHLRKLGGANTVLHVVYEAGPTGFGLYRRLRQLGIDCIVVAPSKTPEPKGGRLKTDRRDAVQLARLHRAGELEGIHIPDAVDESVRDLTRARADAVDDLRRAKQRLKSFLLRQGVRYQGKANWSEAHQRYLRELVLPLPALKAVLEEYLLAIDQATQRVTRLEELIAVQVPQWRMYPAVQALMCLRGFQLTAAAILVAELGDVRRFAHPRHVMAFLGLVPKEDTSGKRRRLGGITKAGNAHARWILIEAIQQAYHPPKVSAPLTLRQRGQPLAYREIAWKTQVRLHKRGWNLLHRGVMKAKVNVALARELCGFVWDLLRHVPLPKA

SEQ ID NO: 486669 - protein, 403 aa, unidentified
MRNGTTLRLEHAVPRPLQRLLWCASWLNEAADGQRQLPTGLFLNPERETESAWVPRETVNKLGSPLHCCSEARTIAWAARASPYPRARVRCSGESTMAECVGIDVAKHTLEWSLGAEGKIQHLRNEPRPIAGLVRRMVTLDPERIVVESTGGYERKLVAKLAEAGLPVVVVNPRRVRSFGEGMGFLAKTDAIDARLLALFGEKAQPPIRPILQGTDRLLADLVARRRQLVSMVVAEKNRRDIAAPAVRRTIDPVLRTLAKLVRELERRIDTTLREDVERAELLALLQTVPGVGPGVARTLLIDLPELGHLGRREIASLVGVAPFARDSGTFRGARRIRGGRASVRTALYLAAMSASRFNPVLAELYVRLRQAGKPPKLAFIAVARKLLVTLNAIARDRTAWQH

SEQ ID NO: 486670 - protein, 362 aa, unidentified
MNYVGVDIHKKYSVLCAVDERGRKLREARVEGNAPFGFAQFFSGLGGPSKAVVEACWNWGLIHDELEELEGIEEVVLAHPYKTRLIADAQIKTDRLDAYALSTLLRGNLVARAHVPRRETRMRKNLLRQRLYWARLRTMLRNRIHALLDRQRDLELPQCSDIFGVRGLSFLRRLELPETDAALLREQLALHDLIAQQMKAQEKRIGLEFGSEAMHRQLLSVPGIGPTLAAVIACEVDSIERFSSAEKLCAYAGVVPTTHSSGGKTRHGQLLPFCNKWLRWALIEASWVAIGCSPYFGALYKQHRARGKKANSAVLIVARRMCRIIWQLLHEKRDFEKRPLRPNFNFPGCSVVRLTAATAARP

SEQ ID NO: 486671 - protein, 320 aa, unidentified
MSATSVVVGIDVAKTHLDVTVLGAKLDAQRFANDAEGHSALAAALRPLGVSLVVMEATGGYEAALACALQATALPVAVINPRQARDFAKAMGRLAKTDRVDAGVLAELAAVLVRRDDLGRFLKPLADPQQQALAALVTRRRQLLTMLGSERQRLQLAIALVRPSIEALIEAIRAQLDEVEGQMLGHVQEHFAELDALLRSASGVGPTTSATLIAELPELGRLNRRQISALVGVAPMANDSGSSRGRRRVQGGRFEVRRVLYMAALTASRRNPAIRAFYERLIAAGKLPKVALVARMRKLLTTLNAMVRHNQPWNNSLHGA

SEQ ID NO: 486672 - protein, 324 aa, unidentified
MRKASMHGTIVETSGAAGIDVGKDWLDVALAAGEATLRQPNHAKGHAAIVGFLRRHGICRVGMEATGGYERGLLAALGAAGFQTLVLQPRQVRAYATFRLNRAKSDRIDARLIASCTAAAAPQEGRDARDARLLPLAEHLTVIEQIEEDLARARVRREHVSEPRLIALQATELARLKSLRKAELERLEADVLAHPDLARRFQLLISIDGIGARTALALIVRMPELGHLTREEAAALLGVAPYVRESGRLKSERHVAGGRSRPRKSLYAAAQAACRRWNRQLIALYDRLTRAGKPHRLAVVACTRKLIVFANAVLARGTKWNTAQ

SEQ ID NO: 486673 - protein, 351 aa, unidentified
MSHTKRMVVGGVDTHSATHHATIVDEHGRLLGDAEFPATPHGYAKLLSWMQSLGRLARVGVEGTGAYGAGLARHLHEHGVVVLEVPRPDRRLRRQRGKSDPIDAEAAARAALAGDTAGAPKLATGPIEAIRMLRVARGGALKAKTAATNTLMAIVVTAPEPLRSQLRDLTRIKLVAACNRLRPDLGQLTDPTQAAKAALRSIAARAHSLELEARALKRQLDELTTAAAPATSAVFGLGPDTVAALLVAVGDNPDRLRSEAAFAHLCGVAPIPASSGKTHRHRLHRGGDRSGNRALHIAVVVRLRYHQRARDYAARRTTEGLSMPEIIRCQKRYLAREVFTTLRADYAAITT

SEQ ID NO: 486674 - protein, 425 aa, unidentified
MSDDVMIAVDPHKASNTAAVLDPVTKTVIEAARFANTTDGYARLTVFAGRWAQRRWAVEGCFGAGRSLAQRLVADGELVLDVPAKLAARVRVYSCGHGRKTDKHDAVSVGLAAIDGTGVVPVAGDDALVSLRLLCDRREELTAQRTQAVCRLHRLLAELTPGGMRRELTANKAQALLALIRPADDVGRVRVHIARDHLADIRALDARIKYIGTQIAALVAASGTGLTALFGVGPVIAGRLLAEVGDVARFATKDAFASYNGTAPIDVSSGDQIRHRLSRAGNRRINHALHMMAVTQIRYPATPGRRYYERKRIEGKTPKEALRCLKRRLSDLVYYQLIADRRGTIGTCGSPTTPPPTRSTSTSPATRSCPAAPPPRPAPRPAPRGSSRWTGKTAVSSASRSSTPAPASTTTSSKTPKSTDKTATS

SEQ ID NO: 486675 - protein, 334 aa, unidentified
MKKYSIFIGVDISKLTLDIVGITSENSIVKNSFKINNNRKEIKKYFTKLKTKYLGNKIIVCFENTGLYGYYLSVILSEIQIDYAMVPALEIHLSKGLVRGKSDKKDALMIAHYLLSNQFKIKVSTLNEFDIDKLKVLNSQRDRVVKAISIFRHTYESKDFLPKGLTKETYRINDSILNNLKKNLVKIEKEVKKIIGASESLKTNYNLMKSIPGIGLQTSVYLLIVTKNFTAFKDGRKLACYAGVAPFPYQSGTSINGRTKVHHFADKKLKSLINMCALNAKRWDAEISIYYEKKVAEGKNKMLVMNNVRNKLLHRVFAVIKRQTPYVNTLKYVA

SEQ ID NO: 486676 - protein, 415 aa, unidentified
MNWHEQPHFAALDWARDHHDFVVIDRQGVVIEKLRFEHDEAGWRRLGLLVDKYRNLPVAVETSHGTVVENLFAAGVKVFPINPKAAERYRERHAPSGVKNDLRDAWSLADALRLDGHMWQPLRPLDPALNELRLLCRDEIALIEQRTQLVNQLRQALHEYYPVALSAFDDWTSPVAWAFVVRFPTPQALHSAGSRRWESFMRQQRVWRPTTVQARITLFAQATSFCGTPSTVAAKSLHAVSLAQLLQVLEKQLVTYREHIEAVFARHPDHALFGSLPGAGEKIAPRLLAEIGDDRVRFPSAQSLQCHAGTAPVTIQSGKMCYQRLRHACNMSLRYSVHIWADLSRRKCKWAEDYYRAHRAKGHTHATALRCLGQRWLNILWKMWQTGTSYDEALHTRNQSQHGSWVAKAASAKPA

SEQ ID NO: 486677 - protein, 342 aa, unidentified
MTNKFLMYGVGVDISKDDFHACVGGITIDACFKVKAQRKFKNSAKGYEELASWLVKHLKEKITIKILMEVTGVYHEGLLYYFYNNGYEVYLEPGHRVKKYMSVLGYKSKTDKLDGKGMCQMVLERTLIKWKPVSPSILKIRSLLRHRKALQKTKVQFENQLHAITHSQIKDAYVVKSLNKLIKTIEKQIAELESKAMDLSNKDEAFYKKLSTIVKSTKGLGFISVLTVLSETNGFKTFRNRKQLESYAGYDVIENSSGKFVGRTRISKKGNANIRSVLYMAALSAVRTKSAPFYDLYTRLIARNGGISKKANVAVQRKLLLIIYTLWTKNEAFDLKYYNKAA

SEQ ID NO: 486678 - protein, 336 aa, unidentified
MSLYSAIDLHSDNNVVVIIDNNDSILFQRRLPNDLGTVLSVLEPYKGVLQGVAVESTFNWYWLVDGLIEAGYETRLVNTAKVKQYSGLKHTEDRYDAYWLAHLMRLGILPTGYIYPREQRAVRDLLRKRRQLVNHRTVHVLSIQNQYWRNTGIKLKAGYIKRSNDYLGEFEDSNIHLALVSNYEIMQALDEQIRKIESQVKRQIKLRPEYELLLGVDGIGFILAVTIMLETGEISRFEKVGNYASYCRCVESKHTSNSKKKGEGNAKNGNKYLAWAFIEAANSAKRFSEKARRFHQRKKAKTNNVVATKALAHKLARACYYIIRDQVPFDEDKLFG

SEQ ID NO: 486679 - protein, 420 aa, unidentified
MKKKPKQTQMPINKLDMQNNEIRFKGQNIYLGIDVHKKNWQVSVSADMPIKRDEFHMTSNNVEGLLSHLQAKYPGATYYSAYESGFCGFSSHRRLIEAGIRNIVVNAADVPTTQKASVTKTDAVDAKKLSEALKNGMLNGIHVPTEEEEGVKNLQRKRDDYVKKLGGTKSQIKHFLHRNGIDFESEFREGAHWTSSFIQWLKELDLSTHLKLTLEGYLEDYEYLKRQAAKFEGYLRTYMRENRMDDLEKIASVPGIGIITSMTFLSEIGDFSRFNNQRAFASYIGLSPTCHDSGEKKNTGEIPFRSNRRLRTSLIESAWVAVKEDDSLRADFLAYKRRMDSCNAIVRIARKLANRILHVMKERDVYVIKEADGGERVKNTFPITRKKTDALSLPQQTANEQISGESNNREGAAPRQPKEI

SEQ ID NO: 486680 - protein, 346 aa, unidentified
MRFYTKQHKYYCGIDLHAKNMYVCIVDQQATILVHKNIPAHPDYLIQLINPYLDDLSLAVECMFTWYWVSDFCLKHNISFVLGHALYMKAIHGSKTKNDKIDSRKIAMLLRGGLIPMAYVYPQRMRATRDLLRRRMYFMHKRSELLAHIQNTRSQYLVEAFDGPVARKRHRHNVVEKFHEQAVAKTIEADLILLNHYDSVINDVENYLQRSVKEHDYNTFYLLRSIYGVGKILALVMLYEIHDIRRFERVQHFTSYTRLVKPRKESDGKVKGGSNKKMGNAYLKWAFNEAVLLLIRESEEVKQLHMKLKNKHGKKVALAILAHKLGRAVYYMLTHKKVFDVDKYVN

SEQ ID NO: 486681 - protein, 346 aa, unidentified
MVHVGLDLSRTRLDVHVMDEAGAPLAVTTAVPDRGGLAVLAERVGGFGGPVYAAIESMNGARFVHDQLELAGWQVEIADAQKVKGLAPLACKTDKIDSWVLAELSRRDLVPAIWLPTPTVRAERERARWRLHLVRHRTALKNRIHATLLAFGHPCPVADLFGVGGRELLGRLELPEPWAADTTAAIYLIDELDRQVGECERALRRLGADHRYVPLLMTTPGVGWVLGYTIAAEIGDITRFASPTKPAGYTGLCPRVYQSGGKDHRGPLSKNGPKYLRWALIEAAVHAARHPVYAERYRRTKTRLGRQRGPKIAQVDLARRLAEAIWHMLCTNRPFAPAGAANALVS

SEQ ID NO: 486682 - protein, 371 aa, unidentified
MEHTRFVGLDIHKERISIAVAESGRSCAVEYLGEISNDPVAIDRLCDRLERPSKTLAFCYEAGPCGYGVHRQLISLGHRCDVVAPSLIPTRPGNRVKTNRRDATMLARLHRAGELTPVWVPDADHEAMRDLIRLRSVVRQIVSRARQHLQGFLLRHGRKHGRGTAWRMAYRRWLSTLAFEHPAQQIAFQDYVDAVMDAERRLQRVEEQISGLLPDWNLRPVVDALQAMRGIALITAVVLVAEVGDFTRFANPRQLMAYFGLIPGEQSSGETTRRGGITKTGNAHARRALVEGAWAYRMKARIGRHKVDRIEALPKVVRDIAWRAQLRLCTRYRRLSARGKTANVVNVAIAREMVGFIWSIACTVQSAPKTA

SEQ ID NO: 486683 - protein, 295 aa, unidentified
MKDCITWVGIDDAADRLDVAVFYGNEGVPRHEFPVANDPQGLAKLVRKLKSMPGQVRCVYEAGVNGYHLYRVFEKHGIACDVAAPALTPRKPGERVKTNKIDARKLAIMHRAGDLTSIAVPKEQQEAVRDLMRAREDALEDLQRTRHRLGLFLLRRGLRYRDGKTWTAGHLKWLKALSLKDAHGQEVLEEYRLAVDEAAERLERFGVRVEEAAKEAPYKKLVEFLMGLRGVKVITAMTIIAESVDLKRYLTAPGYMDAVGLVPSESSTGDRRRRGPITKTGNAHLRRVLVESAWN

SEQ ID NO: 486684 - protein, 347 aa, unidentified
MTIVEAPPGITGGVDTHLDTHVAAALDPLGRLVGTESFDADAAGYKALLDWLEGFGQVTKIGVEGTGSYGTGLARFLRRKGVEVVEVDRQNRQARRSQGKSDTLDAVEAARAAISGRATGKAKIKDGTVEAIRVLVVAKRSARQARVKAIVQMRHLGFTAPDQLHSRLKGLTVTALVAECARFHPTRSPDPVTAATKASLSSLAHRIQALEIEIAELDEKLEPLLIATAPDLLAMFGVGPDTAAALLMAAGDNPERLRSEAAWAHLCGVSPIPAGSGKTSGHLRHHQGGDRQANSALWRIVMVRIAHDPETTHYFERRVKEGRSKRDVIRILKRYVAREVYRHLPRG

SEQ ID NO: 486685 - protein, 446 aa, unidentified
MAKSRPYSSLPVKSVEIESLAKSHAGQVCVLGVDVAKFELIAVLRWPDGSFQRPWRIVNPDELGLLIALLTKLASRCPVTVALESSGTYGDALRQALCDAGIPLRRVSAKAVKDQAETFDGVPSQHDGKDAAIIADLCARGKCSVWSERTSSTPADQEMRYWVRKLDAAQRIKQVWGGKVEGMLARHWPEVTRLVSASGATLSAALVEWGGPAALAADPKALQKLRRFGGHYLTEAKIAALIESAKATAGVRTSEWETRELAELAGHVVAQRREIQACKRRLRQLTKNPDDEGRAAIRAQVPVLGLMTACVLWVCLGDPHRYDSAAAYRKAMGLNLVEISSGQFKGRLRISRRGRRLTRKWMYFGALRWMRDPAVRPWVLRKKARDGGNGMRAMVGVMRRLALAAWNVAVNGEAFDPSRLFPGAGRCRSIAKPKGRERDDAVNAVQ

SEQ ID NO: 486686 - protein, 428 aa, unidentified
MNCNTQNAKIASITEKTLIVGIDVGSETHYARAFDWRNYEYTKKPLEFSNTEAGFQILKAWMEELAEKHGKTAVVPGMEPTGHYWFALGKFLQDNGMRPVHVNPHHVKKSKELDDNNPNKNDRKDPKTIAALVNEGRFSYPYMPVGIYAEIRSLSNLRFQTQEELTRIKNRLARWFAIYFPEYKDVYGDLKAVSGRMVLKEAPLPEDIIRLGAEGVNQIWRDARLRGAGMKRAKTLVSAAEHSVGSKEAPEAARMELKNLLSDMDVYASRMEELLRRIEEKLREIPYIDNLLAIKGIGMVTVSGFIAEVGDIGRFDSPKQLQKLAGYAIVANDSGKHNGESRISYRGRKRLRYVLYEAAISLVGKNAEFRQIHEYYRTRKENPLKKMQSVVAVACKVLRIFYTILTKGVQYDPGKLLGDIRRPQVQAA

SEQ ID NO: 486687 - protein, 368 aa, unidentified
MKQQTSAATETKIKGRNIIDFTGKTIYVGIDVHEKDYQVAKVFDGICLGNHRKAANHQMLIDHLNSRYPGATFKCVYESCAWGFTLQRALNSAGIECIVVHAADVSSSDKEKKRKTDKVDALKLARNLASGDLTGIHVPDEDLQKERNLIRFRKKLVGDLNRSKNRLKSLLKYQGIKIPEHLGKKNNWSYNFMNWVEQEANKDVLLKDTLLLMLEEIKFLRQLLLKTERALRKLMKERHNEKATLLMTAPGIGRTIAMQFVLEVGDIKRFHSFDALNDLIGFCPDTDSSGDMQRDRGITSRRHKQLRSALIEAAWTAIRIDPALTDAYQKLTKRMEGKYAIIRIARKLLRRMRAMLLTGQPYQTGVVA

SEQ ID NO: 486688 - protein, 454 aa, unidentified
MVIRKKGERGPAALPVVHRHAAGLDVGSTFHVVAVPEDADDEPVRTFKSFTGDLHRLADWLAQVGITTIAMESTSVYWIPVFEILEARGFEVVLVNARDAKNVPGRKTDVNDAQWLRQLHTYGLLRGSFRPHEQIVALRAYLRHRERLVEYSASHIQHMQKSLMQMNLQLHHVISDITGATGMKIIRAIVEGERRASILAEFRDVRCKSSVGTIVEALTGNYRAEHVFALRQALELYDFYSSKIVECDREVELRLRELNEQRQQPAATLPKVRSKRRSKNEPDFELRHALYKLVGGVDLTQIHGLGPYSALRIIAECGTDMSRWRTVKHFTSWLTLAPGSKISGGKVLSSRTRRSANRAAVLLRIAAIGVGKSSTALGAFFRRLAARVGKAKAVTATARKIAVIFYNTLRHGAPYVDPGVDYYEQRYRQRTLDNLKRRAQSLGFQLVEAETGPG

SEQ ID NO: 486689 - protein, 407 aa, unidentified
MEVVYRCCCGIDVHKRAITACLNKGGKREVREFGTMTDELRELAKWLTEAECEMIAMESTGVYWKPLYNLFEMLDLNAMVVNAAHMKALPGRKTDVKDAEWIADLLRHGLLKASYVPDREQRERREIARYRKSLIEERAREINRLQKILEGANIKLSSVVGDINGKSSRKLLDKIIVDEVLEEGAVAELIAGNMRSKLDQIMRSIQGLTTPLQRKLIAQIVDHIDDMTRRIADMDDMIKGHMEEQEAAIAALDEVPGIARRSAEAIIAEIGTDMSRFPSAAHLCSWAGLCPGNNKSAGKRGSSRTTKGNKALKTTLTQCAQAVKKCKDTYFSAQYQRIAARRGKNRATIAVAHSMLIAIYHVLRSKVAFKDLGSDYYDNFNREHKINGYLKRLYALGWSPEPEPLPA

SEQ ID NO: 486690 - protein, 442 aa, unidentified
MQENPKQMKRHFIQDKIIIGIDPSKQKHQAMVINSIGDSMGNSFSFQHNYYGFHITLWKKLKERLGSVDPEKIVFAVETSINLWQKLCHYLHEQGFTVVMVRPLATKHERPKMSNSFTKTDPKDSLAIANIARQGYFNFFKVHTDHIQAMHRLSITYDKLNDNIRQTKQRIRSQVELLFPELTDVIDVDTKTVYKLLNKYLTSQDFQQLNLFTEKINIRKASRNRSGMDVLKALKQTAFESIGLPVQNESQMAERLTMDVWLNLLTCLEEQLNVIRKELIMLAKQSPYFHIIVSLKGISDISAARFIAETRDLKEYRHYKQIEKMTGSNLKLSDSGKYSGYRHISHIGNHRLRAILYKMAEETKNYIPEVRIRYLKRQMKQPRYKKNVIAVSSNLLKLMMALIKEKRTYAYDPENLNKLELLETQYKDFKAKKKNKKFKKVG

SEQ ID NO: 486691 - protein, 407 aa, unidentified
MDVVIERACGMDVHKDNITACILTPEGKEIQTFSTKTVFLLQLVDWIKQHNCTHVAMESTSVYWKPIVNLLEAEDIEFLVVNAQHMKAVPGRKTDVKDAEWIAKLLRHGLLKASYIPDRNQRELRELVRYRRSIIEERARQHNRIQKVLEGANIKLGSVVSDVLGVSSRDMLDAIANGEEDPEKLANFARRTMKKKKEELELALKGYINSHQRLMLKTILSHIDFLTEQIEMLDQEVAERVSSHQEDVSRLDSIPGIATRMAEQILSEIGTDVKKQFPSAAHLCSWAGLVPGQNESAGKRKSVKTKKGNKYLRSALTEAAHSVRGSKNYLGALYRRTASRKGKKRAGIVVAHAMLRISYYLLTRKEMYVDLGEDYFDKQRQQSIVRHSLRRLESLGYTVTLEEPKAS

SEQ ID NO: 486692 - protein, 361 aa, unidentified
MLNSFYLGIDQHASQLTINLRDQNGDVVLRKQVSTRPEKVTQFFEDLTRRCIQSRCRFWAIVEVCGFGDWLIEMLKNFQCQRIVVVQPEENGKRKTDRRDAAKLSEELWLFRERIENGKPINKLKIISLPDSIESQLRRLTTLRKHARAKQIRAINQVKFILRRHNLQHDIPTKTFPTIAAMKWLESLKLPAADRLEMNHALEDFRLHERRVAELDQMIAELSKEDDDTRILRTTPGFAQFSSVALSCRISGIERFKRPRALSNYFGLTPGCRNSGEKKDRLGHITKAGSGMARWILGQASKHILRIDPLMRNWFKKLKRKRGAKIARVAVMRRMATVLWHMLTKRKTWAEVRSLGIGLQE

SEQ ID NO: 486693 - protein, 317 aa, unidentified
MDDKEERFVGIDVASTHVDVCVRPGEVTARFDYAESGFDELVAFLAKHSPTLIVLEATGGYEGPVAASIAASNMAVAIVNPRQVRDFARATGKLAKTDALDASALAHFAAAIRPEARPLADEETRELTALVTRRRQLVEMRTAEQARLRVCSSRATKLDLKQHIAWLTKRIKDHDKDIGEAVRRSPLWREKDDLLRSIPGLGSVSSSTLLALLPELGRLDRRKIAALVGVAPFNRDSGKLRGRRAIWGGRGDIRAVLFMATTTAVKHNAVLREGYARLVAAGKAKKVALVACMRRLLGIANAVLRDGAHWEPRKISS

SEQ ID NO: 486694 - protein, 413 aa, unidentified
MIKRERIKESRQEVYAGIDIAEEKHVIRFIDNLGREIGKPVSFTNNLEGFSQIEQCAKDRGKFSVTFCVEPSGDYWKPLAYYLKERQYPVVLVNPYHTRQSKELIDNSQTKNDRKDAYLIADLGKQGKCFQAHLPEGSMADLKELVLAWTRTNRLLVQAKTYLHNFLTKYFPEYKGCFSMMYGKASMYCLVHFPLPADIQQIGLSRLTFLLKRASGGKLSEKKVQLLYQRACASIGMKEGAHAAKEALGDILQDIEMLLQRKRKMKEQMAFHLLQSGYSDSLLSVPGVGVITACFFLSEIGNPQWYTKATQIEKLAGLHLVENSSGKRHGRFIISKRGKHLLRYTGYLAALSAVAKNNELATLYEYRLNHTMNPKEDKMKLMTYLAAKMLRIMFVVCKKRTVYQPEAITQYWK

SEQ ID NO: 486695 - protein, 323 aa, unidentified
MNKDIKYFGIDISHLVFDVTDSDGNYYQFKNSLIGFKKFMKLLDFNSHCVMEATGYYHYQLAYYLQENSVVLSVENPLSVKRFIQMKLSKIKTDKSDSKLICKYAKQVDLKLWKGNSKHQLECLQMTRLLSVYTKQSTVVKNKLHGEAVLGHPSKLVVTSLKRSLRQLKKEIDTIEEKLLLLVNEVHKDVLTRLKSIPGIGKKTSLMLVVLTDGFDRFKSGSELCSYAGLTPIIRQSGSSVNGRARISKIGNQKLRNLLFMCSFNACKYNKACKAIYDRIVAKGKSKKLALIAVCNKLLKQAFAIAKSGLIYDDTYRSTLVKN

SEQ ID NO: 486696 - protein, 370 aa, unidentified
MKETITSFVGLDVHKDSIAIAVAQAGRQAPRFVGTVTPELASMCKALRRVANAQHTLVVYEAGPCGYGLARHLNAHGYCCEVIAPARISRSPAEQRVKTDRRDALLLARESRAGNLVPVVMPDERDEAIRDLSRTREDVCTARLRARQQLKAMLLRHGRSYQGKTSWTLAHERNLSTVSFAHPAQDIAFAEYRQAVKDSHERLARLTEALRTQSSQWRMNPLVHGLMSLRGFDFVGAITFIAEIGDPRRFANAPALMAYLGLVPSESSSGLTRHQGSITKTGNKHARRILIEAAWNYRHSARISRVLEVRQQGQPKIVRDIAWHAQLRLTKRYRHLAIGRRLPPNKVSVAIARELAGFIWDIARQVKPLP

SEQ ID NO: 486697 - protein, 399 aa, unidentified
MLAVGIDISKSKSVAAILNQDGSMHTSPFEFHHTQPELDAFIKYILNSKQSATILMENTGHYHYPVLKALQEAGLPVCMVNAYQIKKFGDMDLRKAKTDKKDAVRIARYALEKSYSLVPYTSMEQKYEDLKFLARQYNQRMLTLKTNKVFLLNLLDETMPGITNILPLTTRTPETSLSVLFINRFKSYDRIKKMGKSRFLDAFEKIARKSRNRQTKTYGLAIYEAALRNITTRGENEYTLAAQNQCLELVCESQKATDSIILKMQTLAETLPEYAVLRSMAGVGDRLGPLILAEIGDIRRFHSGKALNAYAGNDAPPYQSGTFESHNRHISKRGNAALRKYCFEVMQALKLTRPQDDPVYLFLLKKEQEGNPYNVAKMAGVNKFLRIYYARAMETLKQQ

SEQ ID NO: 486698 - protein, 424 aa, unidentified
MKKSHPSKIDQEEIHYERCAGIDVHKKMIMVCLRIGRKTQVKEYGTLTCELREMTAWLKENEVQMVAMESTGSYWKPLYNVFEQEGIPAMVVNAGHMKTVPGRKTDVKDAEWIAKLLSQGLLKASFIPDREQRELRELTRFRKSQIEERSRTLNRLQKMLEGANIKLSSWVSDIDGKSATQLLELIIGKEEFTAEEIERLRHCNMKSSSDELFKSLEGIVTPIQRELFRHIMNVIKEQTAQIEKTESLIKDYMTESYQEAAVAIDTIPGIGPISAQQIIAEIGIDMSRFPDASHLCNWAGICPGNNKSGTKQKSGKTKYANKTLKSTLTQCAQAVKKNKKSFFHAQYHRLVVRLGKNRATVAVAHSLLIAIYHVLSGKSFCDLGADYYNRFNQEKKIYSYVKQLSKLGVNVPDDVIRSALKKVA

SEQ ID NO: 486699 - protein, 313 aa, unidentified
MNQKEPERFVGIDISKQELVVAVRPTTELQTFTNTEEGLATLVRFLQELSASSIVLEATGGFARAAVNAMALAALPVVVVNPRQIRDFARSVGLLAKTDAIDARIIARFAEAVRPEFRPLKDLETQKLGDLNNRRCQIVEMITAEKNRLGMAPVWSQKDIRAHIAWLEKRLKKVNDDIDNLIKQSPIWRQKEKILTSVLGVGPVVTTTLLCGLPELGTLSARKLSALVGVAPVNRDSGQHRGRRACWGGRAHVRAALYMAALTASRCNPVIRAFYLRLRNAGKPAKVALVACMRKILVILNAMLKNNTCWQQA

SEQ ID NO: 486700 - protein, 359 aa, unidentified
MASKVKKNAIKFKGKTVSIGVDMHKLSWRITALVEGDMVLAVTLAHPTYDSFRQVISRFKGNYVRIVYEAGPGGFDLYDKLTDDGIDCIVTPPSLIPTESGNKVKTDKKDSYKLARLLESGMLKKVWVLCPEERAHRQLVRTRRQIVNHRCDVMRQIKSLVLFHGIKVPFSSSQHWSGRFVKWLHEVDLGDEYLNASLKALVQLLDYLSGEKNRLTHEVIELARKDKYASKIKLLKSIPGIGALSAMEILVEIQDMSRFETADELAAYLGLTPSQYSSGEHIRMGHITHMGNRRIRSTLVESSWILIKKDPQMRQKYENVKDRRGGKKAIVAVARNLSARIRRLILDQVPYEIDFKKAA

SEQ ID NO: 486701 - protein, 331 aa, unidentified
MDHCAIDLGGRKSQVCVRSPDGRLLFEGPYDTRSLPEFLRLLPQSRVIVETAAEAFRVADAAKEAGHEVRVVPATLVRSLGVGARKTKTDRRDARTLSEVSCRIDLPSVHIPSARSREWKAICGMHDALITARTKLINNLRGWMRGQGLRIGKGKAETFAERVAQIESLPDYVTSQVQALAALTEKIRGSDKRIEALAKDELCQRLMTVPGIGPSSAVRFVAAIDEIARFDSAHKVESYLGLVPGESSSSERQQRLSITKAGPSSVRWVLGQAAWSLQGRCQDPAARPLQLWAAEIARKRGARIATIALARKLAGILYALWRDGTKYEQRP

SEQ ID NO: 486702 - protein, 353 aa, unidentified
MNTLYTPQELQVGIDVGSLNHSVTISDGNGNIIREFEISHTQKGFDEFFAILAKESKQRDTTASIAMEGYNGWARPLDGLILKQGYKLYNVNNVKLARFKEIFPVAAKTDAIDARKIVELFSLQKHLPIAKKVLQEVQVSDSINIQLKKLSRRRKQLVEERMVITNRMGADLQAEAPDLKALASCVDDLWFLRFITLRQDMRLLTKVHKSTIEKIPRIRKSHIDKITAWQAEANFTDAMDYIASMFYDDAIRILELKQKIKDIEKQIDKLIPSSKIGSLLISIPGFATVGAGTLAGEIGTLNRFENEGSLALYLGMTNLDNSSGKKKGSKRNMATNRHAKKAMKHRGQVITII

SEQ ID NO: 486703 - protein, 362 aa, unidentified
MTQYYVGLDVHSKQSVFVMADGTGKLCAQGALATTPEGFQRWQEHYQVPCGTAVALESGTMAFFAARQLRALGLMPVVVDAHEVRLKAQRPRQKSDRRDAHELCEGLRRGLYRSIIHMPPVPISALRQTLSRRRHFVRVQTAEINAAKHVLRAAGMGQLKANLRTATGWTKLVAALAAQPALQQALSHHHALWRQAQSEVQALEQQLAQQQQPFVAELQRLQTIPGVGRIVALTVVAVFSEVERFPSAKHVASYAGLVPTTYQSGERECHGHITKQGSGELRAMLCEAAQHARHADHPLNPYFAALCAKRGYRMAVVAVAHRLCRIMFAMLRHQSDFDIQRVGVEEGPFLRTTARRYRRKAA

SEQ ID NO: 486704 - protein, 354 aa, unidentified
MKKVVKQVAGIDVAQDELVVCFGKMYDDWSPEVAGRKSFENSTKGFILFAQWAKILAAADVAIRFVMEATGVYHESLAYFLHEQGFEVSIVLPNKISNYARTLDVKTVTDKTASEAITMFGLERKLDCWSPPKGIYKKLQQLTRERSQLIDERTVIKNQLHAERAEAFPNKTSMERAKKREALLNKQEAEIKKELADLIKTDEEVKRIVLLLCSIPGIGNLTAAIVLAETNGFELIRNKRQLTSYAGLDVREKQSGTSVKGKPRISKKGNKHLRKAMHLPALAAIRHNERYKAIFARLVSRHGIKMKAVVAVQRKLLEMCYTVFKTQTAYDKNYFKNMELIKEEMQEKAAAEIL

SEQ ID NO: 486705 - protein, 420 aa, unidentified
MPATFSIPRTNDLERAMTAVMIGVDPHKGSHTAVVISPAEEPLGEIRVRASAAQAGKLAEWASAWPERTWAVEGAAGLGRLLAQQLVAAGERVLDVQPKLASRVRLLQAGDTNKNDPNDALSVAIAALRSRTCREVAAEDHPAVLKVRAERHRDLARLRNQVACRLHAVLCDLVPGGTSKQISAAQAARILGQATPSGAVEVARAELAAEFPGDMRRLDAQLRGTRKKLAAAVKVSGTTLTQVFGVGPVIAGTIIGDIADVSRFPGRDHFASYNGTAPVEVSSGNRKTHRLSLRGNRRINHAIHMAAITQLRHKHSEGRAYYEKKLAEGKTHKEALRSLKRKISDAIFARLQADARQAAAAAPKGPGGHPGNDSASSAAGSHPARQLFGQATPGPGTSLRPATPAGTPSKPVPRKTQATT

SEQ ID NO: 486706 - protein, 323 aa, unidentified
MIKDIKYFGIDISHLVFDVTDSDGNYYQFKNTISGFKKFVKLLTIHSHCVMEATGYYHYQLAYYLLESGFKVSVENPLAVKRFIQMRLSKVKTDKSDSRLICEYAKQVELKLWKGNSKHQTESLQITRLLAVYTKQSTMLKNKIHGESVLGNPSKAVVSSLKRSLKQVQKEINLLECKLLILVKEEHQDVLTRLKSIPGIGNKTAVMLVVLTDGFERFTSGSELCSYAGLTPVIRKSGSSVNGRSRISKIGNQKLRNLLFMCSFNACKYNKACREIYERIVAKGKSKKLALIAVCNKLLKQAFAIAKSGLIYDDSHRSTLVKN

SEQ ID NO: 486707 - protein, 408 aa, unidentified
MNMNAVGIDVSKTKSTVAVLRPGGQVVVKPFDVPHLSADFQSLIKMIRGLEGETRVVLECTGRYYEPVAHELAQAGLFVSSVNPQIIRCFQGQDNPLRRVKTDKADSVKIARYTLDSWDKLKQYTLMDELRSQLKIMNRQFDFYMKHKTAMKNNLISLIDQTYPGANTYFDSPARDDGSQKWVDFLDTYWHVDCVRKMSLEAFTDHYQKWCGRKKYNFSKSKAEEIYGKAKGLIPVLPKDNFTKRVIKQAVEQVNSVSQTVEQLRCLMNETASKLPEYPVVMAMKGIGPSLGPQLIAEIGDVTRFTHKGAITAFAGVDPGVNDSGDYSQKSVHASKHGSPVLRKTLFQVMDILIKTKPDDPVYLFMDKKRTQGKPYYVYMTAGANKFLRIYYGRVKEYLSTLAEAEET

SEQ ID NO: 486708 - protein, 340 aa, unidentified
MKKDKQFYLGLDISKPFFDASLLIVTAAGKQEIPAVQFDNDSPGIKLFEKWLKGFGVSYDANSLVVIENTGIYHRQIWKFCSSRNLPIHIGNAAHIKWSLGITRGKSDKIDAQRLCTYGYRHRGELQCTAALNPVFLQLKDLMTNRTRLINQLTGLRNYLKELKKVSDKEFAKLQQQCNKAVLEGFRKSIKAIHEQIKKIIDRDKNIKNNYRLLLTVPGVGHWIALYLICCTKNFSNGISGKQLACYAGVVPFEHSSGISIRGRNRVHKMANKELKKLLHLGALAAIKYYDEFKNYYTRKKEEGKHSMTVLNAIRNKIILRAASVVNNQQPYVNYTSAAV

SEQ ID NO: 486709 - protein, 409 aa, unidentified
MRYYLGVDWADQTHAVWVVDESGAKITARAVAHTAEGLGEWGRALDEWRAQGIDLWAAIERPDGRVVDFLLDHGVVVYPVNPKALDRARDRFRQSSAKSDPFDARVLADFLRTDHAHLRALLPSSEAAQELKLLTEDCQRHIRQQTRLVNQLTATLKAYYPRALEVAEVTSALAREFLPAYPTPAAVTALTERQWQRWARAHGLSAARAGDLWAVLRQPHLPVPAHVVRAKARLMQALMEQLMPVVAAVAQYRKAIDDFFASMPAARWARTLPIGKHGITAPTLWARLGDAPGRWESFRHLQAHAGAVPVTKRSGKQQVVHFRFACDKALRHVVDQVAFLSLLSSAWARAYYDQQRARGHSHRQALRALGAKWLKIIFVMWHRQVPYDEQYHLATMTRQQLQQGQTQFA

SEQ ID NO: 486710 - protein, 412 aa, unidentified
MNAVGIDVSKGKSMVAVRRPFNETVAKPFEVRHTGSELKQLADYLKSLDGETRVVLEHTGRYYEQIAQYLHDAGLYVSAVNPKLIKDYGGGTSLRHVKTDKADARKIAGYALDRWAELRQHTPMDTIRYQLKMLNRQCGLYTKTKTMMKNNLIALLDQTYPGVNALFDSPVREDGTQKWVDFAASFWHVDCVRGMSRTAFVQRYAKWCKQHRYQARAGRAEEIYEHAQDLIAMLPKDAMTKLLVRQAIDALNAVSATLERLKAEMLKLASLLPEFPVVMAMRGVGDTLGPQLMAEIGDVARFAHRSAITSFAGVDPGANQSGTHEAKSVRISKSGSPELRKALFLVMDCLIQTKPQDDPVYLFMDKKRAEGKPYLVYMTAGANKFLRIYYGRVKEHLASLKGNPVPDPEGHT

SEQ ID NO: 486711 - protein, 504 aa, unidentified
MAPGRRLNIGEAQRGTPLGESRGINPPGQPVFSNTGREGCDGMANEERTGRPEGLKPIDEGFPVLRADVAGIDIGSQQHWVCAPTPTGKGREVAVFAATTPGVEQLAAWLKDRGVTSVALESTGVYWIAPHEILEAHGFDVVLVDTRELGRVPGRNKSDRRDCEWIQRLHSCGLLRGAFRPVEQVCMLRTLVRDKGTLIAERADWIRRMQKTLDQMNVRVHRAVSDVDGATGMAILRAIVAGERDPHQLAALRDPRCRKSEVQIAEQLTGHWRDDHLFSLQQALKMYDALSETIAAYEREILRQLERMTNVDRRDDQAPPPTSPTKAKAIKKRGEDPLRHALYRISGVDLTTIDAVGVETVNVVLSEYGPNLSQFPTEKQFVSHVGLAPHTPTSGGKVVKKKKKPGSASARVGAALRMAATSMRHSQTALGAYYRQVARRGGADVAVFATARKLAQYIYRLLRWGQPYVDEGVAAYEKRYQLARAQRLAAAAKNLGYRLIPVEA

SEQ ID NO: 486712 - protein, 333 aa, unidentified
MVYAALDIHEKVFQAAVLDAESGELVQERLPARREALADWATRSQGKLEAVALEATTGWRWVWRELSGRGFDVRLCDPGQARALRGSKRRPKTDRLDAAWLARLLAKETLPTCWLPPEEIESLRDRTRLRRALAQDRMRFAQRLHALLTHEGWPCSRGRLLSVAGQRWARSLALPPAARANLEARFALIAVLDEQLTVIDAELRQRARSDPRLQALCTIFGVGPVLGAHILAEVGEAGRFRRARQVVRVAGLDPVVSESAETRRRGKLSKQGSTELRWALVEAAHHACQPRSPDHSLYLAGKERSGSKRAALTVARKIARRAYHVLAELEQAA

SEQ ID NO: 486713 - protein, 423 aa, unidentified
MHQPLIITIAVERMFSMDVVIERACGMDVHKDNITACILTPEGKEIQTFSTKTVFLLQLVDWIKQHNCTHVAMESTSVYWKPIVNLLEAEDIEFLVVNAQHMKAVPGRKTDVKDAEWIAKLLRHGLLKASYIPDRNQRELRELVRYRRSIIEERARQHNRIQKVLEGANIKLGSVVSDVLGVSARDMLDAIADGEEDPEKLANFARRSMKKKKEELELALKGYINSHQRLMLKTILGHIDFLTEQIEMLDKEVANRVSSHQEDVARLDSIPGIATRMAEQILSEIGTDVKKQFPTAAHMCSWAGLVPGQNESAGKRKSAKTKKGNKYLRSALTEAAHSVRGSKNYLGALYRRTASRKGKKRAGIVVAHAMLRISYYLLTRKEMYVDLGEDYFDKQRQQSIVRHSLRRLESLGYTVTLQEPEAS

SEQ ID NO: 486714 - protein, 358 aa, unidentified
MQAKGTTINFKGQNVYAGIDIHLKSWKITIMLEGREHKTFSQDPSAETLWNYLKKNFPGANYYSAYEAGFSGFHAHRELEKFGVSNIVVNPADVPTTDKEKKQKEDKRDSRKIAKSLKNGELSGIYIPSKGMEELRGMVRYRKTLVKEIARNKNRIKSFLYFNGIEIPIGLDTASQHWSGKFTQWLKTIKLSTPYGDLVLDETIDTTEHLRRKLLKVNQELRKINCNSEYSNKLKLLQSIPGIALIMSITLLSETEDILRFKNLDQLCSFVGLVPTTKSSGDKEKVGKITPRSNRFLRSNIVESAWIASRKDPSLAYSFNELCKRMQPHEAIIRIAKKLLNRIRYVMKNEKEYVHSVI

SEQ ID NO: 486715 - protein, 386 aa, unidentified
MTHSTNILPRSVDYDQTLVLAIELSNKSWVLAAQVPGLSQTKAKRTIDPNKNDLLAAIDSYRTRAAAAGRSVKRVIASYEAGWCGYWLARWLMAHGIEVYVVQPSSVPVDRRMRRGKSDGIDAELLLRTLLAWLRGEPRVCSMVPIPDEADEDARRCVRERSELVSERVGLVNRIGAILATLGADDYNPLLQNRRRRLTELRTGLGDPIPPNALAKITRLLTRLELVLAQTAELELERDAVARTDAPDQAGKMIQQLISLRGIGVQSATVLVREAFVRRFANGKALGSYAGLTSTPYSSGGIDREQGIGKAGNRRLRTVMVELAWLWQRYQPGTAQVVWFRERVGSTGRRVRKVMVVALARKLLIALWRFVTDGVMPEGAVTKPSI

SEQ ID NO: 486716 - protein, 514 aa, unidentified
MFKRTVRKAKERAYVGKPLGVIQPRVAAVGPERFGIVAVDCGKGASVWMLANFYGRRLLPPQELLHSPGALACAISQLRELLVRHNLADQIVAIERTGRYHLPVQQAFRAAGFETRIVHPLASRQYRELSDPANKTDATDLDGILRAATNGFGLIELPLEGPYLALCTLARHRRDLVEKRAAVLCQIREYLELTLPGYATCFDDLWDHRYALYLARQCDTPADFTARGLNGLKEMLRKAGLLFQERTLNRVLQWARTALPVGVEASLYRQLWHNLDDDRLEKNRQIQRLEQQLAEHLALTPYVLLLSLPGINVVSAAELAGELGPIKHYASARAITGRAGLFPRRYQSHHVDRSGGLSPAGLRPLRFILLVIADNLAQCNPYYRGRALRGKDRQLDARLIRVKIAGAFSRVLFQMVAGGRVFTHPACQQRDYVLQKLLAFHHVHGTPLDQALRNLETARTQIPAQEYAAEAAPLAAELAKSRKLRRGGVKTLQDLLPVLLARLGVGSLQSESSE

SEQ ID NO: 486717 - protein, 335 aa, unidentified
MKKINVGIDISKEKCNLCYRSGLEIVREEECSNEVRALKKAFKAALKALGASVDEVLVCAEYTGRYIYPLTVACQELDIFLWMDDPTRIKNSMGLTRGKNDAIDAARIAEYAFRYSDKAIRYCIPDAALVSMKNLLADREFLLIDRKRYQSQLTDQKKYMAPGDFKHKSSRWKKVIKSIDEQIAAIDAEIESLIAADPVLTRQKELLVSIDGIGDRIAINMIAITGGFTRFQNARQFCSFAGLTPYKYDSGTSVRSKAKISKRANQTMKALLHLAAVSAATHMKNSEYKEYYERKTKEGKHVMCVLNVIRAKLVHRMFSVIKRNTEYTKEYKPAC

SEQ ID NO: 486718 - protein, 318 aa, unidentified
MTQPLIFVGIDVSKAQLDVAQRPAGRFMVPNTEAGFTQLIAQLAANPPTLIVLEATGGVELPLTGALAAAGLPVVVVNPRQIRDFAKATGQLAKTDALDAQVLAHFADVVRPTPRPLPDVETQELAALVTRRRQLIEMLTAEKNRVASARAVVRKQLRAHITWLERALHQADTDLAEAIRQSPLWREKEELLRSVPGIGPVLTTTLLANLPELGTLTHKQIAALVGVAPLNRDSGTLRGKRTVWGGRAQVRAALYMAAIVAARFNPVIRVFYQRLCAAGKAKKVAFVACMRKLLTIVNAMLKHRTPWRQGTEAVCAGA

SEQ ID NO: 486719 - protein, 311 aa, unidentified
MPTVPVHVGVDIAKAAFVARLLSQTLTYPNAPAGQAEFCAALAALPGPAHVVCEATGGYERGLVLALHRAGYALSVLNPRQVRDYARARGQLSKTDHVDAAILADYGATLRPAADPVPTAQQLDLAALAGARQDLLELLGAERSRAEHLTVPLLRRQHTARLRQLDHQLAILDRQIDALIAADAVLAAKSARLQAVEGVGRVMALTALALMPELGQLTGEQAAALAGVAPFARDSGEHHGHRHIAGGRAVVRRVLYMAALSASQHNRILREYYLGLIARGKPGKVALTAVMRKLIVLLNRLLADPQFVLAN

SEQ ID NO: 486720 - protein, 381 aa, unidentified
MKKDTRHVALDVHAETVVVAVAEADGSVRSLGTVPNKPECVQRLVKKLGPVGDLRVCYEAGPTGYVLYWQLTKMGVHCDVVAPTLIPVKAGDRVKTDRRDAIKLARSYRSGDLTPVWVPDPAHEALRDLVRAREAAKKDQLRARHRLQKFLLRHGRRAPETIRPWTEGHLNWVRRHVVFEGPAQEAVRSDYLAEVDHARERIRRLEQSIDEAIVAAPAAIREVIEALQALRGIAQVSAVSIVAELGQLSRFARPRQLMGYSGAVSREDSSGNRVRRGAITKTGNAHLRRIVGEAAWAYRYKPAVQGALRKRQEGLPEPVKEIAWKAQHRLHMRYRRLLGKGKVKQQVITAVARELLGFIWAIGVHVERTQAPVKNQKRPAA

SEQ ID NO: 486721 - protein, 344 aa, unidentified
MSIVILGIDLGKNSCSIVGVDGSGAVVARRTMRRQTLIEYVGKLPQCVVAMEACCGAHHLGRLFATHGHEIRLMSPEYVRPYVKAQKNDDRDAEAIAEAASRPTMRFVDLKSSEQLDLQTLHRVRSRLVAERTGLINQARAILLERGVTFPAGRRKFEVGLEALLADDADAGLSARMRQLIGELRAEWKALDIRVEALNGEFVETARQDETMRRLTSIPGVGVLNATALVAAVGNGSGFDKARDLGAWLGLVPRQHSTGGKARLFGITKRGNKYLRTLLIHGARAALPSLSQSDTPIGRWLKAMIARGVHRNAIIVALANKLARIAWAILRKDKRFERSYPVAA

SEQ ID NO: 486722 - protein, 322 aa, unidentified
MQYIGIDVSKATFVVAYSSDKGGEIRTFNNTTAGIKQFIGTLPKDGSIHCVMEATGNYSALLLYMLNVAGITVSMENPLKVKNFARAMLSTVKTDKIDARLIALYGEKMNPQPFKVQGEAILRLRQKRTVIRQLTKQITAMSNLRGSLACLPVPDKGATHTVDETIKFLEKRRDRLQSELTDLVEVEFSRQLALLTTIKGIGITLATALILTTGGFTYFQNAKQVSRYLGICPTYEQSGTSVNIRGHINRNGDAYTRGLLYIAAWPASRCNAQCKETYTRLRQNGKPGKLAMIAVANKLVRQAFAVVAHDKEYIDGFVSNRP

SEQ ID NO: 486723 - protein, 378 aa, unidentified
MGYFVGLDWASTAHAACVIDEDGAILAQFEVQHTAEGLRQLLSRLARIAPPEQLPVAIERPSGLVVDTLVDAGHPVVPIHPNQLKACRPRYRAAGGKSDPGDAYILADVLRTDGHRFAPLRPLSDEVRALRALVRCRDDLVAERVALANQLRSLLDSFWPGAAALFADLDSPIALAFLERYPTPGTARRLGPKRLAAFLARNAYSGRRDPTELLERLRAAPDGLAGPLEEQANGEAALDLVSVLSTLVARIRRLTSAVEHAVAQLPAGQIMMSFPRAGKINAAQIVAELGDDPQRFPTECQLAAEAGAAPVTHASGKSRGVTFRWACNKRLRNAITTWANNSRHASPWARHVYERARARGCDHPHATRILARAWIRVL

SEQ ID NO: 486724 - protein, 341 aa, unidentified
MSIVGAFDVHRRQLTFDYLDTVTGEVKRGRVAPADREHLRAWLARFSGRGDVEFALEGCTGWRYVVEELAAAGVGAHLAEPADTAALRGKKRHAKTDKSDARHLRVHLMAGDLPESWIPPEHVLETRALVRLYKDLLDERGGWQQRIAATLFHQGAPLAASAGIAEGRAPAGQAGLSAAGRQAVETGLRQIERLSGELDPLRRQLGMISRRQPGCRALAATHYGIGPLTAVVIWAELGDVRRFSSSDDVIRHTGLDITVYSSDAKRSAGHLSRQGPGLLRWALYEAAKCAARPASPDYRYYTAFRARRGASLATLSVARKLARRCYHTLRELGEEALAPAA

SEQ ID NO: 486725 - protein, 343 aa, unidentified
MGIVEVTGGVDTHADFHVAAAVDANGGLLGVDSFPVDQAGFEGLSGWLAGFGTVVQVGVEGTGSYGVGLARFLTDAGIGVVEVDRQNRQVRRKKGKSDPTDAVTAARAALSGAASVVPKLRNGPVEQMRVLLVARRSARHQRIQNMNQLRHLVYCAPELIRVRFKDRPKIGLVKEAAAMRPKPGSDPVAYTTNLVIRNLARRVLALNIEVKEIDRLLVELIDQTAPELLELYGVGPDGAATLLVTAGDNPERIHSERSWAHLCGVTPIPASSGRTVRYRLNRGGDRHANSALHRIVLTRMSSHSQTQAYVARRRAEGLNSFEIMRCLKRYVARQVFKHLPAPP

SEQ ID NO: 486726 - protein, 347 aa, unidentified
MPTQMNNLNFEGQNIYAGFDVHLKDWKVTILSEEMMLKSFTMPPKPEVLSDYLLRNYPGAIYHSAYEAGFCGLWAHYQLCELGIQNIVVNPADIPGTQKDKLQKEDKRDSRKIAYALRSGNLTPIYTPTESTLNDRSLVRSRKTLVGDMIRFKNRIKGLLHFYGIEMPEEFSNSRKHWNRRFMVWLQGIHMKELSGEMALKHQINEALYMKELLKCILLDIKHLSQTDKYRENVRLLRSIPGIALLTAMVILTEVEDINRFPNSERFASFIGLIPMTKSSGEKQKVGEITFRAHDFLRSIIIESSWVAIRYDPALLMSLSETNQTNGAQQRPDTYCKEIIQQNIYGS

SEQ ID NO: 486727 - protein, 341 aa, unidentified
MNRLYAGIDLHSNNNVVVVTNAEDEVVYRKRLRNELDEVLGALAPFARDLTGVVVESTYNWYWLVDGLMDHGYDLHLANTGAIQQYCGLKYSDDETDAHWLATLFRLGILPEGYIYPKQERPVRDLLRKRSYLVRQRTSNILSIQNLIARNTGGSISGAGVKKLTQADVDEMVAGDDLALAVKSSLAVMQCLDAQAKNIEKVALQRVRLRDEFKGLLTVSGIGKILGLTIMLEVGEINRFARVGDFASYARCVGGARLSNGKKKGSVNTKNGNKYLCWAFMEAAGFASRYNETVQRYHQRKQAKAHKMVARKAVAHKLARACYHVLRDGTDFDVNKAFGGR

SEQ ID NO: 486728 - protein, 397 aa, unidentified
MNSLLVGIDVSKELFSVAGIDSEGNESFSRSYSMDSSGFDEFLRTITSHCEDLSRVIIGMESTGCYHINLFSFLTSRQIHTLVINPLLIANYAKLSLRKTKTDKKDARTIAKFLLDHHQEISQLPVSQELQDLRDLSRERESLCHLISATKVEIKRVIRTTFPELESMGDLYTRTMIRFLQEYPSARLVRAAKPKAIAKALKRPSVGNKLTLTAEEIVKAAQSSVATVSPAKEIILRGKIATLLHLQERLAEVSKLLTELCQSTRLEDLEILRSIKGVGPNTATPFLAEMGEVKNYSSHKKIIAYAGMDPSVHESGKFVGMSKLSKRGNRHLRRAVYLMTASVVSQNAFFKAYFLKRKREGLAPQKALFATAHKLIRVIFAMLSQRTRFKVKEAQSR

SEQ ID NO: 486729 - protein, 403 aa, unidentified
MNMNAVGIDVSKGKSMVAILRSYGEIISKPFEVKHTVSGIRSLIEQIQSIDGESRIVMEHTGRYYEPLVRELSKADLFVSAINPKLIKDFGDNSLRKVKSDKADAVKIARYTLDSWTELRQYSLMDEIRNQLKTMNRQFDFYMKHKTAMKNNLISILDQTYPGANTYFDSPAREDGSQKWVDFSATYWHVDCVRKLSLNAFIDHYQKWCKRRKYNFSRSKAVEIYEASKELVSILPKDDLTKLIIKQAVEQLNTASQTVEQLRTMMNEAASKLPEYPVVMAMKGVGKSLGPQLMAEIGDVSRFTHKGAITTFAGVDPGVNESGSYEQKSVPASKRGSSTLRKTLFQVMDVLIKTKPQDDPVYLFMDKKRAQGKPYYVYMTAGANKFLRIYYGRVKEYLSSLPE

SEQ ID NO: 486730 - protein, 428 aa, unidentified
MLKHPNEPDPGQEFAAFLALDWADQEHAFCLQVVGQSKIETGTLEQKPAVLGPWVAKLRERFGGRPIAVGLEQSRGALIHALMAYDFLVLYPIHPTTVAKYREAFKSSGAKSDPLDAGQILEILTQPQDRLHRLNPDTVETRLLGRLVEDRRKAVDLRTSHLQALGANLKEYYPQALELTHDNLSSRLAGDLLMKWPTFADFQQAKPSTIKRFYYGHNVRSPEVIERVLALAEKSPALTTDPAIVESGSRLSQRYVGLLQALNPVIADYEQRIERVFDAHSEAKLFSGLPGAGPVMAPRLLAFFGTDRSRFAAALNVQSFTGIAPVTKSSGKSRVVYARAACPKFDRQTFHEFSRLSVSHCQWARNYVQYYTDKGKKYHTIIRALAYKWIRILFKCWQERTPYNHDQYMQTLKKRGSIFATWHLQKSS

SEQ ID NO: 486731 - protein, 392 aa, unidentified
MAEKNATLADRPEAYLELDVGKQSHWAYAVDSAGTVLLSRRVANTEAGLDEVIAECPDDTLVVVDQRRNIGALAIRRARAAGRPVAYLPGSAESELAKGFPGIAKTDAKDAQVIARVALGMPQTLRPVPEGDPALDGARIMSAQVAQVQKDRTACANALRSRLLESCPAFERACEMTAPWCAGMLSELGGPWNMLDAGRERFCAASHKHGASRGQRDRLWDAISGERPHEQAVAAEMRYVKHFAGRIAADNQEEAMLEEAIAESLSGNADFANLQTIPGIGPRTAAQLVVSVDISQFDSHDKLASYCGLAPSTQRSGTSVNYDKGHRGGNKPLKNLLVFSCNSLGRSKSYYGEYLRRCLGRGMKRRCALKATARKRMKVIYAVMRDGTPYSA

SEQ ID NO: 486732 - protein, 334 aa, unidentified
MEQITTVGIDLAKNVFSLHGVDAAGKTVFKRTVRRDRLVETVAALSPCLIGMEACSGAHEWGRRFQQHGHSVKLMAPKFVAPYRKSDKNDGNDAEAVCEAVGRPSMRFVPVKSLEQQALLAMHRVRQGFVVERTAVVNRLRGLLSEFGVVLPLRSVTVRRQAAAAAEGLPELARRAIVDLLEQLRLLDERIDAYDKEIEAQARLSEPARRLMKIRGIGPTTALAIVATVGNAREFKNGRQFAAWIGLTPSQYSTGGKSRLGHISKRGDAYLRNLLVQGARSVLQTAPAHQDRLSRWALELQERRGYYRTLVAIANKNARIAWVLLAKNDPLRAE

SEQ ID NO: 486733 - protein, 420 aa, unidentified
MGRLKIVYPVCCGMDVHRDFLIACIAATNAQGVTEYQSRRFSTYTGSLRELRDWLLANDCKDVCMESTGKYWFPVHNILEESCHVVVSHPKFVKAIKGKKTDKKAAQWIADLFKHDLVRGSFIPPKDIRQLRDLCRYWVKLSSYMTGEKNRAQNCLTVSNFKLEDVFSNVFGKSASAITTQLLEHPGEQFDVAPFVDGRCKTPIAQIQEAVDGIFTYEQAEKLKIIRGHMDSLERHKAELESLILEIAQNYLPQIELLLTVPGIHDAFTAIRILAEIGADMTVFDTSKHLCSWAGLTPQNAESAGKKKTTRIGKSGAYLKPLLIQVALAASRGEKHPEIYGKKQALQKRRGKKKAIVAIARRLLTAIYHILSKNEPYNPAAYIQEDKNPMARQISQEKAFEMLARMGFIVSNPSPLSSSG

SEQ ID NO: 486734 - protein, 344 aa, unidentified
MNQIIRIGMDTSKHIFQLHGVDATEQVVLRRKLRRNQVLEFFAKLPPTVIGIEACGAAHYWARELRKLGHEVKLMAPQHVKAYVKRNKNDGRDAEGLCEAMSRPTMQFVPVKTEEQQAVLMLAGVRQQLIARRTQLGNAIRGYAAEFGLTAAKGLDKIEPLLAQIAQDETLPEMARELLALQGRDYARLQIELKAIEAKLMAWHRANPDSRRLAKIPGVGPIGATALVMKAPDPRLFPSGRHFAAWIGLTPKDHSTAGKTRLGKITRAGDEMLRSVLVTGATAVIKQAKHGRGSPWLLALLKRKSPKLAAVALANKIARIAWKLMVTGESYDGGRMLGVSAFAA

SEQ ID NO: 486735 - protein, 339 aa, unidentified
MKLYSAIDLHSTNSYLAIIDENGKRIFKEKLPNDITVICERLSLYRGTLEGVVVESTYNWYWLVDGLTAEGYTIHLANPAAIQKYSGLKYADDKHDAFWLAEMLRLNILPTGYIYPKEVRPLRDLLRKRSHLVALRSSLLISLQNIITRNCGQKMKTNDIKRLRENRVQPLLAGNEDLALAGQVSKDSIDFLTRQIRAIETFIEKKVELNGAYRQLETIPGVGKILGLTIMLEAGPIERFAKVGNFASYCRVVSSQWSSNGKAKGKGNKKNGNKYLSWAFSEAAELARRFDDKARAYYNRKLRKSNFMVAHAALAHKLARAAFYIIRDQVPFMPEKTFS

SEQ ID NO: 486736 - protein, 485 aa, unidentified
MAKHKSSTFERLRLGAALNRKERREVQQRLNAPDPGLEIVNRDAAGIDVGNESHYVAVPPGRDAQPVREFGSWTGALEEMAQWLIRCEIRTVVMQSTGVYWIAAHDVLQKHGLEVQLVDARGTKNVPGRKSDVQECQWLMKLHTYGLLRACFLPAPEIHAVRTMWRLRDQHVKDAGRCIQHMQKALIEMNVQLHIALTDISGASGQAIIRALLAGQRDAKTLAALRDPRCQASEEEIVQTLRGNWKPDVLFELQQAVDAYDFYRLQMAKCDEQLKQYMALLPASQAAMPAPPAASSTAPGKSNKSRSGKPRKPIGNQPAFDLQAELERILGVNTTTIDGINVMTIQTVLAEVGPNLSAWKTEAHWTSWLNLAPKRDISGGKVIRHVRQRHTNRAGNAFRMAAQSLLRSQSYLGARCRYLRARLGGPKAIKAMARVLACLYYRLITKGKIWVDRGVEEFNRRSEQRELAALQRKAHKLGMQLVAAA

SEQ ID NO: 486737 - protein, 416 aa, unidentified
MNRTLTRRIAFIEQFDLFVGIDLGKHKNVAVMMDQRFKRYGRFEFGHSREDYDRLAAWLRKNQAGVVTPRVLVGMEPTNDYWQWVATYLEEMGIPYRLVNAFAVKKSREGTQLDYAKDDNRDSATITRLLIQGVFTETQIPTGIYAQMRHYEQAHWQLSHQIGQQKTVLRQHVERLFPELQKVWGDYTGKTALAFLKNHADPHIIAQMDWDTFEARVRQDFAGEKLAVKKLRQVYQLAANSIGVQPGCALQHLIRQHIVTWSYQQQQLAELEAELVNCLYQLPTVTYLLSLGLGKVTTALIAAELGDPSRFSAAKQLVKLAGIQPTANQSGEYKRQKTPMSHKGRVRLRTYLFFATMRLIRWDASFQQKHQALINRPSRPLKPLESVGALMNKLIQLIWAVSRDQMMYSPQQFLAN

SEQ ID NO: 486738 - protein, 348 aa, unidentified
MQGRGTRGLAYHEGGRVLKRCNRVGVDVSAKELVVAIEASGRREAPIVLTNDADGHRKLVKLATKRGASARVVLESTGTYGLDLALALHRAKRVEVMVANPRAIAHFARASLQRSKTDRLDAEAILEFAVRMPFEPWSPPAPEILELRALSRRIEALSKTVVQEKNRLHANDQSEELSEFVKEDIRELAGLLESRITKLRKQALLVIAQSEDLSAAFAHITSIKGIAEASGIAILAELAVLPADMTTRQWVAHAGLDPQQFQSGSSVHKPARISKTGNAPIRRALFMPALVAVQWEPHIKGFYDHLLDRGKTKMQANVAVMRKLLHAIHGMLENDQDFVGEKFFAMKG

SEQ ID NO: 486739 - protein, 346 aa, unidentified
MTIVEERTAVTAGVDTHSEVHVAAALDSVGGLLGTREFPATAAGYASLLGWLGKFGDVALVGVEGTGSYGAGLARYLAAHGVRVVEVDRADRQERHRNGKSDPLDAVSAARAAQSGRASGMPKGRDGAVEAIRTLMVAKGSARHERTQAINQARALILTGPDELRARFAGLRAAALAEAIAALRPRPGDAAGYSLRVALRELGRRVEFLDDQVARLDELIIPLVAARAPGLLSLYGVGPDTAALLLIAAGDQPERLRSEAAWAHMCAVAPIPASSGKTRRHRLNRGGNREANHALWRIVITRMSAHPETRAYVRRRTAEGLSKKEIIRCLKRYVAREVYPYLRPGA

SEQ ID NO: 486740 - protein, 391 aa, unidentified
MVCVGIDVAKDKHDCCILDSDGMVRADCFTIPNNMDGFKQLLQTIRNCTQKSDKIKVGLEATGHYSYNILGFLLDKDLAVYVMNPLHTNLYRKSLSLRKTKTDRVDARTIATMLLSDVDLKSYTDTAYHNEELKSLTRYRFDKVRERAKLKQSVSRLVTILFPELEKLVTSLHIASVYALLSEYPGAKQISEIHLTKLTNLLATASKGRYGKDKAIQIRDAARTSIGSVMPAKFLELKHTIKLIRELTSEIDEIEVSIQKIMDELNPPILSIPGVGIQSAAMILAEIGDFSNFESPDKILAYAGCSPSTYQSGKLTNCYAHMEKRGSRYLRYALYNATKYVCHWNPVFAEYLAKKRAEGKHYNVALSHATKKLVRLIYALQKSGKAYLVAA

SEQ ID NO: 486741 - protein, 318 aa, unidentified
MANQVAVGIDISKKTMDVAIGHEQSTAIFSNDGAGHQALIAALKNHPVSLIVMEATGQYQLACACALQAAGFAVVVINPRQARDFAKAMGRLVKTDSVDARMLAELAQVLNQRPDRDRFIKPMPDQVQQHLHALVLRRRQLVRLLVSERQRKHMAHPEVVQDIAELMDMLATQLEALDRRIAEHLAQYQSDLATLLKSVKGVGPATAATLISELPELGQLKAKQICALVGVAPMNRDSGQARGKRIICGGRATVRSALYMAAIVAMRHNAVIRRCYERLLAAGKPKKVAIVACMRKLLIIMNAMVKTGRPWNDQPAPA

SEQ ID NO: 486742 - protein, 422 aa, unidentified
MLEQTHDEQEIIQRVAALDIGKAELVCCVRVPDPKGGSRRMEEVKTYSTMTRSLELMADRLLDLGVTRVVMEATSDYWRSPFYLLEAHGFQTWLVNAKDVKHLPGRPKTDRLDAVWLCKVAERQMLRPSFVPPVPIRRLRDVTRYRIALVSDRTREKNRVEKLLEDAQIKLSVVASDIFGMSGRDMMAALIAGERNPQALAQLARSRMRGKIPQLEEAFVGYFTDHHRFLLAKMLTRIDALNADIDELETEIEAQLAPFAPAVARLDEIPGVGVTAAAVIIAEVGLDMTRFPTPAHLSSWARFAPGVKESAGRKKGNGSTGHGDPYLARVLGEAAVGASRTNTFLGERYRRIARRRGKKKAVVAVGRSILVIVWYLLSDPEVGYHDLGPGFYDSRINPERKKRNHIRELEALGYKVTLQPAA

SEQ ID NO: 486743 - protein, 390 aa, unidentified
MEVRTVNNLPPAAPDDDTVRCLLAIELSKKSWIVAVNTPLSDKISHYTVKPGDGKELLELCERIRTRVARETKKRVEIVSCYEAGYDGFWLHRLLEARGIRNCVIDPASLQVDRRARRAKTDRVDVERMLRSLMAYLRGEPKVWSVVRAPSVAEEDDRRLHRERDRLINERIQHVNRIKGLLAIHGVYDYHPLLRDRMHRLERLQLPDGGPLPPRLKAEILRELERLELAMTMIKAIEAERDAIASAKTETTHTSAKKIQDLAKIKSIGPEFATILVGEVFYRSFDNRKQLASYVGLTPAHFQSGSMSRDQGISKAGNAKARTTMVELAWLWLRHQPGSRLSVWFRARVGNLKGRMRRITIVAVARKLLIGLWRYLETGLLPEGASLKMK

SEQ ID NO: 486744 - protein, 378 aa, unidentified
MKAARFTADEIERVAYLTAKGYLPVAVDVASRVFQVCYYDLGAKHIRNYQLSREKFFEFIDDTHTPRKLIGIEACGSCNYLCRYIQEHNHKCHILPALKVKAFLHLDKTDRIDALGILKALITPSMQHIPARTQENQYLLNLITVRDQLNKQFIQTVNAAHAFLYESGVVVGTASVSSATKVTEALKALCNTETEKEHSENDCSYSHLNCLSESLLSNIESLQTKIKEINSHLLSYASNNEICSNLQTVPGIGKLSAVALYAAMGDPDRFSSSRAFAAFIGVAPVTTGTGGKTIVLGIRKSGIRSIKKMLYMCAMVYLSQAMKNGTESSWLKQRLNQNRSKKIIICAIMNRLTRIAYAIAKSGQPFDENKCNMIKKIR

SEQ ID NO: 486745 - protein, 345 aa, unidentified
MQHYVGLDVSLKLTAICIVDGTGKIVREGTVASNPEAIAAFVKSHAPYVARIGLETGATSTWLWTELNKMGLPVICIDARHAKAALRMQINKSDRNDAVGIARIMQCGWYKEVRVKDLDSHAIKALLVSRGLLVKIKRDLENQIRGLLKNLGLVIGRAKMNVFFVRVAELTEDRPELAAVVEPLLNTRQAVERQIADLDRKVVRLARNDAQVRRLMTVPGVGAITALCFLATIDDPTRFKRSRSVGAYVGLTTRRYASGEIDWTGRISKCGDKLLRSYLYEAANVLLTRVAKWSPLKAWGVRLAKRSGLRKAKVAVARKLAVILHRMWIDGTEFNWSSKEVAQPA

SEQ ID NO: 486746 - protein, 396 aa, unidentified
MSLEKYIGMDVHAATISAAVKNAEGKLLMECVLETKAATILEFIQGLRGTLALTFEEGTLATWLHDLLKPHVSRLVVCDPRKNALMRDGNQNDRVDARNLAELLRTNQVHPVYHGKHGTRALKELGRSYLTLTKDSTRVMNRIKSVYRSWAIPCAGTSVYSRRHRAEWLAKLVEPGVRIRAEHLYEQRDCLQPVRQAARHELLRESRKHAAVKLLCQIPAIGPIRSALLVALLQTPHRFRTKRQLWAYSGFAVQTYDSGEYRFVRGKLQRNRERITVRGLNHNHNHDLKNLLKGVAISAIERRGPLQDFYAALVDKGMRPSMARLTLARKIAAITLTMWKKGVSFDPKQLQRQAAGASLVKKSLPFEEFPLLVVGRILEMLGSREVSVNEIRPRVP

SEQ ID NO: 486747 - protein, 345 aa, unidentified
MKLTVIGMDIAKHVFQLHAVNPSTGEIERIKLRRSQLLEFFAKRERSLVAMEACGGAHHWARELLQLGHDVKLICPRSVRPFVLRNKSDAADARAIWTAVQQPEARLVAVKSEAQQTILALHRLRAQLMKFRIMQTNALRGLLHEFGEALPEGYQALSKEIPAALAKVSDRLPAMLIDSLREQWARVQATDKDINLLEHRLKLALRDSQQCQRIAEIPGIGLLTATAAVATIGDPHTFRSGREFAAWLGLVPKQVGTGGKVRQLGLSKRGDTYLRTLLMHGARSVITRGTRSPWLDGLLARRPFNVVVAALANKLARTIWAVLSWSCPCNSGHANTVRLMTRQHA

SEQ ID NO: 486748 - protein, 340 aa, unidentified
MTITTVGIDLAKNVFAVHGVDQNGKTVLIKPKVSRAALPELIASLPPCVIGMEACSGAHYWARLFRQYGHEPRLMAAKFVSPYRMAGKSGKNDAADAQAICEAVRRPHMRFVPVKDESQQAMQCLHRTRQGFIEEKTATYNRLRGLVSEFGIIAPQSTDALRHVVSEQKHSLPLQVQQCVTDLLEHIDRIEENIAEYDQILSKAAKTDHRSQRLMALKGIGPTTACALVASIGNAHDFKNGRQLAAWLGLTPSQYSSGGKSKLGRITKAGDSYLRTLLVQGARSVLIGADKRTDSFSRWVCMLVERRGYWRAVVAIAAKNARLCWASLRYGDDFRLYSAS

SEQ ID NO: 486749 - protein, 365 aa, unidentified
MKKISTIAAKQSRNFSEQKLTIGLDLGDRSSWYCVLDERGEVVLEQKLGTTPKAMKEAFGGMPRSRIALETGMHSPWVSRALSELGHEVIVAHARNVRLIGESRKKDDRLDAQMLARLARIDPQLLSPVKHRSAKAQADLTVIRARAGLVRARTALVNTVRGLAKSYGERLRGCNVRNMNPEKAQELSPELQRALEPLLAGIEALSERIGEYNERIEELAEQSYPQVARLKQVKGVGTLIALTFLLTLEDAHRFRKSRDVGCYLGLQPGRRNSGQSEPQMHISKEGDPYLRTLLVQGAHHILGPFGADSDLRRWGLKLAERGGKSGKKRAIIAVARKLAVLLHRLWVSGEVYEPLRNQRAMPVAA

SEQ ID NO: 486750 - protein, 353 aa, unidentified
MHKMTDEIVSGKKIFVGLEDAKRTWKLCVRCEGMIVHEVGMPAEYRALHRYLTGRYPGCHIVVMYETGFSGFNLYDKLTTDGIACVVTPAHTVQQAKVSRVKTDRTDARLLAGNLEAGRYVVCRVPDRQQREDRQVSRTTSQLQRHIVSVKNQIRRFLEFHGLDEGLPAGRWRESHYRELAITSLPHSLQISLEALQTLLATLEKLHAGLRAELKHLSQQPQYQPGVTAKASCPGVGWLSAIRFTLEWGEMRRFTSGEQLASFVGLTASEASSGESTHRGHITGQGSGQVRAWLIQCAWRAIRLDPVLLHKFRAVWSASSSKKKAIVAVARKLAVRMRTVEITGQPYVIGVER

SEQ ID NO: 486751 - protein, 387 aa, unidentified
MTQASLLFPPIPLDYENTLVLAIELSKTKWVLAAQVPGLLRVKAKQTIEPKAEALLAAIDGYRNRSRAAGRTIERVVAIYEASWSGFWLARWLGRHGVETHVVQPSSVPVDRRARRAKSDGIDAELLLRTLLAWLRGEPRVCSMVPIPTEADEDERRRVREREDLMAERVSLVNRIGAVLATLGTGDYNPLRRDRRTRLESLRTALGDPLPPHARARIRRMLDRLDLVCAQITELEQERDAVLDKEAPDRAEKMIQQLVELRGIGVQSATVLVREAFVREFANGKALGSYAGLTPTPFSSGATEREQGIDKAGNRRLRTVMIELAWLWQRYQPGSAQVSWFRERVGGTGRRMRKVMVVAMARRLLIALWRFATQGVVPEGAIVNPAG

SEQ ID NO: 486752 - protein, 449 aa, unidentified
MAKHRKKHGKLDRNLPELKPNAGGIDIGAREIFVAVPADRDVESVRSFPTFTEDLHRLADWLQQCRIDMVAMESTGVYWIPLFQILESRGIQVCLVNAQHVRHVPGRKSDVLDCQWLQYLHSVGLLKASFRPEQDVCAVRSLLRHRESLVQMTCVHVQHMHKALDQMNLQIHHVISDITGVTGLAIVDAIVEGKTNPRQLAKLRDYRIKAPIETVIKSLVGDYRPEHIFTLKQSLLSYRHYQQLIDECDREVEQRLQAFNTKDDGPNAAADGSNSTTPAQSSFDLHHHLERIFGTDLTLIPGFQSLRIQTIFSELGADLSKFPTEDSFCSWLNLCPKDGTSAGRRIRGRRIKTQNRVANAFRLAAQCLFSNKSFLGHYFRSQRARHGALKATKNAAHKLARIFYHLVTTRLPYDETVFAKLETRNQKRRLNRLQSLARRMGYALVQANA

SEQ ID NO: 486753 - protein, 437 aa, unidentified
MMLQSIPYLSVGLDAGADFTWMSIMLPNGILTGKPFKIIHSDPASRELAVTKIKEAQEAYSLESRCFLESTGIYHIPLLCFLRDKGFDCSVINPIITKNSTNMNVRKLHNDKFDSKKAAKVGLDASLKTSIIPDDEVIDLRNLVRDYYYFKDLQSAIVLKLHAELKVSFPAYQKVFSKITTQTSLKLLEAYPLAADMLAAPKDRIVETIRKTARFGEKYALAKYDAICTAAKDAAVFGRALPSNALRIRLYIKTYREYQEHLDGILEELHKAVDKLEGTPAYDRIALLQSLRGVGFLSAVVLIAEMGSFDLFSSPKKLYAYFGLDPAVKQSGKFNGDKVHMSKRGSSLARRILHMVALNNLKIDKGTKTPVNPVIHSYYANKCKSKKKNVAVGAVMHKICNIIFAMLRDHKPFKIITPQEHCEQYLAAHPGKTHNAA

SEQ ID NO: 486754 - protein, 412 aa, unidentified
MEVVYPCCCGLDVHKKSITACVLWAEAKGKSRKEKKRFGTFTHDLLQLADWLEQCGVTHLAMESTGVYWKPVWNILAEQFEVLLVNAQHIKAVPGRKTDQKDSEWIADLLQHGLLRGSFVPPQPIRELRDLTRYRVSLVQEINRIANRIQKVLEDANIKLASVATDALGASGRAILQAMLAGEQDAARLAEMSKGLLRNKIPELKLALEGRMTEHHRFLLRQLFEHLRFTESKRSEIEQEIDKRMRPFEDKVTRLCTIPGVDRVTAWGMLAEMGMNMNQFPSSGHLASWACLCPGSFESAGKRLSGKMRKGNVSLRRCLSQAAWAISMMKNNYLSALYRRIAARRGAKRAVMAVAHALLVIGYHMLKRKEDYRELGADHFDRIDVNRIRRSLVRRLERLGHKVTLEPLAQTA

SEQ ID NO: 486755 - protein, 344 aa, unidentified
MNSTTIAVDVAKSVFEVAVSEQPGEVRERQRLSRERFRRFLAERPPATVLMEACGSAHHWARQAQALGHRAVLVPPHVVRPYVLRNKTDRTDTKGLLEAIRNEDVRPVPVKSETQQALAALHRLRSMWLAARTVRINTVRGLLREFGLIMPIGAHHVVPHVATLLEDADSAVPGLLRPALADATTDIREIEARLRAIEHQLESVASENVVVRQLRTIPGIGLLTATALVATVGDVARFPSGRHFASYLGLTPREASTALRRRLGAISKRGDTYVRMLLIHGARSVLCHAKTKTAPPPDRLRAWALQVERLRGHNKAAVALANKLARIVWAVWRHGKDYVGTPAV

SEQ ID NO: 486756 - protein, 315 aa, unidentified
MANGVCIGIDVSKASLDVAFGSQGEVRSLANESGAIEQLAAQLKQLEPERVVMEASGGYERLLAGLLWDAGLKVVIANPRQLRQFREGMGQHAKSDRLDARMIALWAEHKRPEVRPLPDAEARELSELLTRRRQLIEMLVAERQRLARALSRPLRKELKASVGSLERRLKQLESEIETRIGKSELWRRTRELLESVPGVSKATSFMLIAELPELGTIDRRRLASLIGLAPFVRQSGQWRGRQMIGGGRAKVRSVLYMAALSAAHWNPTLRVFYQRLLQRGAAKKKALIAVARKLLVILNAIVRDRTPWREPCPAA

SEQ ID NO: 486757 - protein, 313 aa, unidentified
MMASPDVFVGIDVSKDRLDVHVRPLGQGFSVSNEATGYAALIARLRPLRAKRIALEATGGYERALWLALSEAGLVAAVVNPRQVRAFARAAGRLAKTDRLDAAVIAHFAETFVPRTGKPDPVADRLGEHVLYRRSVQDELIGLQHQLRRLETPALRQRAERRVAALRAEVREIEREMRAIVDSDPAKKALFACLTALKGVGLILACTLIANMRELGSLSRHQAAALIGVAPLNHDSGAWRGDRVIAGGRRRVRNVVYVATLSAVRSNPSIREFYRRLSAGGKPAKVALVACMRKLLVMLNGRVRDHRAATAMA

SEQ ID NO: 486758 - protein, 456 aa, unidentified
MVAVMIGIDPHKASHTAVAINAAEEPLGGVQVRASAVQVERLLAWAQAWPERTWAVEGAGGLGHLLAQQLLAAGERVLDVPPKLSARVRLLEAGDTNKNDPNDARPAAVAALRSRGVREASRDDHAAVLKVWSKRHRDLGRARTQVACRLHAVLCDLVPGGVPKAITAGQAAHLLESITPAGSVAAARCELAAEFTEDLRRIDSQIRGTRNKLAEVARAAGTSLTGLFGAGPVIAGAVIGDVRHVSRFPNRDHFAACNGTAPIEVSSGPRKIYRLSRRGNRRLNHAIHMAAVTQIRNPGSEGRAYYDKKLAEGKTRKEALRALKRQVSDAIFACLQDDARRTEGPGGQPGNHSASRAAGSHPERQRFGQATPGPGPHPRAAARTRGRAGRSPAAATSAPATPQVQVERPQRSEDERPGGTARRRPHSATRNARNHRPSATPQPPTSRTAKKIGPTS

SEQ ID NO: 486759 - protein, 380 aa, unidentified
MKNHTKVKVGKKPQVAKVQDRAKQHVSSEVREVLKKLMAGTNQGDAQHSRQGQSCSSDGIHCGVDLGDKKSNYCFIDVTGKILIEGSLATTQKEFGAYFEALPKMTIALEVGTHSAWISELLESCGHQVVVANTRKMESIHKNRRKNDKVDARALARLVRADPELLYPIRHRGAETRRDLVMLRARDALVSARTKLINATRGLVKSVGSRLPQCSADSFHKQVAGSIPEGIRAALVPLLEQIELLTVKIKEYDGKVSRMAEKKYPETILLKQVKGVGDLTSVAYILTLEKRERFEKSRDVGCYLGLIPRQDDSGESSPQLRITKTGDKMLRRLLVGSAHYIVGPFGEDCDLRRFGMKLAARGGKNAKKRAVVAVARKLAV

SEQ ID NO: 486760 - protein, 319 aa, unidentified
MTTNSVVVGVDVAKDRLDVAVRPSGEVWSEANNETGITTLVARLRPLGPALIVCEATGGFERAAIAALAAAGLPVVVANPRQVRDFARATGQLAKTDQLDAGILALFAERVRPTPRPLPDAAAQLLDAVLTRRRQLLEMLVAEKNRLGFAPKPVHRGIQAHVRWLERQLDDVTKELAALIEASPVWRAKDDLLQSVPGVGPIVSYTLLGELPELGTLSHKQIAALVGVAPLARDSGTLRGKRLVWGGRASVRTALFMAALCGRRWNPALQRFYERLKAAGKPTKVALIACARKLLTILNAMVRDDKRWAVPAPSVQYSC

SEQ ID NO: 486761 - protein, 333 aa, unidentified
MVDEAGQIQLEQRVRTNAKALQEVFGAMPRSRIALETGTHSPWISRLLSALGHEVIVAHARKVRLIGESRKKDDRLDAQTLARLARIDPELLCPVKHRSAQAQADLTVIRARAGLVRARTGLVNTARGLVKSYGERLRGCNVRNMNPEKAEGLSPELQRALEPLLSAIAELSERISEYNQRIEALAQASYPQVALLKQIKGVGTLIALTFLLTLEDPHRFRKSRDVGCYLGLQPGRRNSGQSEPQMHISKEGDPYLRTLLVQGAQHILGPFGVDCDLRRWGLKLAERGGRNGKKRAIVATARKLAVLLHHLWVSGEVYEPLHNSGRTTVATAA

SEQ ID NO: 486762 - protein, 398 aa, unidentified
MKRSLTPKAKPNKPIVFLSEERVDIGVDTHKKTYDATLWSETRQSVVSRWVQPSSPQTLIARLLPYKDHIRRIVYEAGPTGYALVRALRCAGFRADVIAPSRTPRNCGPQAKSDRIDSGKLGMWSAKGLLRPVRVPTEEQEGDRQIFRLRADLVSKRCAIKQQIKSFLLLHGIAEAQDFEHWSKKNVHTLSRLALSPQLRFALDMLLADLARHDDQVRKANAALNALASLPRHCATVAALRTVPGVGPVTAMAVRTELIDPERFKNSRQVAAMAGLAPLVQSSGQSRREGPLMKSGNARLRAVLTEAAWRWVARDPAARQKFTHLIHNTGEKKKALSAMARRLLVILWHISVSGEAYRPPSPPALEKKSQSGLPDEKKRGNGASSVVRKRPSSVQPPQ

SEQ ID NO: 486763 - protein, 413 aa, unidentified
MDVHKESIDITLAEEGGEVRRLGQIGGDRGSLLKMVRRQQSKGRELVFVYEAGPCGFWIYREITALGERCMVVSPALIPRRAGDHVKTDRRDSARLASLARAGELEAIHVPDIRDEAIRDLVRGRDDAVIAQRRVRQQLKALLLRNDIRYVGKSSWTGAHRRWLSELKLPEPAQQIVFEEYIDAIVVATGRIERLTWAIETEVASWRFAPVVAALQAMRGIQFVHAVTLIAELGDLTRFASARQLMGYLGLVPREDSSGEHRRQGSITKAGNSYARRAMIEAAWAYRHPARVTRIIATRQTGLPKAACDIAWRAQLRLSAKYRRMNAGTSITTRSWWRSRASSRALSGRSARASSRSELKDRNRPSIAARPNRLAKGGPRHPPLMPDRQRGAAAERRTLVERYWSGSRRHPRS

SEQ ID NO: 486764 - protein, 410 aa, unidentified
MELLHRRCCGLDVHKETVVACLRLVADGKVTTEVRTFQTTTADLLRLSEWLAANGCTHVAMEATGIYWKPVWHILDDGEFELVLANAAHVKNVPGRKTDVNDAMWLAELLAHGLIRASFVPDAQTQEMRNLLRTRKQLVREQSSHVLRVQKTLEDANIKLDSVLSDVMGKSGRAMIEALIAGETNPAKLASLADRRVKASPEQLREALRGRVTKHHRFLLRLHLNQIDALDAAMATVDAQVEANLAPFRTAVELITSIPGIKTLSAHAIVAEIGIDMSRFPSAPHLISWACICPRNDESAGKRRSNRQRKGATWLKTTLVQCGWAAVKKKGSYLQAQFHRIKARRGPKKAIMAVVASILTAIYHMLKDGTMYQDLGCDHFKRRSTDQQKKRLVKRLADLGYTVELKPLAA

SEQ ID NO: 486765 - protein, 372 aa, unidentified
MQGDGEVYVGLDVSKLKVSVALAEAGRDGEVRFLGEVENTPEGIGRLVAKLAKRHRRLAFCYEAGPTGYGLHRQVAALGHDCAVVAPSLIPRRPGERVKTNRRDALTLARLHRAGELTRVWIPDPGHEAVRELVRAREAAMEELRRARQQLQSFLLRHGRVFGGRAPWTKAHARWLGEQGFDHPAQQLVLAEYRQAVEDAGTRLERLTRQVAEAAAAWSMAPVVEAYQALRGVAFLTAVTFVAEIGDVRRFDGPRQLMAYLGLVPSESSTGERVRRGGITKAGNGRARRVLVEGAWTYRFPARVSRLLQERQEGLPKAVREIAWKAQVRLCGRYRKLMARGKRQTVVVTAVAREMAAFLWAIGRQVEPRPAG

SEQ ID NO: 486766 - protein, 376 aa, unidentified
MAKNMRYVGLDVHSESVSVAVADAGRGGEVRYLGTVPNNQEGVKKLLKKIGSKTNLQFCYEAGPCGYELYWQLVGMGCEVVVVAPTLIPLASGDRVKTDRRDAEKLARFLRSGDLTPVWVPSKDHEALRDLVRAREAAKKDQLRARHRLSKFLLRHGRKPDVRMTSWSARHMVWLEGVKFTEFAAQATMIDYLHEVQQATSRITRLEKSIDKALALASSQTQHLVAALQALKGVAKIAAVSVATEVGEMSRFASATQLMSYAGLVPSEHSSGGPGKSNRGAITKTGNTHLRRILVECAWAYRHRPGVKGRLKKRQEGQSEQIKAISYKAQHRLNGRYNRMRESGKPAPKIITAIARELLGFIWDVGLTAEQEAASC

SEQ ID NO: 486767 - protein, 356 aa, unidentified
MAIVADTYTYVVGVDTHAATHHYAIVETRSGGQITHGKFPTHAAGLLRAVDWISRRTSVDDNPAVDQVLISMEGTGSYGAQAAELLAARGYRVVDAPSPKRARGSGKNDHIDALVAARGALPKDSERLADRRAGHTRAALQILLTARDSMRRDRTRSKNQLTALLRTHNLDIDARKGINKVHISLIAGWRKRPTDTTLARIARTEAHRLATRIHTLDADLDSNEKAINALVRELEPTLLDLPGLGPINAAIVLAVWSHPGRIHDEAGFAKIGGVCPLEISSGNSKDHRLNRTGDRQLNSALNSIANTRMRHDETTKAYVKKRKQQGQTKPRIRRCLKRYIARQIFRHLNTTTLDKT

SEQ ID NO: 486768 - protein, 422 aa, unidentified
MRKLVTTLANTFQRSIFMNAVGIDVSKGKSTVTILRPGNEVLLPPCDFPHTQSCINGLIEQIKSLGGETKVCMEHTGRYYEPVASWLSDAGIFVSAVNPILIKEFGDDSLRTPKTDKADAKKIARYTLDRWTNLKQYNHMDEIRSQLKTMNRQFGFYMDHKTAMKNNLIALLDQTYPGANGFFDSPARSDGSQKWVDFVYTYWHVDCVRGRSPEAFAQHYQDWCRRKGYNFSASKAETIYSRSSDLIAVFPKDNTTKMLIRQTVAMLNAASATVESLRQKMDETASALPEYPVVMAMHGVGPTLGPQLMAEIGDVTRFTHREALTAFAGVDPGSRQSGKHEQKSVRTSKKGSPNLHKTLFQIMAGLLKRSPADDPVYAFMDKKRAQGKPYYVYMTAGANKFLRIYYGRVKEYLSTDTEADNA

SEQ ID NO: 486769 - protein, 316 aa, unidentified
MKPPQPFVGIDVSAKRLDVAVLPAGTHFTVAHSDEGIASLVRRLRELCPHIVVLEATGGYEIPVAYAMSEAGLPVVIMNPKVLRHFAKSTGKLAKTDKLDARVLAHYAQAIQPPVRPLKDPEQVELATLMSRRRQLRDMIVMEGNRRRTSTPKVRGNIDQHLAYLRQLLKDLDGEIHDSIRRTPLWHENSEILQSFNGVGPKVSASLIADLSELGTAPRTQISALAGLAPMNRDSGQWRGKRTIQGGRPAVRQALYMAALVASRRNPVIREFYQRLRQAGKPAKVALTACMRKILVILNAMLKNRTYWNPQMPLAA

SEQ ID NO: 486770 - protein, 369 aa, unidentified
MFYLGIDQHAKQLTISLRDESGSVRQARQVSTEPVRIANFLHELLLTCGTNGYYAIVEVCGFNDWLLELLPKHGCSRVFLIQPEKKRKIKTDRRDAKSLSELLWVNQERLRRGHPLNGVKQIVFPSAIDVENQRITLIRQRIGRQNTRTINQIKHILRRHNLQWEIPTKTFPSKSAITWLKHLTLPSWDRKELNWLLEELKSINGRLAELECEIATRCASDPRVQLLKTIPGVASFSALAFACRIGDVTRFTSGRGLANYWGLTPLVNDSGESTGRRGRITKAGSTVARWLLGQVVLHVLRKDATMKAWYKTIRVRRGSKIARVAVMRKLSVVIRNMLASNQDYWTCRTEMLERRTKQIRTKKIRKPAA

SEQ ID NO: 486771 - protein, 424 aa, unidentified
MKVTYQTCCGVDVHKSFLVATIVKTTGGIEPSYQKKRFSTFNNSILEFKQWLLDNDCHDVCMESTGKYWVPVFNLLEDEINVVIANPKWVKAVKGNKDDAKDSKWIGDLFRLGLVKGSYIPCKKVRILREYTRYRYKLVSCRSSEKNRYQNALTVCNVALDSVVSDIFGKSSTSIIDYLLEHSGISINHEEIASKLLRSLKSKEDAVIESIEGYQMTDAQKYRMRLVRAHMDYITAEINDVDKMIENAISSDPDFENAVQFLCTIPGVKRASAITIISEIGTDMTQFSSSKRLCCWAGLTPGSNESAGKKKSVRITRAGVYLKPALVQCAHAAVKSDKSPYYKKKYDSLVKRRGKKRAIIAIARMILTAIYQMLSTGELWNPSDLYKIDMPVALVEKQKAKAIKQAKKLLQQEGLLPPDEPLAS

SEQ ID NO: 486772 - protein, 442 aa, unidentified
MRLLNANANEHPLRIKLSAHIRTGTIMELQRNKVCGIDVHKRFLIATILSRDGKKDTQRFSVTLEDLLKFRDWVIENGCEQVAIESTGIYWHPVHSVLEGKIDLIVANSYKIKHTPGRKTDVNDSEWIAELCLNGMIEPSRIFPKDDRELRRLTRAREGYVKQMTQEKNKIHQSLDSACIKLASVISDIFGKSGMYLLNCVLEGRDIDEIIDGIPSGRLKKKADQIKESIKSRLEISQVILIRGSLSLMRSIQERIDELDGEISARIQYRKNDLAIAMSIPGTGFVSATAILAEIGNYIDFKKPEQLAAWCGLVPSLYQSAEKTILGGITKQGSKHIRRMLIQVAYAISRTKDSKLKKFFLRIQAKKGSKVAAVALARKVLCILHHLLINQEMYLEDRDKKNMRQKPLIPPSPIEMSIQEMIDCIVRAGYVVTKSDSIGGFG

SEQ ID NO: 486773 - protein, 348 aa, unidentified
MIHVGIDLHKLESQICVLSGTGEVLEERRVTTRRDALEKALATWPGAHVLIEACNESEWVARHLEQCGHVVVVADPNYTPMYGHRHHGYKTDRRDAQALAMASAQGLFRRAHRTSEARRQVRAQLVTRDTLVRTRSRFVSVLRARLRAEGYRVRSGHASTFVARVDELQLEPELREQLRPLLEVMALANAQIVAADERIATMAKADPVAVRLTSMPEIGPITALAFVAALDDVRRFRNAHQVESYLGLVPRERSSGERQVRGRITKTGDKRVRWLLVETAWRMMMHRSRTRVSTLQGWAARIRLRRGSTIAAVALARRVAGILYAMWRDDRIYDPDQVGSRKRLVQVA

SEQ ID NO: 486774 - protein, 375 aa, unidentified
MGDHSEAFVGFDTSKLRNAVAIADAGRGGEVRFFGEIENTPAATAKLVRKLSAKYGRLTFCYEAGPTGYGLQRQIKELGFECLVVAPSLIPKRPGDRVKTNRRDALSLAKLLRADELTAVWVPDAAHEAMRDLTRARETAMLDLRTKRQHISAFLLRLGRPYGERKKTWTKAHVRWIASQKLEHPQQRLVLEEMMLAMRQAQERLQRLEQAIAAAVPEWSLAEVVTALRAMRGIDLISAATLLAEIGDLSRFRTPTELMAYLGLVPSEDSTGDVIKRGPITKAGNRRARRMLVECAWSYQHPPRVGVAKQPKVDAAPEAVREIAWKAQCRLYRRYRALIRRNKLKTVAIVAVARELAGFIWAVARQVTTARAELA

SEQ ID NO: 486775 - protein, 416 aa, unidentified
MTFKVVRFICGGMDVHKNLIVATIGTTDRQTLITEYIQQSFSTFYSDLIRLKEWFISHDCYDVCMESTGKYWIPIYNVLETELNICLTHPKYVKAIKGKKTDKRDSKWICDLYKCDLVKHSFIPKKEIREMREIARYRCKLVYMRSSERNRYQNCLTVSNISLASAVSDPFGKTATNIMKELMQSEVIEDDKILKLIHKNCKDKDKILDSLQGYHIESDQRFKMDTVMNHIEYLDKQIQACEAELIKRAYPLRDYFQHITHIKGPSALSALLIVSEIGTDMNQFESDKQLVNWAGLSPANNESANKKKSVRISKAGQYLKPLLVQCALSSIKDKNSYFGIKYCRIKKRRGHKKAIIAIARMMLVCIYHMILTGEEFNPCDYESLTNPKPKKGPIMTVESALPFLKDSNFDFSSIQL

SEQ ID NO: 486776 - protein, 350 aa, unidentified
MTTIARHITGGVDTHLDVHVAAALDERGALLGVESFSATASGYRQLLRWLENWGRIELVGVEGTGSYGAGLTRHLHAEGVAVVEVDRPNRQRRRRKGKSDPADAVSAARAAQGGEATGLAKTRDGNVEAMRVLRVARFSARCSRTQAINQMRSLISTAPDDLRAELRDLSIYRVLTITSAYRHTGRTDVTTLTKLALRTLARRALSLEEEVKEIDRLLKGLLRETAPQLCAVDGVGTDVGSAILVAASDNPERLKSESTFAKLCGVSPLDASSGKQERHRLNRSGDRQANSALWHIVFTRMVSDPRTRHYIERRMKDGRTKKEAIRCLKRYVAREVFAALPRSELGLDTP

SEQ ID NO: 486777 - protein, 355 aa, unidentified
MNQEKYIGMDVHQATISVAVMDARGKLIMECLVETKAATIVEFIRGLHGTLAVTFEEGTSAAWLHDLLKPHVSRLLVCDPRKNALLKDGSKSDRIDARKLAELLRTNQLKPVYHAEHGVRTLKELGRSYLTITQDVTRVMNRIKALYRSWAIPCAGTTVYAARHRAEWLAKIVEPGVRVRAERLYQQLDGLQPVRQAARGDLLVESRKHPAVKLLRQIPSIGPIRAALLVALLQTPHRFRTKRQLWAYSGFAVETHDSGEFRYVRGKLQRNRERITVRGLSDNHNKDLKSLFKGAAISASTRPGPLHDFYVALVEKGMRPTMARLTLARKIVTITLTIWKKGVSFDPKQLHRQAV

SEQ ID NO: 486778 - protein, 364 aa, unidentified
MKRKIYVGMDVHKETIRIACLTNNTKEIVKEQQIKHNEVQIKKFVNKLKSEWNEIHSCYEAGVTGYPLYRNLKSLGVNCILVAPGKIPRQSSDKIKTDKRDAIKLAKLLRSGELESIHVPSEEDEAVRDYLRSRDSLRLDLGRNRQRLMKFLLRKGITYSATKYWTVSHNKWLNNLQFNNEILQETFNDYYSRVRVQEENLKAMDKRIQEIAESEPYREKVGILRCFRGVDYLTAMFLLCEVCDFKRFKTAGSFMSFLGLVPGEYSSGSKRKQTGITKTGSPRLRRILTEAAWQHRFPGTGSKIVTARRSGQTCVSCCFGGKASLRLHKKFRNLQQRGKTPQVMITAVSRELSGFLWAAMNLVA

SEQ ID NO: 486779 - protein, 249 aa, unidentified
MDKAYVGVDVSKSSLDMAIHEGKEHWSFTNNAEGISQAVATLRQVNPQMVVVEATGGIEMAFVGSLAVAGIRVVIVNPRQIRDFAKATGQLAKTDRLDAAILADFGAKVDPPVRPLADAEAQQLKTLVTRRRQLQEMITAERNRINNVSGAVRERVQSHITWMQMEMKQTDDDLSDSIKRSPIWKEKDAWLKSVPGVGPVLSATLIADLPELGKLNRKQIAALAGVAPFNHDSGTIHRKRRVWGGSNFG

SEQ ID NO: 486780 - protein, 335 aa, unidentified
MDVTTIGLDLAKNIFQVHGVDSEGHVVVARRLRRSQMHSFFAGLRPCLVGMEACPTAHYWGRELRSLGHEVRLIPPQYVKPYVRRSKNDAADAAAICEAVARPSMRFVPIKDEAQQAALMLHRVRELLVRQRGQLISAIRAHAAEFGMIEAKGPQNLAGLLAALEAGGVPDLALPLIGVLKDQLDATDGRIAEVDRRIAAWHKANDTSLRLAGIPGVGILTATAIAATVPDASVFRGGREFAAWLGLVPRQNSSGGKARLGKISKQGNEHVRRLLIIGAQAALLCSKEVKANPWVQGMLARRPRMVVAVALANKMARIAWTLMSRRTQYGVAAAA

SEQ ID NO: 486781 - protein, 342 aa, unidentified
MEQFAGLDVSLEETSICVVDERGRVVREARVASDPTAIVARFGQSGLSVTRVGLEAGPLSPWLHSGLVAGGLPAVCIETRRMRGATLLMAVKTDRVDARAIAHAIRVGWYTPVHVKSAASQELRLLLRNRKTLVEHRVGLDNEIRGTLKAFGIKLGKVSEARFAEVVVRAIEAQRPALLSMVAPMLMVRAALRRSYARLHRMVLSAVRGSPVCRRFMTVPGVGGVVALSVLTGIDHPGRFTRSRDVGVHFGLTPRKYASGEVDRNGAISKCGDEMVRQALFQAAHTLLTRVKRWSALKAWGMRIAKRRGLRRATVALARRLAVLLHRMWLSGEDFRWTADLA

SEQ ID NO: 486782 - protein, 314 aa, unidentified
MSESESFVGIDIAKATLDACIAPTGELLHLTHDDAGIGQLVARLTALRPGLIVMEATGGLEGRLASALAVAGLPVAVVNPRQARDFAKATGRLAKTDAIDAGTLAEFARAVRPQARPLKDADAVELEALLVRRRQLVAMRVQEALRLGATPSKVQRKSLTVHIRWLDKRIAALDDDLNSRLRASAVWRAKDDLLQSIPGVGAVTTLTVLARCPELGQLNRHQIAALVGVAPLARDSGKHRGKRFIWGGRADVRAVLYMATLTAMRCNATIQAFANRLTANGKPPKVVIVACMRKLLTIMNAIIKRGSPWSPNPA

SEQ ID NO: 486783 - protein, 337 aa, unidentified
MNVTLIGIDLAKSVFQVCAVNQAGKPVFNRQVKRQRLLALLLEYPKAIVAMEACSGSNYWGRTLQRHGMDVRLIPPQHVKPFVKGNKNDRNDAFAITEAAQRPHLRCVPPRTLAQTDLIQAHRARERQVNQRTALTNQIRGLLNEYGIVLPQGRRRLQSALPGLLENADNELTPEARVLLEELLIEWHQRDAAINRLDRRIDRQAKGSDAAQRLMTVKGIAEKTATALVAHAGDGRAYRNGRELAANLGLVPREHSSGGKQNLGGLTRRGNTYLRRMLIQGAWSVLRNAHRNHDRLSCWARQVAERRGKHKAVGAIANKMARISWALMYYQQSYRSA

SEQ ID NO: 486784 - protein, 358 aa, unidentified
MAGILALDLGKNKSVSYFLQSDREGTFDTHDTSPPTFHDLFVKIAPDVVVIEIGSIAGWVCDLCRALGIRVVVANTNDDRWVWRKVKRKTDRDDARKLGEMYRAGKLPLVHMPTREVRQWRSLIEYRTALVRRRTAMRNTVHAILLREGRAMGAGGGAAWTQKRWRYLSELSRPMEDCSAQELWRGMLACELQSMRHVEALVDNVELKLDDLAAANESVQLLRTIPGVGPRLSELVVAVIDDPKRFKNVRQVGAYAGLVPRQYESGQSSRQGRITGRGNPLLRGLLVEVSWLMRIHNPHFAQVFGKVERGTKARRKIAAVATSRRLLITCWAMMRDRSAWRGPVKGRVDREKSVKVLD

SEQ ID NO: 486785 - protein, 389 aa, unidentified
MFYLGIDIGKNTHVASLVDDKKKVIFKAFSFSNSIDGAESLILKLEAFKNELEVAMEATGHYWLSLYSYLVEKNFTVRVINPIQTDGWRQGIEIRKRKTDVIDSILIADLLRYGDFVETSLSNEDYLSLRNLSRFRSYLISSIGDLKRKTIALLDQVFPEYASSFSNIFGKTSKEILSNFSTPSDFEDINSDDLNTFLESVSKKNYASKKIDELSKKASSSFGINFCLDSFSLQIKMLIEQISFIQNQVSDVENEIELLLEKLNSPITTIPGIGSVNAATILGEIGDIKRFSNPSKLVAYAGLDASISQSGEYESTYNHMSKRGSPYLRRALFQSALRAEFCDPVFSDYYQKKISEGKHHLVATNAVARKLCHTIFAVLTKDEPYQVQN

SEQ ID NO: 486786 - protein, 438 aa, unidentified
MSNKVIFNLDELFISVGIDVGADFSWMSIALPNQQFVGKPYKILHNSIDSLTTAVSKIKEAEELYSLESRIFLESTGIYHYPLFCYLRDKGFNCSVINPIITKNSTNINIRKVHNDRFDSKKAALVGLKPDLKVSLMPSDLALNCRNLCREYYDLMDNRSAYVNKLQGELRMAFPQYLGIFSKVTINTSLTLLETYTSPSAFLKADKQEIIDIIKSTARFGLTYAQNKYNAIIQAATDANQFGYIIDSNIKCIRLYISFIRKYDEEINNILESLHELADANEDADFVKQIHLIETFKGAGFLSAVSIMGEIGDFSAFSKPKQLFAYFGLDPAVKQSGKFEGTKVQMSKRGSAIARRVIHTLTLQSISISRNGEAKNPVLREYYLKKCDSKPKLVSMGAVSHKVCNMIFAILRDNKPFKIIAPQEHIKQYNAAKCDIAA

SEQ ID NO: 486787 - protein, 343 aa, unidentified
MKHYIGLDVSMKRTFICAVNEQGKIIHQGSESTDPDVIADYLLRLGLEELVVGFESGSLTPYLLAGFKGRAIDAICMDARKLSPILALKVNKTDKNDARGIAEALRSGMYTRVHCKPEESINRSILLTSRRALIEQQTHLKNTVRGLLKSYGIRLGAISVKKFSGAVIKRIEGCQEVLILSVKCLLDAFDKLVEEANKIDKKMLEIAYNDREVQRFMTIPGVGPVTALTYKAEIFDASRFKESRSVGAYLGMTPTQYASGETQRQGKTSKCGSKELRFLLVEAGIVILTRSKKWSRLKAWGLKIMRKKGLKKAAVAVGRKLAVIMHRMMVEEKDFIYGEPKAA

SEQ ID NO: 486788 - protein, 402 aa, unidentified
MNAVGIDVSKGKSMVAIMRPFGEIVSTPFEIKHTSSDINSLVKLIKSIEGESRIVMEHTGRYYEVLAHQLSEANLFVSAINPKLIKDFDNDSLRKVKTDKADSVKIARYALDKWQNLKQYSVMDELRNQLKTMNRQFGFYMKHKTAMKNNLIGILDQTYPGVNTYFDSPARSDGSQKWVDFASTYWHVDCVRKMSINAFIDHYENWCKRKKYNFSKSKAEEIYGKAKELVPVLPKDDITKLIIKQAVDQLNSASTTVESLRTLMNETASKLPEYPVVMAMKGVGTSLGPQLMAEIGDVRRFSSKKSLIAFAGIEPQPNDSGKIVGNDSGISKVGSAVLRRTLFLIMTVILKTQPQDEPVFQFMNKKRSEGKPYKVYMMASANKFLRIYYARVKAVMDSERSQ

SEQ ID NO: 486789 - protein, 370 aa, unidentified
MGVAGRLTLGPPRPWGSVVAMPESLKARTVVRVNQTRIMQGRAKKEKKPMTKEAVCAGVDVAKNTLDVAVSSSEGIRQFANDHEGITNAVRYIAGLKTARIIIEATGGLEMPLVAALQADRLPVVVINPRQVRDFARAIGILAKTDSIDARLLALFGLRVKPEIRPLPDQKAREVRNLLTRRRQLIEMLTAEHNRLLQADDSIRPCIESHIKWLEGALSDINDDLDLQIRSRPSWREKDNLLKSVPGVGKVVSSTLLIELPELGKLNRRKIAALVGVAPLNRDSGTMRGRRTVWGGRARLRSVLYMAALVASRRNPIIAAFYQRLLDAGKAKKVALVACMRKLITILNAMMRTMTVWKSGPILRHVSVEV

SEQ ID NO: 486790 - protein, 343 aa, unidentified
MDYFAGLDVSVKETSVCIVDDAGKIVQEVRVASEPEALLQVLTKKNYRFKRIGLEAGPLSQWLFSALAEAGLPVICVETRHMRAVLKAQINKTDRNDARGIGQMMRVGLYRPVHVKTLRSQKLRMLLIHRKLLQSKAIAIENDLRGTMRNFGLKVGMAGTVKSEVRIKELVENLPELALLVEPLLIVRRVVREQLGILHRRVLAIVRDDDVCQRLMTIPGVGPVVALTYRVTVDVPARFRSSKSVGAVFGLTPAKYQSGENDRTGAISRCGDEMMRMMLYEAAQSILVRVVKWSWLKAWAMKIARHRGMKKAIVALARRLAVIMHRIWVDGTEFRWTREVAAA

SEQ ID NO: 486791 - protein, 353 aa, unidentified
MLRRRRPLVSEFYEGRQFVGMDLHRRRSMLVRMTEFGEHLETVRILNDRDSLAEVMSRAGESPEVVLEATYGWYWAVDALADLGATVHLAHPLGVKAFSYRRVKNDQRDAFDLADLLRMGRLPHAWIAPPATRELRELVRHRAKLVAMRSQCKAHVHAVLAKGGIWVPMTDLFGVEGNLLLDKVTMPAPYRERIASLRRFIEGFDAEIDLFTALAQRRLSHDAGYTAIQQIPGIGPVLAAVFVAEIGDVHRFAGPAQLTCWAGLTPSHHESDTTVHRGAITKQGSRLVRWAAIESVKILPETSRIGAIREQVAHRRGNRNIGAVAAARRQLELVFYALRDHHVRALHRSPHVA

SEQ ID NO: 486792 - protein, 315 aa, unidentified
MTTSSGKFVGIDVAKDKLDIAVLGETKASQVTNDEKGIISLVKKMQKLAPDLIVVEATGGYQRAVVLGLYEAGLPVAVVNPARVRQYARASGLLAKTDKLDAFTLAEFGKQMKPRRFEAKSEAGRYVSALLVRRRQLEEMLKAEKSRLRTVSAAMRPSVERMIEVLKEEIKQLEKELDKFMKENEEWQAQEQILTSAKGVGRVTAATLLAELPELGKLDRKKIAALVGVAPMNLDSGKKRGYRKTKGGRMEVRNVLYMSTLVATRYNPLIQAQYQQLLKRGKVKKVALTACMRKFLTILNAMMRDKTSFRQIASA

SEQ ID NO: 486793 - protein, 387 aa, unidentified
MEKKKGRVVGLDVHPDSFAGAVVEGTDPAGARVLSSSTRVELERLEQWALRHTREEDTLVLEASGNAFSVAMRLRAIGRKAEVLDSHRAGKVGKVYCANDRVDAVKIARIYLSALSPIVWQPDEKTLERREIFSAYQAVVKESTRAKQQLRSMLNEHCVRLEKGFRLCHPNALTRLLALREWTPARRMLLQQLHDTLVGARTRRTLLRRHMAQEIVAEEALLRLTRLCGINLITLYGVAAAVGDVRRFSHSKKLVAYLGLNPSVSQSGNFEGSGALKRHGRGALRALLIQSGKKLLEVNNPLQKWGLAVASRRGRNKAAVAVARKLCVALWHVLMGHAIGALERLDTLQTKLSKFATEMGPAALRAFGYNNKADFVEKKLYVLRTYP

SEQ ID NO: 486794 - protein, 344 aa, unidentified
MTEITTVGLDLAKRVVSLCGEDATGRVVERRSLRREAVLAWFAPRPACVVGMEACASAHWFARELTALGHTARIIAPEFVRPFRLSGKNDANDAQAICAAVRQPHLRFVTVKGAAQQARLVVHRLRQGWQEERTAGLNRLRGLLAEFGRVYPNSAMAALTGARQVLADTTLPAALRRGVARQLEHLRQLEALLAECDAEIAQDVRDDPRAQRVMRLSGVGVLTAGAVAATVADAQQFRCGRQFAAWLGLTPRQYSTGGKPRLGRITRRGDTYLRGLLVQGARSSLQSALRIAPQRRTRLVAWIVATYQRIGYHKTLVAIANKHARLIWVLLTRDEPLRAHAVTN

SEQ ID NO: 486795 - protein, 466 aa, unidentified
MSAEKPLRNRKERKELTRRLQSENPGLEVVHPEAAGIDVGNEAHYVAVRPDRDAESVRKFECFTADLYRLAAWLKKCKVKTIVMQSTGVYWIPLFDIMEEQGFEVYLVNARYTKSLPGRKSDVQESQWLLKLHTYGLLSNSFQPPSEIRTLRTYWRQRAEHVAGVSTCIQRMQKALTQMNLQLANVISDLSGITGQKILRAIVAGERNSLKLAELRDCRIQASQEEIVKSLEGNWRPELIFVLQQQIDIYDAYQRRIAECDQQLKKHLAEFADHRNGSLTPSPTGQGDRKKTAARHTPKFDLGGELQRILGVDLTRIDGIDVMVSQTLLSEVGLDMSRWKTEAHFASWLGLCPDNRTSGDRVLRRGTRPVVNRAALALRIAAHSLLRSQSYLGAQYRRLRTKLGAPKAITAMAHRLARLVYRMLKYGQQFVDKGMEYYEQRYRNQQVHLLQKRAAQLGLQLVAVET

SEQ ID NO: 486796 - protein, 413 aa, unidentified
MKKHTYRAQKVNNMNWQQVNEQTAGEALVLAVDVAKVQQYALLTNQEHTQTWLMQWSHLEHTQYLIEQLKTLEVPITVVMESTGTYGDSLRYQCRQAGFTIFQANAKKVHDAREIYDGVPSLHDAKAAWLIAKLHKDGATKPWCEPTEEERRMNALRLEYELHQDQYRRNQNRLEAYLSRHWPEVLTLMPLDSVTLEQLIKTYGCPQEIAAQSEQAASDMRGWGKSGLSADKIAKVIACAKNTLGEPCIEAERQFLMALASELHHSRQQKQATKQALEAIVENDEALREMGRTVGKVTTAVLISLHLDPRRFATPKSYQKALGVNLTEKSSGQLNGRLKLSKRGSATARKFLYLAALRLLVNDPLVGKWYKAKKDDRAKLKTVIALMRKLPLALWHIARGERFDAGKLLKVAV

SEQ ID NO: 486797 - protein, 345 aa, unidentified
MEQISRIGMDTSKHIFQLHGVNAAEKVVLRKKLRRKEMVAFLKALAPTVIGIEACGASHYWARLLRSFGHEVKLIAAQLVKPYVKRGKNDAADAEGLCEAMSRPTMRFVPVKTAEQQAALMLVGSRDRLIRNRTQLSNAIRGYATEFGLTIAKGMAHLDPLLERIQADESLPVLARELFAVQAEEYAQLQAQIAEVDAKLMAWHKADECSRRLAKIPGVGPIGAALLMMKTPAPELFRSGRQFAAWIGLTPKDHSTAGKVRLGVITRAGDETLRSVLVVGATAVIQHVRRGGRGSPWIVDLLKRKPPKLAAVALANKIARVAWKLMVTGDSYAAKSAPAAVASAA

SEQ ID NO: 486798 - protein, 351 aa, unidentified
MKFYRCESEYSCGIDLHSRQMYVCVMDHEGNKMLHTNVTGNDWDYFLSRIEPYRHDLTVCCECTFNWYWLADACAAENIEFVLAHALYVKAIHGGKNKNDRIDSEKLAHLLRANLIPPAYVYPAAKRSVRDLLRRRTSFVWKRTELLHHLTCMPLVQGQEPVKKCQHRVRERWFEQLRPRFDEPMRKISAEADMYLIKEFDKIIDRLERAIVKETKKEQGRDFALLKTIPGIGDILALTILYEMDTVERFPRVQDFLSYTRLVKGSVASAGKIKGLRGAKLGNPYWRWAFGEAAVIGKRSNADLNRYGKKLETHLKKPQVNAILASKLARSVYFMLKHGKGFDPKLFAKGM

SEQ ID NO: 486799 - protein, 400 aa, unidentified
MRFIGIDIASEKHVVAVVDEDGNILQKPVGFTEDREGYDKLLGLAAAPDDALIVMEATGHYWQNVFVELVAAGYKVTLVNPLQTRRFAEVGLQRTKTDAIDALGIARFGAQRKPAPTAIPDQVTQDLRELVRLRDRWMQELGDRVRQLHRVVDLTFPEFTRHVRSLDSELATTVLSRWPTAAQLAKQSVRRVAATVYDGRHEIGTTLAQELVAAAKASVGKHQTYPYQVQTETLCEDIATLRSRLRSFDRQIRDALEQHEVGKLLTTIDGIGPTTAARLIAELGDIARFEHIGALAAYVGLAPGLKHSGKSTPKRAGLSPIGHVRLRAKLWMPTLVAVRRNPWLRAFYERLLARGKLPMVALAASMRKLLAAVLSVAKHRRPFVPQLPNPVENQHANSAC

SEQ ID NO: 486800 - protein, 407 aa, unidentified
MQLFVGDDWAEEHHDVEVMDAAGRRLAKARLAEGVAGMARLHAMIAEQLGEDTDEAVVKVGIETDRGLWVQALIAAGYEVFAVNPLQAARYRERHTVSGAKSDKADAHALADMVRTDSHQLRPVAGDSPQVEAIKVVARAHKTLIWERTRHTQRLRHALREYFPAALAAFEDLAAADTLELLTKAPDPVSAGRLTLSQISAALKRARRHKITDKAGAIQAAPRAEHLTQPEVLTAAYAATVQSSAAVLTVLNEQIMALQGQVETHFGQHPAAEIILSQPGLGPILSTRVLAEFGDDPHRYASAKARKNYATTSPITRASGKKKVVLARFVHNDRLIDALDSQAFAALTASPGARAYYDQIRARDLGHRAALRQLGNRLVGILHGCLKTGTCYDEATACSHHAQKAAA

SEQ ID NO: 486801 - protein, 365 aa, unidentified
MVKDNRKETTMKEKVYLGIDLAKANSRVAAFDKNGEATCRPFTITNSREGVKKLLSKLSSYKPGQIVCGMEISSNYWENMCSYLKGMNVEVILLNPYQVKKYRQATGAKIKTDSIDAEAIAGLISGKKYESLYISDDTAVELRELVRIKYGFQRRVKDLKKSVLSLLYLVFPEYTRMVSHPFSKVSMEILSKYPTSCHMAETSPSRLVKIFRRYQGCNFDLGKAKELISAAKDSFYSGRASKSRGLSITMQLDEIRSLSEKIADIEEEIKSILCPDDPSGGSSPYNILNSIKGVGMGTISTFIGCVGDVSRFSSADKLISFIGFYPRIFESGKYRKKNPSIQKAGPKELRYMLYLASVACIKHNS

SEQ ID NO: 486802 - protein, 328 aa, unidentified
MHCVDQAGRSVLQTNLRRAQMTTFFKKLPPAEIALEACGSSHHWARELAALGHEVRLIPPQYVKPFVKRAKNDRNDAEAICEAAGRPGMRFVPVKSTTQQAQAMVLKVRETLVRQRTQLVNALRGHAAEFGVTTAKGISQITALLQAIEAEITLPPDAREMLALLGQEIEHLDAKLNEIGAKLTAAHKANAVSQRLATIPGIGPIIGLTLATEIDPTAFQSGRHLAAWIGLTPKEHSTGGKQRMGGISRAGNERLRRLLVTGATAVIRFATRPGNKLVSAWLLKLLQHKPRKLVAVALANKMARMAWAMMKSGEAYRRPPVAAAMAVA

SEQ ID NO: 486803 - protein, 452 aa, unidentified
MEQPQEVEDEAYERVWERVAAIDVAKATGVVCTRVPGDGPSGRRSMHVWTVNATMSAVIELGDHLRCQGIEVVTVESTSDYWRVWYVVLEAAGLKVQLVNARSVKNVPGRAKTDKKDAVWLAKLTERGMLQPSFVPPYDIRRLRDFTRLRADLVHDRARHWQRLEKLLERALIKVSSVASTLDTQSVRAMLEALIAGERNPKVLADLAIGKMRAKRKELAEALNGKFEDHHAELARMLLDQIDALTRQIDQLSVRAGELIAQIPAAWGVDADGTTGPDAGKSPDAAVLTAVARLDEITGCGIISAQAIIAEIGLDMSVFGTPGRLVSWAKRCPQTRQSGKKNTSAPPGKGDPWLNGPLGEIAASASRTDTFLGERYRRLAKRRGKRKAQAAIARSILVIIFHLLADPAARFHDLGSGYYDERVSAERKIRNHVRQLEALGLTVTITPAEDAA

SEQ ID NO: 486804 - protein, 360 aa, unidentified
MVRYYGCDAHKRYSVFNWVDESGHRGHPVRVEHDRILFRSYVESLPAGTPIAVETLGNWYWLIEEMEKAGHDPHLTHAGKAKLMMGQINKTDKLDATGLAVLLRNGTLPRVWIPPEGLRDKRELPRMRMMLVGMRTQLKNRIHATLAKYAIQIDEPTDIFGVRGREVLATRLEELPPYTRVSAEMELRLLDQVGEQIESCEKQIAEVVETTPEMKLLMTLPGVGMILTVVIALEIGDVERFGSGERLASYAGTVPRIISSGGKTRHGKTRADVNRYLKWAFVEAANVIVRSRARHPDSHVVRLYVRIRERKGHAKAAVAVARHLAEAAYWVLKKKESYRDPQFPDSTSSTRKETRTTHEN

SEQ ID NO: 486805 - protein, 370 aa, unidentified
MHQSSTLYVGMDVHKESIAVAYVAKDHDAEVISLGTFGTRQCDIDTLIRKLQSKAKHLVFVYEAGPCGYWLYRYLTKKGHVCWVIAPSLIPKKPGDRVKTNRRDAIKLARLMRSGDLTPVYVPKVEDDAIRDLCRARAEAIRARKAAKFRLKAFLLRHDIRYAGRAPWGPAHLRWLSEVVCPTPAQQIVFQEYIRAVNEHTERLARLEQELTDQVQTWRLAPVVAALQALRGVQFTVAVTTVAELGDLTRFDNPRQLMNYLGLTPSEYSTGERRRQGGITKTGNTHARRALIEGAWAYRYPATISRHLQLRLEKVPKALQDMSWKAQVRLCNRYRQLSARGKTPNHVVVAIARELSAFMWASAQEVPLTP

SEQ ID NO: 486806 - protein, 430 aa, unidentified
MHNKNYISVGIDVGSAFSFMTILAPDETVILKPFKITHNNKDSLERAVSEIKKAEELYSLESRTFLEFTGIYHFPLFCYLVDCGFNASIINPIITHSTKNGNIRKVKNDKIDSKGIAKLGLSKDVPVSQFPEKLVLELRSLTRKYYDLTDERSAHINKLKGDLHTVFPQYLDIFCDVTGKTSTMILRQYGTPDKILRGHKKTMIEKISKASRKGLAKASERYEKLCAAANAAKTFGCQIDSIYFNISLTLDLVEKLDSALDSILNRIRQLITFNKNEKFIQQIKLLNTIPGVGFLTAVTIMCEIGDFSAFRNPKQLFAYFGLDPEVNESGKFVGTQLHMSKRGSRIARRAIFAVALASIRTKRNGEGINPYLRKYYELKSVQKPKMVAIGAVMHKVCNVVFAVLRDKKAFELRSPEEHCKQYQRAALAAA

SEQ ID NO: 486807 - protein, 453 aa, unidentified
MAQRNRSVSLKPGKSRASLTITHPNAAGVDIGNTAHFVAVPPDRDDEPVREFPSFTVDLNAIVDWLKACGVDTVAMESTGVYWIPLYELLESRGFNVLLVNARHVKNVSGRKSDVLDCQWIQQLMTYGLLSGAFRPADQVCVLRSLWRQRAMLLRSQARHVQHMQKALTQMNVQLANVISDVAGETGQKILRAIVAGERDGQVLGSMKNARIRASVDEIAKSLQGNWRAEHLFALKQALAAFDFVGKQLAECDIEIEQQLKTLQVHEGEPAKGKQRGRARNAPKFDLRTQLFKMCGVDLTRIDGIDVTTALAVISETGVDMSRFKTVGHFTSWLGLCPGTKITGGKVMNGRTKRCANHAAQALRLAAAALRASQSALGAYFRRMCARMDKPKAIAAAAHKLARLIYTMLTKGEEYTDRGQDYYEERYRERVLRQLSQRAHKMGMKLVVAEQVA

SEQ ID NO: 486808 - protein, 369 aa, unidentified
MADRITYVGLDVHKESIVVAVADGGLRGEVREYGRIANTPAALDRLLRKLGGDGVALRFCYEAGPCGYGIQRRLSARGHECVVVAPSLIPKRAGDRVKTDRRDAASLAKLHRAGELTAVWVPDAGHEAMRDLVRARLDAVHALRRARQQLSGFLLRHGCHYGRPAWTKLHRRWLAGLRFEQAVHHIVLEDYIAAVEAAAARRDRLTAQIEAMLPDWTLAPVVAALQTMRGMALVNAATLIAELGDLSRFANPRQLMAYLGLVPSEHSSGASIRRGGITKAGNNAARRLLIEASWTYRFPARVSRELLLRQESQPRLIRDIAWKAQLRLCARYRRLARTGKPANIVTTAIARELSAFVWAIARQVTVTAG

SEQ ID NO: 486809 - protein, 357 aa, unidentified
METAYDGRQIVGMDLHRRRSVLVRMTEDGRRLGTARITNSPAELRAQIARAGKNPKVVLEATYGWYWAADTLEAAGADVHLAHPLGVRAFTYRRVKNDERDAADLADLLRMGRLAEAWIAPREVRELREVTRYRHKLVQLRTSCKDQVHAVLAKLGIPVTCTDIFGTAGSAWLDGLGLPQPYAGKITSLRQLTGELTTEITMLSEVITDLLAADRGYQVIQQLPGIGPVLAAVITAEIGDVTRFSNPGQLCSWAGLTPRHRESDTKVTRGRVTKQGSRMLRWALVEAVQRNPADSAAGAVKNAIIARRGKEARNIAKVAAARRMLTLVYYGMRDGQIRALPRSPASLPKAQPPQRAA

SEQ ID NO: 486810 - protein, 347 aa, unidentified
MDHYAGIDVSLEDSSVCVVDADGNIVREAKVLSEPAALVGWLKGLGLSLKLAGLEAGPLSQWLYAAMKKEGLAVELLETRRVRDAFKSMPVKTDRKDARGIAQLVRLSWFRSVHCKSAAAQEVRALLTARKLVQSKLFDIEMSLRGILRGFGLKVGKTNPNRFALRVEELVAGHPTLEIVGKALLAAHEVLLREFKGFERRMRQQARADERVRLLMSAPGVGVIIGLTFVAAIDDPARFKSSKQVGPHFGLTPKKYQSGETDYTGRISKIGDASVRTALYEAANAILTKPLKGASHLKSWGMKLAKRAGMAKAKVALARKLGAILHRMWVDGTPFADKAGAPRLAAA

SEQ ID NO: 486811 - protein, 360 aa, unidentified
MTTYYIGADVHSNSTELAIEKRNKIVARYAVPTTIPAISNVLDSLQGKKHLAFEEGPMAGWLYRNLCRKVDKLVVADPRRNKLITSDGDKDDKIDATKLASLLRGGYLRTVYHSDNDQHAELKHWASLYHDRVRDAVRNINKIRARCRMHGVRIPRLVLREPAHRLKWLFEINHPVLAKQLKMLWIGYDATAKQARIAKCQLSTLGKKYDIIKLWGRLPGIGLIRATTLFAYLDTPWRFKQKNKLWKYCGVGLQRTTSGTDKKGRPKPARLKLPWAVNRTLKNAVLGAVISAINQNNNVFKDYYERMVRDGIITSNARHAVARKMLTVMWGMWKTNSQFDERLLALLPESSRPTAPVLSR

SEQ ID NO: 486812 - protein, 327 aa, unidentified
MKSIYVGIDVSKRTLDVCVKGFEKEQFFKIENKSNSIKKLFKGLSKVDSCVVIAMENTGHYNHQLYKVLPNFNFTVYVVDPKHIKRSIGLVRGKNDKVDARRIATFIERNNEDLDPWEPLSESVYSLKVLLTERKAEVARIRSLKQRIEGLNQQKSVSSVPKLITRNKKEIQRIQKRVKEIEKMIREEIAKEISLKREIDRIKTVPGIGDITAWMIAAKTHGFKRLLDPRKLACFAGVVPFEQQSGSSLKTKPRVSKMADRSLKTVLQMAAMRSVRMNNELQSYYKRKVEEGKNKMSVLNAVRNKLIHIAMALIKNKTYYQNRLELS

SEQ ID NO: 486813 - protein, 486 aa, unidentified
MAKRKESTFERLQRGQPLNRRERREVANGLNSPDPGWEIVHPHAAGIDIGNESHYVAVALGEDEHPTREFGSWTADLERMADWLQACGVQSVVMQSTGVYWMAVYDVLQRRGFDVHLVDARGTRNLPGRKSDVQECQWLLKLHTYGLLRRCFLPGEEIRRVRTVWRLRDQHVKEAGRAVQHMQKALTEMNVQVHNTISDLSGVTGQAIVRAILEGERDAARLAALRDSRIQASEPELVQSLRGNWQEDALFELRQAVEAYDFYRQQMKQCDAQLEQYLAALPSREPVAAPPTAETPEASRKRPVRRGFRKPRKAPGNQPALDLRTELQRILGVDATSIDGIEVMTVQTVVAEVGADLSAWKTERHWASWLNLAPKREVSGGRVIRHTREHRTNRVGNAFRMAAQSLIRSESYLGARFRYLRAKLGGIKAVKAMARTLACLYYRLVTRGQAWVDRGAAEFERRRQEREFAILQRKAGDFAMKLVPAV

SEQ ID NO: 486814 - protein, 397 aa, unidentified
MVNVGIDLHKTQFTVCVRKRSGSKFEKYSTTEEGYAAFLKKVTAWQRSGKEVRAGVESTGNTRYFRDRLETAGVKVTVINTLKLKVVTESVKKTDKHDAATIAEFLEKDMLPVAQICSRESEKQRRMIKARTTLVRAQVVMKNQIHGLLTAEGMEDVRGSLQSKKGRQQALDTLNKCENGLEAQTLVETIDELKRCVNGTEKHLRRLTEGDRVVELLMSIPGCGEVSAWTIRAYTDDIRRFSSAKKYAAYCGLAPWVQNSNETVHHGKITKRGPEELRTALVQVVMGMRRMKAKTSGWRLMQRYVAMKKSKGSGRAIIATARKLAIIIWHMLREDTEFEIGIMVDRKLAVKSESMSNAARLAEEAVYEKQDQPVFKKTTGKKIKKSGVASKKRKKVG

SEQ ID NO: 486815 - protein, 486 aa, unidentified
MIKSVGIDFHQGKHVARCLDEKAQLCDGFSFQTTPEGLATLEERIFQDGSNPVIVFEPAGLTWFIMAICIRARHPDCRLVRAKGQKVAALRRYLRGSSKSDRIDALTLAKMIFIDPEQLDEVYLPPAKIHALQRLSRQRKRLESDIGARKTRIGAIVESYVPGVRKAFSDPWSAQARAFLRCRLNPLAVACDGEKALHSFLVRARHRNKTDKEESHRVYLACQSAADLYQLSSRAEAVDDEFFSVFQEEIERELRLMELEEAESEAIAKRMEELYRELHPSDNLRSIPGVGRVTAPMFLATVGNPTRFHNQSAFVSWTGVVPRTRQSSDVEAKGLRMTKAGPAIMKWALFQAGDIGRRFDPQLASLYYREMVHHGKNHKQAMGAVMSHLAARVLRVLQDDRPYEMRDNEGRLVGPAEAKKLILHNYQVPENIRRERRRRNPVKHGYSKSQGMALPRINEVAIAPQPVKATIPKTSLINGGRQVNKV

SEQ ID NO: 486816 - protein, 338 aa, unidentified
MKKFSGIDLHSNNSLIVVSDEADKIVYQRRHPNDLEEILRALEPHRKELVGIVVESTYNWYWLVDGLMDAGYVVHLANTAAIKKYEGLKYSGDDADAAYLAKLLRLGLLPEGYIFPPEGRATRDLSRKRMQLVRCRTLQILSIESILARQTGSRLKSAQVQRLTAEEIEKLGFSPDVTLALQANAAVMRTLQNQILVLEERLQQRVRLSEEFALLKSVPGIGTILATTIMLEVGTVKRFVKVGNFSSYCRCVQSLRVSNGKKKGEGNSKNGNQYLAWAFVEAAHFALRHCPQAKSFYERKKQQRNAVVATKALAHKLARACYHMLRERKSFEVERCFV

SEQ ID NO: 486817 - protein, 345 aa, unidentified
MSHFVGLDVSQKMTAICVVDKDGRRVWRGQCPSVPEQISAALRRYAGDNARIGIETGAMTPWIVHELRNLGFEVVCLDARHARAALKMQINKNDQNDAEGLAQIVRTGWYRSVHVKSFDSHRARAILGARTQLVGMTTRLSNHIRGVLKTFGLLPGAMRGLPFDRKVEVLLEGRSDVAPIVRPMLVAWRQLRAQIAAFDKAIRAMVRMSGASRLLMSVPGVGLLSALAYVSTVEDPSRFARSRSVGAHLGLTPRQYQSGEIDRSGRISRCGDTLTRTLMYEAAGVILTRVKKASGLRDWAAAIARRSGPGKARVALARKLSVILHSIWRSGEPFRWSEPKHAVVA

SEQ ID NO: 486818 - protein, 423 aa, unidentified
MAGVMIGIDPHKGSHTAFVIDGREKPLGQLRVRASCKQAEALLGWAGRWRQRTWAIEGARGLGQLLAQQLLAAGERVLDVPPKLTARVRLLESGQINKTDENDARAVAIAALRARQLPQLTVEDQTIVMRVWARRYHDLGRLRTQAVCRLHTVLCELVPGGVRKQLRTSQAIAVVDSITAESPVAQAKLELAHDLVADLQRLDAQRREVKRRVSRAVAAAPTSITEVYGVGPIVAACVLGYVRDIRRFPSRDRFASYNGTAPIEVSSGDRKIYRLSRRGNRQLNHAIHIAAVSQISHRGSEGHAYYQRKRAKGMTGKCALRALKRKISDTLYERMLHDIRPRKDPGGHSGNDAVSSAAGSHPDGPALRTSHSRATANSKTATTNQRPLTSPPAPDKRRTSRSGTGVKLQPRPRPRRGRGQERA

SEQ ID NO: 486819 - protein, 337 aa, unidentified
MMYSGIDLHSNNSVVAIIDDADRVVAQKRLPNEITKIVGFLARWQGELAGVVVESTYNWYWLVDGLQDAGLHVHLANTAAIKQYDGLKHSGDETDAQHLAHLLRLGILPTGTILPREDRVVRDLARKRMQLVHCCTTQVLAVENIMARQLGGRMTSNQIKRLTGDAIDNMPLAADVSLAIKANIAVMATLQSQIEILEKRLQERVKPRPQYGLLTSVPGIGQALATVILLETGPIDRFADVGNFASYARCVDSVHTSNRKKKGEGNVKNGNKYLAWAFVEAANFARRFCPEAKRFHERKKARSNNIVATKALAHKLARACYHILKEGKPFDATRCFA

SEQ ID NO: 486820 - protein, 391 aa, unidentified
MYIVGIDIAKRKHEAAVIDGEGTVIIKPFSFTNNCSGYNRLLAMLTKAKLPLDEVSFAMEATGHYWLALFTRLQKEGFRVQVINPVQTNSIRSFYIRQAKTDPRDALLIAEVIRFGHFSESTLHLENIYELRELCRGRHAIVSMQADVKRKVVALLDQVFPEYETAFTNLFGDTSMAILQTCPTPKELSEMPFEELCHLIEVSSHKRFRMAKAQELQALARNSFGFAMAGDVFSTMIRLYAKHLDFLKQQVREMDRKIAEIMETLDTPITTITGIGPTLGAYILSEIGDISRFSSAAKLAAYAGIDPTMRQSGEYNGVRNRMSKRGSPYLRHAIWLAASSAVLHDPALKLYFQKKRDEGKPYMASVGHACRKMVSIIYAVMRDNKAYCLCA

SEQ ID NO: 486821 - protein, 374 aa, unidentified
MVDYSEVFVGLDTSKLRNAVAIAEGGRSGEVRYLGEIENTEAATSKLVKKLAAQHRRLTFCYEAGPTGYGVYRLIKALGHECMVVAPSLIPKKPGDRVKTNRRDALNLAKLLRAGELTAVWVPDARHEAMRDLVRAREAAVDDLKSKRQQVLSLLLRLGRHYLGKRTWTRAHMTWLVSQKLAHREQRIAFEEMLLAVRQAEERVIRLEQAIVAAVPDWSLSKVVTALMALRGLDLVSAAIFLAEIGDLSRFASPRELMAYLGLVPGERSTGETVWRGGITKAGNHRARRILVECSWSYRHPPRVGKKKLAKVEAAPHAVREIAWKAQARLTARYRALARRGKRPTLVVTAIARELSGFIWAVNRAVGAPATPAM

SEQ ID NO: 486822 - protein, 411 aa, unidentified
MEAAVITAVGIDVSKSKSTVAVRRPGGEIALRPFEVHHTNSDLKKLASTLKKLGGDIRIVMEHTSTYWRPIALTLKEAGFFVSVVNAMLIHDFSDNTIRKLKTDRADALKIANYALTFWDTLPPFNNEEETRLLLKMQSRANERITATATALRNGLIALADQTFPGVNIAFDPNTKNANGHEKWVDFFLRYWHKDCVCQYSMEAFTESYRGWCKRKNYKFRTDTAHKIYLLAQEGVATLPKCESTKMLITQACKSLNAVCEAKQSTQLEMQRLAAMLPEYEVVMQMEGAGPITGPALMAEIGDVRRFKNKKALVAFAGIDAPPFQSGAFESKSRHVSKRGSPHLRRTIFIVSNIILTRSNPENAVYCFMDKKRSEGKHYYVYTVAGSAKFLRVYYARVTEFLRSQPSPDAC

SEQ ID NO: 486823 - protein, 347 aa, unidentified
MVIVDSARQIVGGVDTHRDSNVAAVVDMNGGLLGIESFPTTAEGHRSLSLWMTGFGTIERVGIEGTGAYGAGVARHLQRCGVVVIEVDRPERQKRRKQGKSDRIDAVEAARGALSGRCDGQAKTGDAHAEALRALLVAKRSARSTRIRTIVQLRHLMFTAPDELRARLGSLSTTQLVNEAARLRPRPGGDVALHGVKTAAVILARRVHALDAELAAIDEQITPLVKAAAPELLNVYGVGADTAAVLLVTAGDNVERITTEAKWAMLCGIAPIPATSGLTVNQFRLNHAGDRHANNAIWRIVITRLGQHEPRTIAYMQRRLDEGKSKRYIIRCLKRYVAREVFRALPR

SEQ ID NO: 486824 - protein, 350 aa, unidentified
MQGNGRWIGLDLSKKTYEMCYFDQKGKVGRSGGETTKGGRAKLYAKLKSEDIVAMEANSLAFVMEKEMRAIGCTVVILNASQLSVIYSSTKKTDKEDAVKLARLVKIYGKEDLPIVDAPTDKEWYRRKLIKEYKTLKADRTREINRLHALFVQCGITTIKRSNMQTDVNRQEVLPQLFGYEAEQAKRLCERLTMLEAQIEELEQLIKKECKEDKDIQRLQTIPGVGDKTALAFAAYVGDGKRFNNGNEVANYVGLVPRVDCSGTINKYRHITKKGNKVVRALLYQAAWAIVRSKHGGALKAKYCYMTEHGKGKKISITAIARKMAKLLYLVMKNKQMVYQELPFPDLQAG

SEQ ID NO: 486825 - protein, 323 aa, unidentified
MTIMTYIGIDVSKDSFVAACPTKSGYTTKSFPNTTSGVRKFISSLPKESHCVMEATGNYSMLLLYLLQQANITVSMENPQKIKHFARAMLSTTKTDEIDAKLIALYGEKMNPAPYKIPSESIILLKQKRTVLRQLKKQLTATLNLQHALSALPKQDPTSKVTVEKTISFLRKQISKMEEEITNLSNKEFNRQMTLLTSIKGISNTIASALITATGGFTYFSSAKQISRFLGLCPTYQQSGTSINVKGHINRNGDTYLRSQLYIAACASLRCNTACRETYERLRAKGKSGKGAIIAIANKLIRQAFAVVTNNRPYIDGYVSTFA

SEQ ID NO: 486826 - protein, 450 aa, unidentified
MMREAQEIEDEEHEQILERVCAIDVAKASGKVCTRVPHPSRPGARRTRVWDVDATTNAILELGEHLAGEGIEKVTLESTSDYWRIWFYLLEAGGLDVQLVNARDIKNAPGRPKTDKLDSVWQAKLTERGMLRPSFVPPAEIRRLRDYTRLRTDLTRERTRYWQRLEKLLEDSLIKVSAVASSLGTLSVRDMLEALIAGERDPKTLAGLARGRMKAKHAALIEALTGKFDDHHAELARMLLDQIDALNAQIGKLTTRIEELIEAIPAAQGIDADGTTGPSAGTGAGAPVLPAIDRLDEITGIGRDGAQEIIAEIGLDMSRFPTASHLVSWAKLSPRTIQSGASSRSGRTGKGNPYLKGVLGEAAAAAARTDTFLGERYRRIVKRRGKLKALVAVARSILVIIWQLLTNPAARYADLGADHHASRIDRGKKVRNHVRQLEALGYTVALTEAA

SEQ ID NO: 486827 - protein, 336 aa, unidentified
MNTTAWLGIDIAKDTFEACLLLETRSAHGAFDNNPAGFTKLDHWLKKRKVAQVHACLEATGRYSEGVAEHLHAAGHTVSVINPARLKAFGQATLVRTKTDQTDAVLLAEFCRRQQPASWTPPDPATRGLRALVRRRESLLGVRQQEANRLSSGEDDPWVVTSLETVLTCLDEQLAQVEQAITDQVARDANLQRQVELVDSITGIGWTTATALLAEIDFGAYPSARQVAAQAGLTPRQRQSGTSVHGKPRISKQGASQLRQILYFPAISAMHHNPLVRAFAERLAKAGKAKMAIVCACMRKLLHLVYGVLKTGLPFDPNYKSTPAQPAKPVQLLQPA

SEQ ID NO: 486828 - protein, 387 aa, unidentified
MQSVTSATAVATTARANNITLFASLELSKSKWVVTINSPGSEKFSKHVVEGGDGACLLDLLSRSRAKAEQRYGVQVKAIVIQEAGLDGFWIHRLLLANGIESHVVDAASIAVDRRHRRAKTDAIDGETLLRTLMAWARGERRVCSMVRAPSPEDEDRRRLTRERGTLLKERIQHTNRVRGLLSGQGIGDYNPLRRDRFERLEALRTGDGRELPPMLKAEIRRELDRIALVTTQLAAVERARDALIRTDAEERNNPAALLLKLKGLGPEFASLLWLESLFRSFGNRRQVAAYSGLAPSPWQSGGVERDQGISKSGNRRLRKTMIELAWFWLRHQPDSALSRWFQARVGAAKGRIRRIAIVALARKLLVALWRYVTQGVVPEGAVFKAA

SEQ ID NO: 486829 - protein, 358 aa, unidentified
MKHNNTNTQKSSSTKTAAKAKIIKLGIDVHADSFSVVRQIDNDTPPPAQKFTPEGFVKWVAKQLPAAEKVHRCYEAGPFGYSLHRQLLRMGVQNVVVRPQNWDELGRKVKTDRIDALALVQRLDRYVQGNRHALAVIAVPTPEQEQARGLGRHRQQLVQERQTHEAQGRSFLLYHGRRVQGQWWQPFAWEVLQQELEPWQCRILENFRAQILLADQQLAQVEKQVVAEAVSPAKGFGALTCQLLGREVLDWKRFANRRQVASLTGMCPSVHASGGHSWQGSITKHGNPRIRRLLVELAWRVVRFQPNYPPVQKWRPQLDSKRARGGRKKAAVAIGRHLAIDLWRMETGRSTAAQLHLT

SEQ ID NO: 486830 - protein, 344 aa, unidentified
MTYFAGLDVSLRSTNICVVDNQGELIAEGKTDADVAGIVAFLDELDVEITEVGLEAGTLTQYLTYGLQFAGYEVICMEARQVKSALSAMRNKTDKHDARGIAQLLRSGWYSRVHVKSMESHRVRALLTSRRAVLAKCIDLEQEIRGIFKVYGIKLPPRLGHGAFDPKVRPLIEADEVLSLSLLPVLDARLVLYRTFRELDNRTRKLAHSDPICKRFMTAPGVGFVTALTFKAGVDDPARFKHSRTVAAHFGLTPRRFQSGELDLEGHISRCGDASVRSTLYTAANAMLTRSSKWSSLKAWGMKLAKTRGHRRAVIAVARKLAVILHRMWIDDTQFRWGTEAARS

SEQ ID NO: 486831 - protein, 367 aa, unidentified
MKQSSKIFVGMDVHKDSIDVTLAEQGGEVRRFGEVGGDRTALLKAVRKLTSRGGELVFVYEAGPCGFWIQREITALGYACWVVPPSLIPQRPGNHVKTDRRDSENLARLARAGELTCVHVPDVRDEAVRDLVRARDDTVIAQRRARQQLKALLLRNDIRYVGKTSWTSAHLRWLSELKLPQPAQQIAFQEYVDAITVATARIERFEQALRDEALTWRFAPAVAALQAMRGIQFVHAMTLVAELGDLTRFASPRQLMAYLGLVPSENSSGQRRRQGSITKAGNTYARRVLVEAAWAYRHPARLTRIIALRQDALPKQVCDIAWKAQLRLCAKYRRLRARRVLETKIIVALARELSGFVWAIGQHVKPQ

SEQ ID NO: 486832 - protein, 411 aa, unidentified
MRLFVGDDWAEDHHDVELMDAAGRVLARRRLPEGVAGMARLHELTGQQLGEDAEDAEVVIGIETDRGPWVAALVAAGYTVYAVNPLQASRYRERHGVSGAKSDGADAHMLADMVRTDSHQLRAVAGGSADAEGIKVLARTHKTLIWERNRQVQRLRHQLREYFPAALAAFEDLDAGDTLELLGKAPDPARARKLTRAQVSAALKRARRRNITDKATAILAALRGEHLGQPAAVTAAYAVTVRSLIAVIAALNEQVKILQGQVEADFGRHPDAEIYRSQPGLGAVLGARVLGEFGDDPHRYADGKARRNYAATSPITRASGKKKVVAARFIHNDRLVDALNAQAFAALNASPGARAFYDELRARGIEHNDALRRLANRLVGILHGCLKTRTLYDEATAWSHRENLPQSSVAA

SEQ ID NO: 486833 - protein, 313 aa, unidentified
MNDRCVGIDVSKARLDVAVAEGEPFSVSNDLSGHVQLCERLGAIGPRLIVMEATGGWERAVAAQLTAQALPLRVVNPRQVRHFAQAAGILAKTDRLDAAVLVRFAQAMQLEPRALPSEQVQALQALIARRSELTEMLTMERNRLRLAHKSVRTHLKKSIRWLEGQLYDTDHDIDGMLRECGVWRDKVELLESVPGIARVTSLRLVMTLPELGTLTGRQMSALAGVAPFNQDSGQWRGKRRISGGRAAARTALYMAALVGSRHNPVLRAFYQRLRAAGKPAKVALTACMRKLLTIINSMLRDGRRWSPTLANVA

SEQ ID NO: 486834 - protein, 356 aa, unidentified
MTVYIGVDFHPYEQSIAYADEVDGEVRYKRFVHSDKQSIRAFYRKCGEDAVVGVEATGCLWWFEKLLMEVGIKLRVGDPRMIRRVALSRHKNDFRDAETILDLLMRGDFPAIVPRSEQSREVLDLLNYRQSLVRKRTSIANQIHAFARSKGMAKFRLPAVKARRKLIDAPGTDTEQLLLSSRLLMYDELTRQITSVEAKLEEEANKDERLTLLRTYPGIGPLTSLALVHTLGDVRRFRRKEEVVAFVGLDPLEKSSGEKKRMGQISKRGSRLVRHLLGQAAQSCRDHRIRKFYLEVSRRRGRPKAKVAAARKLLINCYVMLRDEIGYEEFQRRGEVGLCEGSGEVKSVKTLQSLEA

SEQ ID NO: 486835 - protein, 370 aa, unidentified
MKKDSKKNQSPKRATASKEGPRTIGMDLGDKTSRYCVLAGNGERWAESSVSTTKKAMAEKFQKMPRCRIAIEVGTHSPWVSRLLANLGFEVIVANARQVQLISASSRKNDRVDAHMLARLARVDPELLRPIRHRSEQGQADLMKIRVRAALVESRTGLINTARGMTKALGERLPACDADAMGVDQMASLPQPMQETLRPLLEQVESLTEKIQELDTSLEQIARTQYPETQLLEQISGVGTWIALTFVLTLEDRERFAKSRDVGCYVGLRPKQKESGQSQPQLRISKEGDVYLRQMLVQGAHCILRRKGPDTDLKRWGLKLAGRGGKNAKKRAVVAVARKLAVLLHRLWVSGEVYEPLRNSQAAPPARKAA

SEQ ID NO: 486836 - protein, 343 aa, unidentified
MKKLEPDPAALLRLLERWRAEAIKTGRTIGRIALAYEAGRDGFWLARWLQARGIEVHVIHSTSVAVSREHRRAKTDRLDTAMRMRVFLGWLRGERGHCGMVAIPTLPDEDAKRPSRERESLVGERTRIVNRMKSALARLGIRGFKPGLRKAPKRLEALRTPEDSAIPPNMLDEIRRDMARLAVVRAQIDEIEQARLERLEQAPEVGPHAMVRLLARIVGVGVETADMLVQEVLSRNLRDRRAVARYAGLTGSPDESGSKRREKGLAKTGNARVRRGLIQLAWRFLMFQKNTALAQWYRARTEGAKGARKTTMIVALARKLLIALWRMVTTGILPEGIVLRPAA

SEQ ID NO: 486837 - protein, 339 aa, unidentified
MKVSTLGIDLAKNVFQLHGVGCNGQTVLKKKLTRDKFLPFLMQLEPCLIGMEACASSHHFARVLRQYGHEVKLIPPQYVKPYVKTNKTDAADAEAICEAVARPNMRFVQIKTAEQQAILVLHTERNILIRERTACANSMRAILAEFGIIMPRTLSQLYKKIPEILEEYDNELSPFVRCSVARQLEHLQGVEDQITLIEQELSRWAKTQPSCQRVMKVPGVGLMTATYLVASVGNGQQFHSAKQFAAWLGLVPREFSSGGKQRLGRISKRGDRYFRYLLVHGARAVAAVIERHKDNMPWLYRLLNKKAYNVAVVAQANKTARILWSMLVQHTEYRTLSAV

SEQ ID NO: 486838 - protein, 416 aa, unidentified
MNAVGIDVSSRKSTVAVLRPLGEVVCLPFDVTHDIAGLASLVEKLKALDGETRVVMEHTGRYYEAVAKALHEAGFFVCAVNPLLIKEYGANSLRRVKTDKADAVKIARYALDNWADLRDFTPMDAIRYDLKTLNRQFQLASKQRTASANNLIALLEQSFPGIRKCFDSPVRSDGTQKWVDFAHSFWHVDCVRKQPFAAFCERYRKWCKRHAYLFKLSNAEEVYALAKRAVVLTPKSKVVKVLVQEAANQLSSISRSVEVYRAEMDRLAAMLPEYPVVMAMYGVGKSYGPQLMAEIGDVRRFERKQALVAFAGIDPMPNQSGDKNVRSNKSSKRGSPYLRKTLFNVIRTYLQCAPQDEPVFQFLNRKRAEGKPFYVYMLAAANKFLRRYYAKLRDYFASLDTLQPVAPIPTILKATL

SEQ ID NO: 486839 - protein, 379 aa, unidentified
MDSMTGSALGIVVGVDAHVDTHDAAVLDACGRLLGTRTFPADASGYRGLLSWVQRFGSIVALGVESTGSYAAGLVRHLRAHGLEVLEVNQPHPHARRRRGRSDPIDAELAARHVLAASSVAIAKDTSGIVEAIRQLRVARDGAVKARSAALNALTGLIVTAPEELRRQLLVRKTPRARATLCARFRPDQARLHEPVHAAKAALRSLARRVVELDAEIATLGRQLKQLVATAAPATTSRIAVSTGHAGTLLVTAGQNIERLKSEASFAALCGASPIPVSSGRTDRHRLNYGGDRDANRALHMIAVCRLRYCERTRAYAERRTAEGKTKAEIIRCLKRYIAREIYHALVADLLPPPSSSRHRDPIVSITRGAEPIGRVTST

SEQ ID NO: 486840 - protein, 341 aa, unidentified
MKNLFIGIDFSKEKLDVAVITAVGLSETAQRECYEFKNSGSGFRQLVKWVERNSNGISTSSWLFCGENTGDYSKPLCNFLYGKGYDIWLENAKSIKDASGIRRLKSDRADALMIAEYAMRNYDKAFMYEPLSASLSQLRELFLYRQMVIRHRCSFQVRRGEKRLAMEKSPVKTIISQSGRHIVSELNKEIEKIDKRIAELIDSEEELKEIYHIVTSVPGIGCQNAVCLMVYTDNFRRFNYDARKIACYYGIAPFGKNSGASVHTDPHVHYLANRQIKAMLTQAALAAINHNPVLSQYYLRLVERGKKKQVAMNNVKNKLIHLVTAMVRNRQVFSPEYKISA

SEQ ID NO: 486841 - protein, 338 aa, unidentified
MQITTIGLDIAKNVFQVHGIDAAEKVVVRKQLRRGQVMKFFEALSPCLIGMEACATAHYWGRELTKLGHQVRLMPAKDVKAYVKRNKNDAADAEAICSRPTMRFVEVKSAEQQGRLMPHRTRDLLLRQRTQATNALRSHMAELGIVAAQGREGLKKLLAVITDGKDERVPVDARASLIVLAAQLQALQTLIGSIERRIVAQHRASEESQRVATVPGIGTVGASAITATVTDPSAFRSGRDFAAWIGLVPRQDSTGGKQKLGPISKQGDRYLRRLLVLGAHAVLRRAKQSPQKYPWLAQLLARRPFKVVAIALANKMARVAWALLAKGGAYRAPVLAAA

SEQ ID NO: 486842 - protein, 391 aa, unidentified
MIYVGIDVAKDKHDCFITNSDGEVLFKSFTIANNREGFETLFQRIQSVSDDLTKVKVGLEATGHYSYNLLGFLLDNGLPTFVINPLHTNLYRKSLSLRKTKTDKVDSHTIASMIMSDVNLKSYSDTSYHNEELKSLTRYRFDKVKERAKLKSSVSRLVCILFPELEKLVPQLHIASVYALLSEFPSAHAVASAHLTRLTHLLSESSKGRYGKDMAIIFREAARNSIGSNMPAKSLELKHTIKLIRELTSEIDEIETEIKSIMDEINSPILTIPGISYRMGAMIIAEIGDFNRFNSADKILAYAGMSPSTYQSGQLDNCYSHMEKRGSRYLRYALYNATKYVCHWDPTFAEYLAKKRAEGKHYNVAISHAVKKLVRVIYAMEKSGQVYNKAS

SEQ ID NO: 486843 - protein, 284 aa, unidentified
MSAAIFVGMDISQACVDVAVHPGTAFQISHDERGIAEAVERLYAVQPTLIVLEATGGLEVPLAGALAAAALPVVVVNPRQVRDFARATGQLAKTDRLDAQILARFAEAIRPPVRPVPDEQTQALAALVARRRQLIEMLTAEKNRLRLAARPIQQRVQAHITWLEKELAATNTDLTATMCESPVWREKDEVLRSVPGVGPVLTTTLFANLPELSTLTRKEVAALAGVAPFPRDSGTLKGRHAIGGGRAHVRAALYMAALVATRRNPVIRTFYHQLCQTGKAKKWR

SEQ ID NO: 486844 - protein, 373 aa, unidentified
MKYTTVYVGMDVHKESFTLACYTNEKEEAEYVQRTEAHYSKVISYLEAMRFHYGDDVTFICGYEAGCLGFTLYHQLTNHHVRCVILAPTSMPVQQGKKKVKTDKRDARKIAKCLAHHDYSAVHVPTAKDEETKEYLRMRDDHKLALKKIKQQILAFCLRHNYRYPGGNRYWTQAHLKWLRELKPGGMYQEILEEYLLTYNNLVDKLERLDRRIEKLAADKEYAESVHKLSCFLGIKTQSALSVITETGDFKRFGSAQQYASYLGLVPGEDSSGDDQNRLKITKAGNRHLRMLLVEAAHSYGRGQIGHKSKELKKRQEGNLPEVIAYADKANERLRRRYYRMVLSQNKRSNVAKVAVARELACFIWGMMTGNVA

SEQ ID NO: 486845 - protein, 409 aa, unidentified
MLKMVYPNCCGIDVHKTFIVAVIAITDNYGITSYHRKRFSTFTNGLLQLQDWLEYYSCFDVCMESTGKYWIPVFNILEEHVNICLAHPKYVKAIRGKKTDKKDAQWIADLFKHDLVASSFIPPLKIRQLRDLFRYRMKLTQLQVSEKNRYQNCLTWSNLQIASVVSDVFGKSAQAIIKSILDNPEEKPNIEQLVHKRMKNKVQDLEIATEGELTPEQAEKIRVIKAHYDALAICKEDLEQMICELGQEYQEQVKLIQTVPGCKEELSALRIISEIGADMTLFDSAGKLCSWAGLVPANNESAGKKYSTRISKGGRYLKPFLVQIANAVVKSDKHPEFKNKYLKLKKRRGHRKAIIAICRRLLVAIYQVLLKQENYNPVLQGLTEIRNPDKTMSVKDAIRFAQQHGFNVS

SEQ ID NO: 486846 - protein, 346 aa, unidentified
MKKIFIGIDFSKEKFDATVIKAEGVEERAERQHEVFDNKVSGFRRLLRWVKSVADEQDTGLWLFCGENTGGYSKALCNYLYGSGYDMWLENALSIKRSSALQRTKSDKADAGIIAEYAMRNYDQMRLYKPLSKNLERLREVFLYRHNLVKLKASMMVRKGEKKLTQDKSDISRFMSMSSKHLISEFNKKIAECDKRIEDIICEDEELLRNFEIITSVPGMGRQNAVCLMVYTDNFGRFDFDSRKIACYYGVAPFGRQSGTSVNTPPHVSPFANKLIKALLTQAALASINFCAQMAVYYHRLIEAGKKKPVAINNVKNKLLHVITAMVRKGEKYDLDYDYHAAINAA

SEQ ID NO: 486847 - protein, 338 aa, unidentified
MEVSAVPRWFGIDVSKATFDVALARWGARWAPHRKFPRSRQGCQECLSWMEEHLTPEVSPCIVMEATGGYSKEMAGWFLSLKGDLRISIAQPFRVHYFAKGLGHPNKTDAQDATMLARFGEVHSPPPYKPMSPAYEQLRALTRERSAFIKAARALDNRNEIPSESELAQEIRERLLVSHVEAMAELDQAIAAVIAEDPELARDAERIQTIPGVGPVVASTLMGELGDLREFAHPKALAAFAGLAPAWRESGSSVHAQAHMTKHGSGHVRRVLYLAAMAATRGDNSLARSYQHLLQEGKPPMVALVASMRKILVLCRAVLVSEQDYDPSHVKPTHPVEI

SEQ ID NO: 486848 - protein, 363 aa, unidentified
MKIMVGIDLHSNNALCGLMDENGRRLLHKKLPCDLGAILELLEPYRKQIATIGIESTFNWYWLVDGLQDHGYHVVLANPAAMQPYSGKKHTDDVSDAYFIAELLRLNLLPTGHITDRKIRPVRDLLRRRMLFVRQRTTLILSFKSLNERTLGQRVPLTRVKTMTAAEAAARFTAPADQLLGGEQITLMSHLSDSITKLEQHILSVVGEWTSYQRLQELPGIGKILGLTIALETGDAQRFADAGNFASYCRCVKSLRQSNSKKKGENNRKCGNKYLAWAFVEAAHFACRHDEQCRRFYDRKQQQTNPVIATKALACKLAKAAWHVMAEDVPYDATRVFGPGKKENLGETGREPGNGSGPQSQQN

SEQ ID NO: 486849 - protein, 344 aa, unidentified
MKEVTTIGVDLAKNVFQVHGVDAEGEVVIQRQLRRAQMLPFFKKQPSCLVGMEACATAHHWARQLIELGHEVKLMPPHYVKPYVKRNKSDAADAAAICEAVRRPTMRFVSVKSAEQQGVLVLHRSRELLVRQRTMLINAIRAHMAEFGIVAPTGVPQVKKLLAVIADQSDKRLPSLARTNLESLVRQFVSLHHEIHAAEKRINAWHRSNEVSRRLETIPGIGPLVASALVASISDPGVFKNGRELAAWIGLVPRQHSTGGKQRLGKISKQGDQYLRWLLVVGAMTVVLHAKRRGTTNMPWLAAIIDRKPTKVVAVALANRNARIVWALLHNGGTYQKPIPAEAV

SEQ ID NO: 486850 - protein, 354 aa, unidentified
MSKILAIDLGKFKSVTCLLETETNETKFWTMATDRQYLETVLRHYDPTLVVIEACALAGWVHDVCTSKGYRVLVCNPAQEPWKWKHLKRKTDRDDALKIAKLAALDQLVPVYIPGREQREFRALVNYRKVVLGRRNRVQNHLRAIFDQRGMAMTRGLKAWTLGRREELIRPSKPLADCGRDELWRGELDLELAELTRLDAQLAQLNKKLTELGREDKRVRLLRTIPGLGPRTAEVVVAYLDQPQRFKNARQVSSYAGLVPRRYQSGQMDRQGRIHKRGPRLLRSALVEVAWIMLRRNSWARAQYERLCGGQKTRRKKAIVAVARKLLVRCWVMLLRKEPWKEMTPLAEPVGARA

SEQ ID NO: 486851 - protein, 370 aa, unidentified
MSVDRYTYRKEHPSSMNHAKYIGMDVHKETISIAVMDSAGKLVMESIIETKAGTILQFIQGLRGSLYVTFEEGTWAAWLYDLHKPHVTQVVACNPRKNALLKDGNKGDRIDARKLAELLRGNHLKPVYHGETGVRTLKELCRSYLTISKDLMRVMSRLKALYRSWGIACSGTGVYTPRYRSEWLNKIAEAGVRRRAELFYQQLDALQVLRREARRDLLAESGKHGATKLLRQIPSIGGIGAALLVALLQTPYRFRSKRQLWAYSGLALETHGSAEYCYWEGQLRRSKKQVTVHGLNDNHNHDIKNVFKSAATQASICAGPLHDFYESLLAKGMRPEMARLTLARKIATITLMLWKKGACFDAERVKAQAA

SEQ ID NO: 486852 - protein, 369 aa, unidentified
MEPCSTVVGLDVHKKTIVTAVLPPGSERAVEQQTLENCPQAIERLVTRMAAKGPAVFVYEAGPCGYEVHRQITRLGHRCVVIAPSLTPRRPGDRVKTDRRDAEKLARLYRAGELTTIRVPTRAEEAARDLVRVREDALADRLRVRHRLSKFLLRQGRVAHETKAWGVAHRAWLRAQRFEWPSLQQTYAAYGRAVEDAEAQLQTLDQQVAELAHQEPYRTPVQYLRCLKGIDTLSALTLVVETQAFPRFAQARAFMGYAGLGVSEASSGETIRRGSITKAGNAHLRRILVEAAWSARHPSSLSRAVAERRQGCPPAVVRIAKRAQERLHRKFWRLLHRGKLPQVAVVAVARELAGFVWAIAQQFPEPTPA

SEQ ID NO: 486853 - protein, 388 aa, unidentified
MEVQTVDALPPVAVDHDPVRCLLAIELSKKSWIVAITTALSDKISRYTLDGCDWKGLLELMERVRTRVAREVGRPVEMISCYEAGYDGFWLHRLLECQGVRSHVIDPASVQVDRRARRAKTDHIDAKRLLRSLMAYLRGEPKVWSVLRVPSVAEEDDRRLHRERDRLIAERGQHVNRIKGLCAIHGIYDYEPMRRDRMLRLEQLHTGDGRELPPRLKAEIARELQRLELILGMLKEIEAERDAIALTENVSAHTNAKKIQNLVKLKAIGAEIATVLTGEVFYRPFNNRHQVASYVGLTPSPFQSGPKCRDQGISKAGNPKARSTMIELAWLWLRHQPDSPLSIWFQERVGTLKGRIRRITIVAVARKLLIALWRYLETGMVPTGAVLN

SEQ ID NO: 486854 - protein, 368 aa, unidentified
MKNYKLKAAPTAISKEENNQKGPKAKRIVIGVDVHLKSYEAARKIDNDSVGVVQRLRSKEEFLLYVEKQREQAEQVVVLYESGPLGYTLYWDLKARGIECLVCAPQSKEQKRKRRKNNAIDARTLSSNLFNYLNGNEHALQRVRVPTKAQEQARIESRQHDALVEERKRIAAMGNSLLLSQDYGSWRNWWRPKSFERLSQLVAPWVLKQLQRWVKILGELDQQIQQAKVELTQQYQGPRPKGMGAPSLAQLNAEVLDWNLYSSGRKIGCLAGMVPSEWSTGEGQRLGAITKVGVPAIRRIITEMVWRMILFQPEYKAVQKWREVLEGSNRGLKKKAVVAIGRRLIVDIWRLQTGRISAQELGLIMIEA

SEQ ID NO: 486855 - protein, 411 aa, unidentified
MITINTLYVGIDVSSKSNVVYLMLPNGDKHSNFSVANSHEGSTQLVKRILSALTSHSLDTVLIGLEATSVYGDNLVYFLREDATLAPFNRKIHVINPKQVKKFHDAYNDLPKNDYVDSFVIADCLRFGRINKEVYLGDYRYKALQNLTRARFFAVQNLVKEKQRFMNVLFKKYSTMTQEKVFSDTFSTTALAVYDEFESAEALANMDLHELTDFIIEKGKNRFPDPDAVAKAIQKAARSSYRLPKTVNDSVNQVLSISITSMKALESQIKEFDKAIKAQMELLPNVLISIPGIGPVYSAGIMAEIGDINRFNSQAALAKYAGLAWKQHQSGGFESEVTRLIPSGNRFLKYYLCEAAFSLVRCDKEYSDFYHLKYKEVNRCQHKRALALTARKFVRLVFRLLKDNRLHCPAK

SEQ ID NO: 486856 - protein, 312 aa, unidentified
MTQETLVVGIDVSKAMLDVVILPLGEVLRVDNAASGWRRLIGRLRRETVAVVAFEATGGYERGLLKALNKARLPAARVNPNRVREFAKACGVLAKNDRLDALMIARFAQTLPPRLTRPDPAVEALAELVTARRQISEDLTRTANQADHAASATLKRLFRRRLRALETDLKLIDLEIAKVVAKDPGLARKNALLQTAPGVGPVTSPTLLALLPELGQVAGRPIASLVGVAPFDHDSGTLKGQRCIWGGRQPVRNTLYMAALGAIRTKGSCFQVFYQKLIKAGKKPKVAIVAVMRKLATTLNAMLKYDQPWRPA

SEQ ID NO: 486857 - protein, 411 aa, unidentified
MHNRQNYLYVGVDLHKEHHTAVIINCWQEKLGEIQFENKPSAFSKFLLEVETYVSAGVSVVFGLEDVGGYGRALAKYLVDHEQVVKEVNPALSFLERKSHVTTQKSDSWDAECVARILINKLNQLPDAKPNDLFWSIQQLVSRRNALVKAQSALKNQLHIQLNHHYPSYKKFFSELDGKTALAFWQQYPSPSCLEGANIKQLTAFLLDVSNNTCSVKKASDILKLVKEDGQTMKEYQETRDFLVRSIVRDIEFKKKEMKYIERELKQLVKLLDYQLETMPGIELVTASALIAEIGDVRRFPNANKLARFAGIAPVYFGSGGKGKTHKSKQGNRALHALFYNLAVQQVQVAKGSKLPRNPVFHAYYQKKLKEGKTKGQALVCIMRRLVNIVYGMMKYKTAYELPIVEEKEVV

SEQ ID NO: 486858 - protein, 423 aa, unidentified
MEGLSHLQFTAYVGIDWADTKHDICLQAAGDTEHRFDCIPHQAARIDEWAKALHQRYGGPIAVALELAKGPMVAALQKYDFFVLFPINPSTLAKYRVAFKPSRAKDDPTDAELALDLLFRHPERFTPLKPQSAAMRSLLSLIEQRRQLVNDKTRFTNRLCNTLKQYYPQALDWFEQTDTVLFCDFLNRWPTLMAVKRARKTTLEAFFHAHNGRRTKLIKARLESIRVATPLTEDPGIVAPCRLHVLALVEQLRTTLTAINLFDEEIAAVASTLPDYALFQSLPGAGPHLAPRLLAAFGEQRDRFQGAHELQKYAGIAPVTERSGKKSWVHWRWQCPTFLRQTFVEWAGQTINKSFWAGAYYRQQRAKGSSYQAAVRALAFKWIRILYRCWQTRTPYDESTYLNALRERGSSLLQNLDLQVQNA

SEQ ID NO: 486859 - protein, 365 aa, unidentified
MAFKILRKNCCGLDIHKTWIFACIGITDSNGRTEYKQARFSSFSNGLRDLADWLAKYSCSDVCMESTGKYWIPVFNILEKTCWVTLAHPKYTKPQKGNKTDRKDAKWICDLYMCGMVKPSFIPPPDIRQLRDLMRYRVKLTNMLTGEKNRAQNCLTVSNLKLDDVFSDVFGKSSRSIIQYILEHPGEQFDVTPFIHRRCKHPVEEIQAAVDGVVSREQAAKLKECLLHIDQLNAHRERIEAEILRLAEPYPYQLELIRTVPGFAAAPLTAVALISEIGVDMSVFPSAKHLASWAGCCPRNDQSNKKVKSTRKPPAQPPGKSRCIKSGWLWRDRGRTWHIRISPLDGKSKCPPITIQIKRRTVLRN

SEQ ID NO: 486860 - protein, 354 aa, unidentified
MSQKLNTAIAVIGIDIGKNSFHVVGLDQRGAIVLRQKWSRGQVATRLANIPPCLIGMEACVGAHHLSRRLRMLGHDARLMPAKYVRPYSKGQKNDFRDAEAIAEAVQRPTMKFVATKTPEQLDLQALHRVRERLVSQRTGIINQIRAFLLERGIAVRQGLRFLRAELPQILGMRTDVLSARMMRVIEELAGDWRRLDERIEGLSTEIEALARQDTACQRLMTVPGIGPIISSAMVAAIGNGAVFSKGRDFGAWLGLVPRQISTGDRTILGKISRRGNRYLRVLFVQAAWVVLIRPKTWERHGLKPWIEAAKKRLHHNVLAIALANKLARIAWAVLNKERDFECVRTDETASRPA

SEQ ID NO: 486861 - protein, 365 aa, unidentified
METIYIGVDFHARQQTICYLKTETGELVTCELKHLDKHAVRAFYAQFHGRVIVGLEASGYSPWFERLLEELGCEVWLGHATEIRRRARWRQKNDRRDAELILDLMLHDEFPRLHRPAVQSREVLRMLRYRQKLIKIRTMSKNSLQALALQSGLAKGSRLFTQAGQQELSAAVMSPVMHWQLEHWLQLMEPLNQQLLETMGWFKEQSKGDVCIKRLRTHPGIGLLTSLCIVHTLQPVSRFRNTRKVAAYAGFDPIERSSAERKCFLGISKAGSRVLRFLLVEAAHTAIRKDEDLKRFYKRLAERRGRPKAKVAAARKLLIRAFIMLRDEIDYAEFRRRAVAARLARGGHRPNVPEVLIGQPASPAQ

SEQ ID NO: 486862 - protein, 371 aa, unidentified
MDESTKMLFVGLDVHKDTIAVAYAPDDRGADVVSLGIIGTRQCDIDKLIRRLESKGATLVFVYEAGPCGYWLYRYLTRRGFGCSVVAPSLIPRKAGDRVKTDRRDAVTLARLRRSGDLTSIYVPSVDDEAIRDVSRGREDTMRDLKRAKVRLKAFLLRQDLRYEGRANWNAAHLRWLSRVVCPTPAQQIVFQEYVRAVTEQTERLQRLESELHELVKGWRLYPVVEAIQALRGLELTGAIVLVAELGDLTRFDTPRKLMSYLGLTPSEYSSGGRRRQGGITKAGNGHARRVLVEGAWAYRYPAKVSRHLQLRLEKVPAEIQGIAWKAQVRLCKRYRQLSARGTHANHVVVAIAREMAAFAWAIARTVPVAA

SEQ ID NO: 486863 - protein, 320 aa, unidentified
MSQGYDRFIGIDMGKSSFDVAGLAEGQRGHFDNTAVGRSQLLGLLPPVGTCLIVLEATGGYERDLVGDMVSAGHHVSTANPRQVRDLARALGILAKTDRIDAVVIARFAELVRPLPQEYHRKQEEMRELIVRRRQLIEHRTAEKNRCEQGHSALVRKSLLRSIEAINNDIKQLDKALMELVDSDDEWKNRFDRLKSVPGVGEQTAVTLLAELPELGRLNRQQVAALVGVAPFNRDSGILRGKRAVWGGRAGVRSALYMAALSAKKHNPVISEFATRLLALGKPAKVVLTACMRKLLVIMNSMLRAQQKWEPRPANAAEAI

SEQ ID NO: 486864 - protein, 434 aa, unidentified
MIGIDIHRTFGEVVIWENGLTRHEGRVEMTRTALEGFGRQLQKTDEVVIEATGNCMAVSRVLSPHVKRVVIANPLQVKAIAHAHVKTDKVDAGTLASLHAAGYLPEIRTPDAATERMRRLVARRYQVVRHRTRIKNEVHAILHAHLIPKCPHADLFNKRGRDWLTRQPVPDDERAAIARHIRELDRLAEDLAVLDRDIAEGSLEDEAIRCLLTITGVNLTVAAGLMATIGSIDQFNSAQKLASYFGLNPRVRQSGLGPAHHGRISKAGRSHARAMLVKAAWAAAKAPGPVRAFFIRIRARRGHQIAAVAVARKLAALCWHMLTKGEDYRWARPSLVAHKRRAMELAAGQPQKKGNKRGASYAYNVKELRQQEARVAEHAERSYEHFVAAWRSRPLGKGNGCAAASNRQGLTGLPGDASSRRATLRHEVDRTTTE

SEQ ID NO: 486865 - protein, 454 aa, unidentified
MRKPRVIPDEDHEVVYERVAAVDVAKASGVVCLRAPDPARPGRFASRIWDEVPAMRAAIEAVGRELLAHRVQMVTLESTSDYWRIWYYVLESIGLAVQLVSPSQAKNLKGRPKTDRLDAMWLARLTQWGMLRPSFVPPAAIRRVRDFTRARTDLVAERTRCLQRLEKLLEDAMIKVTSVAKDGMKAKSVVAMVAALAEGERDPRALADLAKGPLRGKRAQLAEALDGMFDSHHGVIARALLDQAAFLDQQITAMEDQATAALAAVPQSWGVDPDGQTGPRAGITPGSPVLAAARRLAEIPGISVWLAIVIIAEIGLNMAAFPTPAHLVSWMGLCRSAAQSGTRTGKGKPKKGNSYARAAAGQAAIGAARTATFLGERYARIARRRGKAIAQPAVARSIMIIVWHLLNDPAARYHDLGPDWHASRINRDKKIRTRIQGLKALGITVAITENEQAA

SEQ ID NO: 486866 - protein, 337 aa, unidentified
MDRQYVGIDFHRRRSVIVRVSAAGEKLSSARVANDPLAIAAAVAEAGPNPEVVVEATYGWYWVVDLLQASGARVHLANPQGLNWGQRRVKNDERDASDLADMLRLGRLPEAWIAPPATRELRELVRYRAKLVGLRSGLKAQVHAVMAKEGVLPAQGRMFGPAGNAQLDATAMNENYRTRVESLRDLIGLYDRHVTMLEADIHRQLRHHRGYQAIQAIDGVGRTIAAVLVAEIGDVDRFRSAEALCSWAGLTPKHRQSDTKTTRGSITKQGSRLVRWALIEAVSRYHGGPGLAAGFRRIAERRGTNKARVAVARKVLTLVYYGLRDGEIRCIAQAPAA

SEQ ID NO: 486867 - protein, 327 aa, unidentified
MNVTTIGIDLAKTVFSIHGTNQHGKVVVRKRLNRPKLLAFFAQLPPCLIGMEACSGAHYWARELTKLGHDARIIAPRFVAPYRKSSKNDDNDAEAICEAVSRPNMRFVPIKTQDQQAALCLHRIRRGLIKERTAQINQIRGLLAEFGLIIPQGRYHARHRIPEILEDAENGLPMLARRLLNNINQRILQLDEEILTYDREIESMARRDERAKRLMAIPGIGPQTATAILASAPDPRQFKSGRHFAAWLGLVPRQYSTGGKPRLGRITKRGDKYLRTLLIHGTRAVIAKLADKNDRLSGWARELVERRGYKRAAVALAAKNARIIWRY

SEQ ID NO: 486868 - protein, 372 aa, unidentified
MEKIADVEGFTSVDGVLLGVDTHLDLHVAVALDQLGRRLGELTVPTTTKGYERLLRWAESFGGVLCAGIEGTSSYGAGLARYLKLAGVSVVEVERPKRRHLRRKGKSDPIDAEAAARAVLAGEALGEPKSGDGRVEMIRTLRSARQSAVKAKTQAANQLQALLVTAPEELRYRLRELPTKELVATCARFRFGNDPDNIETATRFALRSVARRHEALSEEITQLDAQLDRLVAEIAPGLISLPAIGTHHAATLLVVAGDNPERLRNEASFASVCGVSPVEASSGKVVRHRLNRGGNRDANRALHMICVVRMGSDKRTREYVARRVAEGKSKWEIMRCLKRYIAREVYRILLSSTTTKPPPIQAVSRVLEAGIV

SEQ ID NO: 486869 - protein, 450 aa, unidentified
MGNGSGVSRGDRNRNARLARLRMLVPPVNAIAGIDLADRKQMVVVTDHDSKVLARKTFRCHAWDLGAALDWAGKQAAGKGFAGVTVACEPTGHRWRVLGQLAAERGMPFVCVQPMLTSWARRSEDLTFDKTDEKDAVLIARLTAQLRCYIPEPVDQTWGRLRHLGARREQLLTEAGSQVQQIRALLECVWPAALQTARQPFRSSTWTAAMSIVVDRDGGDLNRTRRLGLVRFETAVRREVVRRGRQKPCLRIVRLLFAALTDPAGVIAHRAGALERVALLISDWLETHRRLLDTETRMTTVLDELRLTELVTSITGLSAIGAAAILAQTGDPHRFSSARALVKHAGLAPRENLSGAFKGRTKLTGQGRPGLRLAAWRAVWGAQRANPVYAARFTHLTTREQNKLTATQAQAVIAAAILRQLHAVVTTSRAWNPAIATHGAERRAVMPIAA

SEQ ID NO: 486870 - protein, 364 aa, unidentified
MKRKVYVGMDVHKETIQIAYLTSNSKEILKEQQIKHNEVQIKKFIKKLKTEWNEIHCCYEAGVTGYPLYRYLKSLGVNCILVAPGKIPRQNTDKIKTDKRDAIKLARLMRSGELESIHVPSEEDEAVRDYLRSRDSLRLDLGRNRQRLMKFLLRKDIKYSTTKYWTVSHYKWLNNLHFNNEILQETFNDYYSRVRVQEENLKAMDKKIQEIAESEPYREKVGILRCFRGVDYLTAMFLLCEVNDFKRFKTAGSFMSFLGLVPGEYSSGSKRKQTGITKTGSPRLRRILTEAAWQHRFPGTGSKIITARRSGQPALVVALSEKASLRLHKKFRNLQLRGKTPQVMITAVSRELSGFLWAAMNLVA

SEQ ID NO: 486871 - protein, 413 aa, unidentified
MIKRERIKESRQEVYAGIDIAEEKHVIRFIDNLGREIGKPVSFTNNLEGFSQIEQCAKERGKFSVTFCVEPSGDYWKPLAYYLKERQYPVVLVNPYHTRQSKELIDNSQTKNDRKDAYLIADLGKQGKCFPAHLPEGSMADLKELVLAWTRTNRLLVQAKTYLHNFLTKYFPEYKGCFSMMYGKASMYCLVHFPLPSDIQQIGLSRLTFLLKRASGGKLSEKKVQLLYQKACTSIGMKEGTHAAKEALGDILQDIEMLLQRKRKMKEQMAFHLLQSGYRDSLLSVPGVGVITACFFLSEIGNPQWYTKATQIEKLAGLHLVENSSGKRHGRFIISKRGKHLLRYTGYLAALSAVAKNNELATLYEYRLNHTRNPKEDKMKLMTYLAAKMLRIMFVVCKKRTVYQPEAITQYWK

SEQ ID NO: 486872 - protein, 311 aa, unidentified
MEQSTVVGIDVAKEHLDVHVRPTDEVFRVTNDDAGLASLVRRRHARRPMVVVLEASGGYEVPLVAALASAGLPVAVVNPRQIRAYARAVGHLAKTDRLDARVIALFAEAVRPAARPVPDEQARALSELIARRRQLVDMLVAEQNRRLLVRDRRLQRHVDAHIAWLEEALRRLDHDLTTLIRTTPAGRETDDRLRSVPGIGPVTACTLIADLPELGRLDRRRIAARAGLAPFARDSGAVRGRRMIAGGRPQVRRVLYMATLAAIRFNPAIHEFHQRLVTAGRPGRVAVTAAMRKLLTILNAMLRDRRPWQPA

SEQ ID NO: 486873 - protein, 426 aa, unidentified
MGLGSKGITISEGLLVIVIMNEVGSMSQFRRLIGNTGFVREPENQSELHCEGADTMQDNTKYVGLDTSKDTIAIAVADAGRDAPRSWGVIPNTPEAIRKLIRKLGQPEDLDVCYEAGPLGYGLQRMLTQMGVKCSVIAPSLIPSRPGDRVKTDRRDAIKLAHLHRAGELTAVYVPNEDDEALRDLVRCREDAKEDLLRARQRMSKFLLRHDLTSPAKMTKWKSKYMAWLQQLKFSNRALQQTHQEYLHAIIVIAQRIERLEKEIHELAMKSPHKPVIQALQTLRGVKELTAVTLVVEVGDFRRFTTARQFMGYTGLIPSESSSGPVRRQGKVTKTGNTHLRRVLVEAAWSYRYRPALRGDIRKRQEGQSPSVQSISWKAQDRLHRKYLRLLSRGKPSTKAIVALARELAGFVWAISKEEMNSVASN

SEQ ID NO: 486874 - protein, 399 aa, unidentified
MDLPMRKPRPRNRSQRKPNDLSRSLAALDMDRTLIAVIEMSASTWLVAGIVPGVERQPLKKLEPDEHALLALLQRWRGEAERSGRTITSIAVAYEAGRDGFWLARWLLSQGIEAHVIHASSVAVSREHRRAKTDRLDTQMLKRAFLGWLRGERDHCKMAAIPTLAQEDARRPGRERESLAGEASRIVNRLKSALARLGVRKFNPKLKKASERLTDLRTPEGEPIPPNTLDEMKRDMERRQLICAQIRKIEQERLKHLARAPDTGPHAMVRLLARVIGVGIETADTLVQEVLSRHLRDRRAVARYGGLTGAPDSSGSINREKGLSRSGNARVRRCMIQLAWRFLRFQKDSALAQWFFHRTGNARGMRKTMIVALARKLLIALWRLVHEGVIPEGIVMRPA

SEQ ID NO: 486875 - protein, 397 aa, unidentified
MIAVGLDIHKDKVFCGIHNGEKFLPVREYSTLTCEIRAMGEYLQQMKADKIAMESTGIYWIPIWNILEEMGFELILVNPYQIKQMPGRKSDVKDAQWIALLLQKDLLRASLVPDEHIRELRTYSRKYDKLQKRMTSLLQEMERTLEMCGIRITSYVSNISSKSIRKVIDTIVEGTEDSEYLEELVHSRIRNKHKEKIRQSLEGCITEHHRFILELLRDEFSLLESQSEKCLGKMKTLCREHYQQEMELLQTIPGIGELSSMVIIAETGGDMKKFENSSKFTGWVGLRPRNDESAGKYKSTAITKGNKHLKSALVQTAWGATRIKGGYFKDKFTRLAMRKSQKKALIAIARKIGVIIYCVLKEKKPFNPSLLPLYDPLRVQRQIEYHQREWMRLSKLT

SEQ ID NO: 486876 - protein, 358 aa, unidentified
MEYGAIDLHKKESQIRILTEDGEIVDRRIATTRERLTAVFWGRPRMRILLEAATESEWVAQHLETLGHEVIVADPNFTAMYGHRSRRIKTDRRDVAALAEACQRGVYRVAHRRSAVRRTVQAQLNIRRELTEARTRAISLTRAIVRGGGFRIRSGSTGSFLTRVAALDLPPSMTDTLAPVRRVIELLNTELTTADETFATHVVEDRIVSRLTTLPGIGPITASAYVAALDDAARFGGAAQVTSYLGLVPREYSSGEQHRRGHVMRSAHPYVQALLVQAAWRIVRVKDPRTAALRTWADAIARRRGKKIAMVALARRLARLLFAMWRDEVAYDPARIRSSPRTSVAASDDGVTQSAVNG

SEQ ID NO: 486877 - protein, 406 aa, unidentified
MLFVGDDWAEDYHDVEVQDETGRRLAKARFTEGLAGVAGLHELVAQHLDEDEADQVVLGIETDRGPWVLALIAAGYRVFAINPLQVARYRERQGVSGAKSDAADAHALADMVRTDSHQLRPVAGDSDQAEAVKVVARAHKTLIWERTRHAQRLRNALREFFPAALQAFDDLTAADALELLAKAPDPDAAARLTIAQVSAALKRARRHHASDKARVIRAALRTEQLRQPAAVTTAYAAAVRAQVAVIGTLNAQIKTMGEQVEAHFGQHPDVEIYLSQPGMGPIVGARVLSEFGDDDHRYADARSRKNYAGTSPITRASGKKKTVLARYVHNNRLIDALGQQAFSALTGSPGARAYYDQLRRRGMGHRAALRQLANRLVGILHGCLKTGTVYDEATAWSHHAPHTAAA

SEQ ID NO: 486878 - protein, 393 aa, unidentified
MKTKLFAGIDVAKNKHKVVVKNEEYEIVESFWVENNQRGFNKALSRIPVGTVVGLEATSEYHKTLVNFLKSKGYKVYVFNPRKTKNFAKINHIATKTDKVDAGMLADFIILGLHKTQKQWTNKYPELRQLTRARLKLVQDQNRYKLRVLNRLAVVFPEYEKLFSQNFGVTFTNLLAKYTYPGNFSVLDAQTLGKELISMSKGILRENKALEIIETARRSVGIRDKIAGYIEEIRTNIRYIQELEKDIKRFDRKIEEQMEGIDQKLTTIRGIDLSTAATIMAEAGDMEDFRGRRSFFNFTGIVPTIKESSKYKGKSRMSKHGSKYLRTAIWLGAISCINHNKAFQMYFIKKHHIDKKPKMVAVGAVCRKLTYNMYRIMKYNEPFEMEKALHITT

SEQ ID NO: 486879 - protein, 357 aa, unidentified
MALKHTQPDFAGQLVYVGIDVGKTNWRVCIMTDLLEHRTFAQPPTTEALVSYLHRSFPHATYRCVYEAGYSGFWIAEQLQHQGIDCLIVNPGDVPTTNRERAFKTDRIDARKLARALHDGAITDIHHPSHETQEDRSLMRTRLQLVKEQTRCKNRIKSFLAFYGIVLDESLIRTHWSQRYIAQLTALSLAKTSGTVAFQTLLGQLQSLRGALATVTKQIRALANEPRYRVRVDCLTSIPGIGVLSAMIFLTEIEDIHRFRSLDHLACYVGLVPGEHSSGDDQITTGITRRRNPHLRMVLVESAWITVKKDPALLLAFETLAKRMPKNQAIIRITRKLLNRMRYVLLHQEVYVPGVAA

SEQ ID NO: 486880 - protein, 405 aa, unidentified
MHDSITYVALDAHKNEHSVAALLPGTDAPEQWTVKNAPRELKRMIRRLRKRTDGLLRFCYEAGVCGFTLRRQILAADEKVECMVVAPSLIPMRPGSRIKTDRRDARKLAWLLRAGLLTEVRPPNPREEAARDLCRCRHGAKVDQVRARHQLLKFLLRRGRVYQGGSHWTQRHLAWLRSLRFDQPLDQEVFAEYVAELDHRTQRMATLDRRLTALSQEDPYREPVAWLRCFRGIETVTALTIVTELHGFGRFGSPRELMSYLGLTPSEFSSGDSHRQGGITKAGNGRVRRLLVEASWHQCNVPITSKALAKRRQGQPAAVVGIAQRAQKRLHQRYWRLVNRGKAPTKAVTAVARELSGFLWSVLFPPSVAAAVTDTPGRERAAPAAKRRKKAARRQTAREFLATSD

SEQ ID NO: 486881 - protein, 429 aa, unidentified
MPNSASLAPNIVAWVGLDWADQAHAVCLQEAGASPVEHSELQHTPEALQLWVAELRSRFPQGQVAIALEQSRGSVFYALMTYDFLVLYPIPPKALADYRQALYPSGSKGDPTDARLLLEFLRKHPERFRPWVADDAPTREIALLVQHRRKLVDDRTALTHRLQALLKGYFPQALEWAGDLTSPLAWDFVSQFQSLEEAQKASRWKVLKVYRAHTRRTPEQLEQLLDQIRTARPLTTDRAVIESSALMVRAQVDQLRALAAGLERLEEKLQELFAAHPDHDIFNSFPGAGKALAPRLLAAWGSDRQRYETAQDMECLSGSAPVTAQSGKKRWVHWRLACPKFLRQTFHEFAGHSILWSPWVRVYYQQMRKRGADHHPAVRSLAFKWIRIFYRCWKDHTLYDEARYQQALERHGSPLAAALRQLPNQEARA

SEQ ID NO: 486882 - protein, 419 aa, unidentified
MKIVHSVCCGVDVHKNVIVATIAITDKSNITQYVVESFSTINADLYRFRTWLLEHQCFNVCMESTGKYWIPVFNILEESDIKVLLTHPKYVRAIKGKKTDKKDSKWISDLFKFDMVRSSFIPPKDIRALRELARYRYKLVCMRSSERNRYQNCMTVSNIGLASVLSDPFGKSASGIMQYVLSSDVFSEEHCKSLIRKSAKKKTELILASIRDSRIESDQRFKMKEASAHMDYLEQAILRTEVELYARIQPHYHCVEHLSNQLPGITPLSAALIISEIGVDMSVFESAKHLTSWTGLAPANNESAGKKKSVRISKAGQFLKPLLVQCALAAVKSNKQPYFATKYQRIKKRRGHKKAIIAIARMMLTCIYHMIQTGEAFNPSDYESFKNPLPRKIALTDENAIAFLAAQGYDVSALTKIAV

SEQ ID NO: 486883 - protein, 286 aa, unidentified
MKSYVGLDVSLKQTSICVVDERGSVVREGVVISDPEAIAAFVRLNAPGAARIGLETGPTTTWLWTELKRLDLPVICIDARHAKAVLKMQINKSDRNDAAGIARIMQTGWFKEVRVKDIDSHLVKALLVSRALLVKIKRDLENQIRGLLKNLGLVIGRGKFNVFAVRTEELIEDRPELVAVIRPLLAARKAIEEQVHNLDRRVLKLARHDMQVRRFMTVPGVGPVTALCFTATIDDPTRFKRSRSVGAYVGLTTRRHASGEVDWSGRISKCGDAMLRMYLFEAAGVC

SEQ ID NO: 486884 - protein, 475 aa, unidentified
MAAKGLLTRGPKRSEPPEAHPQSVPVGKRTALKVQEKVAPRRAGIRATCRSRSAAASAVPEGGGPVRYHLGVDWADQTHAVWVVDERGTKITARTVPHTAEGLSEWGRELDEWRAHGIELWAAIERPEGRVVDFLLDHGIVVYPVNPKALDRARDRFRQSGAKDDPFDARVLADFLRTDHAHLRPLRPSSEAAQELKLLTEDYQRQVRQQTRLVNQLTITLKAYYPRALEVAELTTGLAQAFLQAYPTPAAVAALTERQWQRWARAHRLSATRTRELWEVLQRPQLPVPAHVVRAKARLMRSLVAQLTPVVAAVGEYREAIEDFFARMSTAQWIRTLPIGDHGITAPTLWARLGDAPGRWEAFRHLQAQAGAVPVTKRSGKQQRVVHFRVACDKALRYVVDQVAFLSLRSCEWARAYYDQQRGRGHSHRRALRALGAKWLKIIFVMWQRHASYDEQYHLATMARQQLRQPQTKIA

SEQ ID NO: 486885 - protein, 402 aa, unidentified
MNAVGIDVSKSKSVVAIMRPFGEIVSTPFEIKHTASDIHSLIELINSVEGESRIVMEHTGRYYEVLAHQLLEANLFVSAINPKLIKDFDNDSLRKVKSDKADAVKIARYALDKWQNLKQYNVMNELRNQLKTMNRQFGFYMKHKTAMKNNLIGILDQTYPGVNTYFDSPARSDGSQKWVDFASTYWHVDCVRKMSLNAFIDHYQNWCKRKKYNFSQSKAEEIYGKAKELVPVLPKDDITKLIIKQAVNQLNSASTTVESLRTLMNETASKLPEYPVVMAMKGVGASLGPQLMAEIGDVSRFTHKGAITAFAGVDPGVNESGSYEQKSVPTSKRGSSDLRKTLFQVMDVLIKTHPQDDPVYQFIDKKRAQGKPYYVYMTAGANKFLRIYYGRVKEYLSSLPES

SEQ ID NO: 486886 - protein, 340 aa, unidentified
MPNPAVIGLDIAKNVFQVHGADAEGRCVLRRRLRRAEVITFFARLPKALVGIEACPSGHHWARELRSLGHDVRLIPPQYVRSFVKTNKNDAADAEGICEAVVRPNMRFVPIKSVAQQAAMMLHRTRALLLRQRTQLINAVRGHLAEFGLVARRGARNIRELAELVRDTGSDKLPDAARAMLVLLLEQIREVQLRVQKTEHALEAWAKQSDACRRLMTIPGVGIMSATAIVLAMDDPKRFRSGRHFAAWLGLVPRQSSSGERQVLGGISKRGDGYVCTLLIHGARSLTRWRRESWRWLAGLLMRRPTNIAAVAIANKTARTAWAILAYGHQFQPTRRAEAA

SEQ ID NO: 486887 - protein, 425 aa, unidentified
MRVFDLFVGIDWGSELHQVCVLDGERKKLFEGSIAHTGEALVGLSEKLLALAGGDAQRLAVAIETPRGPVVETLLEKGLAVFAINPKQLDRFRDRHTVAGAKDDRRDALVLADSVRTDRDAFRQVHLGDPKLVELRELSRLQDELKAERNALGNRLREQLQRYFPQILQLGSVYDDAWIWALLERASAPKEAARLSLAKLGSILKQHHIRRITSEEIRAILQSEPLHVAPGVEVASRRSIASLLPRLRLAHEQKLDVEREIGHLLEQLSAPDAEGKVEHRDASLLQSLPGLGKLTCATMLAEAGEALTRRDYTTLRGLSGVAPVTRRSGKQLLVSMRYSCSKRLRTAVHHWAAQAANWDPYWRARYAALRAKGHQHARAVRSLADRLLAVLVAVLKSGLPYDPTRKAAVPTAVSPQLPSATEGLA

SEQ ID NO: 486888 - protein, 343 aa, unidentified
MQATIAVDIAKNVFEIAISHHPGKVAEHHRLSRTKFLRFFAKRQSSRLLLEACGSAHFWARELSKLGHEVVLLPPHLVRPYRQRHKKTDRTDAKALLEASRNDEIRPVPVKTLEHHSLTALHRLRSGWMSTRTARLNAVRGLLRELGHFIPQGANQVVPRVRELIEDAESDLPDSVRLVLHEACCEIRELEQRSKIAQKQLEVLAPTIPAVEHLLSVPGIGKIKETALVAFVAEIHRFPSGRHFASYLGLTPRVNATGYSRRLGHISRQGDGYLRMLLIHGARSSLAAAKKYKKKDPLSVWALEVQQRRGHNRATVALANKMARIAWRVWRQDRDFWLERQAA

SEQ ID NO: 486889 - protein, 344 aa, unidentified
MDTTSRPPTPMPPPPPPGAAAPAGIVVGIDVCKERLDLARSDTGDRVVTFANDAAGIAAVVRLLLAAPAPVAAVVIESTGGLERPLVEALLEAGLPVALVHPGRVRHFAKGLGVESKTDRIDARVLVRFGQLAAPRLAERRSRNEAERRDLLACRRQLTVTRTQQSNRRGATASRAALKAIDAVIKALDRQIASLDEQVRALVDADDDFRDLARRLRSVPGVGPTLAATLLADLRELGGADRRRVCALAGVAPFPDDSGNVRGRRSIRGGRADVRCVLYMATLAAMRFNPVIRAFAQRLRAAGKLGKVTVVACMRKLLTLLNAMARDGLSWDQLDVVKNLAPTP

SEQ ID NO: 486890 - protein, 349 aa, unidentified
MTIVEDRPVITGGVDTHADLHVAAALDPLGGLLGVQEFPATGTGYAQLLDWLGGFGPITLVGVEGTGSYGEGLARHLAAAGIRVVEVDRADRQDRHRQGKSDPLDAVSAARAAQSGRASGAPKGRDGAVEAIRALMVAKRSARAERTQAINQARALIVTGPDELRARFAGHTPAQLVEAIAALRPRPGDVPGYATRVALREPVRRDWFLDAQLDRLDELIVPLVTARAPGLLRLHGVGPDTAALLLIAAGDHPERLRSESSWAHLCGVAPIPASSGKVSRHRLNRGGDRQANHALWRIVITRLGSRPGHPATRAYVERRTKEGLSKKEIIRCLKRYVAREVYHQLRTSA

SEQ ID NO: 486891 - protein, 405 aa, unidentified
MDITPIHRRVIGLDVHQNKITACALIEQADSGVAVEQRELGGFKRHRRALAAWVHGFAPDLVVMESTGIYWKSPYAALENVGIAAWVVNARHVKNVPGRKTDISDAQWLATLARAGLVRASFVPPAEIRHLRLIARQRQKLGGMLAAEKNRLHKVLADAGIRLNVLVSDLHGQSARAMVKALLADEPIHAILERAGRLRASREDLFEALQPEELSAKHHFVLNEIMAHIEYLEATMARFEQQLLVGLALWEPQMSLLETVPGIDRLGAAMLLVEIGADMDSFGSAERLASWVGICPGNNESAGKRKSGRTRQGNAWVRRLLCEFAQAASRTRCALKDKFSALAIRKGHKRSIVALAHKMLRIVYAMLANTTPYQDHTVDYEALMVGRNAPRWLKMLTKHGYLATA

SEQ ID NO: 486892 - protein, 351 aa, unidentified
MPSKKDAAVIRAIGIDTGKNTLHMVGLDEKGAIVLREKVSRNRIAARLVNVPPCLIGIEAGMATHYMSRELVALGHQVKQVPPAYSKLFRQGHKNDFRDAQAVAEAVQRPSTRCVPIKTDGQMDLQALHRVRSRLIGNRTAVINQMRGFLLEHGIPVRQGPRFLRQQLPQILATRTDVLSPRMVRIIRDIVDDWQYLDERIERVTDEIEDLARSDVSCGQLMTVPGIGPIIASATIAAIGNGTAFAKGRDFAAWLGLVPKQMSTGDRTILGRITKRGNRYLRTLFVQGARAILLHPTSWAKHSFGPWLTAAARRLHRNVLVIALANKLARIALTVLVQGRSYETRVEPAAA

SEQ ID NO: 486893 - protein, 364 aa, unidentified
MTESIAAEAPPRRVVVGVDTHKHVHVAVAVDTFGVRLEHRSFNADSTGYSELVDWAERHGPIEGFGIEGTGSYGAGLTSAVRRRGHRVVEVNRADRRMRRANGKSDTVDAEAAARSVLAGTATAIPKTADGHAEMIRQVKVARDTAVKARSSAIITLKQIIVNAPPALRELLAPLADKALIDRCAGLRPGRVVDPTTAAKHTLRTLARRWLALHREIVGHDKVLDRLTAEAAPTLREGFGIGPDTAAELLIIFGDNPDRVRSDAAFAKLCGACPIPASSGMTTRHRLYRGGHRQANAALYRSVIVRMRFHQPTIDYVARRTADGLPKREIIRCLKRYLAREIYQRVLTDHRARLGQPSPPTPPS

SEQ ID NO: 486894 - protein, 308 aa, unidentified
MSVFVGIDVAKATLAVAMRPSGERLEVPNTAAGHQALARWLRQWPVERVLLEATGGYERAVMTALQRHWPVVRVPPHRARAFAKAMGRLAKTDPIDAAMLAHLAQVIDASPTPVASAQQQRLQALVQRRGQLVQQRDDERRRLQQAGERPVIASLKRQLRSLVAEIATLDNAIAQAMAETDSSRSRQLRAVPGVGPVTAATLIAFLPELGRLGRRQIAALVGVAPYNADSGDKRGQRRIHGGRAGVRRILYMATWSAIRTQPDLKRRYQALRAAGKCAKVALVACMRTFLGQLNAMVRDGTAWQTKAV

SEQ ID NO: 486895 - protein, 388 aa, unidentified
MIYVGIDIAKLNHFASAISSDGEELIKPFKFTNDNDGFQLLISKLDPLDKDSLIIGLESTAHYSDNLVRYLVAKNYNVCVLNPIKTSTMRKNNIRKTKTDKVDTFIICKTLMMQESLRFVTFYDLDLMDLKALGRFRQKTIKQRTRLKIQLTSYVDEIFPELQYFFKSGLHQKSVYALLKEAPTPEAVASMHMTHLAHLLKVNSHGHFNKEVAQQLRVLAQKSVGASDSSLSIQVTHTIQQIELLDSQLERVEAEMTEIMKFNDSVIMTIPGIGYINGGMILGEIGDIHRFSSPNKLLAYAGLDPSVYQSGNFQAKKTRMSKRGSKVLRYALVNAAHNVVKNNATFKAYYEAKMVEGRTHYNALGHCAGKLVRIIWKMMTDNVEFNLD

SEQ ID NO: 486896 - protein, 430 aa, unidentified
MKSNTQNAKIEAITEKTLVLGIDVGSEMHYARAFDYRGIEYSKKPFKFSNTEAGFVTFKEWILDIKERHEKDKVVLGMEPTGHYWFNLGKFLQDNEMKPVLVNPHHVKKSKELDDNNPTKNDRKDPKVIAGLVREGRYMIPYLPDGVYADLRTASNIRFQLQAELTRIQNRISRWFNIYFPEYKTVYGKPDAKSGILILKAAPLPEDILTLGIDGVNQIWRDAKLRAVGKARAKTLIEAAEHSVGSKEGAVAARMEIRMLLEDYESRSIRLQEVMTLIEGLVKQIPMAEKLLEIKGVGIRTVSGFLAEVGDISRFNNPKELQKLAGLALVENSSGKHKGETTISRRGRKRLRYLLFEVAMSLVAKNPEFRELHNYYTTRRLNPLKKMQSLMAIAAKLIRVFYVMLTKGVNYDPKKMVNDIKRPAVYLQTA

SEQ ID NO: 486897 - protein, 333 aa, unidentified
MKKLIHFVGIDVSKETFDLALIKDNDMSQITQKIFLNNVKGFKELHSWLKQQKVDYPESLFCIEYTGYYSRLLSKFIIAKKGNLWMEMSLKIIRSLGIQRGKNDKIDARRIALFAHRNQQDYKPCIPKRPIIEKLKTLLMLRQKLINSKLSITIPVNELKRIDKPAGKEALAITSITLKALDKNLMTVEQQIDQLIASDEDLTEKQKLVTSVPGIGKITFCFLTYFTNEFQNYSEAKQLACYCGVVPFEYTSGKSVRGKPRVHHMANKFMKKLLHTAALCAVTYYPEFKAYYERKIAENKNRMLILNNVRNKLIIRIAAVIKNNYPYKAIHAA

SEQ ID NO: 486898 - protein, 404 aa, unidentified
MSNNVFVGLDWAVQTHAVCIVDEQGQVLDHFDVVHDRDGLAGLIRRPARFGVRLRIAIERPSGLLVDALVDAGHEVVPIHPNALKACRARYRCHGGKNDATDAYILADVLRTDGHRFRALSPQSDSIKALRALVRTRDDLVAMRVALGNQLRSALEASWPGAEHIFADITSPIALAFLVRYPTPASATRLGERRLQVFCRQHRYSGRRSAAELLQRLRASAGACVGIVTTGAMRDVVCSLVAVLTPLVEQIAELTHCIEHMVEDLPDGRIVMSFPRAGRLCAAQILAELGDVRERFTSAEQLAAEAGTVPVTYESGKSRGVRFRWACNHRLRRAITCVADNSRHANSWAHTIYAAARARGCDHPHAVRILARAWLRVIWRAWVSHQHDDPSLHGAATRLAEGGG

SEQ ID NO: 486899 - protein, 378 aa, unidentified
MIVIGVDTHKQSHALAAVDEGTGRVRGGREIKADEAGHLAAVRWARELDEDRVWAVEDCRHVSGRLEQALIAAGERVLRVPPKLMGASRQGERERGKSDQIDAVAIARAVVKDGVERFPSAYLDERAMEIRLLADHREDLVRERSKVQCRLRWQLLDICPEVEAKLAAGSLSHLRNLERLDGRLRRAGTGARVRVARAELAQIRTLTRQVDALERELTELITAYKPKLLDELGCGTLTAAILIGHTAGAERFRTEACFARQTGTAPIPCSSGKRTQHRLDRGGDRQLNRALHTIAITRAQRDQKTIDYLARKQAEGNTRKGAYRCLKRHLARRFWRLLAEPPLPAKPAAPAPKTPKRAAPRRPIDNTIPAATPMVCIT

SEQ ID NO: 486900 - protein, 429 aa, unidentified
MQNESTPGARGPVFCGVDTHADSHWLCVLDWRGRRVLSRRFPADAAGYEALAGAIAAAGEPACVAMEGTSSYGAGLTRHLASLGMPVREALSPARTQRRRPGQGKCDEADAERAARAAMSGSRLGTPKSQDGWVDGVRCMLAARSGAVKARTSAINTARSLLTTAPEGLRSRFRGMAGPRLMEELPSVRAEGALGAALGALADLWAAARDAALDMERAIEASLEENCPALLAMYGCGPVSAAKLAVAAGDNPGRLRSEASFAAICGACPIPASSGKTVRHRLNRGGDRQANSALHEIARQRVMRDPETAEYAERARARGKSDREVMRCLKRYVAREAYRALMRPHEIRRPEDASELVAARRAARVSQVRAASILGTSEKYISMLERGQRELKPIRRAYEAWVEAGLPLDWDRQAFEAERKMNSKKHLAK

SEQ ID NO: 486901 - protein, 304 aa, unidentified
MYGIGIDISKASLDVAVHGDPKLHCFTNTPAGHGKLLAWLNTQPVLSVVLEASGGFERTIAQTLAQAQIPVSRINPRQGRDFAKATGQLAKTDTLDARVLAHMAQVMDLPRYRAREEWEQRLDQTVRRRQQVVEMQTAEKQRLTALSDPVLRKMVQASLRSLAKQLQKLDHSLQEQVQAQSWLATLRTIKGIGPVTQATLAAGLPELGHVDGKAIAMLVGVAPMARDSGQWRGRRSTWGGRAEVRRALFMAALSAARYEPRLRDFYLRLRAQGKAAKVALVAVIRKMLVILNARMRDELNGVPA

SEQ ID NO: 486902 - protein, 410 aa, unidentified
MKKHNYRTKNVNEINWPELRQQLGGGAVTFAVDVAKAQQYALLTDDAQRLPLLVKWELLETTGLIHELKQLGCPVTVVMESTGTYGDAMRHQFRQAGFDIWQASAKRVHDAKEIFDGVPSLHDAKAACLIAKLHKEGLTKPWHELDEAGRALNAARREYDMHQSQYERNQNRLEAYLSRHWPEVLGLFSLDSVTLEKLLIAYGSPQAIAADAQQAAKNMQAWGGHFLKTDKIVQVIDSAVNTLGQPCIEAERRYLQALATEMQHSRRQSQAAKQMLEASVVADEGLKEMASLIGKLTTAILIGLHLDPRNFSNAHSFLKALGLNLTEKSSGQYHGQLKISKRGSAVARKYLYLAALRLIQKDPLIGEWYRSKADPKIKMKTVIACLRKLAKALWHVARGERFDARKLVTL

SEQ ID NO: 486903 - protein, 355 aa, unidentified
MNEITRVGTDLAKRVIQVHAVNASGQRVTSRALPRHKFLAWCAQLPAGCLIAMEASSSAHYWARKLIAMGLDARIIAAHLVAPYRLQGKSGKNDANDAAAICEAAGRPQMHFVPVKSVEQQSMLCIHRLREGFKAERVACINRIRGLLAEFGLVFAQSPAVLRQALPDALEDASNELGGLARLALQRAWAQWQEIDAHMDWCDERIAAHRKANEQVRQAERLIGVGVITASAVVATVGDFKQFKNGAQFGAWLGLTPRQNSSGGKNKLGAITKRGDTYLRTLLIQGAKSAVMTAHKREDPISRWLHQLKERSGWQKAAVALANKNARILWAVFVRGKAFDARHVSTKPGAVIAAA

SEQ ID NO: 486904 - protein, 347 aa, unidentified
MRPKLLMENDYILRQCVGIDVSKETLVVTMCMFSFAEEAHYSDVKTFKNNKTGFNQLVKWSRKEAYTDKPLRYVMEATGVYHEELANHLVKIGCTVIIMMPNKAREFAIWEGMISKNDTIDSRALALLGCVKRSMRPWQPSKEIYHELRAMTRFAQDTKKLRLALKNHLEALEHSHQAEKSIVKHYEAMVSYLDKRLKMNLKNMKEKVASDEALNKKVENIITAPSLGFTSVITVIAETNGFALIQNRKQLTSYAGFDVKDNQSGNVEGTSRISKKGNSRIRAILYMPAVQAQLRSRHLKEAYDRIVQKHPDKKMIAVTAMERRLLLLIYALWKSDKPYDEDHDKKK

SEQ ID NO: 486905 - protein, 492 aa, unidentified
MNFENNLRPGNNGSGRKARGRTRFACPNPTRIKPRTPADPGAFIKKSERTTPQEGHRIRTTNDKGRGPCANKPMNDTVSWESIIYYAGFDWAKDHHDVVVVNPQGKIIKDLTFEHSAEGWAKWKELVAAYPHLAVAIETSQGAAIEQLLTSGVVVYPVNPKSAERYRDRKAPSGNKTDFLDAWSLADALRVDGHGWRALKPLDPLIQELRLLCRDEVDLIAKRTELVNQLQAALHEYYPAALQAFEDWTATPSWSFVQQFPTPELLRQAGRRRWEKFLHVHRLYRPEVNEKRLEIFAKAHEFCGPVAVTRAKSRLALALIKLLHALETQLDDYRKEIRRLFNEHPDHELFGSLPGAGEKLAPRLLSELGSDRSLFISAQSLQCYVGTAPVSFESGQVRQVYVRFMCNKSFRHAVHLWADLSRKSCSWAQVYYQQLRAKGKSHASSLRCLGQRWLKILWKMWQTKTCYDPDFHMANQLKHGSWVLAVKPAKSV

SEQ ID NO: 486906 - protein, 375 aa, unidentified
MENDIRAHVGLDTGKAKTVGCALLRDGGEEVEFEVATERHAVRRLVRRLTRKAGGLVSFCYEAGPCGYELQRWIRAEGAECVVVAPALLPGKAGERVKTNRRDARKLAKAHRGGLLTEVHPPTPEEEAARDLVRGREDLVGDLRRCRQRIKSMLLRRGLILPGSKGTWTLAYRRWLKSLVWEHESDRVIFSDYLLALEQGEERLKQLETKIKEISEQDPWRERVGWLRCLRGVDTLTAMTVLTELHGWERFRTPRELMSYLGLVPSENSTGDDVRRGRIGGGNRYARRVLIEAAQHYAHRPGIGVSLKKRREGQPGWVLAMADRAQLRLHRRFWRLMANGKNRNKVVTAVARELGGFIWAILQGPATTASTGKAA

SEQ ID NO: 486907 - protein, 410 aa, unidentified
MEVLYQRCAGLDVHKKSVVASVRLATENKLVTEVRTFATTTTGLLALSDWLSENGCTHVAMEATGVYWKPVWHVLSDGEIELVLANAAHVRNVPGRKTDVNDAAWMAELMAHGLIRASFVPDGQTQELRALLRTRKQLVRERTRHIQRIHKTLESANIKLDGQLADVLGKSGRSILDAMVAGESDPVRLAALAHPNVKCSRASLEEALRGRVTRHHRFLLQLHLGQIDGLDIAVAAIDREVEANLAPFRVAVDLVRTIPGVNTLSAEAITAETGIDMSRFPSAGHLLAWANMCPRNDESAGKRRSTRMRKGGNWLKTTLIQCAWAAKRKNGSYLQAQFLRLRSRRGEKKAICAVAASILTAVYHILKNGTPYEDLGADHFQRRSKITHTQRLVRRLESLGYAVDIKPITA

SEQ ID NO: 486908 - protein, 309 aa, unidentified
MIIAPGFVGIDVSKHHLDVFDSTHRQHHRIDNTATAIAPLAAAWAAAGAFVLLEATGRYDTALRDGLAAAGVAFARINPRRARDFARACGLLAKTDAVDARMLAAMADRLRPPADVPDCPHRRRLARLNTRRDQLVAMRRQQRTRRHEAEADERTSIEAHLAFLDAEIAGLDQAIARLIAGHPDLARRKALLASVPGVGDVTAATLLALLPELGRRGAKPLAALVGLAPFNNDSGERRGRRSIRGGRARVRTALYLAAFVAARRASRFKAFFDALRSAGKPVKLALVATARKLLTILNAILRDQIPFRA

SEQ ID NO: 486909 - protein, 400 aa, unidentified
MLHDHPCVGPTAIRTQFGAIFVSLELSRSKWVLTSLSPGNGEKMSQYSLAAGDVGGLLARFADLKRKAKERTGSDYPIMTIHEAGLDGFWVHRVLQDEGIESHVVDAASIATSRRRRRAKTDKIDGEALLRALLAFKRGEPRVCAMVVAPSPEEEDRRRLCRERQTLLDERIVHTNRIKGLLFAQGISDFAPLRRDRRKRLEGLRTGDGRPLPVHLKTQISRELDRLELLIDQIRSVEAEQEAVLAAESKAAPEAGSGPEKAVSEAEPRNAVAMLLTVKGIGDHSAAILWSEGLSRQFSNRRQVAAYAGLAATPWRSGAVMHEQGLSKAGNPRLRTLMVQLAWLWLRHQPESALARWFNARGERGRKGSIVALARKLLIALWKYVTQGVVIEGAAMKAAT

SEQ ID NO: 486910 - protein, 360 aa, unidentified
MPMKTVQRKGLNFEGQNVYIGIDVHKKSWQVAIQTETGYEESFRMSSNHVEELRKHLTTNFPQANYHSVYESGFSGFSTHRELTSAGINNIIVNAADVPTMQKEQVTKTDVIDARKLVRALRKKSIEGIYVMTKQEESFRELERHRDSLTEDIGRLKSRIKHLLHRNGIRFEEKFGGSGHWTKAFVKWMKEEIELPQMTKRALDDELDLYLILRKKKLEISLEIRHLMKDEFASEHELLTSVPGIGLITAATLLAEIGNFDRFRNEKTLASYAGLSPTCHSSGEKETKGEITFRCNRRLRRCLIESSWVAIRTDSALSSSFLELRKRMPACNAIIRIARKLLNRVLYVMKNGAIYEKGIN

SEQ ID NO: 486911 - protein, 319 aa, unidentified
MQSKLTIGMDIGKAEVVVACHESAFAVLKMANAVRVLRRWLATLPAGSRLGLEATGGYHEPVAELAHSLGFTVYILNPKDVHHYARALGARGKTDRLDAQVIAAYVAEHNARLHAFVPLSADEKLLRELARRRATLVNAKSMLQQSLRVLPGFEREGRELLRAMGSFADRLERKLAEIAARSSERAALVRRLQTIDGVGTLTSIRCATLFTRVSLHRSDAAVAFFGLDPRPHDSGQHRGRRRLSKRGPSEDRRLLYNAAMSAIRTPTWRPLYQHLRNRGLASTEAIIIIARRMVRIAFAMYQNHSDFNPRLVPRPSCPA

SEQ ID NO: 486912 - protein, 387 aa, unidentified
MKLYIGMDVDKDKCIITSLDKNGEQIDQYRIENNSTEIERFIQKTPRNAEIALESSTCSKPIYQQLKKHRMKVHMAAPGKISLISKSKKKTDPNDSRLLADLLRLGYLPESYVPNDEIENLRKLVRYRRSLGEKRTVVKNQVHAILMRNGIKHGFSDLFGRDGTRFLKNQSLPLTEQTILEGGLREIGFLYEESNVMDLRLAEIAMEYKDVRLLMSIPGVGYYSALVIISEIGDISRFPCAKKLVGYAGLAPRVYQSGNIKRYGRISKDGPSILRWVLTIAAEGAIKKSGKLKRFHARLNKHIGYSKAVVATARKLLIIIFHMLTNGVKYEERDDDLTHRKIRMMETKSKRMKRLKDKKTPISEKHKKLMNKGMKMLINSDSDANLG

SEQ ID NO: 486913 - protein, 428 aa, unidentified
MKYNTQNKKIASITEKTLIIGIDVGSQTHYARAFDWRNYEYSRKPFAFSNDESGFLAFKAWMDEIAEKHHKDTVIPGMEPTGHYWFNLGVFLQEQGMRVVHVNPHHVKKSKELDDNNPNKNDRKDPKTIAALVNEGRFSYPYIPTGIYAEIRNLSNLRFQTQEAITRLKNRIARWFSIYFPEYKDVYGKLDAVSGMMVLREAPLPEDIVALGAEGINQIWRNAKLRAVGLKRARTLVNKAEHSVGSHEAPEAARVELSLLLKDYEMYSQRMEELMQTIEEKLTEIPYIDKLLEIKGIGMTTVCGFIAEVGDIRRFDNPKQLQKLAGYAIVSNNSGKHNGESHISYRGRKRLRYVLYEAAISVIGKNAEFKEIHHYYRSREKNPLKKMQSVIAVACKLIRIFYMIMTKGIDYDGAKMLGDIRRPTVSAA

SEQ ID NO: 486914 - protein, 340 aa, unidentified
MNATTYGLDVAKRVFQMYWVDAETGEIVNRKFGRDDLIQYLSRRPAGRVALEACGSAHWWARKIKSLGHDVVLLHAKFIRPFVQTNKTDAADARAIWTAVQQPGMRVVAAKTSDQQAMLGQHRIRSLLVKFRTMQVNQLRGLLYEFGISFRAGRNAGLAEIRSRMGEIEEAVPGSLMCCLKDQLNRIDELQKEIDQLEQHMAVWQKKESACRAISDVPGIGRLTASALVATIGDAKTFKSGREFASFLGLVPRQNGTGGKVHLGSISKRGDPYLRTLLIHGARSVLYHSKTPTPWLKAIQERRPANVAAVAVASKMARTAWAILARGQAYERDHVSMKPA

SEQ ID NO: 486915 - protein, 353 aa, unidentified
MAVYIGVDLHVRTQTVCWMNTADGEIHQHTLDHSRDDVRAFYAQFTAPAVVGIESSGYALWFHQLIEQAGHRLLVGDAYAIRQFARRRQKNDRRDAELLLDLLRREEFPVVHRPAPPSQDTLALLRYRHRLVRMRTMVKNGLQAVALNHQLRLGFRLFTVRGQQRFAALPLSGAYATQRQQSQVLLTTLEAQIAAVNQELATRAAADARVVRLRTHPGVGLQTALAVVHTLEPVTRFDRARRIAAYCGLDPSEHSSGDTTRYGHISKQGNRLLRFLLVEAAWSAVQHEEDLGRFFRRLRARKKPHAVAVVAVARKLVLRLYRMLREGIDYEEFRRRGRDARRARKWTSPAQRG

SEQ ID NO: 486916 - protein, 340 aa, unidentified
MKRTTIGVDIAKQVFELYVEDGGEQVVERKRLARKKMLLWFANRPPALVGMEACGGAHYWARELTKLGHEVRLMAPQYVKPWVQTNKSDAADARAICRAVQEPGMRFVGIATEAQQEVQALHRVRSRLLRNRTALVNQLHGLLLEYGVAVPQGRAALRKALATFLAEERGTPLLRQLLAEQQAELADWDHRLEAVTTRIEQEGARQPVCQRLQTIPGIGPLSASALWVKLAGQAYQHGRHVAAALGLVPKHAGTGGKVRLGGMSKRGDRYLRSLLIHGARSVITHSREKPDPVSRWIHRLVERRGMNKAVVALANKNARVAFAVLTREQEYDPTHVCRAA

SEQ ID NO: 486917 - protein, 371 aa, unidentified
MKKNTIFVGLDVHKNSIDIALADAGRDGDVRFYGSIGGDLDSLQKVVRKLQSTGATLRFSYEAGPCGYDIYRSLTKQGLDCIVVAPSKIPLKSGDRIKNDRRDALNLARLHRSGELTAIYVPTAEDEAMRDLTRGREDAVKAHRVARQVLLAFLLRHGYRYSGLSYWSKAHWNWIADIKMPHRAQQIILQEYVHAVHEQLERVQRLTRLILELVALWQLAPLVNALQALRGVSLIVAATTVAELGDLTRFESAKQFMAYLGLVPSEHSSGGTVKRGGITKTGNSHVRRALTEAAHTYCHPARESRILLNRLEGLPQEVRNIAWKAQVRLCGRFRRLMARGKNRNTVTTATARELAAFMWAIARTLLSVHEA

SEQ ID NO: 486918 - protein, 358 aa, unidentified
MNLKYSVGLDVSSNKINACISCIDEKQKVVVKSSTVISNTLKGFLALEDWILKHKKEAIPVVVCMEATGIYHENCAYYLFGKGFDVSIILPNKAKKYLESIGLKSKNDSIDAKGLSQMGAERCLELWEPMGTFFYELRLLTRQHQNVTELKTVLKNQLHALGFAMHQLDAVNNQINQTVSLFESQLKELEKEIKAHLKSDEEVCKKTENVLKIKGLGVLTVGTVLAETNGFTLFKNYKQLVSYAGYDVVESDSGKRVGKTKISKKGNSRMRRALHMPSLVVIQHQVKPFQDLFDRTFEKHGIKMKSYVAVQKKLLTMIYHLWKKNEDYNADYQKNIQEGEQKLSSRAIGFEEDTRAKK

SEQ ID NO: 486919 - protein, 384 aa, unidentified
MVTGITAYKRRPLMNSIIYVGMDVHKENYTLCCYRFEDDDVKYKQTLAPDYKDILKYLETTRKLYGENLEFICGYEAGCLGYTLYRQLTDRGVKCIIIAPTTMGIINTGGVKTDKRDAANIAKCLAFRTYSEVNVPTQKDESVKEYIRMRDCQKKALKIVKQQILALVLREGYRFDGGKNYWTIKHVLWLKGIDMGGVLQESLSEYLITYKYLVDKIERLDSRIEELAKDDDYKEKVKKLSCLLGVKTHTALSVVVEIGDFNRFSKAEKMAAYIGLVPGENSSGGKIIRTGITKAGNSHIRRLLVESAQSYTRGTIGHKSIDLKKRQAGNAPLVIAYADKANERMRRKFYHMVLKNNVKRNVATTAIAREIACFMWGLMTNNIA

SEQ ID NO: 486920 - protein, 429 aa, unidentified
MQYALIQVLPDVPAGGVCAGIDWATADHVACVAGMAGRVKDQFSAAHDKAGITAVIARLRRNKVTEVAIERGDGALVDALLAAGLTVVVITSRQVKNLRSRYGSSGAKDDRFDSFVLADTLRTDRARLRPLVPDTAATIALRAAVRARRNLVAHRVAACNQLRAHLAVAFPAAAGLFYELDSPISLAFLARFGCHDAAAQVDEQQMTAWLQTVPARGNTAPASVLCARLRAAAPGATGADGTAQAAVTAALAATLTVLNAQVKTLETRIAAQLAAHPDAHVFTSLPRAGTLRAARLLAEIGDCRPKFPDPESLAGLAGIAPVTRQSGKHASIEFRWAVNRQLRDAFCDFAAGSRHASSWAAGIYDAARARGKDHPHAVRILARAWSYIIWRCWQDGTAYDPAKHTALQRILDQQPRQPADPAPEPGHPR

SEQ ID NO: 486921 - protein, 360 aa, unidentified
MEGNQESSDRRIVGGVDTHKDLHVAAVVDEVDRVLASQCFATTRHGYKQMLAWMRAFGSLQRVGIEATGTYGAGLMRYMQKAGVEVLEVTAPDKHDRRKRGKNDDLDAQNAAHAAFAGKRTVTPKSRDGMIESLRALKACRKTAVAARRVALQMIQNTIVCAPDELRETLRKMTRMQLIRTRAAWRPDLTDYRNVASAYRITLKSLGRRYLELHDEIADLDTMIVAIVDELAPALVARNSIGHETAAQLLLTAGDNVQRLRSEASFAALCGVSPVPASSGKTTRHRLSRGGDRAANSALHIIAIGRLRTDPRTQAYVAKRITEGHSKLEAIRCLKRYIAREVFSLIKQRSQERHPAPTAA

SEQ ID NO: 486922 - protein, 404 aa, unidentified
MIIVGLDWSRSKHDFVIMNPQGKVIEQGAVAHNANALEELAASVERHVSSVEQVHVGLELNNGALLAWLVVKGYSVFGIQPKSAQRFRDIYRPSGSKDDRIDAFVLAEFVRINKSRLRPWCPPSKITLELRELLRWREELVQQRTVAYQRLRALLAEWSPQLAELCDNLDCIWQLDLLSQFPTETRLCQAHGNRIRSFVHNHRMRPKKQLQIEDIRRSVPMPVPAGRAQVVERQTSFLVEQIRMLTVEIKHIEEDLQKLTTQHPDINVFESLPVQGIVTIASLLAIFGDDRKRDISVDELAALCWVAPVTIASGKTKRVRQRRACDHTFRQALVHFAFNTAFCDGCWAAQFYQRKRSEGATHYVALRCLTKRWLKILHRIWKDRTTYNEQLHQANQRRNQNHAA

SEQ ID NO: 486923 - protein, 338 aa, unidentified
MSIVMGLDQHRGQITGEWIDTETGEVRRTRVTPADRAAVRKFLARFRGRELEVALEATTGWRFVVEELRRVGALVHLAEPAETAGLRGPKKRAKNDRADARHLRELLMVGRLPESWIAPDHILDLRARVRLRHTLSEQRSEWQQRIQATLYHHGCPQRRSLLIGDGREWLAAQPLPTAAREQVTVALAMIDALEAQVAPLDRELRAYARRQAGCRALMAHYGIGPLVAVTILAELGDCTRFSSSRHAVRYAGMDITVHESDQRRAPGHLSRQGPPALRWALFEAAQSACRRGSPDLEYYGQAVERLGHNRACLAIARKLLKRSYHTLRELGEEALAPA

SEQ ID NO: 486924 - protein, 404 aa, unidentified
MYNAVGIDVSKGKSTVAVLQPGGTVIRKPFDVSHTSQNLNELADYLSSLDGTTKIVMECTGRYHEPMVKALSEAGLFVSIVNPHLIKNFGNNSLRKVKSDPADARKIARYTLDNWTELRQYSGMDNTRTQLKTLNSQFSFFMKQKVAAKANLIALLDNTYPGVNKLFDSPTREDGSEKWVDYAYSFWHADCVRKIGLKAFTERYKSFCKKHHYIFQQDKPEKLFNASKELVAVFPKEKTYKLLIQQSIQQSNLASEHVERLRREMNELASTLPEYSTVMGIYGVGKTYGPQLIAEIGDVSRFTHREALTAFAGVDPGVDESDQHKSKSNRASKVGSARLRKTLFQIMTTLLQNAPEDDPVYRFLNKKRSQGKPYYVYMTAGANKFLRIYYGKVKECLRNLEQTE

SEQ ID NO: 486925 - protein, 363 aa, unidentified
MLFVGIDQHKRHLTICVRDEQGEIALRRQVSTKWEEVDRFLASLQERGAEHGGYVAAMEVCGFNGWLIKRLEQWGCRRVYVIKAPDRVRQKTDRRDAAKLSELLWINRDRIAAGQSLVHVSEVYQPTDQEQYDRQLTHLRHRLGRALTRAKNSMKGILRRHNLEQECPTKGSFTQAALRWLGVVKLPGLDRLELDMRLTEYHLYAKQLVDVTAMIEKRAAKNADVRRIRTIPKPGAYTALALVAHIGPIERFPHARSLSNYFGITPGCRNSGDTDRPGSITKAGHPFIRFLLAQMVLHALRGDPGLRRWYQRVKRRRGSKVARVAVMRRLCESIWHMLSKKEDYRPVDCRGDDNGKRACRSAA

SEQ ID NO: 486926 - protein, 323 aa, unidentified
MTRIICGVDIASSSLEARLGRQGALTSFANNAAGIAALAAFCHAHHVELVAMEATGGYERQAFAGLSQHDLPVAILNPRAVRQFALSMGRLEKTDAIDAGMIAWYAEVKQSPPLCLAPAAQLHLRALVTRLRQLTAIRTAQLNQQRLITDGNVAASFTELLALVNRQIEELAAAIATLIDADPLWRELNHTFRSIKGVADRTVARLMAEMPEIGTLSNKTISKLAGLAPLARDSGKHQGKRTVRGGRAAVREILFIVASVVGRYEPDFIAFRQRLAAAGKPPKVVRIALAHKLLVRLNAKAKQVRQRRTNTPCNGAGAPAMTN

SEQ ID NO: 486927 - protein, 457 aa, unidentified
MNRKRSKPKIDRRMPMVHPNAAAIDVGATMHMAAVRAERTPEPVRSFGTFTTDLHRLVNWFKECGVETVVMESTSVYWIPIFELLDARGFTVFLVNARDAKHVPGRKTDVSDAQWLQRLHSFGLLRASFRPKGQIAELRAYVRQRERLLEYAASHIQHMQKALTQMNLQLHHVVADITGVTGVQIIRAILAGERDPKVLARLRHYNCHSSAETIEKALTGSYRAEHLFALEQALALYDAYHEKVSACDVRIEAVLKELSIGRGCRSDSLPSSRRRTDQANGLAFDVRAALFALLGKDITQIDGLGPYLSLKLIAECGDDLSAWPSSKHFTSWLCLAPSNKISGGKVLSSRTRRCGSRASALLRLAAVTVGRTDTALGAFYRRLSARIGKAKAVTATARKIAVLFYNAVRHGMEYVDPGASFYETRYRKRVVDNLHRRAKAFGFVLQPMEPTPDVVVS

SEQ ID NO: 486928 - protein, 420 aa, unidentified
MKVVYSTCCGVDVHKTFLVATIIKTTKGVQPSYQKKRFSTFNSDIRRFKQWLLDNSCFDVCMESTGKYWIPVFNLLEDQINVTIANPKWVKAVKGNKDDAKDSKWIGDLFRLGLVPGSFIPCKEIRILREYTRYRFKLTCCKRSEKNRFQNAFTVCNVALDAVVTDMFGKSASSITDYLITSDEFDPETCKSFLQKSLKKKADAVIESIEGYQMTSSQKERMLMVRSHLEFMQQSIDSLDSKLDELTAPYENAVSLLCTIPGVDRASAITIISEIDTDMTQFNSSKRLCCWAGLTPGNNESAGKKKSVRITRAGVYLKPALVQCAHAAVKSTATPYYKNKCERLAKRRGKKRAIIAIARMILTAVYHMLSTRETWNPCDLYKIDMPKEMQDKQKAKAVKQALKLLISQGVISPESAPTAV

SEQ ID NO: 486929 - protein, 429 aa, unidentified
MKPKPDLKQCAVLIGLDWADEKHDVALRVPGSPTLQLGTFAHTPEAIAAWVAALRQRFGQGPIALCLEQSRGALLNALSAHENLLLYPINPQMLAKFRAALHPSGKKDDPIDATLLLQLLEHFGDQLTPWQPDDATTRQLALLVEARRGFVDQCTGLANQLQAVLKSYFPQALALVGEDLTTRMATDFLKRWSTLAAVQAAKPSVLRAFYYGHNSRSEDLITQRLAVVKNAVALTSDPAIVGAQSLAAGSLAGALAALRPVLARYDEAIARLFAAHPDAPIFSSLDGAGAVLAPRLLVAFGTDRDRFADADAMPRYSGTAPVTVKSGKQKWVHRRWARPVFVHQSFIEFAGCSVRCSGWAKRCYDGLIQKGQGHWAALRVLAVKWQRVIWRCWRDRTPYDEATYVKSLQKRGLKLYADLAVEGAQTHGE

SEQ ID NO: 486930 - protein, 351 aa, unidentified
MNFIGIDLHKKTISACVMNQDRKVLKRQTLPCSEPKQIVAFFRQWGEFQAVVEATASYEWLWQLLEPLAQRLVLAHPKKLRVIAESKNKSDKLDAQVLADFLALNMIPEAYRPTLRQRQHRALVRQRCYVKKNLTRVRNKIRRLVSDYNADRRDLFTHEGLSYLREAEKKFSEVDRFVLHQLQMQWEYHQQQLQVVNRRLKTFAGKAPCKEKEIRAVLGSMPSVGPTTIEIVLSEIGDIERFRSNKPVVAYAGLAPGHRESAGHKKDLGITKEGSRLLRWALVQTAWRTLRCSVRWRCVYENLKKRRGSKRAIVAVARRLLTVMAALWRTGQCYRLEGGDPAGIPALVPAR

SEQ ID NO: 486931 - protein, 331 aa, unidentified
MTFKIYIGIDISKLTLDVFIKEVQAHKKFKNDLSGFNSLLKWVKIQSKESCESMLFCFEHTGLYSLPFAQFLEENSIPFSMISALEIKRSLGITRGKNDIVDSRRIADFACRFYDRITLTKLPAKEIANLQSLLSLRGRLSVALGGFTVSRNESLKFIGKNSTPELFSSYDKMIITLKSEIKALEKAIIEIIRNNEELRRTYELITSIKGVGLIVACNLIAYTNNFTRFSNWRKFACYSGIAPFEYQSGTSVRGKSQVNSLANKQMKKLLHLAAICAIHTDTELQEYYTRRQSEGKPKMAIINIVRNKIVARVFAVVKRDTPFVDLRKYAA

SEQ ID NO: 486932 - protein, 338 aa, unidentified
MEPTTIAIDLAKRVFQVHFVEPDTGTIHSKVLKRAQLKPFFANRARCRVVMEACGSAHHWARQLAALGHDVRLIAAQFVRPFVKSNKNDAADAAAIWEAAQRPGMRFVAVKTEDQQAMLALHRMRQQLVRIRVMQVNQLRGLLYEFGVVLPQGRRTAIEAAKASLASLAEQLPAMLTDSLQDQISRLLVLDDQIQRIEMRITEWRRGDEACRRISEIPGVGLLTATAAVAVIGNAQAFRSGREFAAYLGLVPRQNGSGGKVKLGGISKRGDVYLRTLLIHGARSVISGARHLPERMRAMLARRPTNVVAVALANKVARTIWALLAYGRTYQPPTSTPA

SEQ ID NO: 486933 - protein, 376 aa, unidentified
MNHDSTVFVGLDVHKESITVAYAIDMGDVELLGKIGTLKADIDRLCKRLQSKARHVRVVYEAGPCGYGLYRELVERGFDCVICAPSLIPKKPGERVKTDRRDAVKLVRALRAGDLSVVHVPDVEDEAFRDLARAWAAAKADLRQARQRLKSFLLSHGVRYSGNANWGPAHRRWISVFAFPNPWQQLAFDECRRTIEDRFAQCERLEATLHEAVVGWRFYPAILGLQTMRGIQFITAVGMLSELGDLSRFEHPRQLMAWLGVTPSEHSSGERRRQGSITKNGNSYARKLLVEAAWSYRYPARVSPEIERRHEGIPKRILDRAWDAQVRLCRRYRKLAARGKNVNIAVVAVARELAGFIWDISKLAMSLAVTRNEQSA

SEQ ID NO: 486934 - protein, 419 aa, unidentified
MEYLHYIGFDVHKKSIQYCTKLADGEIVKEGRIAATRTDLLAWAAQQSHPWKGALEATMFSAWIYDTLQPHARELKVAHPAMLKAIAASKHASDRLDARKIADLVRMDWIPGVWMAPPEIRSLRLVLRYRNLVVRQATQTKNRMASVLMEHGVEYSKQKLHQRGYFQELLGRLTEVPETVQQLLRTSRGGLELFASTQRMLLRRLKTDRTLAHRVALLDTVPGVGEVTALTWALEVGDPHRFPSVGRALSYCGLVAPLQESAGKSYRQPLSKKRNAHLQTTLIEAAHLAPRHSAELAALYERHKARRHAGAAAIAVARKLVAYLLAVDKSGQPFQPRPAADAPRSPTGKTAFPPEPPIGGRPVARRSSPSRVRSAAAGPPASPPPAETPPAAPWTAPGRRAGKTSATGGSGGKATRRPG

SEQ ID NO: 486935 - protein, 401 aa, unidentified
MEQGLDFDVVVGLDVGKAAHHAVALDREGRRLIDREVENTEEDLRAVLARAGQSGRILVVVDQLNSIGALPVAVAHATSTAVAYLPGLSMRRLADLHPGNAKTDARDAFVIANAALTAPHALRALDIPSEAQADLSMLLGYDDDLAEACSAAISRLRGLLVHIHPSLEKSLGDNVSHEAVLRLLIKAGGPAGLRALGRARIDRELAKHAPRIHERLADEIWDGLAAQTVTVPGTTAAARVLPGIASQILQLRDQRRQVAQDVERVLDAHPLSEVLTSMPGIGVRIAARFLAETGGDVAAFPTAAHLAAYAGLAPVTRRSGTSIRGEHVNRGGNKRLKNALFMAAFASLRADPESRAYYDRKRAEGKKHNAALICLARRKTDVLYAMVRDHRHFTPAHPKAA

SEQ ID NO: 486936 - protein, 403 aa, unidentified
MGATCGIDWASDWHDVHIADEHGALLVAEQFSHDERGISALIELLRSSEVECCAIERPDGLLVGRLLAAGIVVLAIHPNQVKAARDRFRAAAGKNDRFDAFVLCELARTDRHRFPVLAPSSDETLALKALMRTREDLVDARVALANQLRAQLQAFWPGAERIFADIDSPIGLAFLERYPSPVDARSLGEKRLESFIARHAYCGRRTPAELLARLRSAPNAIVGELEQDARRSAVIGLVAALRPIVEQISQLTSQIAGATRTHPDGAIFLAFFRDPKSVVTAAGLLAEIGDNRARYPTNDSLAADAGQAPVTIQSGKRSNATFRWACDKRLRKHMSVLADSTRHWHPWAREVYQRARTRGCTHPHAIRILGRAWSRILWRCWQDHTPYDPAQHKALNQLLAQKG

SEQ ID NO: 486937 - protein, 411 aa, unidentified
MDVVYARWAGLDVHKATVVACVRSPGLRAETRPAETQTLATTLRGLAALAAWLTAHAVTHVAMESTGVYWRPVFAVLEGTVQVQLVNARHVKMLPGRKTDVRDCEGLAQLLECGLVRGSFIPPAAVRDLRDLTRLRKTLIRERGPHVNRIAKTLELANIKLGSVVTDIMGKTGRAILQALSIGRADPEYLAAGAQGRLRKKPAALREAVEGRLTPHYAFLLPQHLALIDTLDAHMATLDTRSEAAMVPFAETAAVMQTMPGVAPRAAEAILAETGVDMSPFPTAAHFASWARLCPGNHESAGTRRSTRTGKGATWLRATLQEAAWAAVHTKKSYYRALSDRLKARGGPKKAIVAVQHAMLVALWHMLKRRVSHQDLGADYFAQRNTERTLRHHVRRLEQLGYHVLLAKEAA

SEQ ID NO: 486938 - protein, 344 aa, unidentified
MILIGVDPHKSSHTAVAVDAAGHQVAQRRFVVNAGTFRQLMRWCEQWPDRRFAVEGAGGLGRSLAQQLAAAGENVVDVPSTLSARARLLATGGDRKTDAKDALHVAQVALFRHDLRPVGQEDQTTILRLLTERRDDLVHERTRVLNRLHAILRDLLPGGAPTGLTADKAAALMKGIRPVTATDNCRRDIARDLLADLRRLDRQVKDNEAEMREAVAATRTTLTALPGLGTVLAAKVIGHIGNVSRFPTEHHFASYTGSAPLDASSGNNVRHRLNTGGNRALNSVLHTIAICQIRDGGRGQDYYLRKISEGKTPSEARRALKRRLSNVVYRIMKRDQRTHLAQAA

SEQ ID NO: 486939 - protein, 383 aa, unidentified
MTLDRHFRQCVGIDVSKDKFTACLQMYDRASDVGCHTMSIDFDNTKSGFNQFVKWSRKEAVKGFPLTYLMEPTGVYYEPLAYHLHKIGQTVYVVLPNKARSFCEAEGIKTKTDAMDARCLALMGCTSRKLKPWSPPAPIYRELRQMTRFHTDLSQIMTSVMNRMESLNHMEEADKTVRKNCQKLIDEIDTLMENNDKAIMQKITEDKELEARVKRIAKTKGLGVTTVVCIVAETEGFHLIENRKQLTSYAGLDVRAKQSGREDPKHAISKKGNAHIRAALYMPALVAVRYNPQIKTVYGRICQKHPKQKKIGVTAAMRRLLLLIYTLWKNGEEYDPMRDKTHTHQKKMKEEDTELEYEPEDCIGPKRDPADWNATDEHGNPPF

SEQ ID NO: 486940 - protein, 480 aa, unidentified
MNESIFQRKNQDIVDLFESAEHPKKVACVALDYAKGTHTALICDGEGKRLKGAFPVENNADGLKYIFERVDKVCRKHNISHNHVFFGGEACGTYALNFIHAIEQRGFLVISVDPKEAKDQRASFQASTDKLDLLGIAKVLLSMRGSSDSVSAESERQLRNVTRHRADLVVSKTAVSNRIHSIVDQLFPNFLDENKSGIPAFSETSLWLMEDRFSPRQIKSRKLSTTVQNARKHGLKQPDGCIKMLQEHACSVLQPVPEWVGTLQTTLHHEVQLYRKLLLCVEQADKEVALHLACVPAAMMTTIKGIGITLAAGVGAEIGSPEKQPAIRRLTSYCGIIPRVKQTGGPDGEPRYGKVSRRCNHVLKNFIVQCGNHAGQHGPAELKEDHRRRGANGQHADFGMARRVLRISMRLMLDTQAYVPPALRERADKDELATYYLKSWERLRRIWQKSGALEVAFDSKNPLGKWRDCVQELYEIKLPL

SEQ ID NO: 486941 - protein, 384 aa, unidentified
MYKHNILFIGLDTHKVSTEVAHVEDQRGAKPVHFGKINTTKAAITKLARQYQSKYPHATLHFVYEAGPCGYWIYRLLTSLGHCCYVVAPSLIPKKPGERVKTDKRDALKLAKLLKDEELTPIYVPESEDEAIRDLSRARETAMADLKDAKYQLKALFLRNNITCKVNDNWSLQHLRWLTELILPHPSQQIVLQEMIQTITERIGREKRLANELFHQVKQWRFYPVVKALQAVRGIRLLIATGIVAELGDLRRFDHPRKLMAYLGLVPSEHSSSDKRRLGGITKCGNGRARRLLVQGAHTYKHKANISTELQKRQEGLPKEINDISWQAQLRLCRRYNRLMSRGKHRNVVVIAIAREMAAYIWAIAREVVISPVNPRLRISRVPA

SEQ ID NO: 486942 - protein, 367 aa, unidentified
MFKNSMLFTGLDLGDRHSHLISLDQDGELVEEARLPTTQASLARKFSGIPPCRVAIEVGAHSRWVSALLTRLGHEVLVADARKLRLIYKNPRKHDRADAEYLARLARLDPKLLSPIHHRSPQAQAHLAVIRARDSLVRARTQLVNHARGLVKTTGARLPSCSAASFHHKAATAIPQELLPALSPILATIGSLTQSIQAYDRQIQQLALDHYPETRLLRNVPGVGPVTSLAYILTLEDPQRFRKSRELGACLGLVPRTDQSGAQDPQLHITKTGDSYLRRLLVQSAQYILGPFGPDCDLRRWGLKLAERGGKSAKKRAIVAVARKLAVLLHHLWKNGEIYDPLYRSQSAQRPAELARPSAQEAAIAPA

SEQ ID NO: 486943 - protein, 389 aa, unidentified
MICVGIDVAKDKHDCFILNSEGAVLADVFTIPNNLEGFNTLLDKLRGCSTSQDSIKVGLEATGHYSYNILGFLLDNGLATYVLNPLRTNLYRKSLSLRKTKTDRVDARTIAAMLLSDAGLKPYTDTAYHNEELKSLTRYRFDKVKERAKLKTSVSRLVCILFPELENVVSTLHAASVYALLEEFPGAKQIADAHLTRLKTLLADASRGQCGRDMAVEIRDAARCSIGSRMPAKSLELQHTIRLIRELDAEIEEIETAIQSIMEELHSPITTIPGIGYRMGAMILAEVGDFSRFDSPDKLLAYAGMSPSTYQSGQLKNCYPHMEKRGSRYLRYALYNAAKYVCHWDPAFAAYLAKKRAEGKHYNVALSHAAKKLVRLIFALEKSRQPYCP

SEQ ID NO: 486944 - protein, 428 aa, unidentified
MSQRNYNKQVKKRQRIKRTTLVIGIDVGRAFNAVAYMDKEGNILGKYPKVYNSRAGFDFFVKVTEQIKKKHGMKDVLIALEPTGHYWRNIAYFAKEKGYDVQFIRTTSVKHQRELDDSSSAKTDIRDALTIANLTREGKYIDTIIGDGVWRQLRTLVKVREKIRKYNISSKNTLEAALDDYFPELRKIFWAVNTKGIWAILERCPFPEDVLKVDISELREIIGKVSRRRKVAAQKAIKLHEAAKESIGIKEIGQSDRYRVKMCLQEVKRTEGLVKEAEKKIKGLLKQIEYTEYLLSIPGVGPLSAAVVLGELGNPPHFKHARQIIKYAGYDPQENDSGQRIGRKVISKKGRWLLRKCLYFMCLRVVMKTRFFKEFYQRKLEKKNRFGQNLKKKEALCAVIIKLINVIHALLRDKRCFYDTVDCLAKAA

SEQ ID NO: 486945 - protein, 348 aa, unidentified
MNFYTQQHKHYCGIDLHAKARYVCILDQHGTKLVHKNLPTTPEAFLRILAPYREDMVVGVECIFTWYWLADLCQKEGIAFVLGHALYRKALHGGKAKNDKIDAHKIAVLLRGGMFPLAYVYPAEMRATRDLLRRRCHLVRKRAELLAHSHNTNSQDNLPEISQKLAYKANREGVEEHFPDPSVRKTVELAVSLIDHYDKLLGEVELSLTRTAKGHDGPPFTRLQSVPGIGPILALVILYEIQDIARFPRVQDFVSYCRLVKCAKESNGERLGTSGKKIGNVHLRRAFAEAALLFLRQHQLGKASFTKPEHKHGKAKALTVLAHKLARAVYSMLAREQAFDLQRFVPAS

SEQ ID NO: 486946 - protein, 354 aa, unidentified
MMIIGCDYHPGFEQIALVDTETGELQERRLQHREEAEKFYRDLAAQGGKVRVGMEASGHARWFEGLVSELGFELWIGDAAEIRTKRVRKQKTDRQDAQLILRLLLEDRFPRIWVPSGENRDLRQLLWHRHRMVQARTRIMNQLQAVALNEGLRCKKRLWRDAGRAQLESFRLAPWASRRRRDLLELLDRLTPTIAELTQAVEQEAEKCPEAQRLRTHPGVGALTALAFVLIIGRAERFPCGKQLASYLGLVPLEESSGQRRRLGHITKQGNSLLRFLLVEAAQVTVRSDPAWRSKYFHLAMRRGRKIAKVAMARRLAVRMYWMWRKGWDYEQMTKFSSHAGQPGNRDGVQPNTE

SEQ ID NO: 486947 - protein, 466 aa, unidentified
MKDNRHRRPSKPRVSPSVLDRINPNAAGIDCGSGEHFVAVPPDRDPSPVQSFKTFTSDLSCLADWLTACGVTSVAMEATGVYWIPIYEILEARGFEVLLVNARHIKNVPGRKSDVSDCEWLRDLHSVGLLRGSFRPADTIVALRAYLRHRQTLVESAGTYIQRMQKALVQMNLQLPLVVSDITGVTGLRILRDIVAGQRDPQYLAEHRDPRCRASKAEIIAALTGNYRPEHLFILKQNLELFDACQVQIITSDQAIEAHVQTLTTQVGAPAAPLPAPRVTRKPRDNEPTFEIRTPLHQLTGGVDLTQIDGIAPYSALKLIAEIGTDTRRWATEKHFTSWLTLAPKNKVSGGRLLSSRTQPSANRAARILRMTAMSLSRTPTALGAFYRRLAARIGKPQAITATARKLAILVYRALKSELVYRDPGADAYTLQQRTRALRRIRQHAATLGFDLLNRETGEILHAAIS

SEQ ID NO: 486948 - protein, 358 aa, unidentified
MDVSKARAPMTAGLDIGDRYSYLCLIDTLSGEVIEEGRLRTTPEALGRRFASERPPMRIAIEAGTHSPWVSRVLEGLGHEVLVANARKLRLIYANKRKTDEVDAENLARLARLDPKLLYPLKHRGEVGQAHLAIIRSRQALVDCRTQLVNHVRGAVKSFGHRLPKCPARSFHKRAKEHIPEALRPALEPVLEQIASLTERIRGYDRQLETICQEHYPETELLRQVEGIGPLTALTFVLTLEDPHRFEKSRSVGAYLGLVPATGRSGDSDPQKRISKEGDEMLRKLLVGSAHYVLGPFGSDSDLRRHGEKIATRGAKNSKKRAAVAVARKLAVLLHSLWINAEVYDPLRNARTPGVRAA

SEQ ID NO: 486949 - protein, 427 aa, unidentified
MPGARCTRSLVCAIGSKYAHEYSQRAIGKHPTFPHAMVYGLYRALVSAKSVRMCERAVLTNRPSLDLSPFVLEGHRACRGAWDRSGVFLNPNSCMGLEPEPSKEGSWMMAQNDLVVAGIDVAKDKVDVCIRSLSLRRTFAATAEGRRELASWLRRRKVSKAVMEASGGYEREWAKALRNAKIEVRIVDPKRVRSFARSAGRLAKNDTIDAEMIAWFAETFDEAPGQAHDAARETLAQIVNARLGLLELQTKLQNRGEHAGPEPVQKMHARLLKKIAAEVAKLEAVIAAMIKATPHFAELAEIIESVPGLAGTTSAGLIAKMPELGQVSNKVAPALLGTAPYDDDSGRRRGERHIKGGRRKVRNLFYMACLGAATQHNPVLKAFYRRLIAKGKEPKVALVACMRKLIVILNTMIARRQKWDANLYVLG

SEQ ID NO: 486950 - protein, 341 aa, unidentified
MGQASTIGLDIAKWVFQAHGADATGRVVFRKRLVRAKVLEFFAGQPSCLVALEACGGAHYWARELGKLGHTVRLIPPAYVKPFVKRQKNDVADAEAICEAAQRPGMRFVPVKDEAQQANAVVFRARDLLVRQRTQCINALRGHLAEYGHVVPQGPAHVDSLVALVEDPKSSVPESARGILRVLIRMLNALEEQLKELDGEIARRAKADPVARRLMTIPGIGPIAATAITALVPAPEGFRAGRDFAAWLGLTPLQKSTGGKHKLGAISKRGERTIRRLLILGASAVVRWASRRGAAAGSWLARMLARKPRMLVTTALANKMARIVWALLVKGGTYRAPAVAA

SEQ ID NO: 486951 - protein, 436 aa, unidentified
MAVEFVGGPEQAEFMARVRGVEPGQVLLVPVDVGKSEAMAMVTDLRGEIVTPPFKFALTVSGVAALRARTSAAVEERAAVLCRVGVETAGHYHRTLVTSLVGGSVEVIELNPAAVKHARAQQLRSRQKTDERDLAAMADLMARGAGRPPQSRAEVLAAQLAWVGHRRRKVEIYRRMRQQIHAQIDLVFPGLSSCFSSLFETRAGRLILSELCCPDRVVRLGPTRLERFAANRGARMTRDKANQVVDAARDSLALPTPERAVLAEILAADVALFERVEADMVRAEAELARLLPDTPAAVLTSLPGVSTIRASAYGAALGDPHRFRNADAAYAFAGLSPASYDSAGKVRPGLGITKARSINLRAAILELGLGLGQSEESFINYRAQLIARGKPRQVAAVAVAHRAHRLAFAMLRDGQPFDPTQSADRSVMTTRSSPTT

SEQ ID NO: 486952 - protein, 436 aa, unidentified
MTLINFVAANQKYYAFNLLSVFIMVFWSVQYLLQHLLVQTQVSHQLLQPLILILQLPQTPQFRHARPGKFFLPVNGMDYFLPLRLTVRNVLTRRITMNIVFLGIDLAKNVFQLCGLNQAGKPVYTKRTGRKELLQTLANIPACLIGIEASTGAFYWQRELEKLGHKVKVISPQYVRPFVRGQKNDGNDAQAIAVALMQPTMQFVPPKSPEQQDIQALHRARQRIVNHRTATVCQIRGLLLDRGIPIGSAVSRARRAIPLILEDAENGLSSRMRRTIAELYDLFNDLGRRIHFFDKEIETVFRQSEACPRIAKVKGIGPKTATAVVAAIGKGTEFKNGRHFAAWLGLVPRQHSSGDSQVLMNMTKKGDKHLRTLFIHGARAVVRVATNNNDGHMNQWVNQLKERRGFNKTTVAVANKNARIIWSMLRNDTGYQVVCN

SEQ ID NO: 486953 - protein, 343 aa, unidentified
MDHFAGLDVSVKDTSVCIVDETGRIVREVKVASEPDALLAVLTNPAYHFKRIGLEAGPLSQWLFSVLAEAGLPVICVETRHMRAVLKAQINKTDRNDARGIAQMMRVGLYRPVHVKTLRSQKLRMLLTHRKLLQSKAIAIENDLRGTLRNFGLKVGMVGTVKFEARIKELIANLPDLAELIEPLLIARQVIRDQFAILHRRLLAIVRDDEVCRRLMTVPGVGPVVALTYRATVDVPARFRNSKAVGAVLGLTPAKHQSGERDQTGGISRCGDEMMRMMLYEAAQVMLMRSVKWSWLKAWAMKIAKHRGLKKAIVALARRLAVIMHRIWVDGTEFRWTREVTAT

SEQ ID NO: 486954 - protein, 351 aa, unidentified
MIIIGIDYHPSFQQIAFVDQETGECGERQLNHSDGEAERFYRELKQRGVSVRVGMEATGHSRWFERLLAELGFELWIGDPAEIKAKRVRKQKTDREDARLLLKLLLEKRFPRIWVPSPENRDLRQLLWHRHRLVQMRTRIMNQLQAVAMNEGYRWKKKLFSEKGRGLLEKLPLAPWSSRRRKELLELLDHLNPKIDELTAAVEQEAKKRPEVLLLMTHPGVGPITGLVYVLVIGTPDRFPCGKQIGSYTGLIPCEDSSAGRQRLGHVSKQGNTLLRFLLGEAAQAAARCNQDWRRRYVHLMMRREKRIAKVAMARKLAVRLYWMWRNNWQYSQLVEFGSNAGKLGTVHGVK

SEQ ID NO: 486955 - protein, 357 aa, unidentified
MTKLKQFADFTGFSLYVGIDVHLKNWDVSVNLGKQNIRSFHQAAECSVLINTLKRDYPNAEIHCAYEAGFSGFWLQRELTNAGISCIVVNAADIPQTDKERKTKTDRRDSKKIAQALEAGQLNPIFIPDIESEGHRRLVRYRLQLLRDLNKSKARVKHLLHQQGIAIPKNFKSGKWSKAFFQWLRTINTNIESIKYTLDKMIIQVEQTKQELKDVTNEMEKLLENEKYKKTADILMGIPGVGPITAATLIVEINDIRRFSSFKKFNSYIGFCPGEHSSGESERKGHIISRNHNVLRALLIEAAWMAVKKDPALLISYTNLIKRMTGKRAIIKIARKLLNRIYHVWYRGENYQKGVIN

SEQ ID NO: 486956 - protein, 331 aa, unidentified
MNSVGIDISKGRSTVAVMRPFGEVVISPFEVRHTDSELSELARQLKSLDGETRVVMEATGNYHAPVAKLLHDAGLYVSVINAKLVHGYGNNDLRRVKTDKKDAVKLANYGLDRWLTLPRYVPEEDTRLLLKNCYRQYRQYSKVQTILKNNLISLLDTVFPNANRLFSSPIRVDGSEKWVDFVAEFWHCRCVSEKSQKAFTNKYQRWCRKHGYNFSEAKAHTIHAEACGHIDVIPKSETTKLLVEQAVAQLRATSAALAALKHEMQALASMLPEYPVVMDMFGVGPTLGPQLIAEIGDVRRFYSKKALVAYAGLDAPPNDSGDVTGRHKSMD

SEQ ID NO: 486957 - protein, 325 aa, unidentified
MDPDDKHGIAEKMSDNLPQTIGIDISKASLDCHVHPAGAERQFSNTAKGHKALIAWLRQWPVERIAYEATATYHRALEAALADWPCVKLNPERARRFAQATGTLAKTDRIDAMLLARMAATLQPPVRPARSAQQAQIAELINARDGLVRDRTALKNREKNLTIAFLKRQCRQRLEQIERHIEALDTEIANLIAADAALARRHEILTSIAGVGTLTANQLIATMPELGSLENKQAASLAGLAPVARQSGQWKGKSFIRGGRANVRQALYMPALVAARYNPDLKAKYQQLVTAGKPAKIAITAVMRKLVVTANALLKADRCWTQSPA

SEQ ID NO: 486958 - protein, 385 aa, unidentified
MTSTSTRFRIIPAQFDIFAGLDVDKKSMATTFSDHGTLVKSLRLPYSATHLLNYVNKHFAGKRIAFVYEAGPTGFGLHDELVAGNHTCLVVAPSMVPTEPGKRVKTNRLDSRNLSVRLRGGELNGIHVPGRRYRELRHLVQLRDLHVRQLSASKCRIKALLLYEGIEFPDPKGRWNARAVAALYGLPCSSEVRFKLEHLIGSLYFHFNAAATVQKRIRQFCKNDPELHQSITLLTTLPGVGWITAAHAVARLGDWRELKNVRQIAGFLGLVSSEHSTGEKENRGPITRSGDSRLRNKLIQCAWVAINKDPELRAFYRSVYQRQAKKVAARKAIVAVARKLTTRMSVVLKEQRPYVIRPEVFVAPLTAEETLGPRERLDASQNEQL

SEQ ID NO: 486959 - protein, 343 aa, unidentified
MGEVITIGLDIAKSVFQVHGVDDAGVVVMRKRVGRSKVLQLFGGLSPCLVGIEACPSAHYWSRELQALGHTVKLMPPSYVKAYLKRSKNDANDAAAICEAVTRPSMRFVPIKTQEQQTGLMLHRTRQLLVRQRTMLSNAIRGHMAEFGIISAKGRNGTAELLQIIGNVSDDRIPPVARFCLELLARQYLTLNAEVSSIDKRIHAWHRSCEQSRRLEQIPGIGPIVATALVAEIGDWRAFRSGRSLAAWIGLVPTQHSTGGKERLGSITKQGNRYLRWLLVAGAMAVIRYARAHGTKRPWLTRIIDRRPAKVAAVALANKIARMAWAIMVRGERYTEPKPLLAA

SEQ ID NO: 486960 - protein, 378 aa, unidentified
MRFYNQAHRFYCGVDLHARTMYLCILDHRGQVVLHKEVPCEPAAFLEAIGPFRDGLVVACECLFCWYWLADLCQAQNITFVLGHALYMKAIHGGKAADDKTDSAKIAHLLRGGNLPIAYVYPKGLRETRDLLRRRMYLVHKRAEVVAHVVNTNSQYNLPPFGKKLIYARNRQALKIAQRFSDASVKKSIEVNLRLLDCLDDLIADVELYLERTVKVDDADTFYRLRSIPGVGKILALVLFYEIHDIKRFAGEGEFLSYARLIRPVKTSAGKVKGSGGGKIGNAHLKWSFSEAACLLARESDQAKRFLARKEKKHGKPKALGILAARLGRAVYHMLWQKKPFDPKRFWNGEPGVTPEKLKKSVVKRPRRAKGSRCVLQA

SEQ ID NO: 486961 - protein, 343 aa, unidentified
MQTITTIGLDIAKSVFQVHGVDAGGQVIVRRQLKRRYVLTFFQKLSPCLVGIEACASAHHWSRELQALGHTVRLMPPAYVKPYVKRQKNDATDAEAICEAVTRANMRFVPTKTPEQQSGLVLHRARHLFIRQKTSVINAIRAHLAEFGIVAPVGRHGVEELLNVVADPNDKRVPEIARACLSAFGAQLRMIKEQILEFDRLISAWHRSNELSMRLDEAPGVGPVLATALVAAVADPKSFRSGRNFSAWIGLVPKQHSSGGKNRLGNISKQGDRYLRGLFVAGALAVIRYAKIHGTTHRPWLTALLARRPTKVAAIALANKIARMVWAMMARGERYKEPFALAR

SEQ ID NO: 486962 - protein, 550 aa, unidentified
MHTGESTGAEVGRYISGAVKPDDKRGPRFRAPYRGYSLISTQADSDQKSTFIARPGRCLSGRGQAMFGQEKQPEEPGKQKTVAGKSKQRRRKKGMTLDDRPLLEPNAAGIDIGAREIFVAVPADRDENPVRVFPTFTADLEEMARWLVSCGVTTVAMESTGVYWIPLYDVLERHGVTPCLVNARNMKNVPGRRTDWHECQWLQFLHSVGLLRAAFRPDGDVCAVRSLMRHRSDLVQIAVQHIQHMQKSLTQMNLQIHHVISEITGVTGLAIVDAILAGERDPAVLAKLRDHRIHASEEIVQKSLVGNWRPEHLFTLKQSRQIYQQYQESITACDEEIERLVIAFEPRVDPSEHPLPPDRKAKQRKRKKRGVTPGVNPKTGFDTRTEAYKLFGVDVTQIPGLMMMALVLFSEIGRNMSKWPTADHFASWLGLCPDNDISGGKVLWKGMRGTRNRAGQLFRMAAFGLHHDLTPMGDHLRRMKSKIGPAAAQTATAHKIAIIFYTMVKNQVEYDASIWARRDAEREKKFEAKLKRQAHERGYKLVKIEENIAA

SEQ ID NO: 486963 - protein, 374 aa, unidentified
MNDITKYVGLDVSKEKIAVAVAEEGRSNPRYVGMIPYTVEDIRKQMKKLGEPELLRVCYEAGATGYGLYRLLKSMGIECEVIAPSLIPQKPGDRVKTDKRDAINLAKLYRAGELTPIYVPTEDDEALRDLVRAREDVKEDKLRAKHRLTKFLLRNEIKPPRGTKKWTVKYWDWLDKLTFKRSASRVVFQEYLQQLKEFQQRLNVLEKEIEEQAKEGVHAPMIQTLMTLRGVAVNTATSLAAEIGSFKRFQVPTQFMAYTGLVPSESSSGECRRLGSITKTGNRHVRILLIEAAWSYRYQPAVKGELKKRQKGHPTNILGISWKAQNRLHKKYFRLLGRGKESGKAITAIARELAGFIWAISHEFDGEVQTNGAD

SEQ ID NO: 486964 - protein, 400 aa, unidentified
MSVAVGIDIGAYKHAVAVCRAGEREADRWTMQISANRAGFRQLAGWMQTLAEPVSVVVMESSGHYWYNLASHLHRAGIRVAVVNPLESKYFGKRRLQRSKSDRADARTLAALGMHDQPRAQRPLAQSELREAARFSMRLVREQAEVCQRIQRLIDLGFPELREVWDDPTCVSALAVLRKAPTAAAVRRLRLDTLAALKRPGEGGRAIGPAKAEQLHALARESVAAPELEAQVGFEMRLLIQQHDFLDRQIAEADAHLASLLDGDTARRLLTIPGVGPATAATLLAEIGDIWRFTDVDQLLAYAGVHPKEQSSGQKGERPETSWTMAKTGNAFLRAAAYRMAVVGIKHNPVIRSHYARKRAAGKSPMNAVGHCMSKALSLIWGVWRSGRDFDPRQPQPRSA

SEQ ID NO: 486965 - protein, 420 aa, unidentified
MVYLERGYNLKELPWSKTVSNSFLFKEACMILVGVDVAKDKHDCYIMTSEGEVLFKSFTIANNMEGFNQLYEKILSVIDNFDNVKIGLEATGHYSYNILGYLLDKGLTPYVINPLHSNLYRKSLSLRKTKTDKVDSHIIASMLMSDVSLKPYSNTLYHNEELKSLTRYRFTKVQERAKLKISISRLVTILFPELEKLVPTLQMNSIYALLYEFPSAHAISKAHLTRLTNLLNTTSKGHYTKDKAVLIREAAKNSIGSNMPAKSLELKHTIKLIKELTSEINEIEEEIKIIMNKINSPILTIPGIGLSTGAQILAEIGDFKNFSSPDKLLAFAGLSPSTYQSGNMYSSNAKMEKRGSKYLRFALFNAAIYVSYWEPTFSQYLKKKRVEGKHYYVAISHVVKKLVRVIFHLEKTNERYSTVI

SEQ ID NO: 486966 - protein, 340 aa, unidentified
MGDITTIGLDLAKNVFQVHAVDVAGSVVLRKRLRRGQVLAFFAGLPPCLIGLEACATAHHWARELIALGHETRLMPPSYVKAYVKRNKHDVADAEAICEAVRRPSMRFVPLKTAEQQSALMMHRARDLLIRQRTMLVNALRGHLAEFGLVEAQGLHKVARLIAIVMDEMDARVPDIARQVLKVIVSQIEDIQTRIAGLETQVLAWHKSNPVSQRLATIPGIGPIIATAIAATVADPSTFRSGREFAAWLGLVPRQNSTGGKARLGGISKRGDSYLRRLLVNSAHTVLLCSRAAKTDPWLTSLLSRKPRLVVAVALANKTARMAWAIMSRPDLYRHAAVAA

SEQ ID NO: 486967 - protein, 342 aa, unidentified
MYYIGLDVHKKTISYCVKDASGQVHQEGKIGATRRELDNWVKTLPQPRTMAMEATIFTGWIYDHLLPHAQRVKVAHPLMLRAIAAAKKKNDQIDASKIADCLRCDFLPECHMASTQIRDRRRTLRYRHLLVRQMVQMKNRISGLLMETGVSYNKQRLHKVGYFRELLATSEDVHESIRPLLKLSRDTVVRLQKTEYALVSSLQRDPLLADRIQRLRTVPGVGPITALTWALDIGDVSRFRSIRQAISYCGLCGEEKSSGDKVMRTPLSKQRNKHIQRVLVEAAKLAPRQDHDLAQVYETEKQKGNANRATLAVARKMVAYLLAVDRAQRDFVPAENYQRAAA

SEQ ID NO: 486968 - protein, 348 aa, unidentified
MQVMHACCAGMDVHKDSVFVCVRRMSDDGKMSEEIRMFGTKTGQLLGLGDWLVSQGVRHAAMESTGVYWKPIWNLLENRVKLILVNAQHIKQVPGRKTDVKDCQWIAQLLQLGLLKASFVPDRPQRELRDLTRQRSQLVADHSRVANRIQKTLEDANIKLASVATDVLGVSGRQMLQALIQGNRSALHMAELARGRMRSKVPQLAEALDGRVNEHHRFMLKMLMEQIESLEKQIEAFNQRIEQVMGPFEKAAVAMLDGMPGVNQRAAQNIIAEIGTDMSRFASAEHLASWAGICPGNNQSAGKRKSGRWSSAPGARPARRIPSGWAATSASATGAAPGVPRWQWPIRN

SEQ ID NO: 486969 - protein, 378 aa, unidentified
MDVIYPRCAGLDVHAETIVACALWEEDGHIQKDIQTFSTFSKGLGDLLEWLEEHGVTHVAMESTGVYWKPVFAFLEGYVDLTLANPQRIKNVPGRKTDVSDAEWIAKLLRHGLIEKSFVPPADIRELRDFTRLRKKWVGQLTSEKNRIQKVLESSNVKLGSVLSDLFGVSGKDILARLLEKGYVDKDELDQCLRGRLKKKKQAVYDSLLGTLTEHELRLLRLLWKHVEELEQLIEEVDQHIDRLLEPYREEVNLLMTMPGVKKQTAAVIIAEMGTDMSVFETPERAASWTGLSPGNHESAGKRKSTRTTKGNPHLRSALCEAAWSAARSKTHPLSRKFWSLAARCGKKKALIAIARRMLVIIFCMISRKEPFRQPQLI

SEQ ID NO: 486970 - protein, 343 aa, unidentified
MKLSRVGVDLAKNVYQLHGVDRTGKTMLKRRLKRHQWLKVLLDKTESDCVIGMEACAGAHHWGRQLQARGYTVKLIPPQFVKPYVKSNKSDAKDAEAICEAMSRPNMRFVTVKRVEQQDIQATHRIRAELMTQRTAKANQIRGLVAEYGLVAPKHLSSLRAAIPCWLEDAENGLTADFRALLQGVWNDLLGLDDRVCEMDKLIKRLAENNEDCVRLQQLRGIGPMTSTAMIATVGDARQYHKGRQMAAAIGITPKQHSSGDKHRLLGISKRGDVYLRTLMIHGARAVVARATHKDDRLSRWVTNIAKQKHPNVAAVALANKTARMAWAMLRNETDYDPDYAIS

SEQ ID NO: 486971 - protein, 330 aa, unidentified
MTYVGIDVSKDTFTVAYSSDKNSKTKTFKNTVKGIHEFIQTISKEDTHCVLEATGNYSALLVYLFSEAGITTSLENPLKIKNFARVMLSVTKTDDVDARLIAMYGEKMNPSPYKLKEESILVLKQKRTVLRQLKKQLVATRNLKESMEILPLVDSTCKRTIEKTIIFLEKQIRNMEENITSLATQEYKKQMELLTSIKGIGVTLAAALIIATGGFTYFDNAKQFTRYLGLSPTYQQSGTSVNVKGHINRNGDSTLRSQLYVAAFASLRCNSECKECYDRLRSNGKPGKVAVVAVANKLVRQAFAVVTKEKEYVDGFVSEKPQKLQKHISA

SEQ ID NO: 486972 - protein, 390 aa, unidentified
MKPDGDKHSSFSIPNNRPGAEILVDRIVEVLHRLFIPKVVIGMESTSVYGDNLMYFLRETGKFSGFEKKLHMLNPKQVKKFRDTYSDLPKNDFVDAFIIADHLRFGRINKEVYMGDYRYEALKALTRARHQTVQSLTREKQRFLNQLFMKFSGLSQEKIFSNNFGATATAVIENFESLDELAYIDSDELADFIKKHGRGKFEDVDGIVSDLRKAAQNSYRPPTVIADSVNQILAISMSTIRLLQGQVKEYDKAIEKQLSTIPNTLTSVKGIGLVYAAGIIAEIGDINRFPSQASLAKYAGLTWTQRQSSEFEAEDTRLIRSGNHHLRYYLCEAANSLRKCDPEFRRFYNLKFHEVSKHQHRRALALTARKLVRLVYALLKTNRLYIPPEE

SEQ ID NO: 486973 - protein, 408 aa, unidentified
MWFAGIDWADDHHDAVVLTDQGQLLGALRVPHTAEGLDHLTRFLRGGASTSGAAEPVICLVETQHGLLITALLEAGFTVCPVNPLAVGRLRPPSGVKTDALDARLLARLGRNDWPALRVLPPDGPLLQELKTLTRDLEGLLREQTRLVNQLTACLKAYYPAALRCFDGLTRQVTLAFLQAFPTPEAAAAAALDQLDQLTQVLAQGHYPHPRQKAEQLAALLQAPQLHALPGVARAKARLMSALRAQLAVLTTQVAAFDQAIQQLFAQHADSAVFASLPGAGRRLAPRLVAEWGEDRTRYASAASVRALAGTAPVLFQSGAFRGVRRRRACVNAWRQALSHFAWESVLCEPWATASSQRKRAQGKTSAMALRAVANQWVRSIYAMWQARQPYQRAIFLAAQHAHGGMVA

SEQ ID NO: 486974 - protein, 402 aa, unidentified
MKQDIAKAISQQKAAALDGAGGWSRYGGFIGLDVHKETIAVAIAMPGRDEPVYRGEIAHEPKALKKWLDRLNDEFGGAVLLFCYEAGPCGYGLYRQLTEAGHECHVVAPSLIPKKPGERIKTDRRDALKLARLLRAGDLTAVWVPDTEQEAMRDLTRARDDMKSQERKARQQLNAFVLRHGHHWPRGKTRWTQAHHNWLESIRFEQPWLQIVLQEYIDAAKAASRRVADLTDQLMQALPGWSLAPVVDSLAALRGIDKLAATVLLAELGDISRFDSPKQLMAYLGLVPSEHSSGPRRRQGAITLTGNGHARRMLVESAWSYRFPARQTMHLKRKAQHASEQAKAIAWRAQKRLCGRYRQLSQAGKNIKLVCVAIAREVVGFIWDIVRHEMPRLEVQVAPTGR

SEQ ID NO: 486975 - protein, 356 aa, unidentified
MKKDQTTPQTVIGIDLGDKKHAVCVMNQAGKILRETSIPNNAASLKRLGGEFPAALAVIEVGTHSPWISRLLKDCGLTVLVANARKVKAIYANTRKSDRLDAVILARLGRLDPELLHPIEHNSEQAQRDLLPVKMRDTLVRQRTASITSLRGSMKSLGMRLPSCSSASFPKQARAMLGAEGRHDLLPIAEPILLSIECLSKQIVAYDKIIEETAAERYPAAARLREIPGVGPITSLSFVLMIENADRFSDSRDVGAWLGLVPRRDQSGDSDKQMPISKAGNRYLRRLLVQSAQYILGHFGPDCDLKRYGHRIAARGGKAAKKRAIIAMARKLSVLMLALWKQEGTYEPFRGGLPVA

SEQ ID NO: 486976 - protein, 432 aa, unidentified
MEEVTDEPLYRDRVCGIDIGKAVMAATIRVPSETNPARRMAGTRSFATTRRGVLELADWLRVWQVPAVAMEATGDYWKGPFYRLEAEGIECVLADARQIKNLPGRPRRDCSDSVWIAVCFERGSIRSCFVPAPEFRVIRLCTRYRRDLTNDRTRDKNRAGKLLESAALKISAVLSDVHGVSGRDIMDHLIAGERDPKVLAQLARRQARAKIPRLEAALEGAEFFTGAHAGLLKTMLARIDSASAEIARMDQVIEELLAPYEEQLQQAESMPGWGRRSARDVIAGTGTGMTRFPAPGHLASWSGRTPLDHQSGARPGKARRKHGNRYTGAATGETAVAAGRTGTREGARHRRLVRKRGKAKACVATGNTQMRVFHVLLSNPGMRYEDLGPGWYDDERQAARRLSRLVGALDSMGYEVTLCRKPDPAPEAAPVT

SEQ ID NO: 486977 - protein, 399 aa, unidentified
MGQQLWAGVDAGKSEHHCVVIDGDGQRVLSQRVANDETVLLELIDAVTTVADGEEVTWAIDLNHGGAALLIALLITAEQRLLYIPGRTLYHASGGYRGDGKTDAKDAAIIADQARMRRDLQPLRPGDEIAVDLRILTARRTDLVADRTRAINRLRAQLLEYFPALERAFDYSHSKAALILLSGYQTPDGLRRAGAARLDAWLRKRKAYNAAAVAARAIEAANAQHTTVPGQQIAAAMVARLAKEVMALDAEIGDTETMIEDRFRRHRHAEIILSMPGFGVALGAEFLAATGGDMSAFDSVDRLAGVSGLAPVPRDSGRISGNLKRPRRYDRRLLRACYLSAQIAIRTDPASRIYYDRKRSEGKTHTKAVIALARRRLNVLWAMLRDHAAYQPTTTAAAA

SEQ ID NO: 486978 - protein, 462 aa, unidentified
MTIPKKKGNRKNETPLPTSLPAIRPLVAGLDVGSSQHWVCGPAREDGKPNVRVFGTTTDQLHELADWLSEQGVESAAMESTSVYWIPIYELLESRGIEVILVNARQLHNVPGRKTDFSDCQWLQLLHSCGLLRGSFRPVEAITRLRALHRQVANLVAERTRCVQWMQKALDQMNVQVHRAVTDLTGATGMAIVRAIVCGERDPARLAMHRDPRCRKSAEEIARYLTGNWREEHLFNLASALRLFDALETEIASYDAQLLKEIAALQPPERQEEPAPPHPNPAKEKAIKARGDQQARTTLWRFAGVDLTRVDGISAGAAQVVLTEVGPNLAAFPSEDHFVSWLRLCPRTPISGGKPLKKRRNGLGANRISAVLRMAALSLERSKTALGASFRRVARHKGGAVAVFATARQLARLIYRMLRYGHDYVDIGEKAYDQRFQIRRLAALTETAKSLGYALVPNVAAG

SEQ ID NO: 486979 - protein, 403 aa, unidentified
MNAVGIDVAKGKRVVSILRPFGEVISSPFELCHTSSAIDDFIHSLSNLEGEVRIVLEYTGRYHEPIARWLSDADFYVSVVNPKLIKDFGNNSLRKVKSDKKDALKIARYALDNWNDLRQYCFMDKTRDQLKTMNRQFDFYMKHKTALKNNLIALLDQTFPGANTFFTSPVRKDGSQKWVDFVASFWHVDCVRKVSLSVFTERYRKFCVRKGYDFHPDKPAQIFEASKELIALLPKDKMTKNLIMQAIEQLNTLSRTIEQLRLQMDQTAAQLPEYPVVMAMKGVGPSLGPQIMAEIGDVRRFSRRGALTAFAGVDPGVNQSSTYNQKSVRTSKRGSAQLRKSLFQVMDVLVKTSPENDPVYAFLSKKRAEGKPYYVYMTAGANKFLRIYYGRVKEYLASLSEEE

SEQ ID NO: 486980 - protein, 407 aa, unidentified
MDVVIERACGMDVHKDNITACIMTPEGKEIQTFSTKTVFLIQLVDWIKEHNCTHVAMESTSVYWKPIVNLLEAEDIEFLVVNAQHMKAVPGRKTDVKDAEWIAKLLRHGLLKASYIPDRNQRELRELVRYRRSIIEERARQHNRIQKVLEGANIKLGSVVSDVMGVSGRDMLNAITEGEEDPEKLANFARRTMKKKKDELMLALKGYINSHQRLMLKTILKHIDLLTQQIEMPDHEVACRVSSHQEDVERLDSIPGIATRMAEQILSEIGTDVKNQFPSAAHMCSWAGLVPGHNESAGKRKSSKTKKGNKYLRSALTEAAHSVRGSKNYLGALYRRTASRKGKKRAGIVVAHAMLRIAYYLLTRKEIYVDLGEDYFDKQRQQSIVRHSLRRLESLGYSVTLQEPEAL

SEQ ID NO: 486981 - protein, 421 aa, unidentified
MTYSKPQKVRKIKSGTMIVAVDIGKGLHMGYFRAPGGEECKPFPFSNSKLSFNEFWGKVQEFFKRHALEEIVVGFESSGPYAEPLFHYLGKKPVKLVQVNPFHTKRVKELTGNSPNKTDRKDPRVIADVMSLGHALTLVVPKGAAAQLRRLTQARERAIKRRTAALNQLQDLIFIVFPEFSNIIKNISTKTAFYLIDKYPDPKSIAALGREGLAAIIKTVSRGKLRPQTAEALFHAARQCAGVQEGKRSILLEIEYLTSQIWGDHCFIANLEKEMEKHLEEIPYSHSILSIKGIGKVTAAGLIGEVGDFRAFGTISEITKLAGLDLFEISSGKHNGQRRISKRGRGLLRKLLYFGAINMVKTNGILHEPYQQMVGRGMLKMKALVAMARKLLRIIFALARDNAVYVENHGGICNQHLKLAA

SEQ ID NO: 486982 - protein, 478 aa, unidentified
MPRQKKHPKKAGGEKTQASQGRKQKGMCLGERPILEPNAAGIDIGAREIYVAVPPDRDENPVRVFSTFTEDLQKMAQWLVNCGITTAAMESTGVYWIPPYDVLEQHGVKPCLVDARGMKNVPGRRTDWHECQWLQFLHSVGLLRAAFRPEAKVCAVRSLMRHRSEQVLMANQHIQHMHKALTQMNVQIHHVISDITGLTGLAIVDAIIQGERDPEALAELRDPHIRASEETIRKSLQGNWRAEHLFTLKQSRTSYQHYQEQINACDEEIEKVLLSFESRVDPEQRPLPPDRKRKQRGRKKKNVNPKTGFDVRTESYKLFGVDLTQIPGLMAMVLTLFSEIGRDMSRWPTAGHFISWLALCPDNDISGGRVLWRGMRKVHNRAGDLFRLAAYSLHHDETALGDYLRRMKSKLGPAGATTATAHKIAIIFYTMVKLQVEYDPTIWAQRDSERKKRFEAKLKRQAQQLGYKMVPIEQDPAA

SEQ ID NO: 486983 - protein, 379 aa, unidentified
MRNVRFVGLDVHAQTIAVAVAETGGEVRSLGVVPNRAESINKLIRKLGKPEQLRVCYEAGPTGYVLYWQLTKLGVRCEVVAPTLIPVKPGDRVKTDRRDAEKLARCYRAGDLTAVWVPDAAHEALRDLVRAREAAKSDQLRARNRLGKFLLRQGRRAAEGTKAWTGKYLKWIKEQVHFEQPAQEATLLDYLHEVEHAGERIQRLEKSIDTAIETVPQKMRAVIQGLQSLRGIAKVSAVSIVAELGEISRFAKPSQLMGYSGAVSSEDSSGERTQRGAISKAGNAHLRRIVVEAAWSYRHRPSIGAALAARQKDNSEEVKQIAWKAQHRLHGRYSKLLAKGKTKQKVVTAVGRELLGFIWAIGVQVEQTVSARAPKRRAA

SEQ ID NO: 486984 - protein, 318 aa, unidentified
MNTKINQSINVGVDTGKTQLDIHIRPLDLFFSVENNDKGIKKALKTIKSHSPERIVIEATGRLEMPFVLACAEAQLPIVRANPVHIKRFAGAIGRRAKNDRLDAELIAHHGEAIKPALTVIKPKNIRLMSDLVIRRNQLLSMQTMEKNRIQILPASLHPTIKPMLTTIKNQITKLEEKLVKLIKDSPEYQAKNTILQSVPGIGNIAAASIISNVPELGYITNKQAASLIGVAPITRESRRYKGKRVIQGGRAQVRTVLYMAMMPAIQCNPVFKVTYARLLAAGKPKKVAIIACVRKMVVTLNSMLRDGAMWDENTAKN

SEQ ID NO: 486985 - protein, 346 aa, unidentified
MSKISIIGIDLAKQVFQLHGNDSRGHKVLGKQLKRDQLLPFLATQPACLVAMEACGGAHYWARQIKALGHEVKIIHPRYVKPFVQVHKNDQRDAQAIAEAAARPSMPSVAVKSVEQLDIQALHRVRERLVKEKTAIGNELRGLLLEMGITIAQGHKSLRETVPLILEDAEQTLSVRARHLIHDLREQWLERERRIADYDRELKLIAKESAVCEAIQSLPGIGPINSTLLYSHAGDAEHFKSSRHFSAYLGLTPRQHATGGVEKMLGISKQGNKHVRKQLVHGARAAYRVLSQPDNDSRLGRWVKSKSMEGKHVNKIVVALANKLARIVWAIMKTGQPYQPMRGLEA

SEQ ID NO: 486986 - protein, 360 aa, unidentified
MTGTMTWAAMDVHARSIYTASLDVMSGELRRQRFDTGAAEPVVQWLVGLPGPVRCCYEAGPTGFGLYRAAVAAGVDCQVIAPSKTPRASGDRHKSDRRDTDLLLRQLMAGALTAVTVPSVTFEAARDLARAREQVRVDLMRCRHRLSKLLLRHGRVWDRSAWTKAHRQWLSAQTFTQPNTELAFIDNLAACDGLSARREALDERLSHIVTDPEFWPTVRRLRAFRGIDTLSALIITLEVADFTRFSRAPQLGSWLGLVPSREQSGESDAYGSITKTGSKYARRILVEAAWHYARQPRVGRTLYERQEGLPDHVVQIALRAQRRLYRVHKRMRERNKAGNVITVACARELACFLWAAATAP

SEQ ID NO: 486987 - protein, 463 aa, unidentified
MMKRRKLASKAEKPRREKVDWKTLEIVHPDAAGIDIGGREHWVAISPDRDEDPVRRFDCFTADLEQMAKWLVEKGVCSVAMQSTGVYWMPVYEVLEQSGLEVYLVNARHTKNLPGRKSDVQECQWLLKLHTFGLLNNSFQPTDEIRVARTMWRHRSSLVAQAGGAIQRMQKTLTEMNVQIHNVLSDLSGVSGMAILKAILKGARDPWQLAAFANPAVKASPADIAKSLHGNWREELLLVLRHEMELYQTYQDKIAECDHQLRKHLQSLASRVDLQAQPLGARPKGKKAPRGNTPKFDLRSELYRITGIDWSQVNGIDVQIAQTVITEVGVDLSSFPSERHFASWLGLCPMNEQSGGKILNRRTPKVVNRATVAFRLAAQGLLRSQSYLGAQYRRLRTRLGAPKAITAMARKLACLFYRLLRHGQPYVDKGAQYYESRYREQQIRSLTKRAHKLALELVEPKPA

SEQ ID NO: 486988 - protein, 359 aa, unidentified
MDATTVAVDLAKSVFELAVANQHWRVVQRARLSRAQFERWFQNRSVGLVVMEACGSAHHWARFFQQRGIAVKLLPPRYVRAYVKRNKTDAADAAALLEAARCADIVPVKVKSIEQQSLQSLHRVRSAWMASRTSRINALRGFCREFGIVIAEGSRLGTEQIARVLADPNSAVPPMLRDTLKLLIEEIRLLEARIAQLERELTLAAKASAACTTLLSVPGIGLLTATALVAATGGSVSHFKDARHFASWFGLTPKEYSSGSSRHLGRISKRGDRYLRMLLTHGARSVLRAATVAQRGGRPLDPLRLWGLAVQRRSNHNKATCALANKLARICYATLRDQEPYEKTRLGKKIERQAFVMPA

SEQ ID NO: 486989 - protein, 348 aa, unidentified
MSEAYDGQQVVGMDLHRCRSVLVRMTADGRKLETTRITSSPAGLRRVIARAGKRPRVVLEATYGWYWAADTLAAAGAQVHLARPLGVKAFSYRRVKNDEKDAADLADLLRMGRLAEGQLAPAEIRELRELTRYRIKLVRLRTSCKDQVHAVLAKLGVPVTCTDIFGVWGNTWLDGLEPGQPYAGKVASLRRLAAELTAEITVLEAAIADLPGHHDGYHAIRALPGIGPVLAAVLVAEIGDITRFPHPARLCSQSGTAPRHRESDVKVTRGHITKQGSPLVRWALMEAIQHVPAGHPLRQRKDDILARRGTQAKNIAKVAAARQLLTWVFYAMRDGQVRALAASSPKAA

SEQ ID NO: 486990 - protein, 412 aa, unidentified
MNPVIGLDVSKGESQVQAFLDKGKPYRKSFSIKHNTDGLGSLLEFLHEVESSTGGHPPTVVLESTGHYHFPVIQFLEEHNYIYIIVNPLISHRAKSSSLRKVKTDAIDAYHLCELFYKEELEPYKKRGIQLLNLRNLTRQQESIAEVSAQTKIQLHTLLDQVFPEYRGVFGSLYSKVSLLTLLAFPTSEVVLSVSEREITDKIASLCMSRSNAWANEKAKKLREAALRNPFQNNLYQSNIFNLELLVKIVLQYQEHLSRIADEIDALAEEIEEYHILQSIPGIGEKIAATIISEIGEIDRFNDAKKLVAFAGVDPSVYSSGKFTASVNRITKRGSSRLRHALYMAVQSGIRDSRKKKTTDEILARNKRLREFYDKKREEGKPFRVAVIACVNKLLHWIYALLKSRTTFQDIA

SEQ ID NO: 486991 - protein, 443 aa, unidentified
MELSKAQKRSIEKRKSIEGKTIVAIDPASKKHQVAILSPEALPMMASFKIFNTGQGFKRLLRKLEGIKKEFPTVNFLFAVEPSGHYWIPLLFFFKKRGYQFVLVPGLFVKRSREIEDHTSRQDDPKDAHIIGELALHGKYCEERQPQDIYAELRNFSNDWLELSQEKAAVRMKIRMLLDRYFPEFIDLFSDFLGATGRFLLSTCPFPKDVLKQEMTLLKEQVYKISRCRIDDERVMELKEAAETSIGIDEGMLGARFRLCHLLEKYELYEQHQKEIVCEIDAYLNCIEYTPFLLNLPGVGLISVMLLLGQTGDLRNYHTVADLLSYAGLDLIYADSGNRVGKRRISKRGRKQLRLILYQMTLAFVQHHNIARRKYLKQRIAGKKPTQAIVSSISFFVRVMFSVVKQARDYRALDCSDPLYQEIKLLEQQLADQKKSNSQKKAA

SEQ ID NO: 486992 - protein, 420 aa, unidentified
MEILVERCAGLDVHKDIVVACVRVPGLAGERETKMASFATFTEDLLALRDWLSQLGVTRVGMEATGVYWKPVFYVLEEEFDCWLLNARHMRNVPGRKTDVGDAQWICQLTEHGLVRASFVPPGEIRAVRELTRYRRTVIEERGREAQRLDKVLQDAGIKLSSVASDILGASGRAMLQALVSGTEDPAVLADLAKGLLRKKLPQLRSALDGRFGAAHSVLVAEILAHLDYKDEAIGRLSVAIDEQIAPFADARDRLCTIPGVDRRIAEAIIGEIGVDMTRFATPGHLASWAGMCPGQHESAGKSKKGTARKGDSWLQRHLAVAAMAAARTKGTYLSSQYHRLAARRGKMRARKAVGHTILVAVWHILSDPKVTFVDLGPDWFDRRNSPELRARRKLSELRALGCAVIPNGDGTTTVVLPAA

SEQ ID NO: 486993 - protein, 436 aa, unidentified
MRGCRCSMIMGFTKPIEHFNLQRKKVITMNTLYVGIDVSSKSNVVYLMLPNGDKHSNFSVANSHEGSTLLVKKIYSALTSHSLDTVLIGLEATSVYGVNLVYFLREDATLAPFNRKIHVLNPKQVKKFHDAYNDLPKNDYVDSFVIADCLRFGRINKEVYMGDYRYKALQNLTRARFFAVQNLVKEKQRFMNVLFKKYSTMTQEKVFSDAFSTTALAVYDEFESAEALANMDLHELTDFIIEKGKNRFPDPDAVAKAIQKAARSSYRLPKTVNDSVNQVLSISITSMKALESQIKEFDKAIIALMELLPNVLISIPGIGPVYSAGIMAEIGDINRFDNQASLAKYAGLAWKQHQSGGFEAEVTRLIPSGNRFLKYYLCEAAFSLVRCDKKYSDFYHLKYKEVNRCQHKRALALTARKFVRLVFRLLKDNRLYCPAK

SEQ ID NO: 486994 - protein, 445 aa, unidentified
MHYKRLLSLIDSVSSYLSVGLDVGADFTWMSIALPNGSFIGKPFKIIHSDPRSRDLAVTKIKEAQETYSLKSRCFLESTGIYHIPLLCFLRDKGFDCSVINPIITKNSTNINIRKLHNDKFDSKKAALVGLNVSLKTSILPDDSVVDLRNLVRDYYYFKDLQSAVALKLTAELKVSFPAYAKVFSKVTTQSSLKLLSSYPLPEDMLAASKEDIVDIIRSTARFGEAYALRKYDAIISAAQDAAVFGRALPSNAVRIRLYIDTYQEYQKHLDALLKALHETVEKLQDTLIYDQICLLQSLYGIGFLSAVVLVAEMGDFKLFSSPKKLYAYFGLDPAVKQSGKLNGDKVHMSKRGSSLARRVLHMAALNNVKVAKGSGTPVNPVVYDYYTRKCSCKKKPVAMGAVMHKICNIIFAMLRDNKPFEIITPEEHCRRFAAEHPDKIRKAA

SEQ ID NO: 486995 - protein, 464 aa, unidentified
MQQKKRNKNASRKKSGFSSFPIINKDAAGIDIGSEEHWVAVPEDRDEEPVRSFGCFTADLHAMAQWLKTCGITTVAMESTGVYWIPAHQILEQYGFEVFLVNARHVKNVPGRKSDVDDCQWVQRLHMYGLLSGSFRPSDQMCVLRAYWRHRENLIRYAAAHIQHMQKALTQMNVQLHKVLADINSVTGMRIIRAIIAGERDREKLALMRAPGVRSTPEEIAKALEGDYREEHLFALKQAVELYDFYHKQIEACDQEIERYLQTFDSKVDLLKNPLPRPKRKGKKLVKNQSFVDLRTELYRVSGIDFTQIPGFDALTVQKIVSEVGLDPGKFPTEKHFVSWLGLCPNNRITGGKVISTKTRKTNNRAAAAFRIAAQSLANSTSGLGGFYRRIRGRLGAPKAITATAHKLARIFYRMWTTGQSYKDLGSDYYENRYKERVLRNITKRARDLGYEAILQPLQQQGVA

SEQ ID NO: 486996 - protein, 373 aa, unidentified
MANVQEGFAKGKPIYVGLDVHKRQWVVTVLCQGEELYHGTVVPEPAALVRLLKRFQASEVHTVYEAGPTGYWLHDALVGAGFDSMVTPPSLVPRMGSKVKTDRRDSRKLASMLASGFLRRVHLLTAEEQAHRQLLRTRNQIERHRRRTQNQIKSLLLFHGKQVPASVRERWSDAYLHWIETLSWDHQALKVSIDAMLKLYRDVTEQYKQLTHQIELLALTEKYQERAGLLTQIPGIGIFTAMAILIELQDIERFRRADQLASYLGLTPSQHSSGERIQMGHITRCGNYEVRTRLVESSWTLIRYDTNAKATYERIKHQTGSGRKAITALARRLALRVRRVLLDKAPYRLTDGGRLATGRDKQREVKRFVLRSL

SEQ ID NO: 486997 - protein, 414 aa, unidentified
MDIVFHRCAGIDVHKKTVVVAIIATRDDGSVHQETRTFGTMTADLLDLSDWLTLHNITHVAMESTGDYWKPVFNILEGNFEVWLINAQHLSKVPGHKTDVGDAEWIADLLRHGLVRPSFIPPVAQRDLRELTRYRSTFVRERATLVNRVQKLLESANIKLSSVATDVLGVSGRAILEALIVGQATPEQMAELAKGRLRNKREQLTKALEGRVKPHHRFVLTELLCQIDALDETIDRFDEQVKAYCLPFEEAVALWDTIPGIARRAAEIIVSEIGTDMTRFASADHLSSWAGVAPGNNQSGGKRRRAKTPKGNQTLNEILTEVALAASHTKNTYLSALYHRVAARRGHKRAIRAVAHAILIIGYHLMLRKEPYRELGADYFDKRRPQATANRLVKRLQRLGYDVTIQKQPETLAA

SEQ ID NO: 486998 - protein, 408 aa, unidentified
MRIIGMDIHREFAEVVTLDGAELTHLGRVKMTRDNLAAFAVKLEATDHVVLESTGNTTAVVEILSPHVARVAVANPLQVHLIAKAKTKTDKIDAGVLAKLYGAGFLPEVWTPDEATLARRRQVARRTQLVKHRVRLKAYVQSILHAHLVPRCPHADLFGGKGRTWLGVQQLPDDERVSVERHVAEYDRLSVALKDIERDIAKSALGDGNVTRLMTIPGIDMIVAVGVMAAIGRIDRFRSPDALVAYIGLNPSVFQSGDGPARHGRITKRGRSHARFLLVEAAWQTVRSPGPLRAFYERVRGRRGNHIAAVAVARKLAVLVWHLLTKEEDYAWASPALMARKRRSMELAAGMPSERGKKGASADYNLPHRRRADRAGAELSEIAYRRMMEGWRRKSRQKSAGATTEERL

SEQ ID NO: 486999 - protein, 317 aa, unidentified
MSKISIVGLDLAKNVFQVHGVDASGGVVLRRQLRRGAVEKFFAQLPPCTVGVEACGSAHHWARVIGRYGHQVRLMPPAYVKPYVKRNKNDGRDAEAICEAVSRPTMRFVPVKSVEQQATMAVHTTRALLVRQRTMVANSLRAALSEIGIVAAQGIEGLRELMAKLEAPHEEVPEIMRGALLLLAKHWQALDADERVLERQIAKAARSDREARRLMEVPGVGPIIASTVLAKVPDAKVFRSGRDFAAWIGLTGRDHGTGGKHRPGRISKQGDRMLRALARRPYKVVMVALAAKTARILWAMLVKGEPYRDRASASAAA

SEQ ID NO: 487000 - protein, 369 aa, unidentified
MRDRITYVGLDVHKDGIVVAIAEGGRRGEVREYGRIANTPAALQRLARKLGQEGVELRFCYEAGPCGYGIQRQLSALGHECIVVAPSLIPKRAGDRVKTDRRDAASLAKLHRAGELTAVWVPDPGHEAMRDLVRTRLDAVRALRRARQQLSGFLLRQGCHYGRPAWTKLHRRWLAGLKFEQAVHHIVLEDYIAAVEAAEARRDRLTAQIEAMLPDWTLAPVVAALQTMRGMALVNAATLIAELGDLSRFGNPRQLMAYLGLVPSEHSSGASIKRGGLTKAGNSAARRLLIEAAWTYRFPARVSRELRLRQEEQPRVIREIAWKAQLRLCARYRKLARSGKPPNVVTAAIARELAGFIWAIARRVPPAAG

SEQ ID NO: 487001 - protein, 358 aa, unidentified
MNSKAFIPRDYDVFAGLDVDKKSISVTFTNHQGFIGSLRVPYSAEHLVKHVRKHFPDQKVAFAYEAGPTGYGLYDGIVAQDYPCLIASPSMIPKAPGQRVKTNRLDSRGISENLRGGQLKSIHVPAVLYRELRHLTQLRDTFVSAMVAMKQRIKSLLLMEGLEFPPAPAGSQWSFMVKAKLRKLPCSSMVRFELDQLLDSLEFNEKQIVKTTQQIRRLCQNDAELSQCIKYVMSVSGIGQIVASQLLARIGDWRELRNVRQLGAFLGLVPTENSTGERTDRGSITHSGDPRLRSKLIQAAWSAIRKDGELKEFFRAVCQSHARPVASRVAIVAVARKLTVLISVVLMEQRPYVVRKKV

SEQ ID NO: 487002 - protein, 355 aa, unidentified
MKYDYTGKKVYVGIDVHKKTYALYCLSEGRKVKSWSMEANPQQLIEQLKSFFAGARICSAYEAGFSGFALHRQLVAAGISNIVVNPGSIETASRDKVKTDKRDAKKIAEQLSDGRLRSIYIPALEEELRRLSTRKRQTLVSDRKRVTCRIKAKLFEFGYNELVTDKQANESWVKSLIDYGFFPPELKEDLDYWCKQWLELTKDIKEQNKRIAKESRANKESTQQEEIYRSAPGLGNITAKALSRELGDLQRFERAKGLYSYLGLTPSESSSGERRKQGGISHCGRPYLRHLLTEVAWRSVGKDVELAEKFELLSYRRGKKRAIVAIARILIGRIRACFKNGTLYQTQVIKERACA

SEQ ID NO: 487003 - protein, 415 aa, unidentified
MSRFNKIVYPICCGMDVHRDFLIACVASTNDVGVTTYESKRFSTFAGSLRDLCAWLAARNCRDVCMESTGKYWFHIHRALEKSCNVVVTHPKFVKAIKGKKTDKKDAQWIADLFKHDFVRGSFIPPEDIRSLRDLCRYWCKLTSCTTGEKNRFHNCLTVSGFKLDAVFTNVFGKSASGIIEHLLAHPGEEFDVAQFVSGRCKTPIEQIQAAVDGEFAPQQADKLRIIRSHMDFLEELKRRLEAAILAIADKYPAHMELLLTVPGIADRLTAARIIGEIGVNMSVFETSKHLTSWAGLTPQNAESAGKKKTTRIGKAGIHIKPLLVQIAIAASRSDKYPELKLKRLILKKRRGGKKATIAIARRLLTAIYHMFARGVEYRPFVAADKPPKPRHLTPQQALKLVAKLGYTITEPEVA

SEQ ID NO: 487004 - protein, 341 aa, unidentified
MTFYCGIDLHSKRSHVCIIDKNGKKVKEENLSNDLSLILDFLKPFGRDVHIAIESTINWYWIVDGLKEAGYDVRLAHTLGLYMITGAKVKTDRRDAFKLARLLRMGEIPEAYIYPKEKRPLRDLLRRRAGLVQQRASCYCSLRIQFIRYNLNTMSLNDLRYLLPSDIDAMPIPQQLKDYCKMILERVELLSRQIREIDTYLKTVTLEDQKFKVLLTIPGVLYTLGLTIYYEVGDIDRFNSVKQFASYCRLVPGISQSSDKVKRGKGSKQGNHYLKFAFTQAAHMATRYYPRFRKFRDKHANRRKGNATTMVANCILAHKMATATFHMLKEGTPFDEAKLFG

SEQ ID NO: 487005 - protein, 362 aa, unidentified
MEYFCGLDVSIDETAVCVVDAQGDVHLQTVAVTDAAALFAVLEPYLPRLRRVGHEAGSLSPWLHPEMLKLGLPAICLETVHVRAAMSAQRNKTDKADALGIAHVMRTGWFRRAHVKTEGCYRMRLLLTHRRNLKRKFLDLENAIRHSLKAFGIRLGGTGRSKFDAAVREAVADDPFTTDLMEAMLTARAALWKEYCRLHDLVVKMVAQSELCRRFMAIPGVGPVTALSFMTAIDDPSRFRRSRDVAAYFGLTSRRWQSGTSIDVKGRISKAGDADVRRALYEAASALMTRFKGKDDLKTWGTALAKRSCHRKATVAVARKLAVIMHAMWSAGTFYTGVPNDGAAQADARQVRKERKLLGAHA

SEQ ID NO: 487006 - protein, 388 aa, unidentified
MRAADHRPEDQTAIHTDLSAIFVSLELSRSTWLITSLSPGGGEKMSKHSVRGGDVAGLLQRFSELQQRAERRTGRRVPIVVIQEAGLDGFWIHRMLEAEGIESHVVDAASIATSRRRRRAKTDRIDGEALVRALLAYKRGEPRVCAMVRIPTPEEEDRRRISRERKTLTAERVAHVNRIKGLLFSQGIEYEPLHRNRRARLEGLRTRDGQPLPDHLKQQIGRELDRLELLLEQIKAVESERDAMLASAKKEEVPTPAKMLMDLKGIGAEFAAVLWLEGLFRHFDNRRQVAAYAGLAPTPWQSGTVDREQGVGKSGNPRLRTTMLQLAWLWLRHQPDSALSRWFHERVNRNGGRFRKTMITALARKLLVALWKYVTAGVVIEGATIRTA

SEQ ID NO: 487007 - protein, 360 aa, unidentified
MASEGFAKLLKTIKAHSRDLTKAKAAMESTGCYHMNLFCFLVSEGLPCYVINPLLTANFAKLSLRKTKTDKKDAMLIAQFLLMHKDALAKAEPSHNLQDLKDLAREKESLTGLVAALKNDIKRMLQITFPELEKRCNVFSETMRDFLKQFPSARLIRTADIKAVQQALTQYDGRKTAAFYAEDLIAEAQKSVASDSIAKELIIPEKIATLEYLMERRDKITKALVVACEALMIEDIEIITSIGGIGNTTASAFLAEVGDFRLFSSHKHLIAFAGLDPSIHQSGKFEGKSRISKRGNRHLRHLIYLMTSRVVRQDNQFKVYYKKRRAEWLPFKKAIMATAHKLLRVIFAMLSSRTTYAARG

SEQ ID NO: 487008 - protein, 385 aa, unidentified
MKTNSDTPQTIYIGLDVHKEKTSIAILESARDAEPRFYGEINTSQHALERATRRIAKQQNRKLSDLHVCYEASGCGFWIARRLLQMGVKCEVIAPSLIPTKSGDRVKTDKRDALKLAKNLRSNDLVPVNIPDSVDEAVRDLCRGRTDAVDDLRRARARLLALLRRLGYNYTGKTHWNQAHMNYLRGLKLPDSAHNIILEDNLTLIDFNEKRVEKIEAEMLNLLADWQRRPLVEAMMAFKGFKLIAAMVTVSEIGTFSRFEHPKKLMAFLGLVPSENSSGNKRRQGSISKCGNPHARWILIEQATHYRYPPKISEQLSRRQAGQDRWVLELSWSTQIRLNTRFKSLRKRLLHHNKTKVAVARELCAFLWELGTRIESKAAPQTTNN

SEQ ID NO: 487009 - protein, 397 aa, unidentified
MVAVAEVSVSLEDMEFQCRRFGTTRKELEHLGAWLEQQGVREVVMESTAQYWRPVWLELEGRFQQYLAQAWSNRAPHGRKTDFKDAQRLVRRHVSGELTWSFVPPAQQRQVRTLTRRRVQLVHDRVRLQNQLEALLEEMRIKLSSLVTDLLGASGRRILTALAEGISDPETLAELGDARLKCTREQWQDAFPGPIPQVSRKLLALWLEQLALLDRQIEELFQLAAAAMQDWQDVLGRLVEVPGIRVLAAQQIVAEAGPDAAAFPSAAQFVSWFGACPGRNESAGENHSGRCPKGNRYLRRTLCPAAQAAVQTKNSHFQPVFRRLLPRLGYSKAIWAVARHMGVVIWHILHNQARYEERGQLSTPQAIKRRFQYLAKQLREIGYTVEIKPPVATPPPA

SEQ ID NO: 487010 - protein, 337 aa, unidentified
MEDIIYDHYIAIDWAAANMAIARMTKKSNKINVIDVPSDIKELQFYLKNLKGSKILTIEETTTSQWLYTELIDYVDKLLICDPHRNRLLSEGPKTDKIDASKLVRLLKACLLKEVYHSDNKFLHLRKLVSGYEDLIKAAVRLKTQRYSLLRACGKSGYEKGNVKLGSRSEQFVLEGMKKQIAANEEERQNYEKEFKRLSRQYPEIRHQKSLPGIGDINAVKIVARVVTPWRFADKGRYLSYSGLIKHEKVSGGKSYGKKNSRYSRQLKSIYKMGVVAALGGNNPINDYYEYLILEKGYPPYHARHKACRRLATLSFGVLKSGKQYQPYKRGSIRISQ

SEQ ID NO: 487011 - protein, 485 aa, unidentified
MHLFPGRILRCRLVLRLYYKAFAETKSCLLVKPDLEMEMKLVLTTTNNTNEQFAARIGLDWADQKHFWSMCTSDGKRQRGETDNTPEAVEVWACELGQRFGGRPIAVALEQARGSVIAMLSKYSHLVLFPVHSTSMANYRKSFSPSGAKSDYQDADLILDLLTRHPEKLKCLHPDTVETRQLQFLTEQRRKLVDLHTSQVQYLIDWLKQVFPQVLQWFDKPSTALVEAFLLRWPTLQNVQKASPKVVLKFLHQHNCRSEERNQQRLAEIRQALPATHDPALLSSGVLCIQNSVRILAEMRNGIANFDRQIAETFQAHPDRAIMQSFPGAGPVLEPRLIAAVGTQRDRFESADNLTAYTGIAPVTESSGNACWIHWRWACPTFVRQTFHEWADCSIQTCAWARAYYDKQRARGKGHHAAIRALAFKWIRIFFRCWRDRVPYDEQRYLQSIAARAANGVPSENSTRTKPTVVLKTCGSFKKLAALSC

SEQ ID NO: 487012 - protein, 428 aa, unidentified
MTTENYVAYIGIDWADRKHDIALYDCASKTWQESIIQTRPQDILDWVNQLRARYGEGKIAVGMEQKRGPLLYALCQYDNLVLFPINPRTVANYRKAFQPSRAKSDPVDARLLVELMQKHPDKLERWVAGCPQTRALRQWVESRRMLVGEKVRLTNRITASLKSYFPQLLDWFEDKDTLVFCEFIEQFPSVGAAQAATPEQLTQFFRAHKVIRKSAINRRIQQIQEAGPPLTRDEAIVLPAQALTRTLIALLKVILNQLTDFNAKIADLFEALPDAQLFADLPGAGPHLAPRLLVAFGAERDRFASAQAFMSYVGIAPVKEESGKKRWVHWRWSCPIFLRQTFVEWTNQSRRFSPWAQAFYLQQKRAGKSHQKAIRALAYKWGRILWRCWQDQTAYDEEKYLAALARKKSPLIKFLGTMTTEAQTIESV

SEQ ID NO: 487013 - protein, 320 aa, unidentified
MMAQNEVVVVGIDVAKDKVDACIRAFKLRQTWPSTAQGHRKLVAWLRKHQVNKAVMEASGGYERAWARVLREAGIEVRIVDPKRVRSFALSAGRLAKNDAIDAEMIAWFAETFSEAPSQPHDAEREELQALVKARLDLIDFRMRLVSQSEHAAPGLVQKAHAHILKSLASEIAKLEAAISAKIKSTPDFAERAEIIESVPGLAQTSSANLVAGMPELGQVSDEIAAALIGVAPYDDDSGKRRGERHIKGGRRWVRNAIYMPCVGAATQNNPVLRAYYQRLLAKGKEPKVAIIACMRKLIVILNTMIARRQKWDPSRHALS

SEQ ID NO: 487014 - protein, 351 aa, unidentified
MNYVGIDIHKRYSVLVALDERGRELKRCRINGNTAFGFDQFFSGLDGKSKVVVEACWNWGRIYDLLSEIEQVEEVVLAHPLKTRLIADAQIKTDGLDAHGLATLLRGDLVARAYVPSKPTRQRKEVLRQRLYWARLRTRVRNRIHALIDRQGELSMPQCSDLFGRKGLNALNKLCLKEPDATLLREELALLELIQSQIKAQEARIVEFNSKDETTLRLQSIPGMGKILAAVAAVEIDCVERFSSAAKLCAYAGLVPRTHASGGRVYQGPLVQSRNKWLQWAFIEAAWVAIGCSAYFGGLYRQHRARGKNANIAITSIARRMCQISFTLLKERRDFIEAFPGRSAVRLTAAA

SEQ ID NO: 487015 - protein, 414 aa, unidentified
MLPPDIECVVGIDVAKQAHVVCALEVPSGVVRHPPSRIEATAEGFALLRSWLETWGAPERILIGLEATGPLWEPLYEHLTQAGYGVLLLNPRQTSSWASSLGRRAKTDGLDAQTLARGLLAGWARASTLPSESVQALRTLTRTRRDLIQSRTATRQRLQDELVTLFPEFVRFLSTLPGRTDLGAPAVLALLRRYSSAQALAQVSLAELTTTLDQLSGGRWGGAQAQALQDLAQQSTASSRALAARSLVARTLAQQLQELAAHLTEVEAAIAALLQDDADGQRLQAIPGSGPQTGATIQAELGDASRFARVDEVVAYAGLDPRTRQSGAFMGQKQLSKRGPGALRHALYLAAFVAARCAPEWRVRYQRLLDRGRAKKEAYLILARALLRVIYHLLRTGEAYDPALLKQPTAPSAA

SEQ ID NO: 487016 - protein, 342 aa, unidentified
MSTIQTIGIDLAKNVFSIHGVDAYGKCVLRKTVKRNKLLEIFANLPPCLVGMEACSGAHHWARELSKLGHTPRIMASKYVIPYRQNEKNDANDAEAICEAVSRPKTRFVSIKSAEQQAVLTLHRIRQSLIKNRTATINQLRGLLSEFGIIIPQGRYPLQNTIPSILEDAENGLPMLARELLYDLVNRIHDINDEVLRYDRKIYALVSQMKEAKKLMTIPGVGEHSATAIVATVSDGKQFRSSRQFSAWIGLVPRQYTTGGHVQLGRISKRGDRHIRTLLIHGARAVIARCKDKTDRNSLWLQQLVERRGYKRATVALAAKNARIIWALLTSENEYKVNYING

SEQ ID NO: 487017 - protein, 483 aa, unidentified
MKPKQVESNKKASCRATPNHWQRMNHKQRREMLRKIQSADLSLEVVHPDAAGIDIGNESHYVAVPSARDRQPVRRFGCTTAEVKAMADWLKQCKIQTIAMQSTGVYWVSVYDILEEAGFEVYLVNANETRNLPGRKSDVQESQWLMKLHTYGLLRNSFRPSREIRTMRTYWRQRNDLVRAAGRHIQRMQKALTQMNIQRANVLSDVSGMTGQAIVQAILAGERHPYQLAALRNWRGKASQEEIARSLEGNWQEEHLFVLQQEQDGYQFCLKQMAECDQRLQQYLQLQEDRSHGASLPEEKRKERLRKKKKGNTPQFDLRTELFRMTGTDLTQIDGIDVTTTMTILSEAGWDMSKWKTEHHFVSWLRLCPDNRISGGKIIGKGRLPTNNRVTNALRMAASTLRLSSTYLGAQFRRLRTKLGAPVAIKAMAAKLARLVYRMLCYGMVFIDRGAEFYESQHRKLQINYLKRKAANLGFQIIEAPAA

SEQ ID NO: 487018 - protein, 346 aa, unidentified
MLHAGLDLSRRKIDVCLMSSAGEMVDEWASPPDADGLRGLAARAAMHGGPARGVIESMNGARFVHDRLEEHGWDVLIADATKVKGLAPLACKTDKIDARVLATLSARDLVPEIWLPDPSIRRERELARFRLHLVRHRTTLKNRIHATLVAFGHPCPVSDLFGLAGRELLDRLEIPDPWRRNVDVSLGLIDDLELQIARLTVELKRQGADHRYIPLLVTAPGLGWINAYTIASEIGDIGRFASPAKLCGYTGLCPRVKQSGATDARGPISKHGPKYLRWALFEAALNACRHPHYAERYQHTKRRLGRQRGPKVAQIDLSRKLTEAIWHMLTNNQPFAPAGATFRLAA

SEQ ID NO: 487019 - protein, 315 aa, unidentified
MAEGVYVGIDVSKAELVVAARPLGECVKLSNDRDGIRQLLARLGKWAPELVVMEATGGLQRQVMAALWSARIPAAAVNPAWVRSFAKGRGLLAKNDRKDAQLLALFAERERPQPRPPADSETQALQELVMRREQLVEMLVAEEHRLKRASAPVRKELRHHISYLEGRIKDSEEEIDKTVRRSDAWRRKRDIVHSVPGLGKVFCAMVLAKMPELGTLNGKQAGALVGGAPVARDSGTRHGPRVIAGGRFEVRHKLYMCALSAVRANPELKQFYRRLIARGKPKKLALVAVMRKLIVILNAMLKTNTLWRPPCPAST

SEQ ID NO: 487020 - protein, 410 aa, unidentified
MEVLHQRCAGLDVHKKNVVAAVRLAEGDKVVTEVKTFTTTIAGLLALSAWLTEHRCTQVGMEATGVYWKPVWHVLADTDMELILANAAHVKNLPGRKTDVSDAAWLADLLAHGLIRGSFVPDGPTQEFRDLLRTRKQLVREQTRHVQRIHKTLEDANLKIQSELSDMLGKSGRAMLKAVIAGETDPARLAALAHPGVKSPKDKLQEALRGRVTAHHRFLLKLHLAQVDQLDSAIATIDSEVEAHLAPFRTAVEIVSTIPGVGSLSAQVIVSEVGTDMSRFPSDGHLLSWAGFCPRNDESAGKRRSTRLRKGAPWLKTTLVECAWAASRKKGSYLQAQFLRLRSRRGPQKAICAVAASILTAVYHMLKNGTLYEDLGGDYFVRRSKTTHAQRLVKRLEQLGYAVDLKPPAA

SEQ ID NO: 487021 - protein, 411 aa, unidentified
MSVHDVVRPVEMVAVAVDVGKNTVAVSVTDDQRRRLLGPLDFAMTRPGLAATVAKIELVVPSQARVRVGVEAAGHYHQPLLVPSSWPAGWELRELNPGHVSEQRRAQGRRRVKTDAVDLEAITELVLTGRGSPVTARAEVLGELGAWVTHRRRRVETRTATKNQLLAELDRAFPGLTLALPDVLGTRVGRLVAEHFADPARLAVLGESRFVRFAGTRGLQVRGPVATRLVAAARDALPTRDAVVARTMLAEDLVLLGVLEDQVAAAEEHLAQVLPLSPFAVLTSVPGWAVVRAAGYGAAVGDPARWPGPRQVYRASGLSPAQYESAGKRRDGAISREGSATLRRALIDLGIGLWLNEAGAKSYAAGLRARGKKGGVIGCAMANRANRIAYAMVRDQTTFDARHWATDPQEG

SEQ ID NO: 487022 - protein, 350 aa, unidentified
MSIVGGLDIHRKQLTFGYLDTVSGEVRRGQICPADRAHLSAWLAGRFTGQTADFAMEGCTGWRYVAEELAAAGITPHIGEPADTAALRGRKRHAKTDKTDSRHLRVLLADGRLPECWIPPSHVLECRALLETYHDLRTEHTAWVQRIHAVLFHQGARQLGEQRLRTSEGLATLRSVAAAELSPAGHLQITVALDMLQVLEGHLDALRRRLIEAARQLTGARELHARLYGVGPATALALCCWLGGAGRFSSARKAVRFTGLDITVWSSDRKGPPGRLSRQGPEVLRWCVYEAGKAHARRCAPDHAYYAQVKERIDGKRAAISEARKIIRQAVHILASLGDDALTMDPRPSR

SEQ ID NO: 487023 - protein, 314 aa, unidentified
MSASSSTVLQRAVGIDVAKAHLDVHLLPQQTARRFTNTAAGHTQLLRLITPASPERIVLESTGGYERSLLRRLQDAGLPAALVNPLRVRRFAQATGRLAKNDRIDARLLADFACRVDTRLATPVSKIADMLRELVVRRRQLVNQCVQLRNQREHARFKSVTASVDRSITHVREEVKAVERLIAEQIESDPSLRARRDALLQAVGVGPAVAAVLVSELPELGTLSRNPLAALVGLAPFDDDSGRHRGTRHIRGGRTGVRAALYMATLVGIRREAHLKAHYQQLIARGKPKKVALVACMHKRLNYLNSLLRNHKTD

SEQ ID NO: 487024 - protein, 423 aa, unidentified
MTKLSSTPAGAVLVAIDMAKNRQEVLIERPEGGRRRRMTVLATKADYDGLAEQLAAIGRPIVVGFEATGNYHRTLAHRLLTAGFELRLISSVALARTREALHNGWDKNDPKDAQVILHMLRIGATQRYVDPLAAGINDLQELSKTHEGVSRMKTQTWHRILTHYLPLYFPEIARFAGNSRSDWFLAMIERFPTPASIASLDREAFSAEVWPLIGRKVSKARLINDVYETACASTALPVPEDSAAITMFRMVIAQGRSLIQQRDEIERLAHVRLADHVDYQLLRKIPGIGPINALTILAEAGDLRRFNHHRQFLKFCGLDLATCQSGTFRGRTKLSKYGNARLRRTFWMAAQVAARQRDNSFRDKLGRYTAGHADDADRRRKAMTALTAKMARVAHAVVKTGTEYRPFIERPDARWKDPSLQVP

SEQ ID NO: 487025 - protein, 332 aa, unidentified
MYLYFVRIPTSKCSLMRCSTTLARDLAICAHGSKKSRVVLSQALFGMEFTGCYSLDLEKFLTSKNYSFCMLSTRIVKHHPMGTIDKRDKNDSAKIADFLYRYDGTECAKPYKLPSKAMQQLKQLVNERKFLVEQRTNFMNRMQMFETKEDSAMYESYIKKLNHDIEKIDQEECELMSKEEDVFDTFQNLLTIPGIGFVNATNIIAITRNFTAFDTARQYARYVGVAPCSHTSGTSVKWRARPSAHCNGQVKADLSMAALRAVEYDVEMQMFYNRKLGGRKDSDTKRKALNAVKFKLICRMFAIGKQKRKWEVLNTSDDRKNLHIEKSKASEL

SEQ ID NO: 487026 - protein, 339 aa, unidentified
MKLYIGIDLHSNNNYVAILDEGGKKVFMKKLANDLRVIKEALQPYRDNVAGIAVESTYNWYWLVDALTEEGYPVHLANPAAMKKYAGLKYTDDKHDAFWLADLLRLEILPQGYIYPRDMRPLRDLLRKRHHLVGLRTSLILSLKNIVTRNTGSTMTANTIKRLTEDQVHPVLAHNEELSLAGAVSKSSIDFLTKQITRIESSIEKKIQIQDPYKNLLSIPGIGKILALTIILETGPISRFAKVGNYVSYCRKVASTWISNEKTKGKGTAKNGNKYLAWGFSEAAEHARRFHEASRTFYNRKRSKKNLMIAHNALAHKLARAAYYIMRDNVPFEEAKLYA

SEQ ID NO: 487027 - protein, 478 aa, unidentified
MIKSVGIDLAGAGEHKVRCLDEEAQLCDGFGFESTPEGLAKLEERVFRDGSNPVIVFEPTGLAWFMVAVYLRARHPDCRLVRTQARNVVALRKYLRRSSKSDRIDALTLAKMPFVDIERLNDVYLPPAKINAILRLSRQRQRLEGNIAGRKKRILGIIDGYLPGVRQPFSNLWSPQGREFLRTRLNPLAVVHDGEKALHRFLAQARVRGKKETNESQWVYQSCQKVAIVYEMSRSSGAVDDDFFTDLQDEIARELRLMEIEEAESDTIAQRIETLYRELHPSDNLRTIPGVGELTAPVFLAVVGDPARFRSQSAFANYNGVVPDSRQSSGTQAKGLRMTKAGPSIMRWALYQASQIGRRYDPQLASAYHREMVHNGKNHKQAMGAVMSHIGARILTVLQENRPYELRDNKGNPITWEEARKLVLANYQVPEEIKQARRRRTIEDNSAKLKRKRREMVAHSTHEAAEAPQPVVTTASPA

SEQ ID NO: 487028 - protein, 348 aa, unidentified
MTYYAGLDVSMNTTFICIVNEKGKVVKELEAVSTPESINSFLSGTGLKIEKVGLESGCLTHYLKKGLKKKGYEVIGMESHRMSAILATIINKTDKNDARGIAEALRVGHYKECVHRSDEAVEIRTILHGRRTAVEGRTHAITSIKGHLKVYGIKLGKGSGKSFREKVEGAIAPLGPRVQKVIKSLLNILDTFEKEIKELDQTVKDIGKEDEKVQLLQTVDGIGPITALAFVAEVDDPKRFEDSKDVAAYVGLTPTQYSSGEIKRQGGISKKGSKHTRCLLVEAATTLLTRCQVWSKLKAWGLKLMKKIGKKKAIIAVARKLAVTMHRMLITGKPFERSSKKNETLQVA

SEQ ID NO: 487029 - protein, 316 aa, unidentified
MNTQDHNQINIGIDTGQAILDIHVHPKGDYQSFENNPGGIRAAIRFIKPFKPTRILIEATGRLEMAFFCAAHKAGLPVCVCNPIKVRKFAEMTGILAKTDKLDAQVIAYYGETMKPALTELKPEKLRLLSDLLAVRSQCLDMSTMQKNRLIRMPKTVQKPIRNILKKITQEIAVIDRQLDQLIAEIPQFQARVDQLISAKGVGKVLAYTLLSELPELGSMNRKQIAAIVGVAPMNRDSGKHKGKRKIRGGRSKIRTVLFVSMLSAIQCHPKLKPMYQRLVAAGKPKKVAIVACMRKQLVILNTMVKNGTHWDENMT

SEQ ID NO: 487030 - protein, 377 aa, unidentified
MGRKQREEKIEQLSVGVDLHKSQLTICVMREDGELVQEGMYRTTAEGYRSFVQKMHEWEQELGCSVAMAVETTGNARYFRNRMEAEGFSVVVVNTNKFKVISQSTKKNDRGDAATLAYYLGKDMLPESHLADQSSEELRRMIKCRSLLVSSMVKMKNQIHGMLLGYGIATKAAQLQSNKKRQALVKDLADQGFTEAAASLEVILGIIEGVQEQIKVLEKRLREMTKDDEDVELLMTIPGVGFLTASSIAAYTKDLDKRFCGDFKRFASYVGIVPSVHNSSETVHMGRITKHGPQELRTAFVQATMGMIRLSKITGEWRLMTDYRAMKTGKGSGKSIIATTRKLARIIFAMLHNREPFNPALMVRDKCLFTVEEVIGA

SEQ ID NO: 487031 - protein, 362 aa, unidentified
MEFFCGLDVSMDETAICIVDDKGGVHLQTSAMTDPDALFTALQPFLGRLRRVGHEAGSLSPWLHPELSKLGLPVVCLETVHVRAAMSAQRNKTDKADALGIAHLMRTGWFRQAHIKSESCYRTRLLLTHRRNLKAKFLDLENAIRHSLKAFGIRLGGTSRGAFEQAVREAAAGDALTSELMDAMLRARAALWKEYCRLHDLVVKFVARSELARRFMAIPGVGPVTALSFITAIDDPSRFRRSRDVAAYFGLTSRRWQSGTSIDVQGRISKAGDADVRRALYEAASALMTRFRGKDKLKTWGHALAKRGCHRKATVAVARKLAVIMHAMWTDGTTYHGTSSADATTVEARRLIKERRLLGAHR

SEQ ID NO: 487032 - protein, 403 aa, unidentified
MSINGAPVMAATVVAVDVGKNKAALSVTSADRHRLFGPAEFAMTAPALAAVLQRVSAVVPAGSVKVGVEAAGHYHRPLLGSGVWPAGWEVLELSPARVAEQRRVQVRRRLKTDAIDLEAISELVLAGHGIPVTACAAPVTELTGWAMHRSRRIQTRTATKNQLLAQLDRCFPGLTMVLPDVLGTKIGRLVAAEFANPHRLAALGVSRFVRFAANRRLRVRRSAADRLVAAARAALPCPEAQVARQVLADDLVLLGCLDAQIAAAEAQLSRLLPDTPFAPLTTVPGWGTVRAANYGAAVGDLDRWPGARQLYRASGLSPAQYESAGKRRDGSISREGSVALRRALIDLGIGLWRSDPAARRYGQQLRARGKEGGVIGCAMAHRANKIAYAMVRDQSGYDPGRWA

SEQ ID NO: 487033 - protein, 364 aa, unidentified
MLRVAHFVDAVVGGDTHVDTTSLCVVSPVGAVLAEITIDNDEDGYAQAVTWVLQSVPSERFLVGLEGTRSYGAGLCRALQSVGIRVVEVERPSRGERGRRGKSDTGDAVLAANKVLAMPPDRVPAPRAGDGVREALRLLTVDREQMTTQRTRLVNQLYADLLTGNAEQHALRKKDLTSGTLRKLAGARGRSGRPIDEQARLVVLRRKAQDIVRLDQQIRENERQLNTILDEVAPQLLEQVGVGPVVAAQLIVSYSHHGRCRSEAAFAALAGVSPIEASSGRITRHRLNRGGDRRLNRALHVVAVTRVKHDPRTRAYIQRRSKDLTDREIRRMLKRYITRDLYGVLRTIDALHPKRTTSTVTPAA

SEQ ID NO: 487034 - protein, 354 aa, unidentified
MSEKLNTAIAVIGIDIGKNSFHVVGHDQRGAIVLHQKWSRGQVAARFANMPPCLIGMEACVGAHHLSRKLKAFGHDARLMPAKYVRPYSKGQKNDFRDAEAIAEAVQRPTMKFVATKTADQLDLQALHRVRERFVSQRTGIINQIRAFLLERGIAVRQGQRFLRAELPRILARPQDVLSPRMVHLIENLAGDWRRLDERIESLSSEIEAIARQDAGCERLMSVPGIGPIISSAMVAAIGSGEVFTKGRDFAAWLGLVPRQMSTGGRTILGRISKRGNRYLRVLFVQAAWVVLIKPKSWERHGLKSWIEAAKKRLHPNVLAIALANKLARIAWGVLAHGRDFEARTNTNATAQAA

SEQ ID NO: 487035 - protein, 371 aa, unidentified
MILGAALQADGENEVRIFGLKHQKEKRSMDHFAGLDVSVKETSICIVDDTGRIVREVKVASEPEALLPVLLNPAYRFKRIGLEAGPLSQWLFGALAEAGLPVICVETRHMRAVLKAQINKTDRNDARGVAQMMRVGLYRPVHVKTLRSQKLRMLLTHRKLLQSKAIAIENDLRATLRNFGLKVGIVGTAKFEARIKELVEDLPDLVVLVEPLLIVRRVLREQVGILHRRLLSIVRDDDVCRRLMTVPGVGPVVALTYRATVDVPARFRNSKAVGAVFGLTPSKYQSGEVDRAGAISRCGDEMMRMMLYEAAQIVLVRSTKWSWLKAWAMKIARHRGLKKAIVALARRLAVIMHRIWVDGTEFRWTRDIAAA

SEQ ID NO: 487036 - protein, 312 aa, unidentified
MTSEVFVGIDVSKRWLEVRGHGEAESRKIGNDPDGFTTLIEQMKAVGSALIVFEATGGYESRAVKALSEAGFAVAVVNPTRVRRFAEALGILAKTDKIDAQVIAHFASVVQPAANGRQTALEEQLAACVERRRQLLVELVAEKNRLSTCPACVRKGIEEHIAWLEEHIESLEAEIQTYILQKPEWQERAEIIDSVPGVGLVTATTMVAELPELGQLNRQKIAALVGVAPFNRDSGPKQRKRRIFGGRSGVRRTLYMAALSASKHNPVIRAFYESLLKRGKEKKVALTACMRKLLVIINAMVRKGEAWKVSPA

SEQ ID NO: 487037 - protein, 400 aa, unidentified
MLSIGIDVSKGKSTVCGMKPGGEIVYTPFEVQHTREGMSELVSLLRGSGEEVRAVLESTGSYHCPVVAALLENGIFVSVVNSLRMKRFCSQSIRKVKTDRIDAMQIALYGLAYWQELQPTRLPEDTYRELQLLARQYYQMTSMLIKAKVDFNAICDQVLPGMQELMSDHAGRHKLSDFVLRYRHTTHILEMGETRFRKDYCKWAEKKGYRNHERMAALIFATAQNGIPVLPNAPSTQIVITEAIRVLHTVEASRDAILTQMQALAKTLPEYSLVREMPCIGDTLAPRLIAEIGDVRRFHSKRALIAYAGIDAPPYQSGKFCANNRHISKRGNRYLRKTGYEVMQSYVMHKPANDPIFTFIEKKRSEGKCGKLAMVAGLNKFLRIYYGKVTELYRSLPAIE

SEQ ID NO: 487038 - protein, 371 aa, unidentified
MEHTRFVGLDIHKERISIAVAESGRSGAVEYLGEISNDPVAIGKLCDRLERRGNALAFCYEAGPCGYGVHRQLTSLGHRCDVVAPSLIPHKSGDRVKTNRRDATMLARLHRAGELTPVWVPDADHEAMRDLIRLRSVVRQIVTRTRQHLQGFLLRHGRKHGRGTAWRMAYRRWLSTLAFGHPAQQIAFQDYTDAVMDAERRLKRVEEQISGLLPEWNLRPVVDALQAMRGIALINAVVLVAEVGDFTRFSNPRQLMAYFGLVPGERSSGETIRRGGITKTGNTHARRALVEGAWAYRMKARIGRHKVDRIEALPKIIRDSGWKAQVRLCTRYRRLRARGKTANVVNVAIAREMVGFIWSIACTVQSTPKTA

SEQ ID NO: 487039 - protein, 405 aa, unidentified
MKVCGLDVHKDTIFCGIYDGKRHFDVKEYESMTTGIRKLGEYLKGEDVKQVAMESTSIYWMPVWDVLEEMGFDLILVNPYLIKQMPGRKSDVKDAQWIATLLHKGLIRGSMVPNSIIKELRIYTRKYARMQQHLCQLLTKMDRIMVTANIRISSCVSKLTNKSVIRVIEALILGETNPDELVKLVYGNIKNKHSGKLRAALTGNMKEQHRQSLQWEKEQYDLYEKQTLECLNCMEKICKEHYSKEMELLKSLPGISNVSAMSIIAEMGADMSVFENSGKITGWVGLRPRNDESAGKFKSKAITKGNKYLRSILVQVAWSAARTKGSYFKEKYNRLALRKSNKKAIIAIARKMLVIIWSMLNDNKPYNPSLVHIYDPVKIERSIAYHQKEIEKASKLLPQKTVKTA

SEQ ID NO: 487040 - protein, 351 aa, unidentified
MPILAEQFVHVIGVDTHKLTLTAAALNAGGGCLEVLEVRADSKGHRRLMQLGSRLAGPLLWAVEGTGSYGASLTEHLLANGQTVTEVDRPKRPPRKRGKSDEIDAIRAGRDALAMKRLNPPRRRQEREQLRILFTTRQELVSNRTRLANHLMQLVVTASENVRSRFLDFGSHSHSAERLVRKCLASRCSSSLSAEDRTRLRTMRELARMIRNLSVDADRYEHELAVLVEQIAPGLRAQPGLGALTGAQILLSWSHAGRMPGEATFAALAGVCPIPASSGQTIRHRLNRGADRRLNSALHRVVLTRCRYDQATRDYVLRRTAEGKTLPEIRRCLKRYAARQLFRFLNSLDRA

SEQ ID NO: 487041 - protein, 449 aa, unidentified
MAKLEMEVINTRCAGIDIGSRSHFVAVGQGPGDVKEFGVYAEDLTTIGKHLKENNINSVAMESTGAYWQNLYVELVKQGFDVTLCNGKFTKNIKGKKTDVKDASWIQKLHSIGLLSGSFLPDDTTETLRTYCRQRTNWLQLSVEATHKMQKYLKLLNFRLDVVVNDVCGLTGIAIIADICNGNLDPQKLAAHRHGNCKKSYDEIAKALKGNNREDYLFGLKQEYDSYLFFQNKIEDCDKRINSFLKIQINTDPVKKKLHTDDKVHKRINKNTLKGIDLNQASYQYFGGIDLMKIEGVSYATILTLMSEVGPEGFKKFETAKQFASWLRLAPNNKISGGKVLSNKIPKGSNRLKIALRNAANAIGNLKDTHLADFFKRVSYRRGRTAAISATARKLAVIIWNMISKKIPYTPPTEYLFTDQKRKAKVIENIKKNIAKLELKPQDVGFVTA

SEQ ID NO: 487042 - protein, 414 aa, unidentified
MEVLYSHCAGLDVHKKTVVVCRLGVDAKGHKVKATETFGTTTAELLRLSDWLTAGTCTHVAMESTGEFWKPIWNLLEGSFELLLVNAQHVKRVPGRKTDVQDAEWLADLLQHGLLKASFIPPVEQRDRRDLTRQRTQLVRDRASVLNRIQKVLEGANIKLSSVVSQIDGVSSRAILAELVADHLNPAQLEGLVHGRLRDKLPELEQALSGRVRAHHRFLLAQHLAHLDFLDEQIAAYSREVERLTAPFDELVALLDTIPGVARTTAELILAEVGADLSRFPTADHLASWAGLVPGNNESAGKRLSGKMRQGSQWLRAGLTQAAHAAARQKNNYLASHYHRLAGRRGKKRATMAVAHSILVIAYHIIQRREPYQDLGSNYFDERQKAFTANRLTRRLEKLGYRIVITPPATRVAA

SEQ ID NO: 487043 - protein, 417 aa, unidentified
MPLNVVGAEFFVGIDWASAVHAVCVQDAAGRRVAAFTVEHSATGLAGLVRRLARVGDPDTMPVGIERPDGRLVDALLEAGHPVVPVKPNAIKTWRDGEVLSGAKSDAGDAEVIAEYLRLRHHRLQLSIPYTPETKALRTVTRTRGDLVDMRVATTNQLSALLDAHWPGAKAVFADVESPIALEFLTRYPTARHAQHLGAKRLTAFCVKHGYSGRRTGEQLLTRLRAAPAGTLDGTLCEAVRDAVTALVAVLRAVGAALKDLNRSVVAHLGEHPDGEIFTSLPRSGQINAAQILAEWGDCRQAYDGPDSVAALAGVTPVTKESGKHRAVHFRWACNKRFRVAVTTFADNSRHDSAWAAKVYTDACARGLDHPHAIRVLTRAWIRVIWRCWIDHTPYNPGRHGNAVRLHQSGQTELVAA

SEQ ID NO: 487044 - protein, 349 aa, unidentified
MVTIGADPHKRWHTAVAVDEQGRKLAERTVRATPGGHLELRAWAERWAERRWALEDCRHLSRRLEGDLVRAGESVVRVPPKLMADARRSSREPGKSDPIDALAVARAALREPDLPTARLDGIERDVRLLVDHRDDLVVERTRAQNRLRWHLHELSPGDEPVARSLDRYHVLAALEARLAGLSGVVARIAADLVVRIRDLTRTIEGLEREIARLVAELAPSLLALQGCGTLTAAKLVGEVADIGRFRSAAAFARYDGTAPVPVWSGNETRHRLNRGGNRQLNVALHRIAITQLQRPGKGRDYLAKRMAGGDTKTEAIRLLRRRISDEVYRRMRSDEASRASELEPVDLAA

SEQ ID NO: 487045 - protein, 408 aa, unidentified
MNTLYVGIDVSSKSNVIYLMLPNGDKHSNFSVANSHEGSTQLVKRILSALTSHSLDTVLIGLEATSVYGDNLVYFLREDATLAPFNRKIHVLNPKQVKKFHDAYNDLPKNDYVDSFVIADCLRFGRINKEVYLDDYRYKALQNLTRARFFAVQNLVKEKQRFLNYLFKKYSTMTQEKVFSDTFSTTALAVYDEFESAEALANMDLHELTDFIIEKGKNRFPDPDAVAKAIQKAARSSYRLPKTVNDSVNQVLSISITSMKALESQIKEFDKAIKAQMELLPNVLISIPGIGPVYSAGIMAEIGDINRFNSQAALAKYAGLAWKQHQSGGFESEVTRLIPSGNRFLKYYLCEAAFSLVRCDKEYSDFYRLKYKEVNRCQHKRALALTARKFVRLVFRLLKDNRLYCPAK

SEQ ID NO: 487046 - protein, 465 aa, unidentified
MAARKPKAKRMSARIAEDEDYRLRHERVAGIDVAKASGMVCLRLPPEPGKARRRSKTWEVTAAVPAIAEAAAELRAAGVELVSMESASDYWRVWFAVLEDAGLGVQLAGSSQARNLPGRPKTDKEDAARIARLTEMGLLRRSFVPPPEIRAMRVYTRQLVHLTQDRTRYWLRLEKLPEDALCKLTSVAPKLAGSQSCTAMIRAMIAGERDPHALAELATGPMRAKRADLVKAFTGMRSGEQHAFAAAAHLRAIEFLDAEVSALQDRVEAHLAAVPAAWGADADGATGPGAGRGPGAAVLAAADRLDEIPGVSRQMALGLIAETGLDMSRFPAPGHLVSWAGLAPVAVQSGPRTGRGKKGKGNVYARRIAALAASAAANTATFLGERHRRLAGRPGGGRTKASCAVGRSILVIAWHLLADPAARYRDLGPDHYARHSDKNRKARSHKRQLEALGYDVILTPRDEAA

SEQ ID NO: 487047 - protein, 408 aa, unidentified
MLLVGIDWAESEHAACLLSPEGQVLRRLRIGHDVAGIERLRDVIGGLEPDPARVLVAIETAQGLLVAALLAAGYTVYAINPKAVERYRARTRVSRAKTDPADAELLARILLTDRDRHRPLRPSSAVREEIRALARDDERAARDQRRLLNRLRADLLAVFPQALAAFDELAAPTCLAFLARWPAASAAASLSEAELEAFFRAQRHGWPKRAARRVCETLAAPALTAAPHLAQAKAGSIRLAAEQLLLIHRQRRAWERRLEELLEAAHPDGEIYLSLPGLDVRLAARVLAEVGDGALEFAVANELQCYGGTAPVTRRSGKQLTVACRLACNRHLRQAAMQWAFCSLRRSPWARELYDAQRARGKTHHKALRALANRWLELLWHLLHKRTLYDEATHQRNRPKTEVIACAA

SEQ ID NO: 487048 - protein, 344 aa, unidentified
MDHFAGLDVSVKETSVCIVDDTGKIVREVKVASEPEALLAVLKNPVYHFRRIGLEAGPLSQWLYSALAEAELPVVCVETRHMQALLKAQINKTDRNDARGMAQMMRVGLYRPVHVKTLRSQKLRMLLTHRKLLQSKAIAIENDLRGTLRNFGLKVGMAGTVKFETRIKELVGNSPELAALVEPLLVVRRVLREQLVILHRRLLAIVRDDEVCQRLMTTPGVGPVVALTYRATVDVPARFRKSKSVGAVFGLTCSKYQSGEIDRSGRISRCGDEMMRVMLYEAAQSMLYSKKWSWLKAWAMQIARRRGMKKAIVALARRLAVIMHRIWVDGTEFRWTRRQTAAAA

SEQ ID NO: 487049 - protein, 345 aa, unidentified
MEQLSRIGMDTSKHIFQLHGVDSAERVILRRKLRRKEVLHFFAGLEPTLVGLEACGGAHHWARTLTRLGHSVRLIAPQYVRPYVKRGKNDAADAEAICEAMSRPTMRFVANKSAQNQAALMLAGMRDRLVRNRGQLCNAIRGYAAEFGVIAPKGQANILPLLQRLQTDATIPALARELFAEHAQEYAQLTAQLGAVNTKLMAFYRANELSRRLTKIPGVGPVIASLLAMKVPDPQAFRSGRQFAAWLGLTPKNHSTAGKTRLGVITRAGDQTLRSLLVVGATAVIWQARRNPHCRTASPWIIELLKRKPPKLAAVALANKIARIAWKLMTTGQVYDARRAMAATA

SEQ ID NO: 487050 - protein, 316 aa, unidentified
MSEPVYVGIDVAKASFEVAASGEEQTLSLGNDEAGHAELCQVLVPLAPRLILLEATGGHERLLALALAAAGLRVSVINPRQARDFARCTGKLAKTDRIDAQVLRGFAALLDAQGHEPRALLDEQQRELTALVTRRRQLVAMLVAERQRLALAHPKAKASILAIMDAIAAQLHDVDGQLREHVQAHHADLAKLLTSVKGVGPTTASTLLAQLPELGHLNRKQITSLVGLAPMNRDSGTLRGQRHIFGGRADVRRVLYVAALVGTRFNPVLKAFYAKLLAAGKPKKVALVACMHKLLIILNAIARTKSPWSHEIAGIA

SEQ ID NO: 487051 - protein, 383 aa, unidentified
MKNTIVHHEGAASLEAVAIKLEPRAAVIKIDLDVHARQYVAVAQYDHLLPKAARRLSPNEFVPWVEGLLRQGHSVHVVYEACGFGFTLYRQLIALGAHCYVIAPRKLDEECSRVKTDPRDATTLCQRLSRYLEGNTRELAVIRVPSESEERARHVTRQREQLVHHRQKLEAQGRSLLISHSLPAPAHWWKKQTWSRLGNHLPRWITTHLEVARPALLSLQGQIESLTSQLEAAAPPNIPTGLGKLTTVMLTREICDWHRFNNRRAISSYTGLCPGERSSGSKRVPGSVTKRGNPRLRAALVECAWRMVRFQPQYPPVKKRLAVLAKGAKTTGAQRKKAIVAVARRLAVDLWRVHTGRLTAQQLGLNIKISEFEGNSYELTTQR

SEQ ID NO: 487052 - protein, 381 aa, unidentified
MSIVALDIASKSATFCVLGTQGVQSQGSLTFDHDGFSSFIASTQVSDASLFVMESTGGYHLPLYHFLLNHGRKARIINPLLVKHFHDGQTLRRTKTDALDAVTIARYAQANLSALQEDRMQLDSESKMLARRRAANAEDLAKAKTILKSDLSVAFPELLRFNVFTKTLLEFLSIYGCAKDVLGATDGQLQQAMDVQKGRKSEEITVQNIKDLAQTSIGVSYRAAMVRDSAKAVLACQQRDEDLTKALVELENALHKRQMEILTSIPGIGEVTASHFLSEIPDIAQFATYQKLIAFAGTDPGIYESGDTSKNLRISKHGNAVLRKYLYLMADSCVKHNIVFNTYYHKKRAAGFPHRKAMVATMNKLVRTLHALLTKDEMYSL

SEQ ID NO: 487053 - protein, 455 aa, unidentified
MAGQPAKTDERSSVMQIKHERCAGIDVHKKTVVVCCLWVDEQGKDQRETRTYGTTTRELLNLCEWLASLEITHVAMESTGEYWKPVYNILESSFEVMVVNSHHFKQVPGRKTDVKDAEWLAELLCYGLVRGSFIPPLPQRDLRDLTRQRTNLIRERAGVINRVQKVLEWANLKLASVVSDISGVSARAMLRALVNGTEDPAALAELAKGRMRTKHDELVAALSGQVRDHHRFLIRMHLDHLEFLDHQLQPFDQRIEQLIQQHTSLPEAPTPELEETSDSVAVKLPLTWAQALPLLDSIPGIAGQSAELLLAEIGSDMRRFPSAAHLCKWAGVCPGNHESAGKQYSGKTPPPNRWLRSILVHMANAAVRCKASYFATVYRRLAPRRGHKRAIVAVAHRLLIAVYHILKQHQPYRDHRTTESGQQRQQQLVQTLQQRIERLGYQVQLTPIATAQSFN

SEQ ID NO: 487054 - protein, 441 aa, unidentified
MIFGDTLHAVAVPPGRDKEPVRTFGTFTCNLLAIVQWLKQCAIDTVAMESTGVYCKPLYALLITEGFEVYLVNAKQTKNVSGRKTDMSDAAWIQMLHCCGLLKSSFLPDDLTETIRTLVRQRKALLHDSTRCIQRIQKNFELMNLKIHTVIADITGKTGKAIIEAIIAGERKPENFLALIDERILATEEDILKSLEGNWRRECVFLVKQCYWQSKELQAHISECEKEIEGLLEQMTAVANEGIIETAPAKDKGDGKRQKEKKKKRKNKNTPRYDVRAYLEQIHGVDVLEIFGISEISALEILSETGTDLSRWPTANHFVSWLNFCPNNKITGGKLVSSMIMKKTPNNAAQAFRAGANGLRRSDNWLGDYFRRMRAKGGHKYAVVATARKLALIYYRMVRYKEAFKEVDMEAYKDKQRQAKISYLENRLAQLRKETSQIEAA

SEQ ID NO: 487055 - protein, 351 aa, unidentified
MKYYTTTTEFNCGIDLHTRQMYICVMNRAGEVLVHRNIQKNDFGFFLKLVEPYRHDLTVTCESCFVCFWLADACEDAGIQFVLGHAYYIKSIAANKHKNDKEDARELAECLRTNRIPPAYVCPRDLRPVRKLLRRRNKYVKNRAVLTGHSTCEVMAAGHQPLSTSPNSKEKWREGIRSSFDDPLDSFTADAELYMIESYDRVIAQMEQRIEKYAKDFQLQNYRLLRTVPGVGKILALTILYETIDIKRFRSEKDFVSYCRLVAGTNESGGKDFGGKGRKMGNPHLKWAFMQAAILCKRADKKMNAYYEKLARQKGKHVANAIVAAKIARAIYFMLDRKTGFSPEMMMKGRR

SEQ ID NO: 487056 - protein, 332 aa, unidentified
MDNREVCGIEVSARELVVALEGKGLRRFANTAAGHRALLRTLTRGGKVRVCLEATGLYGLDLALQLSQHEQIEVMVANPRAVRHFAQALMQRSKNDQLDAVVLREFAARMPFVPWARPSENTLAVWAIARRLEALTALCTAEKNRRHAAGLSEAIPAVVRQDIARSLRFHQRAMQRLRRQGLRLIQADPQLAQRFALLRSIRGVGENSAVQLLAELLLLPPDRDVRQWVAYAGLDPREYSSGTSVRKHTRISKVGNAHLRRALYMPALVASRFEPHLRGFYQHLLQRGKNKRQALTAVARKLLHAIYGMFRSQLPYDGARVYSLPSTVEKAA

SEQ ID NO: 487057 - protein, 428 aa, unidentified
MLKHNTEPDPAEDFAAFLALDWADEKHAFRLQVVGESKTETGTLEQKPEVLGPWLAKLRERFGGRPIAVGLEQSRGALIHALLAYDFLVLYPIHPTTVAKYREAFKSSGAKNDPLDAGQILEILTKHQDRLHRLNPDTVETRLLGRLVEDRRKAVELRVTHVQALGANLKEYYPQALELTHGNLSSRLACDLLLKWPTLADFQQAKPSTLKRFYYGHNVRSPELIERALALAEKSQALTTDPAIVESGRRLSRMYVGLIQALNPVIEDYEQRIQRVFDAHPEAKLFRGLPGAGPALAPRLLAFFGTDRSRYAAALNVQSFTGIAPVTKSSGKSKVVYARAACPKFDRQTFHEFSRLSVSNCQWARNYVQYYTAKGKKYHTIIRALAYKWIRILFKCWQERTPYSEDKYMETLKKRGSIFATLHLQKTS

SEQ ID NO: 487058 - protein, 365 aa, unidentified
MKEEKKAVTRFVGIDLGKRTYEVAIVGANGKVTMSNGRTTAEGRQKLYKKLTAGDKVALEAGNLAFIVAKELKAAVGCEIRVLNPSHLALIYGSMKKTDKEDALKLAHIIEDYKDERLPVVPVPSEEEMKRRKIVGSYRREQKMRNQAVNRLHGLFLAQGITDVVKSDLASAEAREETVKELSGLEREEAEHLLACLKLYEGRIKALEEQMKKEAEGDKVIERLKTVPGVGPMISFAFAAHVAAERFENGAQVSNYIGLVPRVYMSGDTVRYGQITKRGNGFLRALLVQGAWALTRSKEGGSLKERYEYMTKEKGISKKKAIVAIARRLSELLYTLMKNGTNYEVRKFKRGKEEGEKLARAALSA

SEQ ID NO: 487059 - protein, 402 aa, unidentified
MKEFKAEAIQLETASALQTVRQIEAMGKYPAYIGLDVHKESIVVAVARAGREAPESRREIANKPKSVAKLVGRLNQEFGGEVLLFCYEAGPCGYGLYRQLLGLGHDCQVVAPSLIPKKPGDRIKTDRRDACKLAQALRSGDLTAVWVPDEEQEAMRDLTRARADMKAQERKARQQLNAYVLRHGHAWASNKTRWTKTHYNWLEGLRFAHDWQQVVLQEYIDAVRAASQRVADITAQMERVLPQWSLAPVVDSLVALRGIDKLAAMVLLAELGDISRFDSPKQLMAFLGLVPSEHTTGGRRRQGAITKTGNRHARRMLVESAWSYRFPARQTAHLKRKATSASAEARDIAWKAQKRLCGRYRTLTRAGKETKLVCVAIARELVGFVWDIVCREMPKVQLHKAG

SEQ ID NO: 487060 - protein, 338 aa, unidentified
MFYTGIDLHKHSSYLTTVDSSGNIIKQADIKNLYHNFVQYFSDLGNENITTVESTMTWYWLNDLLTSLNIPLVLAHAKYVKAIAYAKVKTDKVDSHTLAQLLRMDYIPSAHKISNHNRTLRDALRARIKIVQRHTSVTNSMQLLLAKYNLSSPDQLEEIPHYQYEQLSEVESLLKEQMLDLEKQLYPFLIPNEDIQRLLWIPGIGKMNAFTILLEVDDINRFPDVKNFFSYCRLTPSARNSAGKSKQRSSKDGNKYLKVVFSDAAVHACHYYPPIRKYHNSKLRKKNKSVAKTIIAKEIARIVYYVLKNKSNFNNKFKGKDLIERKSFQWPRITNPYA

SEQ ID NO: 487061 - protein, 390 aa, unidentified
MKKFNPLSTLFVGIDVSAKTNVVCALNFNSDRLLETSVDNNQSGAERLSAMLAEVLSSHPEFKEVAVALESTSFYSIHIANFLSSDINLLPYKPFVFCLNPKTIANYKKSFIGLSKTDPIDAFVIADFARVGRITNEPWRGSQYLALQRLTRHRLHLVECITREKTYMVSNMFLKFSEMAVLSNDNRALSNNYGATAQAILTEYLSLEDLVNSSTEELVEFVCQKSKNRLTDPLKTVEILQQAARNSYRLDKCLYEPITVSLASSYNCIKTYQAEIKSIDKAIEKAIKGLNVTEYQCLLSIPGIGPVYAAGILSEIGSVKAFPNNDALAKYAGLVWTKKQSGNFEAEDTSMSKAGNRYLRYYLIEAANSVKNHVSDYNDCLLYTSPSPRD

SEQ ID NO: 487062 - protein, 359 aa, unidentified
MDTRIKRNQIKFKGKMVYIGIDMHKLSWRITALVEGEIVLAITLAKPTYASFRSILTQFKGSCVRIVYEAGPGGFDLYDRLTADGIECMVTPPSLIPTESGSKVKTDKKDSLKLAKLLESNMLKKVWVLSPEERAHRQLIRTRRQIVNHRSDVMRQIKSLLLFHSVAVPFPSNQQWTSPFVRWLQELDLGNEYLNQSLQALVALFDFLSAEKKRLTREVLVLSRKAGYVPRVRLLKTIPGIGALSAMEILVELDDIRRFQTADELAAYLGLTPSQYSSGEHIRMGHITHAGNQWVRTTLVESSWILIGKDPSMRRKYEEIKRRRGGKRAIVAVARILSGRIRRMLLNQVPYEIDFQKAA

SEQ ID NO: 487063 - protein, 331 aa, unidentified
MKLLQHLGADLSKDSIDLFCYELKSHIHIKNSSAGFKELLDWLTRLRLEKNSVFLVMEHTGLYSYRLEKFLHQRQIKFAKVSALEIKRSLGLTRGKNDAIDAERIARYAFEKKDKLVAETPVHPVIQRLQMLHSTRERLTKHRSSLICALKEYRIVLYSTDPIMRSHEKLIEELSVQIKLIEEQIKHCIQTAEPSVNRNFKLLIGITSVGPVIATATILKTKNFTAFKDGRKFSCYCGSAPFDHSSGKSIRKKTRVSHLADKRMKTLLTLGARTAIQHDKELKAFYERRLLMGKSKNSTINIVRNKIILRMFAVINRQTPFVKPYSKPVLN

SEQ ID NO: 487064 - protein, 341 aa, unidentified
MRRFIGVDLHKNSFTVCYMQKKGERDLKTFKVSPKDVEAFKKTLTKQDEVAVESTGNTGYFAREIKESVSRVRIINPIQFKIISESVKKTDEHDAVTIARYLSKGLIPEVRMRSKEEAKLASLIGTRDKFVKLRTTLKNKIHNILNASGIVTSKEMFTSDKALEKLFSMNLDEGDLFEIRIIVDQIKSLNKSIDEINKELIDRGKKLDGHKNLTSITGIGDISATILLNTIGNVDDFDDDKKLAAYFGIVPRVYVSNETSQYGRITKRGNKIARTALVQSTLVAIRYNHYLRRFYFKLKAKKGSGKAIIATARKLLTIVYRTLKNDWVFEDFNRFKLAVTV

SEQ ID NO: 487065 - protein, 337 aa, unidentified
MLYLGIDQHARQITISLRDENGDVVMARQVSTRPEKIQEFFQRLTHERLQSGESFVAVLEVCGFNDWLIRMLRDYRCHKVILIQPDGRKICKTDRRDAAALSELLWINRDRLLHGKPVRGLRQVDIASATDQEERRLTMLRKNAGRDLTRVINRVRQILRRHNLQWEMPTKTFPTVAAVAWLKQIVLPEIDRLEMNHLLADLEHVQQRIKELEKVIGQRSGASKEVAILSSIPGMGRGFTAMSLACRIGRVERFPRAHSLANYWGLTPGCRNSGESDQRLGRITKAGSPTARWLLAQLVYKVLRRDGRLREWFKRIKRRRGATIARVAVMRKLTTII

SEQ ID NO: 487066 - protein, 350 aa, unidentified
MSMLAELVDLVIGVDTHADTHTAALIAVDTRAVLATLTVPADPHGYARLVELAESHGGVRGWAIEGAGGYGAGLARHLSDRAELVVELDRPHRPPRRHGAKSDVIDAERAARDALARIHLAAPKTGAERAGLAMLLTARRSAVEAAADAQKQLRALVITAQETVRARFRGQSTRQMLLTAARQRPHLHTGDIEVFTALSVLRALARRITALQAESSEHERAITAIVRSWRPDLLEIPGVGPTTAAVVLTAWSHPGRVRSDAAFAMLAGAAPIPASSGKTVRHRLNHSGNRQLNRALHVIAISRMRYDPTTRAYTQRRRAERKTDREIRRCLKRYIARQLYRQLEAGLPTT

SEQ ID NO: 487067 - protein, 344 aa, unidentified
MYYYAGIDVSLECSSVCVVDGTGKILREAKVASEPEALIAWFRSQGPELERIGLEAGPLSQWLYAALREAGFAVELLETRHVRDAFKAMPVKSDRNDARGIAQLMRLGWFRPVHCKSMEAQEMRAVLTARKLLQSKLRDIENSLRGVLRGFGLKVGKTTECTFAGRIRELVAGHPGLELVAKALLEAHAVLRREFNGLDKCTQKLARAHPSAKLLMTTPAVGPIVALTYASAIDDPKRFSSSKATGAHFGLTPKKYQSGQTDYTGRISKIGDASVREALYQAAHVMLTKPVRNCSTLKSWAMRIAKRAGMRKAKVALARKLAVILHRMLADAKPFNPMAKAAAT

SEQ ID NO: 487068 - protein, 387 aa, unidentified
MPEDASRPAQAAIRTDLGAIFVSLELSRRAWLITSLSPGAGEKMSRHAVPASDVPALLQRFAELRRRAAVRTGQDFPIIVIQEAGLDGFWIHRVLEAEGFESHVVDAASILTSRRRRRAKTDRIDGETLVRTLMAYKRGEPRVCSMARAPTPQEEDRRRLCRERRTLVGERVKHVNRIKGLLFAQGVFGYEPLLKHRRERLEELKTGDGRALPAHLKTQILRELDRLELVLAQVKAVEAERDILLEPATDEIASPAALLTRLKGIGPETAALLWLEGLYRRFDNRRQVAAYAGLAPTPWKSGSIDHEQGVSKAGNPRLRTAMVELAWLWLQNQPASGLSRWFHERVRRLGGRVRKSAIVALARKLLVALWRYTTAGVVIEGAVMKTT

SEQ ID NO: 487069 - protein, 351 aa, unidentified
MNVTTIGLDIAKNVFFAHGVDQHGKVVMQKKLDRGKVLAFFATLPPCRVGIEATGSAHYWARELNRLGHTAKLMPAQYDKPYVKRDKNDPNDAAGICEAVSRPSMRFVSINTPAQQDVQMLHAIRRRLVGQRTALTNQMRGLLGEYGIVFGQGPARVRRGLAEVLAGEDARLSPAAREMIADVQQQLQAQDLHLTAYNARIERVCAADARCVKLDALPGVGAITATALVASVNDGKQYQRGKHLSASLGLPPREHSSGGKQRVLGMSKRGNTYVRTLLIHGARSVLRHAATKTDPDPLIRWALTVAARRGKNIAAVALANKLARIAWAILARDREYDPRWTPRRGDSAIPA

SEQ ID NO: 487070 - protein, 353 aa, unidentified
MLVDNYLSKGVNQMKLTTIGIDLAKSVFQLHGVDVHGKTVLKKQLKRNQMATFFANLMPCLIGMEACGSAHYWARKLQTLGHTVKLMAPQFVKPYVKTNKHDVADAEAICEAVLRPNMRFVPIKETEQQAVLALHRARQGMVKARTAQANQIRGLLSEFGLIVPQGITYLHQRVPVLLEEAKDELPGVFRELVHRLLTHLKELDRQVGELEVQIQLWHRTNATSRKLEAIPGIGPLTASALAASIGNAKNFANGRQLAAWLGLVPKQHSSGGKTNLQGISKRGDPYLRTLLIHGARAVILRAERNLKEDSWLRRLIGRCHKNVAAVALANKTARIVWALLLKDREFRSDYAAA

SEQ ID NO: 487071 - protein, 482 aa, unidentified
MGHVGDIGESVATDIPFERVSTTTYLNQRDIPIEIMEDVMAKFKQSKLELIHPNAAGIDIGSASHFVAVPPDRDNKPVREFKSFTADLNGLADWLEACEIDTVAMESTGVYWIPLYELLESRGLTVYLVNARHVRNVSGRKSDVLDCQWLQQLMSFGLLSGAFRPKDEICALRAISRQRDMLIRYQARHVQHMQKALAQMNIQLANVISDIVGETGQKIVRAIITGERDGHILANLKSNRIRAGKDEIEKSLVGNWREEHLFALKQAMSLYDAYSERLTECDRQLETMLAALQVHKVEICQKKRRSNVKNAPKFDLRAHLIGMCGVDLTRIDGIEVMTAMKVLSEVGADMSRFKSAKQFASWLGLCPGTKISGGKVLSGASKRTANRAAQALRMAAVSLKSSQSALGAYYRRLCGRLDKAKAITATAHKLARLIYTMLTKGTEYVDKGQEYYEERYRQRVLHHLTVRARKLGFNLTPVPEAT

SEQ ID NO: 487072 - protein, 365 aa, unidentified
MAPQSIDAVDAAKRGRPAVEHIGIDLGKAESQISILTEAGELVGQRIRTERGRFIKVLGDRPRARVLIEASTESEWVARYLEELGHEVVVADPNYAPMYAQRSRRVKTDRRDAEALAEACRLGAYRPAHRTSDPQRHVRALLGVRESLVRTRVRWIVLIRSLLRREGHRVRNGQTSSFSERVGELELPRHLKEEIAPLLALLGSVNVRISAFDRRLVQISRRDEVVRRLMTVPGVGPVIAVCFVATLDRVDRFRGAHQVESYLGLVPREWSSSEIQRRGHITKAGNTRMRWLLVEAARCVMRGKKRPETAALREWGDRIAQRRGRSIAAVAVARRLAGVLYAIWRDESVYDPEKLKSPIVAPRVA

SEQ ID NO: 487073 - protein, 346 aa, unidentified
MTYIGIDLHREFFVAHVEKRNGEKLLSQKYPNSLESVGELTDRFPNSKVVVEATRNWMWFVRAVRAGGCSITMAHPFRTKAIAAAKIKTDAIDAATLCQLLRANLIPESYIASDSEVDARELSRGRINLVHDRTLLKNRVKAILGKENLTFQGSDLFGKSGRIWLNGQRLSCGKELMVTNYLNLMDGIEERLKEVDRVIKQKGGSDPRAFLLNTIPGIGVTTAFLLSSEIGNIDRFANSKKFASYFGLTPRLSQSGNHAYYGRITKVGNPYVRWTLVQAAHRWVRTNQNSKVWFSRLSYRAGKKKAIVALARKLATIVYSVLKYKRPFDLNFEAQRVNPAILPESG

SEQ ID NO: 487074 - protein, 343 aa, unidentified
MEKIITVGLDLAKSIFQVHGIAENGKVLVRRTLRRSQVLPFFRSLPACLVGMEACASAHHWAREIAALGHAVRMMPPAYVKPYVKRNKTDVADAEAICEAVTRPTMRFVPVKTAEQQAASMILRTRELLMRQRSQTANALRAHMAELGIIAGTGMASIAKLLVLLRDEKDNRIPGAARFALILFAEQIELLTTRIEKLDREILVAVRKDPDARRLMSIPGVGPLIAATVRTSVVDARDFATARDFAAWTGLTPRAQSSGGKERLGAISKRGNRQLRTLLIVGATSIIKLAKRGLKVPLWIRTMLQRRPVKVVSVALANKIARTIWALLVRGGIYQAPAAMLKS

SEQ ID NO: 487075 - protein, 319 aa, unidentified
MSESTVVEVFVGIDVSKNTLDVGMDLGNEFFQVSNDDAGIQDLCRRLQTLSPGPTLVVMEATGGLEACVASELVLQGFAVAVVNPRQARDFAKATGHLAKTDRIDALLLARFARAIRPEARPLKDTETQELADLLSRRRQLVDNRVQEELRLHSAKMLRVRKNLKAHIEWLNKRISELDDDLYGHLQRSPAWKEKDNLLQGIPGVGKVTSLAVIARCPEIGTLNRREIASLAGVAPHACDSGKFRGKRSIWGGRADLRAVLYMAALSAMRSNPGIKRFAERLKAAGKPAKVVIVACMRKLLTIMNAMIKNNTPWQPDFA

SEQ ID NO: 487076 - protein, 340 aa, unidentified
MKKTVKFYLGMDVSKLWVDIAVMCVVDHNKQPLVRERFDNNAAGMKALDKWLKKHKVCFNENSLLVIENTGVYHRLVWEYCSTHNLPLYIGNATHIKYSFGIARGKNDKIDSERLCAYAFKNADELKATPVLNPVFLKLKDMMTSRSRLLAQLNSIKVYLREMNLSNSKETQAIIEEAHKAAVEGIKKSLKAVEKQIHQMVQQDAAIKNNYDLLLSVPGIGHLTAVYIICCTNNFICKITGKQLASYAGVAPFGNSSGTSIKGRDKVHHMANKELKKLLHMGALSAIQHYEEFRAYNERKVKEGKHQLLVLNAIRSKIVLRAVAVINNQHKYVDNYKKAA

SEQ ID NO: 487077 - protein, 443 aa, unidentified
MDLSKQQLIRGKYIVGIDPAKKKHQAVMLNPDGLQLGKSFCFDVSYEGYTNTFWKKVTFLLPRCNPENTVFAIETSCNLWMTLAFYLKSEGYTVIMVSPLTTHLSRPMAHHDFSRTDPKDALLVASNAHYGHFDLYQEYSTSSNAMHRLGITYDKLRKELAQNRARLRAALEQLFPEFLSVLEPDTQTAHYLLKRYLFPKDFLAMDIAHEAQAIAAISRHQHGMNTLLHLQHLAGRSIGVVHTLEECPAQRLTVHCWLTLIDTLSAQIETIFSAVVSLAQQLPEYDIVRSLKGISHLSAALFFAEVRDIHRFRHYKQIQKNAGLNLRLSQSGQYVGARHIAHIGNRRLQWLLYCMAEETAKWIPEVRIKFLRRQLKSCKYRKNIIASTSPLLKLIMALVKEQRPYQMRGETLDQMRDLEQQVSQRKEERLGIHPLGKKRKHAA

SEQ ID NO: 487078 - protein, 378 aa, unidentified
MEQVLERCAALDVHKAQVTVWVRVPDARGERADLKARFATMTADLLALRDWLKELAVTHVAMEGTGVYWKPVYYVLEDDFQLVLANAQHVKNLPGRKTDMGDAQWLCMLLEHGLLRGSFVPPREIRELRDLTRYRRSLVGERQRQANRLHKTLEDAGIKLACVASDVLGVSGRQMLQALISGTRDPQVLAELAKGKLRNKLPALRAALEGRFSSHHALLAGHILAHIDYLEETIGALTQEIEARIAPFAHKARRLETIHGVGARTAQAILAELGPDMSRFPTHRHAASWASVCPGNHESAGKRRTGRTRKANQHLRAVLVEAAQAASRTKGSYLRAQYEQLKRRHGHNKAIVAVAHSILIAAYYILRDDVPYQDLGGD

SEQ ID NO: 487079 - protein, 472 aa, unidentified
MIRSVGIDLHQGQHRARCLDERAQPCDSFSFQTTPEGLATLEEHVFQDGANPIIVLEPAGLPWLMVAVYLRSCHPGCRLVKAKTQKVAALRRYLRGPVKSDRLDALTLAKMPFIDPEQMDEIYLPPAEIHALQRLTRQRKRIEQDTTGRKVRISAIVDGYLPGVRRTFNDAWSSPVRAFLKSRLNPFIVVRDGEDALHAFLSKNSYHSKWSKAQTRLVFLACQSVAAVCKLSESAGTVNEDFFMDLQDEIARELRMLEADEIESEALARRIAELYQKLHSSDNLRTIPGVGEHTAPIFLAAVGDPARFPNQSAFANYEGVVPGARQSSNVEAKGLRMTKAGPSIMRMALYQAGDIGRRWDPQLAAVYYREMVYHGKNHKQAMGAVMSHLGARILAVLKEDRPYELRDPEGKLISKDETRKLILSKYHVSEDIRRERRRRNSKISKARETATYRTNEATEAPQPVPVQAVSRK

SEQ ID NO: 487080 - protein, 462 aa, unidentified
MQMTLGIDVACRAAHQASLADETGRFAWSGRKFRTTAADLDELWESIPAGAAVLVVMEPTRNAWVLLAAWFRRRGATVIMVPPEQSADLRDYYSKHAKSDRLDSKMLARLPLLHPEGLRPAEGLGPADALRRASVLRSSLVKRRHVILARLDSYLELLGPAWHAAFGGDLANITPLRLLAAGYADPHAVRRLGLARLTRFTWRYSHGAFGEHYAAGILAAAAETLQLWDGELSYPDLAEDIAAEARLALTLTTEIRDLERKIAALLHQADPAGILTTVPGVGAIGAAQILARLTDPARFRSMAGARSFTGLVPSLTASGTSGRHGPPTKSGDALLREALFMAANQARRIDPVLAARYHRLMVTCGKHHNSALCHISTAVLTRIIACWRAGTPYQIRDLDGTPLTTAQARAIVTQRYHVSDELRALRRTSHLSAKAGRRHQESPSAPTPARPQPNATARSRNT

SEQ ID NO: 487081 - protein, 286 aa, unidentified
MRQEEIYVGIDVAKDRVDVAIRPGGDTWSADYDERGVSELVSCLRTAEPTAVLLEATGGLEVPLVSALAAAALPVVVVNPRQVRDFAKATGKLAKTDALDAQVLAHFAEAVRPPVRPLRDEDAQELSSLTTRRSQLMTMLVAEKNRLRRASHSVHPSIRSHIRWLEQELSDLDNDLRKTLRSSPVWREKDDLLRSVPGVGEQVSLSLLAYLPELGTLNRKRIAALVGVAPFNRDSGLRRSKRSVWGGRTRLRAVLYMGALVASRHNPVLRAFYQRLLAAGSLRSWL

SEQ ID NO: 487082 - protein, 351 aa, unidentified
MGVDTHRDVPVAVALDGLGGRLGELGVPTTRAGYRALETWAAGLGEVAAYGVEGTGCYGAGLARFLAQRGHRVVEVNRPDRATRRRRGKSDPIDAEMAARAVLGGVAQVVPKDTAGSTEMVRLLKLPRDSAVRARTSALNQLKALLVTAPAALRESLGELATPALLARCAGFRRGDLDSPTDAAKQALRSLARRALALTAEAAELERQIERLVASSAPALLDAYGVGPLSAATFLVTAGAHPDRLRSEAAFAALAGASPVPASSGRTTRHRLNRGGDRQANAALHRVVVVRLRWHPPTRDYLARRTTEGKSKPEIMRCLKRYLAREIFGLLRPPRPSPGALGPCAGAAGHL

SEQ ID NO: 487083 - protein, 363 aa, unidentified
MFTERTSVGLDVHARSVAAAAIDGVTGELIQARLIPDYEHVRSWVQDLPGPVAVTYEAVPTGFGLQRALAAAGIRCEVAAPSKLQRPSGDRVKTDARDAVHLARLLRLDEITAVAVPSVGQEAARDLVRAREDCRGDLMRARHRLSKLLLRHGIVYCDGDAWTGKHDVWLRHHARPQLTSRATRMAFDSDYETALAVKARRDRLDTAVEEMATDSEFTTMMRRLGCLRGVSTLTGFALAVEVGDWRRFTGNTIGSFVGLVPSEHSSGSSRVQGSITKSGNTHVRRLLVEAAWHHRARYTVGKTMRDRWDLAPEAARARGDEGNRRLHQRWVRFIERNKKPTIANVAIARELAGWCWSLAVLEE

SEQ ID NO: 487084 - protein, 338 aa, unidentified
MPALTIGLDIAKNAFQIHGVDHHGKTVAQRKLRRADVLKFFAKLQSSLVGIEACHGSHFWARELTALGHTVRLLPTQYVKPFLVGGKNDANVAAAICAAVTRSGIHFVAIKSAEQQSLQSVHRMRQRLIQERTAKSNQIRSMFAEEGVIFPIGLPQLRKGVVELVNNLDSPITALLRRLGSMYLEQLKALQQWLDELAAEIAEIFKSNEACQRLATAPGIGPVIATALLRSVGDPSQFRNGRQFAAWLGLTPMQRSSGGATRLGSITKRGDTYLRTLLVQGARAMMHFVNHRDDRHSRWIKAVMQRRHVSIAAIALANKTARIAWAILTGNGCFRAAA

SEQ ID NO: 487085 - protein, 337 aa, unidentified
MGLYCGIDLHSNNHVLTVIDDADHRVYERRLPNELAITKAALEPYRAELVAVAVESTFNWYWLVDGLMEAGYAVRLVNTAAVRQYEGLKHTDDEHDAFWLAHLMRLGILPTGYIYPKSERGLRDLARQRMRLVQHRSSLITSVQNQVWRSLAVRLRSETVKGRGKQPWPEISDPDLALSVKAGRATIDTLTVQIERLEKLILKRVDRSARFRMLKTVTGIGPILAMTIALEVGDIGRFAGVGEFASYCRCVDSQRLSNGKKKGEANRKCGNRYLAWAFMEAAHFAIRNLPAAKRFYERKRRQRHALLAVKALAHKLARACFYVLRDQVPFAPERLFV

SEQ ID NO: 487086 - protein, 324 aa, unidentified
MTSAKKKLDFCVLFEGKVLREEQVSNHQQAVARLIGELKNDLEMDNEQFLICAEHTGQYTFPLVCACKSVECKLWLENPSQIKYSSGMQRGKNDKVDAKRIAIYASRFGDKVKYYDRPSEEIERLKQLERERALYVTDLAKYKGQMYDQKDFMPAALYRKKTKRMKGLIQELQAAIDAITAEMEKIIGSTEVLARQMELLMSIDGVGKVVALNVIIETEAFSRFDNPRKFCCHAGVAPFSYTSGSSQHSKNKVSHRANKNIKKLLHMAAVSVTHRKEGELKAYYMRKVEEGKNKMSVINALRAKIVARMFAVIKRNEFYTPIYS

SEQ ID NO: 487087 - protein, 319 aa, unidentified
MKYYIAIDVSNKVLSVFDGKKDLTFKNERGLRALKSYLREKFETFDDVVIIFESTGPYSNYLKDFCATNHIKTCIINPKRSSNFAKAIGNRSKTDKIDAKTLYAFKNLINPSDIKVPEIDKDVEVLSAYLSSYEFIIKVRVSISNHIKALKYNANAPKGLLITLKHELERNKQLEKELLDKITEYIEKNEELKKDYYNLLTIPGIGKISAIALLYLFKNYKDTNRSQITALVGLDPTRKESGTSISGRRKISKNGNGTVRKILYFPTLNAIRYNKKIKTVYERLVENHKHKKLALMAAMRKLVLIAHAVYKNKVEFSIV

SEQ ID NO: 487088 - protein, 414 aa, unidentified
MALKIVFPCCCGMDIHKSFLVACIATTDSNGFTTYASKRFSTFTGDLRRLADWLAGYNCRDVCMESTGKYWIPVFNMLETSCNVVLAHPKYVKSIRGQKTDKKDARWIADIFKHDLISPSFIPPFEIRQLRDLTRYSKKLTGFISGEKNRAQNCLTVSNIQLDQVFSDVFGKSASAITEQLLEHTNGDFDVAPFVDRRVKTPLPDIKAAIEGAICFQQAEKLRLIRKHLDSLRTCKASLEALIDKCSLQFQPQIEFVMTVPGIQRSSAITIISEIGSDMSVFPTAKHLCSWAGLAPQNDQSAGKKKTTRISRAGAYIKPLLVQCSLAAIASKKHPEIKERYTMLKKRRGHKKAVIAICRMLLTAIYAMLKKAEPYDPSHYHAFDVAPVNRTITPEQAFLLARRFGYYVVKAQTS

SEQ ID NO: 487089 - protein, 393 aa, unidentified
MIYVGIDVASEKHDCAVLSSETGEICDTFVFENNSIGFNALMTKLALYSRKKDFSDIEIGLESTGHYSNNLVNFLHEKRLSVKVFNPLTVQRLRKAQTLRRTKTDQTDAKFLACMLIGDDSKSYEKSLPQIEELKTLTRHRFRLVKEKSKHKQHISRLITIVFPEIITAFCSTSLATVRELLMQLLSAEAIAAVDIRKLTNLLWTASKHRFGRDKADEVRNLARQSIGTNNRGTALELQQHLQMVQFLNQQIKTVESEIKAIMIELDSPIISIPGISFTLGAMILAEIGDITRFQTPAKLLAFAGIDPSCYQSGKFTADRTPMVKHGSPYLRYAVIHAATCVKRYAPEFIAYFHKKTAQNKHYFVAISHVAKKLIRVIFSLLKYHKHYEPQVA

SEQ ID NO: 487090 - protein, 331 aa, unidentified
MKFTETIGIDVSKLTLDACIHCQQFLIQVPNTKEGHLKLLSWAIKSTGCSIENILFCFEHTGIYSFILARFMTEMKLNYILVPGLEIKRSLGIQRGKNDQIDARKIAQYAYRRRDEITPYQAPDESVNKIRQLLTLREKLVKQRSEFMATLKDQANFIEKSKNKLFFSIPNKLIKELNKQIDNIEKEMDNVLAESPAIMDNFKLVTSITGIGRQTALLLIVVTNNFLWFNDHRKLASYAGIAPFPYTSGTSIKGRNKVSPLANKKLKSLLSSCAVSAIRSDPEMKIYFNRRTESGKHKMNTINAVRNKLLSRVFAVVKRRTPFVSLCKYAA

SEQ ID NO: 487091 - protein, 338 aa, unidentified
MKCYVGMDLHATNTYVGMVDEENKVLHKQRFRNELPLILAGLDPFKKDIEGVVVESTFNWYWLVDGLMEQGYRVHLANVSAIKQYEGLKQIDDKRSAFWLANLLRLGILPTGYIYPKEERPTRDLLRKRLQLVRHRTSHILSVKNILARNLGLRMKSEEVKKLEAPEVKRFFPDKEMQTAVLASLGLVRHLEEEISGIETMILKKLKIKKEFARLITLPGIGKILALTIMLEVGNIRRFPTVGDYSSYCRCVKSIRTSAGKIIGYGNRKNGNKYLSWAYVEAAQFARRFHETVRAYYQKKMAKTNRIVAIKALSHKLTRASYYVMRDQVDYDPARLFQ

SEQ ID NO: 487092 - protein, 342 aa, unidentified
MYYIGLDVHKKTISYCIKDASGQVHREGTIGATRNELDVWVQMLPQPRIMAMEATIFTGWIYDHLLPHAEQVKVAHPLMLRAIAAAKKKKDRIDAGKIADCLRCDFLPECHMASTEIRDRRRTLRYRQLLVRQMVQMKNRISGLLLETGVSHNKQRLHKVGYFRELISNNEEVQGSIRPLLRLSRETIVRCQKTEYALVSSLQRDPLLAERIKRLRTVPGVGPITALTWALEIGDVSRFRSVKQAISYCGLCGDEKSSADKVLRTPLSKQRNKHIQSVLVEAAKLAPRQNHELALVHEREKQKGNANCATLAVARKMVAYLLAVDRREREFVPAEGHRTAAA

SEQ ID NO: 487093 - protein, 364 aa, unidentified
MVRLYYVGMDVHKETIDVLIFRDPGRQPYLERRIPNREQTVRKLFGKLLSHGSVIACYEAGCMGFELQRLLEGMGITSIVTAPGKVPRRTTDRVKTDRRDARRLAEQLRAGTLEAIHIPSREDEAVRDYLRAREDVRGEQVKAKQRLQKYLLRHGYVYESVRYWTLRHDRWLRGLEFDKPLLKETFDQYYYRIQELREQLRCMDKRIEEIALSEEYACRVKKLRCLKGIDYMTALSIVCEVGDFKRFGHAESFMSFLGLVPQERSSGEKRRQGGITKSGNTHIRKLLIESSWHYRYKSLPSKRLTERRRGQPSEIIAYADRAMRRLQGKYFHLLLKGKRPQVAVTAVARELAGFVWGLMVGQTV

SEQ ID NO: 487094 - protein, 420 aa, unidentified
MKRERNTRVLEEGKRYIGLDVHKHYITVGGMNAQQEIVLRPRDVEMERFQRWAESNLRKTDEVVLEATTNTWDIYDTIVSLVKRVVVAHPAEVKQIANSRVKTDNQDVIRLIRLLIADIVPEVWVPPVEVRELRAMISYRWRLVKMSTAIQNRMHSLLHRHNIQAPQGKIDTGENREWWETLKLSELETLRLKQELKTLRLIRENIGEVEKELGRLSNSERWGDQAVHLMQIPDVGIIVTMTILSAIGDIRRFESPKKLVGYAGLGAGVHDSGQKHREKGITKFGRKELRWALVEASWQAVRSNPKWRAEYDALCKRKHQNQAIVAIAHKLLVTIWYLLNRKEVYKQSSEEDLAYKMLTWAWHMDKTALNSMSNQQFAKYGLLRLGKGAELTRVVRGGVPRRIASKEEVLALKPELHLKQ

SEQ ID NO: 487095 - protein, 412 aa, unidentified
MLFIGDDWAEGHHDVVVQDEAGKTLARRRLPEGVDGLARFHEVVASCLGEDGEPDAAQVMVVIETERGPWVNALAAAGYRVFPVNPKQAARHKETVAVSGKKDDFFDAAGLADMGRTRRHQIRELAADSDVAEAVKIAARAHQKLVWERTRHLLRMRSALREYFPAALEAYADLTLTGADALELLGKAPEPASAARLTVTQITAALRRARRRGDLAQRARDIQAALRAPHLAQPAVIAGAYGASMQAGAAMITALNEQIKIMEARVSELFHRHPDAGIYLSQPGIGDITGARMLGEFGDAPGRYASAKARKNYAGTSPLTIQSGKKKTVHARYIRNRHLIDALHTQAFAALTASPGARAYYDELRAREIGHEAALRRVAGRLTGVLHGCVTTGREYDEATAWSHRDTPARAA

SEQ ID NO: 487096 - protein, 409 aa, unidentified
MLNAVGIDVSKGRSTVAVLQPGGVVVHKPFDVQHTSNGLRQLTTYLGSLEGDTRVVMESTGRYHEPVLKAISEAGLFVSAVNPHLIKNYGNNTIRKVKTDPADAKKIARYTLDNWAELREYTSMDTTRIQLKTLNSQFAFFMKQKVAAKANLIALLDQTYPGVNKLFTSPTRPDGTEKWVDFAYSFWHVYCVRKSGIKAFTDRYERFCKHHGYNNQPERPQEIFDAARDLIAVLPKEAIYKELIQDSIQELNLASRHVEELRAKMNELASTLPEYSTVMSMYGVGPTFGPQLIAEIGDVSRFNHREALTAYAGVDPGKDDSGQHNSTSVNASKCGPPRLRKTLFQIMTTILQNGETDDPVSQFLFKKRSEGKPYLVYMTAGANKFLRVYYGKVKECLRHLEQEQRKTVE

SEQ ID NO: 487097 - protein, 410 aa, unidentified
MQTLVERGCGLDVHQATVVACLLIVLQNGKVQKQIRTFGTTTRELLSLREWLLSEGCTHIAMESTGVYWKPVYAILEGALEIVVANAQHVKKVPGRKTDVKDAEWIADLLCHGLLRSSFVPPKPIRELRDLTRYRRKLVESQTAERNRLLKLLETANIKLASVATDVFGVSGRLMLEALVEGKATPQEMAELAKGRLRQKIDELGPALEGKLKEHHRFLLRLQLDRLEAAEKDLAVLEQRLQEKLKPYAEQLTLLDEIPGVDWTLAAVIIAELGVDMSVFGSVSQLASWAGVCPGNNESAGKRKSSRIPKGNVYLKTALVEAANSAAKAKGTYLRDKFYRLKARRGYKRAAVAVAHKILVAIYHMFSDRVCYNELGDVYLDKLNKHHLTRNLVHRLERLGYTVTIEQKAA

SEQ ID NO: 487098 - protein, 352 aa, unidentified
MIIGCDFHPSFQQIAYVEQETGEYEERRLSHRGEAEAFYRSLAGRSVRIGMEATGNDRWFHKLMSELGHELLVGDASAIHASAPREQRTDKRDARHIFKLLVENRFPSIWQPPVGNEEQRQLLLHRCRLVRMRTRIKNQLDSIAKNEGLTGSRVWKAKRRQQIEALPLTGWYAERRKDLLELLDEMDKRIEPLDKAVKLAAEQNAEARLLMTHPGVGPVVSLAYVLILGDWRRFPRGKQVGSYLGLIPSEASSGKHQQRMGHITKQGNTLLRWMLVEAAVKAQSKDPSWHRQYVRLSMNKHHGVAKVAIAHKLAVRLYWMLRSGQNYTKIVERGSHAGQSELAGGCGLGPIN

SEQ ID NO: 487099 - protein, 370 aa, unidentified
MGKSILYIGLDVHKNTIDVAIADGRYESQVRSYGKIINTPDALDKLLKKLQSGKSELSVVYEAGPCGYQIHRHLTSKGISCSVVAPSLIPKRSGSRIKTDRRDAANLARLFRAGELTCIYIPTREDEAMRDLTRCRDDIKRLQRKVRQRLLAFLLRHGFRYSGTKNWTKAHTNWLAGVKMAHPAQQIVLQEYIDAANECTDRVERITEQIHALLSEWSRAPFVRAYQALRGVSMIGATTVAAEIGDMSRFKKPKELMAYLGLVPSEHSSGNTVRRGSITRTGNGHVRRVLIEAAWAYRMQARKTITILKRQEDLSKSICDISWKAQTRLCTRYRRLYAKGKSKQAAITAIARELSAFLWAIDKEVQQTIV

SEQ ID NO: 487100 - protein, 314 aa, unidentified
MNPSTIGVDVSKDGLDAHRLADGASRRFANDKAGCKALIKWLAATPVKRVVFEPTGPYHRVLERALDAAGVPIAKVNPRQARRFAEAAGKLVKTDRADAAMLARMGEVLDLQPRPCVSQTIAEMKELHMARAALVKDRTAAKNRAKAITLPLLAKQNKKRLAEIDVKIDEIDAAIEKLINDDVQLARRFEILLSIPGVSTITAFALLIEMPELGSLEGKQAASLAGLAPVQRQSGSWKGHAYIRGGRAFLRQALYMPALVACRFNKDSRAIYQKLVEAGKPAKVAITAVMRKLVVLANALLRDNRPWTENAPCA

SEQ ID NO: 487101 - protein, 440 aa, unidentified
MGSYAGVDWASEKHDVRVADAAGEKLLAATFAHDEQGLRSLCRQLVRLEVELVAIERPDGLLVERLLDAGLRVLALHPNQVAAARDRFRVSGGKSDGFDAFVLCELARTDNHRFRVLEPDSDQTKALRALTRGREDLVGMRTALTNQLRAELERFWPGPLGLFTDLHGRISLAFLERYPSPADARGLGEARLAGFLARERYSGRQKPAELLAKLRGAAAARVGELELSTRRQLVLGLVAMIKSLGAQIKELERQLARTLGEHPDGEIFRSLFRDPRSVICAAELLAEIGDCRGRYPSRDSLAADAGQAAVAIESGKRKAACFRWGCNKRLRAAFATLADSTRHWHPWAQDVYAAALARGHDHPRALRTLGRAWCRVVWQRWQKRTPYDPARHRALRKHITVTIPTASGPVVDQLATESMAADLFATNAPTSRQQQVTAAQ

SEQ ID NO: 487102 - protein, 370 aa, unidentified
MQVTFGIDVSKSTSTVCELIGESKNELTITNNRPGFIQLLHELTAFSKHPQIIFEATGVYSRRLQAFLEDYGYEYVVINPLKAKKEMNMGLRYNKTDKTDAYHLALIQRLYRHPVNQSESQTYKQLNALSRFYDQLTSDLVIAKNRLHQALQSTFPEIENLFSSAKGKNYWQIVVRYPHCDLVRREDKKQLINWLMSLKGIAFKHALRTADKLIELAYQAYPVVSCSSIEVEQVQYYAHRLLNLSDQRENLIARMVKLAKSLPNHDLENLESIPGFAQTTAVRVLAELGDLRRFSNPNKINAFIGIDPGRYQSGEMDSNLSITKHGNAVARKLLYRAIGQIDNAAKTNPCHIADYYESKKLSSQTKGSKR

SEQ ID NO: 487103 - protein, 344 aa, unidentified
MQITTIGLDLAKNVFQVHGANERGKVVLRKQLRRDQVAAFFANLPSCLIGMEACGSAHHWARKLQALGHTVRLMAPQFVKPYVKSNKNDVADAQAICEALTRPTMRFVPIKNVEQQTVLSLHRVRQGFIKARTAQANQIRGLLAEYGLVVPQGISYIALRVPDLIEDANNELPGAFRQLIDRLLEHLKLLDRQVDEIEAQIKAWHRDDEISRRLEQVPGIGPITASALVATVGDAKNFDNGRQLAAWLGLVPRQHSTGGKAKLLGMSKRGDAYLRTLLIHGARSVIYRATQRNDPGSWLVKLTMRRNGNVAAVALANKTARIVWALLAHDREFRPDYTPAVAAA

SEQ ID NO: 487104 - protein, 346 aa, unidentified
MQYYTERHRHTCGVDLHGRNLYLCVLDSDREIVLHRRVDCDEKKLLRMLAPYREDLVIGVECMFKWYWLSDICEEHGIPFVLGHALEMKAIHGRKSGNDKLDAERIARLLGSGMFPVAYVYPKGMRSTRDLMRRRSFLVNQRSALINHIQVTNLQYNLPELGRISNPDNREGIVERFEDPAVRETIAADMSVIEILDVVIRRLERVIVKAARGHDHHAFALLKSVHGIGDVIGLTLLYEIHDIRRFDSLGGFLSYSRLIRCDKTSDGKKKGTGGRRQGNHHLKWAFSEAAALFLRANPEGQKLHSRLLKKHCKAKALGILAAKLARSVYYMLHRSTPFDMERFVRT

SEQ ID NO: 487105 - protein, 430 aa, unidentified
MKSNTQNAKIEAITEKTLVLGIDVGSETHYARAFDYRGIEYSKKPFKFSNTEAGFVTFKEWILDIKERHEKDKVVLGMEPTGHYWFNLGKFLQDNEMKPVLVNPHHVKKSKELDDNNPTKNDRKDPKVIAGLVREGRYMIPYLPDGVYADLRTASNIRFQLQAELTRIQNRISRWFNIYFPEYKTVYGKPDAKSGILILKAAPLPEDILTLGIDGVNQIWRDAKLRAVGKARAKTLIEAAEHSVGSKEGAVAARMEIRMLLEDYESRSIRLQEVMTLIEGLVKQIPMAEKLLEIKGVGIRTVSGFLAEVGDISRFSNPKELQKLAGLALVENSSGKHKGETTISRRGRKRLRYLLFEVAMSLVAKNPEFRELHNYYTTRRLNPLKKMQSLMAIAAKLIRVFYVMLTKGVNYDPKKMVNDIKRPAVYLQTA

SEQ ID NO: 487106 - protein, 480 aa, unidentified
MAYPTKNPPDLQVVPMLKYESLYVGIDVGKQRHVAGFVSTTLLERHQRFEACPALAFEQSREGFRSLMERIRSYVPLEQVSVLLEQTGHYHRTLVQYLQEFDIPVYIMPVQKRPPGMLKTDKRDALSLANHLFNQLERGIQLADKTHLVRRLLTPTETALQLQGWMRHRYELVQECTRRKNKLTAICDELFPELTQVLKDPNLPTALALREHFPTPHALATAPFSALIALRAKSRPTLGQLEHLQQVASQSIGTKEMTRQRGLVLEQSQLIRELRMLQEHIEQLDTEIRRSIEQSREGKILTSIPGIGSIQAAAIIAAMGTVLNFERASRLKAYFGWAPQEERSGTSLDRVHLTHRGTRSMKQMLFLCVASAIQLDCEWARLYNRLVPKKCPYDERTQRYRGKVKVMGRIAGQMIEMIYALLKQDAEILSQLAPGETPPDPILYDPEVHKRHRNGEYGPIKNVPSQRKVIRLPGRVLPKQ

SEQ ID NO: 487107 - protein, 419 aa, unidentified
MNYVGFDWASRARDVTVLDEAGGVLDRWAFPHSETGWVTTLDRLARHGSAAEVPVIIERTCGLIVDRLLAAGHPVVPVHPTAFYAARPRWGASGAKSDPGDSYKLADYLRTDGHRLRRLTPTDPGLHELQALVRLRDDQVRARTAATNQLTAILDNYWPGPKQLFMSLASQIALAFLTDYPTPTSAAHLGEARMAAFCRRHAYRGGKSPAELLSRLRAAPVAPIGLPPATLAAMVTAQVTVLKTLQTVISDVERLIAVRVVAHPRSNLFENLPGVGMINLAQLLAEVGPILDRVDSAEQAATECGAAPVTRSSGQTRGVYFRWAANTRARKAITSFAHNARMHDDWAAALYADARARGKRNPHATRIVARAWLRVIWACWTSGQPYNPDRHHSSRFLHRCHPAGAQARSRWSPPPEERS

SEQ ID NO: 487108 - protein, 311 aa, unidentified
MDNIIGIDVSKGTLDVHRLTDGRHNNFTNDKTGHTQLLKWISLQPDTLIVFEATGAYHRRLEQFLSAKTIAFVKVNPKQARRFAQACGKLAKTDRVDCEMLAKMGAALQLTPKPISAENLYDLRELLSARRALIKDRTAAKARSATATHSLVKQQLARRLRQIESDIAKIDAAMLQSSQQDQQMSERLDILSSIPGIGTTTALMILVDMPEIGTLDSKQVASLAGLAPMSQSSGKWQGKARIQGGRPNLRHAIFMPALVAIRHNADFKVKYEQLVAAGKEKKVAITAVMRKMLVLANALLRDQRKWVEKAA

SEQ ID NO: 487109 - protein, 377 aa, unidentified
MKRIIRIGMDVHSTNYTLCAMEPIIGEDDRIFATVDVTPDYKNILMFIENLKMKLGVDNQYDIQCGYEAGCLGYSLYNQLTAANVKCVILAPTTMLTPQGVRVKTDARDARMIAQCLSYGGYHAVYVPTEDDDSVKEYIRMRDDHKTALKKIKQQISAFCLRHGHHYAQSKWTIAHWKWLKKLELSALYREVLDEYMISYEEQTAKIDRLDQRIEELAAQEKYAEKVKKLECFLGIQTHTALSLIVETGDFKRFAKGNIYAAYLGLAPGEDSSGPKTNRTSLSKAGNSHLRQLLVEAAGGICKGTIGHKSKALKARQNGNTAEVIAYADKANTRLRSRYYKFIRHGKARNVAVAAIARELACFVWGMMTDNISVRAV

SEQ ID NO: 487110 - protein, 344 aa, unidentified
MRSVTPQTVFVGLDCHAESVQVCVLDANQRQLVNRACPNDWGAVVAAVQKGCGEKVNVQAAIEACCGAADLADELITQAQWSVNLAHPGYVARIKQSPDKTDFSDARLLADLERVGYLPRVWLAPEEVRELRKLVRYRQSLTKERKNLKLQIGGTIREARQKPPADVNAWTKTWLAWLQETAVLSPNARLITRCRLARLAALAQEIRAVERLLAKQTAHDPLVQKLLTLSGIGLVTAVTIRAEIGRFDRFRTGKQLARFCGLTPRNASSGQRQADAGLIKAGNPQLRTVLVEAAHRLIRYDQRWTKLAGELRLRGKPMSVVTAAIANRWVRWLFHQMQPGQLAA

SEQ ID NO: 487111 - protein, 462 aa, unidentified
MMNVQEQREMVEKANRILSEMKSFTWRDLETQGKFSKNDKLSFIDDDMLILGCDIGSETHYVRAIDIRGRELSRKALAFDNNAEGFQKAHDWAVQLAASNDKKQIVLGLEPTGHYWFCLAAWMVSNGISVVQVNPYAVKQTKELEDNSQQKDDRKDPKLIANLVKDGNYGMPYLPEKVYAELRRLSMFREQLTEDRNRSMNRLHREMKIYFPEYKDAFGKIDGAFCMAVLKEAPFPEDILKLGGEGIREIWHQAKLRGRGYSRAAEIVKYAETSIGLKDGTAAGRKAVRWFAEKIMELDEELAEIENRLNEKCREIPHAENVLEIPGIGGKILSGILAEMGDISRFDDAKELQKLSGLGLVSCSSGKHKGETRISHRGRKRLRYWLFQAARSAVAHGEEYKWIHAHYTTRAGNALQKMQSLMVIACKLLRVIYTMLKTGKPYDPEKLLKDIRYPENVQTAAA

SEQ ID NO: 487112 - protein, 400 aa, unidentified
MSVEYAVFLGLDVGKGEHHACALDPSGKKLHDKPLPNDEQRLRALFTQLSRRGRVLVVVDQPASIGALPVAVARDAGCQVAYLPGLTMRRLADLHPGNAKTDARDAYIIADAARTLPHSLRRVDTGQETLAELEVLVGFDDDLAGESTRLVNRIRGLLVTIHPALEKALGPRLHHPAALELLIAHGGPDGLRAATTDELLATTRPLAPRMAGRLVEAVKTAMDAQTVVVPGTTAAATVLPHLARSLRSVHDQRNQVAVQVEEILDAHPLARVLISMPGIGVRTSARILLEIGDISAFATPGHLAAYAGLAPVTRRSGSSIKGEHPPKGGNKALKRAMFLAAFASLSDPLSRAYYDRKRAEGKKHNAALICLARRRSDVIYAMLRDRQPYQPSRTPAARAA

SEQ ID NO: 487113 - protein, 443 aa, unidentified
MLPRDGAVIGIDLADEKQAFAVIDHDVRVLARKTVRVKAFRLGPALDWAVAQAGAKGLARVTVACEPTGPRWLQVQMLCAGRGLPLVCIQPLVSHIAREQQDYTSHKTDEADCVMIARLAAELHCYVPEELDETWADLRHLGRRRAQLITQQTASMHRVRDFLSAAWPTVIETCAQPLLSKTWLAALEVVTARCGGQPAGLAAMGEEAFTASVRGAVAGWGGQRAWGTISSRIFAALTDTEGVVVSSRRGLLRRCAGELGDLRRARAQLRAVEAEMVAVLAELGLSRLGDIPGLTAAGAAAILAETGDPRRYDSSSSLVKHAGLSPSENASGAFHGEARISRRGRPGLRLTVWRAVWPMLRFNPVMAAKYQAMTAAAPASAGSRQAAAADAAARARRAKARAACAASLLRWIYSLVAHGTSWDPEVAAGRKDHQAAPRYLEAA

SEQ ID NO: 487114 - protein, 351 aa, unidentified
MLIIGVDYHPSFQTIAFLMEETGECGEQELNHRDGQAERFYRELKQRGVSVRVGLEATGYSRWFERLLAELGCEVWIGDAAEISRQRVRKQKTDREDARLLLKLLLENRFPRIWVPSPENRDLRQLLWHRHRLVQMRTRIMNQLQAVAMNEGYRWKKKLFSEQGRALLEKLPLAPWASRRRKELLELLDQLDPKIAELTAAVMQEANQRPEVRRLMTHPGVGPVTGLAYVQVIGTPDRFPCGKQIGSYIGLIPCEDSSAGKQRLGHLSKQGNVLLRFLLVEAAQAAARSNPHWRRRYMHLAMRRHKNIAKAAMARKLAVRLYWMWRNGWDYSQLVSFGSHAGKLATGHGVK

SEQ ID NO: 487115 - protein, 397 aa, unidentified
MYIVGIDIAKRKHEAAVIDGEGTVIIKPFSFTNNCSGYNRLLAMLTKAKLPLDEVSFAMEATGHYWLALFTRLQKEGFRVQVINPVQTNSIRSFYIRQAKTDPRDALLIAEVIRFGHFSESTLHPENIYELRELCRGRHAIVSMQADVKRKVVALLDQVFPEYETAFTNLFGDTSMAILQTCPTPKELSEMRLEELCHLIEVSSHKRFRMAKAQELQALARNSFGFAMAGDVFSTMIRLYAKHLDFLKQQVREMDRKIAEIMETLDTPITTITGIGPTLGAYILSEIGDISRFSSAAKLAAYAGIDPTMRQSGEYNGVRNRMSKRGSPYLRHAIWLAASSAVLHDPALKLYFQKKRDEGKPYMASVGHACRKMVSIIYAVMRDNKAYTPCIPNEISA

SEQ ID NO: 487116 - protein, 402 aa, unidentified
MQVSKKFTHFCGIDIAKDKHVACVIDRDGCQCIRPSSFANTAEGYQRLVDRLKDTAKASSVLIGMEATGHYWYSLHDFLSRCGYTVVVLNPIQTARQVAQAIRKCKTDKYDAVHIAALIRSGNYKPAAIPGELAMTCRQLTRLRYSMIQQYTRIKQLLWSRIHPVWPEYESLFANPFGKTGRTLLRIAPTPRNILQLDHNKLTEMIHKSSHGRFGQLKAQQIRDAAQTSIGMLRGQEGINAAINCLLDQIEALDPVRDGLETQITALAKQLPQYLFTLPGATLLNIVSLYGEVDPIETFKQPSQLVAFAGLDATVFQTGQYDAPQRHISKRGSPFLRKTLWQMAYRALQQEGDLRDFWFKKKRQNKHQFVAVTAVARKLCHVVWRIMIDRRDYIPKGYNPES

SEQ ID NO: 487117 - protein, 421 aa, unidentified
MKKEQSEFAAYIGIDWADKKHDLCLQVAATGAREKSVLEHNPKAVHAWAEGLRKRFGGAPVAVCIELAKGPIVSALLEHDFFVIFSVQPALLARYRKAFVPSRAKDDPTDAQFALELLLRYPERLQRLKPESTTMRALRQLVENRRTLVDDRVRVTNRITASLKGYFPQVLALFREKDTGVFADFLERWPTIEAAKKARKSVLEAFFREHKVSSQTTIDRRIAALKGEEPLTTDQAVIGPAKLLVDLLLPQLKALADAIERLDTEIGHCCAKLADYKLFAALPGAGPALAPRLLAAFGEQRERFPDAASFQKYVGVAPVTERSGNKCWVHWRYSCSTFLRQTFVEWVAQTITRSFWAKAFYEAYRARGGSYQSALRALAFKWIRVLYRCWIDRIPYDESKYLMALQNRQAPLLKHAANTIA

SEQ ID NO: 487118 - protein, 320 aa, unidentified
MAQQGRIVGIDVAKLKADACIRSLQLRLSQPSTAQGQQDMITWLRRNEVGLAVMEASGGYERVWAEALRAAAIAVRIVDPKRVRYFAKSAGRLAKNDPIDAEMIAWFAETFAAAAEPAHDADRDALNRLVTARSLLVRLATPIRQLGEHGQPRVVENAQRAILKTIKAQLAKLEAAIEAKIAANAQFLARRAIIASVPGFGDHFVAGALAWLPELGRISNKAAAGLVGVAPYDDDSGQHRGERHIKGGRRDIRTLLYMAALGAATRHNPVVMAYYKRLRAKGKKTKVALVACMRKLVVILNTMLARGEMWNPTPRTTAVA

SEQ ID NO: 487119 - protein, 343 aa, unidentified
MKLSRVGIDLAKNVYQLHGVDRSGKTIWKRRLKRHQWFKVLLDKTEPGCVIGMEACASAHHWGRELQSRGYTVRLIPPQLVKPYVKSNKNDAKDAEAICEAMSRPNMRFVTVKNVEQQDIQATHRIRAEFITQRTAKGNQIRGLVAEYGLVAPKHLSSLRVAIPCWLEDAENGLTADFRSLLHGVWDDLLALDDRVGEMDKLIKRLAENHEECVRLQQLRGVGPMISTAMIATVGDARQYHKSRQMAAAIGITPKQHSSGDRDRLLGISKRGDVYLRTLMIHGARAVVARAEHKDDRLSRWLTGIATKRHPNVAAVALANKTARMAWTMLRNETDYDPDFAIR

SEQ ID NO: 487120 - protein, 370 aa, unidentified
MTSVLNLSEVVDVVIGVDTHVQTHAAAAIDARTGGVLAEITIEATGEGYAELVEFADQIADEHGALRAWAIEGTASHGRGLAVHLTGAEELVIELDRPERARRRGGVKSDPADAIRAAREALSRARFGTPRGGGPDPDHAATRQALATRLAIRRSAVQAVGDARRQLFSAVLTAPEPVRARLRGLKPLALITKAASLRTAAAWVNADVETATTVACLQILAKRVQSLTAEAELHEHEIRALVRTWRPDLLAQRGVGPIVAATVLCAWGYAGRVHSEAAFAKLAGTSPIEATSGQIHTRHRLNPHGDRRLNCALHTIAITRQRCDPATRAYTHRRAAEGKNPREIRRCLKRYIARDLYRLLESPRQALDAT

SEQ ID NO: 487121 - protein, 393 aa, unidentified
MFHVDDLSRSLTAFDQDSTLIAVIEMSLKSWLVGAIVPGVSRAPLKKLEADEAGLLRQLHRWRDEATKAGRHIKRLVVAFEAGRDGFWLAWWLRARGIEAYVIHAASVAVSREHRRAKTDRLDTEMLKRAFLGWLRGEPEHCQMAAIPTLAEEDARRPNRERECLVRERTRIVNRVKSALVRLGVRGFNPKLRKAAERLDDLVTPQGEALPPNTLAELRRDLARLALLREQIGAIEAARLERLEQQVSSEGPHAMVRLIAQIVGVGIETADMLVHEILSRNLRDQRALARYAGLTGSPDESGSRRREKGLARAGNGRVRRGMIQLAWRFVRFQGDSALAKWYEARTMAAPNTRKNPNTRKKMIVALARKLLIALWRFVTTGVIPDGVALRAAA

SEQ ID NO: 487122 - protein, 410 aa, unidentified
MRRVIGIDIHRTFGEVVFWEEGRLRHGGRIDMTRTALEGFGKSLLTRDEVVIEATGNCMAVFRVLAPFVKRVVIANPLQVKAIAYAHVKTDKVDAGTLASLYAAGYLPEIWAPDADTERMRRLVARRYQVVRHRTRIKNEIHAILHAHLIPKCPHSDLFNGRGRDWLARQPVPDDERFAIARHVRELDRLAEDLAIIDRGIAESALDDRAIGRLLTIAGINLTVATGLMAAIGDVTRFKSPQKLVSYFGLNPRVRQSGVGAAHYGRISKVGRSHARAMLVEAAWAAAKTPGPLHAFFVRIRARRGHQVAAVAVARKLTILCWHLLTKEKDYLWARPALVANKMRAMELQAGKPQAKGNRRGPAYAYNVKALRDQEMRIAEQAERSYEQFVTHWKPRPTKSSARAPQSGKA

SEQ ID NO: 487123 - protein, 417 aa, unidentified
MSATVRYVGLDVHKDSIVIAVAEDGVQPAEFLTKLPYDVPRLLKQLRKLGSPARLRCCYEAGPTGYGLYRALTEAGFACLVVAPSLIPVKSGNHVKTDRRDARKLAHYLRSGDLTAVWVPDEACEAMRDLERARDDAKRSERRARQQLGKFLLRHDRRYPGKTSWTGRHLTWIATQKFAHEAQQQVLTDYLHTVQEATARVRRLSDQIAKLVEGWALAPLVKALMAMRGVQLITAVTVAAEIGDLKRFPKAGQLMSFVGAVPSERSSGGSRRQGRITKTGNAHVRRVLVEAAWTYRHRPRMSDAIRKRNAGLSPQVQAIAWKAQVRLNERYRRMLAAGKSPNVTVTAVARELAGFVWSLGQQVESPKAHGSRAALTLSPDVCGTCPPKSSSGVPQPKATRSTRRKPRASLPRGSAAR

SEQ ID NO: 487124 - protein, 336 aa, unidentified
MSELATVGIDLAKSVFQIHGVDENGLVLVRRQLRRSQLLAFFQKRPRCLIGMEACAGAHDWGRRLQELGHDVRLMPPSYVKPYVKRGKTDAADAAAICEAVTRPSMRFVAIKSEACSAVMVLHRTRDFLVRQRTQIGNAIRAHMTEFGIIAAKGAQNVDQLKEQLDQLPKAARLPVALLFDQLFETNMRIERLTEEIEEAYVQNETSQRLATIPGVGILSATIIAATTPDVDNFDSARDYAAWLGLTPKPHSTGGKQKVGSISKMGNRYIRRLLYLGAMAQIMLRRRLKRKAGSDWLSGMLMRKKTKVVAIALAHRMARMIFAVLRDGSRYEPQVA

SEQ ID NO: 487125 - protein, 357 aa, unidentified
MRSRQRSLMKIDEVILGVDTHLNLHVGALISNSGKFLGTLSVTTDAAGYLELITWARSFGTLYRAGVEGTGTYGAGLARALRDHKVQVLEVNRPDRARRRSRGKSDPTDAENAARAVLSGMATAVPKEQTGAAEAMRSVSVTRRSAVKAQTQAINQLRALLISAPPEIRQRLWKERTSDCVMGCSRLRSLGSTPLLQTLTATLVLLAKRWLALKEEIKTLDAMLESLTTRYAPRLRGRFGVGPQTAAVLVAVAGDNPERLKSESSLAALCGVSPLQASSGKTVRHRLNSGGDRSANNALWTITMVRMRSDPRTRAYVERRTKEGMSRKEIHRCLKRYLVREVYPLILEDLGASTKDS

SEQ ID NO: 487126 - protein, 375 aa, unidentified
MSKIRFVGLDVHADSIAVAVAEPSGEVRSFGVIANRPESVRKLMHKLGPAEQLRVCYEAGPTGYVLYWQLTALGVRCEVIAPTLVPVKAGDRVKTDRRDAIKLARSYRAGDLTPVWVPDAAHEALRDLVRAREAAKRDQLRARHRLGKFLLRSGWQRPEHLKTAWSKPHLEWIKTKVHFAQPAQEAALTDYVHEVEHVAMRLERLDGAIQEAARLAPPRMRAVIAALQALRGVAEIAAVTIVAELGKISRFRTPRELMAYSGLVPSEYSSGSARRQGSITKTGNAHLRRVIVEAAWAYQFRAWLGGYLLKRQVGLSPEVKEIAWKAQNRLHLRYRKFLARGKNKPQIVTAVGRELLGFVWAIGVKVETEQQRIAA

SEQ ID NO: 487127 - protein, 334 aa, unidentified
MSDAPSLETQTMTSTPTVFVGIDVSSQAWDIHLLHDGQAWTSKTDPASLKILLKRLKPFAGTSHIVLESTGGIERPLAIALIDAGHIVSIVNPRQVRDFAKGMGLLAKTDRIDARVLALFGQKVQPRRAVKPSEKQLELEALVVRRRQLVDIRATEFTRQKQTVSKKTAQSITKLIEVLTKQIETLEQAIVELIQSDENWKHKADIVDSAPGVGPVTAATIIAELPELGTLNRQQIAALVGVAPFNDDSGKKHGVRSIRGGRTSLRNTLYMATISAVRFGGDSSHIKQLYHRLRDKGKDFKVAIVACIRKLLTTLNIMVKNNAMWRDNPALANP

SEQ ID NO: 487128 - protein, 412 aa, unidentified
MEVIYPCCCGLDVHKKSITACVLWAEAKGKSRKQKKRFGTFTHDLLQLADWLGQCGVTHVAMESTGVYWKPVWNILAEQFEALLVNAQHIKAVPGRKTDQKDSEWIADLLQHGLLRGSFVPPQPTRELRDLTRYRVSLVQEINRIANRIQKVLEDANIKLASVATDALGASGRAILEAMLAGEEDAARLAEMAQGKLRNKIPELKLALEGRVTEHHRFLLRQLFEHLRFTESKMQQIEEEIERRMCPFEDKVIRLCTIPGVDRVTAWGLLAEIGLNMDQFPSSAHLASWACLCPGSFESAGKRLSGKMRKGNVSLRRCLSQAAWAISMMKNNYLSALYRRIAARRGAKRAVMAVAHALLVIAFHMLKRKENYHELGADHFDRIDIGRVRRSLVRRLERLGHKVTLEPLAQTA

SEQ ID NO: 487129 - protein, 267 aa, unidentified
MMHAGLDLSRKRLEVQLLTDQGARVEHLAVMPTADGLLDLVGRVARYRQPVQAAIESMTGARFVHDQLELAGWEVAIADAIKAKGLAPLACKTDKIDAWVLAELSRRDLIPAIWLPDPGVRAERERARWRLHLVHHRTALKNRIHSTLMSFGHACPVSDLFGVSGRQLLTALALPEPWLGSVTAALQLIDQLDGQIDERERELRAMGADHPSVVLLRTVPGIGWVLAYTIASEIGDIHRFASPTKLISYTGRCPLVKQSGDRDSAGR

SEQ ID NO: 487130 - protein, 405 aa, unidentified
MWSLGIDWAEKHLDYCLLSPSGDVLLRSRVENTEAGFAKMLSDVTHLDITPKQMMAAIESPHQPVVDFLMVREVIVYPVNPTAIYDYRKSLKTSGSKSDAADAELIASYVRLHHQKLRAWRLAEPELRQLQILVADRDKLVSEKVRLQNQLRETLLGYFPQAVQAFSDLSSKTALDFLSQFPTPSHIQTMTDEKWQTFLNEHRVFHPKARQRFCDAMKQPALTVDDAVVSAKALFTETVVIQLKALGAALESYQKQIEGLFKRFDDSDRFLSLPGVDVVLGAKLLVAIGTDRERFTTADELGAFFGTSPYTKSSGQHKSVHFRKACHKKMRSALHQMALASLRSSTWAKAYFAKKRKEGKKGAHALRCLANLWLKVIFALWKTETVYQEDKHLASVARHQLAQPM

SEQ ID NO: 487131 - protein, 353 aa, unidentified
MEQFIGCDAHKKFSIFASIDEKGEYGPTFRVRHDLEVFRKFLKELPAGSKIALETSGCYYWMVDEMERAEHIPLLAHALTAKRRMEGRHKTNERDARGLAMLLRNGTLPVVWIPPAELRDQREMLRWRMCLSRMRTRVKNRIHGVLQRYNVDIAVSDLFGDAGRVELLARLHELPPYSRHSLLDQLQMVDTVETQISECEQVLEEMLYPSADRDLLDSLPCVGKILSAVMALEIGDVQRFGGPDRLVSYAGLVPVARESADWKRKDRCPRDCNMYLKWAYVEAANLISIHRGHWPERHVAQLYERVKQSTKMHGKATMAVARHLAEASYWMLRKQAVYQEPNSKRKVLSSTHG

SEQ ID NO: 487132 - protein, 358 aa, unidentified
MNGNTGMNAGQIIGTMNGLQVIGLDIAKHVFQLHSVDMGTGEIVNVQIKRAQVLEHFVNRAACLIAIEACGGAHHWARELTAQGHSVRLLHAKIVRPFVSGNKTDATDARAIWLAVQQPGVKFVGIKTTAQQATLTLHRQRELLMKMRTMQTNALRGLLYEFGATFAKGRNALLTDVEKALEDLSAKLPQMVGDSLREQVARIKAMSEDMLAIEKRLGLQLKADPQMQRIAQIPGVGLLTATAAIATMGEASAFKSGREFCAWLGLVPKQTDSGGKVRLGGISKRGDTYLRTLLIHGARSVLAHAKEPGPWLEQIKARRPANVVIVAQAAKMARTIWAVTAKEQDYQRGFKSVRPLAA

SEQ ID NO: 487133 - protein, 449 aa, unidentified
MTKSKRSHPERDISPTHRDAAAIDIGAKMHVAAVPPDRDTEPVRSFGTFTGDLQRLADWFERCGVRTIAMESTGVYWIPVYELLEQRGFEVMLVNARDAKHVPGRKTDVSDAQWLRRLHEYGLLRPSFRPKGELAALRAYLRQRERLLDYAASHIQHMQKSLMQMNVQLHHVVTDITGATGMRIIRAIIAGERDPATLAVHRDRRCHATVEVISAALTGNWRDEHVFALGQALELYDAYQAKLTDCDVQIEAVLRRLRNAANPAGPLPAPRHRDNTANAPTFDARAALHAVLGVDLTQIHGLGASLALKLIGECGTDLTAWPDAKHFTSWLCLAPANKISGGKILSRRTRRSGSRAAALLRLAAVTVGRTQTALGAFYRRLSARLGKAKAVTATARKIAALFYNTLRHGMAYSDPGASYYEQRYRARVLSNLQRRAKSFGYVLQEASSA

SEQ ID NO: 487134 - protein, 474 aa, unidentified
MGKGSGNGTTRGDRRRNARRERLRGLLPRDGAVIGIDLAEDKQAIAVIDHDVRVLARKTVRVKAFRLGEALDWAVGQARAKGFASVTVACEPTGPRWMQVQRLCAERGLPLVCIQPLVSHIAREQQDYTTHKTDESDCVMIARLAVELHCYIPEELDETWAHLRHLGRRRAQLVTAGIASAQRIRDFLSVAWPAVMETCAQPLLSRTWLAAMQLVTERCGGQPARLAAEGEQAFTALVRGAVAGWGATKAWGPIAGRVFAALTDTEGVVPWSRRGLLRRVADELGDLQRIRAQLRAVEADMVAVLDELGLARLADIPALTAVGAAAILAETGDPRRYDSSSSLVKHAGISPSDNASGAFLGDTHISRRGRPGLRLTVWRAVWPMLRFNPVMAAKYQAMTQASDAAEDQAAAGSRQASTAAAAARARRAKARVACAASLLRWIYVIVVHDTSWDPAAAAGGAAGRHAARYPEQAA

SEQ ID NO: 487135 - protein, 400 aa, unidentified
MAVAVGIDIAQEMHWVCLKITETGQLLASHKVDNTPADIAGLVDEIRAAAEQHGAATVGIDILGGIAALAEAMLLDAGITLVHVPGLAVNRARRATVDGEHKSDPKDAAVIADQVRMREDLRPVTAQRDVDVDLRLLVGRRSEIVTDQTRRAARLRDLLVSIHPGLERVVDVTGKAGLHLLTRYVTPAEIRAAGRRRLLAHLRRAGHLRETTMTALTDAAVAAAQTQRITVPGETVAAQLIRALATEMLSAREQLKMIDARIEAILAEHPDAALVRSLPGMGATLTAEFLAITGGIDRYTRGDQLAAAAGLAPVLKQSGKSRYLQRATAEDKALKRVFYQSAFIAISCDPASKSYYQRKRTEGKVHHQAVISLALRRVNVLHAMLRNRRPYNAGHSASAA

SEQ ID NO: 487136 - protein, 319 aa, unidentified
MESKVHVGIDISKISFDVAIPAGTKDGYKHLKFSNNAEGFKKFITHLEPMSHCVMEASGVYYLQLAICLHEHGMIVSVVNPLTIKRFSQMRLMRAKTDKKDAAIIAEYGKVEDPIQWKPRADHMLQMQQMQALQDNYVGQLTRLKNQQESFINSGISNKILLEIIEKEIEHITNQVKLLDAELLKITKQHHNDLFERLQTIKGIGKRAAMTLILITDGFERFENYKQLCAYVGLSPRIYESGTSVKGKVKICKMGMARMRKLLYLCAMRARTCNKACKEMFERLTERGKNGKLALIAIANKLLKQAFVIGNSQMIYQEF

SEQ ID NO: 487137 - protein, 326 aa, unidentified
MQAVTTIGLDIAKSVFQVHGIDAEGNVIVRRQLKRRHILTFFQKLPLCLVGIEACASSHHWSREIKALGHTVRLMPPAYVKPYVKRQKNDATDAEAICEAVRRPTMRFVETKTPEQQSCLTLHRTRHLFIRQQTAVINAIRAHLAEFGIVASVGRQGVDKLLDIVADARNTRLPEVARACLAALGNQLRMLKAQILNFDRMITAWHRSNETSKRLDALPGVGPALATALVASVADPKAFRSGRDFSAWVGLVPKQNSSGGKQKLGSISKQGDRYLRSLFTAGALAVIRYAKIHGTGHRPWLTAWRGDRPKSPLSRLPTRSPEWLGP

SEQ ID NO: 487138 - protein, 390 aa, unidentified
MWAEASLAQIRGLPSRIWLLGLSDNVWEAPVFTERRSVGLDVHARSVVAAAIDGVTGELVQARLTPAHDHVRSWIRQLPGPVAVVYEAGPTGFGLYRALMSAGVRCEVAAPSKLQRPSGDRVKTDARDAIHLARLLRLDEITAVAVPSVQQETARDLVRAREDCRGDLMRARHRLSKLLLRHGIVYCGGDAWTGKHDAWLRGQHLDMPATRLTFDSYYDCVLATSARRDRLDAAITAMAAESEFTGVVRRLGCLRGVSTLTGFALAVEIGDWARFTGNTIGSFVGLVPSEHSSGASRVQGPITKTGNTHARRLLVEAAWHHRARYRPGKTLRDRWELTTPAARARGDAGNRRLHARWAGFIDRNKKSTIANVAIARELAGWCWSLAVLEE

SEQ ID NO: 487139 - protein, 340 aa, unidentified
MPLYGGIDLHANNSVIVLLNEQDEVIYRKRLSNELPAILEQLAPYHAEVKGLVVESTYNWYWLVDGLMEAEYRVHLANPAAIQQYSGLKYTDDHSDARWLAHLLRLGVLPEGYIYPKAARAVRDLLRKRAHLVRQHTANVLSVQNIMARNTGARFSVKRIQELTKQELTTLLAEETQVLAVTSSLVVLDCLRHQIKRLEQSVHTRLHHTPAYEQLLTVQGIGTILAQTITLETGAISRFPTVGNYASYCRCVDSTKISNGKRKGTGNVKNGNPYLAWAYMEAAQFAMRFQPEAQRFYQRKLAKSRNNTVLARKAVAHKLSRACYYIMRDLVPYEVTKAFG

SEQ ID NO: 487140 - protein, 340 aa, unidentified
MNIRKVTQNPSKGKSLSNDGYDHYVAVDWSLRVMAIAHMTRRSTQPTLFERASDIKYLKDYLDAMPGRVVLAIEETTTAQWLYLELVDHVDEIIVCDPYRNRLLTDGPKTDKIDAGKLCILLRAGLLKAVFHSTSDLYELRRLVSAYDDLVKAGVRAQNQQTALAQAHGDKGNSAPFVLEHLTKSIELYRSSKQQYEQKFLELSHRITPVRNLLQVSGIGIIGAVKIVAIVVDARRFPRAGHYLSYCGLVEHEKMSGGRSYGRRQPRFNHSLKAVYKIATMAAISGTTNPMRAYYDYLRAKGVAEHNARHAVARYIARVTYGILKTGKRYRPFQQRSQQR

SEQ ID NO: 487141 - protein, 366 aa, unidentified
MQKISTMQAFSSEILKEQKLTIGVDLGDRSSAYCVLNEAGGIILEHKLATTPEAMKQVFGSMPRCRMAMETGTHSPWVSRLLTALGHEVIVAHAQKVRLITKSRRKDDRMDARTLARLMRIDPQLLSPVKHRSAQAQLHLTEIRARAVLVSARTALVNAARGLVKSYGERLRKCSTEQITRDATSGLSTGLREALDPLLREVDALNKRIQEYDRRIEQMSKKTYPETALLKQIKGVGDLIATTYVLTIEDPHRFRKSRDAGCFVGLQPGRRNSGESEPQMRISKEGDEYLRTLLVQGAHYILGPFGEDSDLRRWGRKLSERGGKIAKKRAVVAVARKLAVLLHRLWVSGEVYEPLRNTQKAMTAAA

SEQ ID NO: 487142 - protein, 344 aa, unidentified
MKIAVLGIDLGKNSCSVVGLDHAGTVVKRRRMRPESIPAFTRTMPTCTVAMEACCGAHHFGRLLRSQGHTVRLISPEYVRPYVKAQKNDDRDAEAIAEAATRPTMRFVELKSEEQLDMQTLHRVRDRLVGERTALINQLRAILLERGSAVPQGRRKLEQHLAAMPDPDNDTSLSPRVRRLIDDMRAEWLELDRRGMVASRRASARARSDADARRLATIPGIGVLNATALVAAIGNGETFARGRDLAAWLGLVPRQVTTGGKPRLVGITKRGNKYLRKLIIHGARSALPVLASGPTPLGEWLRALMKRVHKNVAVVALANKLARIAWAVLRRGEEFDAAAVRAAV

SEQ ID NO: 487143 - protein, 371 aa, unidentified
MNFIGIDLHTNRFTCCYRNEMSPTDNPVKGREIKTFELNESGLTDFYQTLTSDTYVLVEATITTFCFIRLFKDIVKEVIIANTYELKQISMARCNTDKIDADKLCRILKMQIISGEQLISPVVLPPEDIQDLRSFFTTYRLMKKQSIQLKNRIHSLLKERLLGFTQEEVFDTKNRERIRSILKGSPMNIQVNLLLDRLEREEAEVKELQNQIMLHASPFMSQIEILTSMKGVSVFIAIAIIADIIDVKRFRNSKAFTSYLRSAPKVSNSNTSVCIKGTNKKGRKLSATLLTQSLNHVLDASPKLRRWYDRLCEYKKPGMVRTGLRRRVFAEIFQMLKKGEYHYAREEKKHESKMCQYRIFLKKRKILLEIA

SEQ ID NO: 487144 - protein, 353 aa, unidentified
MRTYYVGMDVHRATIAIVVLNGAGKVVEQLVVETSATRVRCYLKQLQGRVYVTFEEGTQAQWLYDVVQPLVTEVIVCNPRHNKLLKAGNKSDRIDAQKLAELLRNGALKAVDHRDHGVRALKELVRNYDCLVSDTTRVMNRLKAMFRGRAIACGGHEVYRQDRREVWLSKLTERGAKERAGSLYRQLAALRALRQEAKLAMVREARRAAAYSWLMSVPRLGAVSVAQLLAVVGTPHRFRTKRQFWSYVGLAVVTSSTADMEVVEGVLRRSRRPVATRGLNRNHNHLLKRVFKNAATSACQSEPFKQSYELRLQQGMDPALARLVIARQLSAITLSLWKRGEKFQAERMKRPAV

SEQ ID NO: 487145 - protein, 316 aa, unidentified
MTDTSMICAGIDVGKSHLDIAIHPGDARLKVAYDTAGLKRLDAFLQEHDVERVGFEASGGYEWRLMVHLRASKRPTARLQPAQVRFFAKSRLQRAKNDRLDATLIAVFTASLETMPALPDARFDRLSAEQTYLEQIEQQIALVKTFAETAVPDIVKRRHAREIARLETCRKMHMLRLEKMVRDDVDLARRFDLLISIKGIGPRSALCLIIRMPELGHASRNEIAALAGVAPYDDDSGKHRGRRKIQGGRQRLRKSLFMCAFTAAWHNPDLAAFYRRLRGNGKQHLCALIAVARKLVILANAVLARNTAWTPKYSHA

SEQ ID NO: 487146 - protein, 445 aa, unidentified
MSNYYLGCDVSKGYADFIILDSAKKIIEPVFQLDDTFEGHNQFYRFLQDFFKQYPGATLFSAVESTGGLENNWLSLFKKLSDLMDIKATRINPVGPNALHKASLKRNSNDAISAKLIAEYLITYPEKVNYTSDDPYISLRKQWNLIEMYKKQKTQLLNQLSILLYTSMPFLVKYCKDGTPHWLLNLLSKYPCSSKLTKTKESTLAKIRYISHKRAQLIIADAKQSIGSVDDEATSFVIKSIVEQILQLKNRIEKHKHYMVTRCDLPEVKLLQSFQGIGVYSAIGLVLNIVSVDRFPSAKHLASYFGVHPVYKISGDGSGRFRMSKKGRAVPRQILYMVARSSIIHNPLIIEVYINHLKRGNTKSSALGVCMHKILRIVFGILKHQKEFDPEIDKQNRNKTRIIKKNNTASDIKRRYQEKSIDAPVSRRQSIKRRKRKQSQSLLEA

SEQ ID NO: 487147 - protein, 385 aa, unidentified
MPKPNDLSRSFTAFEQDSTLIAVIEMSLTSWLIAGILPGVERHPLKKLDVDEEALLQLMHRWRDEAINAGREINRMVLAFEAGRDGFWLARWLRARNIEAYVIHPNSVAVSREHRRAKTDRLDTELLKRAFLGWLRGESDHCSMAAIPTPEEEDARRPNRERENLLGERTRIVNRMKACLVRFGVRNFKPTLRKAPERLRALRTPEGGPLPPNSFAELRRDMARLRFVMDQIREIEETRLQRLEHSPNEGSHPMVRLLARVIGVGIETADMLVHEILSRNLRDQRAVARYAGLTGSADESGKRRREKGLARAGNARVRRGMIQLAWRFVMFQKESALVQWYRSVTNEVRGARKIMIVALARKLLIALWRMVRTGEVPQGVAFRTA

SEQ ID NO: 487148 - protein, 417 aa, unidentified
MKTENYAALVALDWGETEHAFAAQVAESSIETGTIPASSETLHSWLEELHERTHGGLVAVALEGGKSAVVHALLAHPWVVIYPVHPATSERFRTAFTPSGAKDDVPDALVLLDILRQHRNLLRPLTLDSPQTRKLSALVAVRRAGVDQRTRLACELASTLKSYYPQALDLCGRDMAASLALDFLNRWPELKALKAARASTVQAFYTAHNSRRCDVLAERIAVIAKSRPLTEDRAVIEPAVLRVKLLVDILRPLQRNIALIEEQIAEAFDAHPEAALYRGLPGAGPATAPRLLVAFGTDRGRYPQASSMQKFGGIAPVKVKSGHQLWIHWRWNAPKFLRQTFVEWAGQSVPKCAWAKAFYLQQRAAGKHHQAALRALAFKWIRILWRCWQDRIPYDEARYVASLRQRKSPLAAHLATA

SEQ ID NO: 487149 - protein, 392 aa, unidentified
MFYCLGIDVGKFFHSLCLINEEGKKSIWQIKNNREGFEELKKKLEKIGDKDKILIGMEATGHYFLNLYEFFLGQGIKSEQLALLNPLQVKAFRNTNLRGAKSDNVDAEQIAILLRFGNFQRCNVAVDKLMNLRELTRLRYDLVAGSSDLKRKIIAVLDRIFPEFSVVFANKFGKTAMSLISDYPTPEELSVLSLDELTQIIKGLSKRGISEKKIKQLHDSARNSIGITFGREAFKIELEILIKRLEVFQEQINFLENKINNLAEEFQSPIFTIPGIGKTTGAAILAEIGNIQQFSGAIKLIAFAGLDPKLKESGTYQGRTPISKRGSKYLRGAIWYSAMVTCRVNSKFKEAYKKRREKGKSHRYAVTAAANKLTKIIYHVLKNNCPFQENLA

SEQ ID NO: 487150 - protein, 340 aa, unidentified
MKITTIGIDLAKSVFQIHGVDAQGKTVLKKQIKRDEMTVFFANLSPCLIGMEACGSAHYWARKLQAQGHTVKLMAPQFVKPYVKTNKHDAADAEAICEAVTRPNMRFVPVKNVDQQAVLALHRARQGMVRARTAQANQIRGLLGEFGLILPQGIAHLYQRVPLLLDESKDAMPGAFRELVQRLLEHLKELDRQVGEMEVQIQAWHRANVLSRKLEKIPGIGPITASALVASVGDAKNFANGRQLAAWLGLVPRQHSSGGKTNLLGISKRGDTYLRTLLIHGARAVIRHAERKLDAQGWLHKLLARRNKNVAAVALANKNARIVWALLARDREFRSDYAAA

SEQ ID NO: 487151 - protein, 347 aa, unidentified
MSKRSHPLQSKRSDPLPPTVFGGVDVSAATLAVAILQDGQPLEQREFPNTDSGHKALIACLHKRKARARVSLEATGIDSLNLARALDAADEVEVAVLNPKVVNRFAQTLRRSKTDSADAQVLAEYSRRMDFVAWRTPSRKGLQLRTISRHIDGLTVEHTREQNRLHAALGSAATPGCVAQDLKRSLASLQRRMVRLRREAMALIASDAILAQRFELMISIPGIAEISALQVLGELATLSPEMSVRQWVAHSGLDPVHEDSGTSVHRPSRISRAGSRPLRRALYMPALVAAQRDPHLRAFYELLQSRHKAKLQALIAVARKLLHAIDGIFRSQTPYDGHKLFPALIPG

SEQ ID NO: 487152 - protein, 393 aa, unidentified
MICVGIDVAKDKHDCFILSSEGEVLAGVFTIQNNAEGFDTLLQTIRRCTRPEDKIKVGLEATGHYSYNILGFLIDKGLPTYVINPLHTNLYRKSLSLRKTKTDRVDARTIAAMLMSDVDLKSYTDTAYHNEELKSLTRYRFDKVRERAKLKQSVSRLVTILFPELEKLVPTLHMASVYALLSEFPGAKQVAGAHLTHLKAVLSDASKGRYGRDMATTLRDAARCSVGSVMPAKSLELRHTIRLIRELDAEIKDIEAAIQSMMDEIQSPITTIPGIGVRMGAMILAEIGDFSRFDSPDKILAYAGMSPSTYQSGQLSLSGTYSHMEKRGSRYLRYALYNATKYVCLWDSTFAAYLAKKRAEGKHYNVALSHAAKKLVRLIYALEKSKQPYSTAA

SEQ ID NO: 487153 - protein, 452 aa, unidentified
MAKRSKKRCEQLPILHPHAAGIDVGASELFVAVSADRDPQPVRSFPTFTRDLNALADWLQQCGIRSVAMESTSVYWIPVYQILESRGLEVCLVNAQHVKNVPGRKTDVSDCQWLQYLHSVGLLRASFRPPGFICAIRSLWRHRSSLIQMAAEHVLHMQKALDQMNLQIHRVLNDITGMSGLRILDAILAGERDPVTLARLCHGGVKSREDTIAKSLEGDYRPEHLFALRQSLAAFHYYQQLVVEVDQEIQRQLGSLETAITAQPTVPKRTKASPYKRGRYEPKAFDLRHELYRIFGVDLTNVPGISAITAQTILSEIGTDVSRFRNASAFASWLGLCPENKISGGKVLYTKSRRVRSRLATALRMAANSLHHAKDYLGEFFRRITRKLGKPQAITATAHKLARILYHLLSTKEAYDETVFHRCDEEVLRRAQFRLSRQAAQLGVQVIPLQNG

SEQ ID NO: 487154 - protein, 343 aa, unidentified
MQVVTTVGLDIAKSVFQVHGVDAAGQVVIRRQLKRRYVLAFFEKLPACLVGIEACASSHHWSRELKTLGHTVRLMPPAYVKPYVKRQKNDTADAEAICEAVTRANMRFVATKTPVQQSCLTLHRTRHLFIRQQTAVINVIRAHLAEFGIVAPVGRKGIETLLDVVANPTDKRVPVIARACLAALGAQLRRLKEQILEFDRMIMAWHRSNEASKRLDAIPGVGPVLATALVASIADPKAFRSGRNFSAWIGLVPKQHSSGGKDRLGNISKQGDRYLRSLFMAGALAVIRYAKIHGTMHRPWLTALLARRPTKVAAIALANKMARMVWAMMTRGERYKDPIALAA

SEQ ID NO: 487155 - protein, 457 aa, unidentified
MNKRSKPRRKIPRMSSLDQINLDTAGIDIGSSEIFVCVPHDRDKMNVRGFETFTCELYRIANWLKACRIRSVAMESTGIYWIPLYEILEERGFDVCLVNARDVKNVPGRKTDVLDCQWLQQLHTYGLLKASFRPDNEVCELRSLIRHRENLIRSRASHIQHMQKALHLMNLQIDNVISDITGVTGMKIIRAIVAGQRNPKVLATYRDPHCKNSQSVIAKSLEGNYRSEHLFELKQALQLYDFYTKLMQDVDREIEKRYQAFEMRVNITDKPLKPSKRSNKLPIKNEPGFPLRENLYKMCGVDLTLIDGINTLTVQTVISEIGLDMSKWKTAKHFTSWLGLCPGSAISGGKVLSSRSKKTNNRANTALRIAAQSLHRSDCALGAFYRRMRTRLGAPKAITATAHKLAKIMYFLLENNVEFVDMGAEYYEIKYKQRVLKNLSQRATKLGYTLVPAASVS

SEQ ID NO: 487156 - protein, 363 aa, unidentified
MEVLHAHCAGLDIHKDSVVACVRHMVEGKVTSQVKTFKTTTQELMALSDWLSAEGVTHVAMEATGVYWKPVWHILSDGEFELVLANAAHVKNVPGRKTDVNDATWLADLMAHGLIRPSFVPDEPTQQMRDLLRTRKQFVRERTGHTQRIQKTLEDANIKLDSVISNVVGISGRRMIEALTAGRTDPQALAALADGRLKATPAELEASLRGRVTAHHRFMLRLHLDHLDALDAAIARIDKEVDGNVEPFRVAIEMLITIPGVSHLSAEVIVSEIGIDMSRFPTEGHLISWAGLCPKNDESAGKRRSTRMKKGAPWLKTTLVQCAWAATRTKGTYLHAQYPVSYTHLDVYKRQLRSQCPVRSGIR

SEQ ID NO: 487157 - protein, 384 aa, unidentified
MKKLQRRRDRFKGNSVGLDLHKKMIQFSVIDQLGDEVENDQIASSRQELTALMDRLLKAGPVQVALEASGCFIWAYDLLVSKLGKGQVHVAAPSKVKVIAESGDKTDATDAWWLGYLLFEGRLPESFVAEGDLRELRIACREYRSVVGVRGDLIRRMRSHLLQLGRGVGKSDFKSLAGRKRIDALVTEVEASEGLRGEAIARLWKRFGGASAEVEHWSGRVSELSKKFDEVKLLDEELAGVGGQIAAVVWSELGDPRRYRSAKAFAKATGLTPGYRESGGRRSGKKITREGSAHVRWALTRAVLACTRCKKGDGLVVKTWLKKMQKRKSKKAAIVAAARKLGEGIWRLFALGEAFDLTLPFGGKRKGIGPPGRGGSGGRVYVGT

SEQ ID NO: 487158 - protein, 426 aa, unidentified
MSVHIQPPSPAWERYIAIDLHQAYLMIGGIDAQQRVVIPPRRLDLDRWRSWAQVTLKPTDAVVIEATTNAWHIYDQLVPLVGRVVVAHPAKVKQIAAARVKTDKHDVLVLAQLLRADLVPEVWVPPQHVRDLRGLIAHRQRLLRMRTMCRNRLHSLIHRYNLTPPHGELFAAKHRDWWATLGLSSTERLRVDQDLATLDHLEPQIAAVEAELHRLSTTARWADQVPYLVQLPGIGLISAMVLLSAIGDITRFEAAPKLVGYAGLGAGIHDRGKTHRAGRITKEGRRELRWVLVEAAHNAVRTDPYWQREFARLARRIGEAKAIVAVARKLLVVIWHVLMGRTANVRADAERVAFKLMVWSWKLTDEQRGGLTSRQFIRAHLIRLGIGHDLTHIRRGGTKRPLATIEEVRALRPELRGPAAAPSATS

SEQ ID NO: 487159 - protein, 360 aa, unidentified
MAKARTLVGLDVHATKIVAAVLDAETGELQFFKVSGDVYEAAGLCAGLPRPVRVAYEAGPTGYGLARELARRGVQCVVAAPSKIPRASGDRVKTDRRDAELLVRLLLAGKLHAVRVPGPEEEALRDLVRAREAVRVDLMRARHRLSKLLLRHGIRFDDGSAWTPRHRTWLAGVTLPYAAAQATLLDAQGAIDALAHRRDGLQREIVAMVPGSPWAVQVGRLRCLRGIDTLSAVGLCAEIGDFERFAHAEQLMSYLGLVPCESTTGQQRRLGSITKTGSGHARRLLVEAAWHYRKRPAVGKALAERQDGQRAEAVAVAWSAPRRLHRTWARLEARAKRRTIIAVATARELSGFCWAITRIE

SEQ ID NO: 487160 - protein, 430 aa, unidentified
MLRNLSNEKIEQVTDSTMVVGVDIGSQRHYARAFDNRGRELTKRIFSFHNDLEGFNSFNLWAETLKTENKKTAVLIGCEPTGHYWFAFAKYVNDHQKRLVMVNPFSVKKIKELDDNSPKKTDSKDPKTIAKLVVDGRYSIPYMPEGIYAEIRDLVYSRDRIMKQHNISANRIQRWLAIYFPEYLGLYTRFDAISGLAVLEKAPLPKDVIALGVNGIRKIWHDKKMRGRGVTEDRAKTLVEAAHNSVGLDGGIGTKSELYMLLEEHRLWTSQLEAVNKVLEEMILKVPHVEKLLAIKGVGSITIAGFIAEVGDIRRFDSPKQIQKYAGLELVENSSGKHKGRTRISKRGRRKLRKILYQVMVPLLARNKEFRGIYDYYVTRVKNPLKRRQAMVAVSCKLIRVFYAVLTKGVEYDRFKMMSDIHRKSDIIAA

SEQ ID NO: 487161 - protein, 399 aa, unidentified
MLAVGIDISKSKSVAAILNQDGSMHTGPFEFHHTQPELDAFIKYILNSNQSATILMENTGHYHYPVLKAFQEAGLPVCMVNAYQIKKFGDMDLRKAKTDKKDAVRIARYALEKSYSLVPYTSMEQKYEDLRFLARQYNQRMLTLKTNKVFLLNLLDETMPGITNILPLTTRTPETSLSVLFINRFKSYDRIKKMGKSRFLDAFEKIARKSRNRQTKTYGLAIYETALHNITTRGENEYILGAQDQCLELVCESQKAADSIILKMQTLAETLPEYAVLRSMAGVGDRLGPLILAEIGDIRRFHSGKALNAYAGNDAPPYQSGTFESHNRHISKRGNAALRKYCFEVMQALKLTRPQNDPVYLFLLKKEQEGKPYNVAKMAGVNKFLRIYYARAMETLKQQ

SEQ ID NO: 487162 - protein, 423 aa, unidentified
MNHATSEELIVSLDRSDASLAVALLSIATGQLEHVTVSTKPEELDSWWRDLQSAHPDARLLVAFEQPAPNLLAFFAARPPAAIYALNPSATWAYRQSLVVSHARTDQSDAHHQALYILHHRDQLTPWTPPPRTVEQLGRLCEARRKFVDTRTGLTNRLQGVLKRYYPQALEIMHEDIWRPLNLAFLRRWPTPQALQTARSTTLRRFFHQQGSRSETCWGRRSQVLAVLVPLSAEEPLSERLEVTVLADQIEALNTGILRYDRAINELFAHCADAALIEALPGAGPAMAPRLYVAFARYAGNCASAADFAAAVGVAPVTDQSGKMRKVYRRLRCDKHTRQSFVEWARESIKHSAWARAFFDQRKAAGHYAQATFRALAYKWTRILWRCWRERTPYDEAKYLATLRAKGSHLLKDLPAAPALQPA

SEQ ID NO: 487163 - protein, 347 aa, unidentified
MLADQLDYVVGVDAHRDSHALAVVQVVSGAVLFEAAVSASSDGYANALKLVDQHAKGRRAFAVEGTGSFGAGLTRFLTANGERVLEVGRLRRERRSGGKTDALDAIRAARSVLTQNRPATPRASGEREALRALMAREGAVNAKRAGLCQLRDLLVTTPEPLRSELRPLTRARLLQRLAATRPERRHDPELRGALLALRSVARRVLQLTAEERELAREIETLTRKLAPQLLEQPGVGPLAAAQLLLSWSHRGRISSEAAFARLAGCAPIPASSGQTVRYRLDRSGDRRLNRALHMILVTRRRTHAPTIAYISRRTQEGKTKREATRCLKRYLARNLYRLLEQGAPPAT

SEQ ID NO: 487164 - protein, 401 aa, unidentified
MDKNRIVAGFDVHKDSIYLCIMGHEETIIFQKTYGVLTPELHRMCVEMVFYGVTEAAMESTAVYWVPVWNALCDSMELKLVNPYFIKQLPGRKSDVKDAQWIAECLLKNLIRGSFVPEPVVQDMRKLNRRIFDLQEDITYNQNKLDAALQRCGFRLSNYVTKISGTSYRKAVESISKGITNPVELLKRIHGRVINKHGKDTILAAVSGDFSECDIMVIRQYWDMLDVCLRQSEECHKKLLQMCEIHFPKEYRRLQTIPGVKERAASAIIAETGVDMKMFATAAMLVGWCGLKPRNDVSNGHFKSRKITHGNKYLRHILIEISWTASRKRNCFFSNFSYTQVTQKHKSKMKIQVAIARKILVAVWHMLTKDEDFVDVYLKRLERERMEQDRQQTILDSITTN

SEQ ID NO: 487165 - protein, 374 aa, unidentified
MKDYTKYVGLDVSKDLISVAVADSGRGEPRFLGNIPHTPEAIRKIMKKIGPNEQLHVCYEAGPTGYGLFRFLLSLGIDCIVVAPTLIPKRAGDRIKTDRRDALRLAQLLRAGELTPVWTPDEDHEALRDLVRARHDAKEDLHRARLRLVQFLLRHDLRPEKGTRNWSVKHREWLDSLRFEKSSLRIVFQEYLHTIDEVTDRMKRIESEIHEQATRSVHAPVIQALQTMRGVAEVTATTLVAEIGKFSRFSSPRQLMSYAGLVPKEYSSRASRWQGSITKVGNAHIRHVIVESAWAYRHSPSLKGQIRARQEGQDPEAKRIAWKAQHRLHQKYHLITSRGNAGKKAAVAVARELIGFIWAIGCEIEKKQFEALVA

SEQ ID NO: 487166 - protein, 466 aa, unidentified
MMPGREETETSNKRGRQIEGLPVIRASVAGIDLGSERHWVCAPTMDRSHGEVASFGATTAELIRMAEWLKARQVESVAMESTGVYWIAPHEVLQAQGLQVLLVDTRQLAQVPGRDKKSDPTDCEWIERLHSCGLLRGSFRPEEAVCMLRTLVRDKANLVSERGDWLRRMQKSLDQMNVRVHRAVSDIDGVTGMAILRAIAKGERDAQKLAQLRHARCSKTEQEIAEQLRGHWREDHLFSLQQALKMYDAVEERIAAYEQEILRKLGDMEREEQRGQTAPPLNNTNKARAIKQRGQEPRRQALYRMSGVDITQIDALAVETVEVVLSEYGPDLSRFPTEKQFVSHLTLAPRVATSGGKPVKKKKPNSASTRVAAALRMAALSLRHSQTALGAYYRRIAQRRGGDIAVFAAARKLATLIYRLLRWGQPYVDEGAAAYENRYRQHRIGRLAVTAKQLGYQLTPVPPDVS

SEQ ID NO: 487167 - protein, 460 aa, unidentified
MSKAGRGQVQVRPFAGMSQVNLRAAGVDIGAQEIVVCVGGGADEQFVRSFGTYTVDLRAIAKWLKENHIESVAMESTGVYWIPLFEELEKQGFHCHLISSRSLRRVPGRKSDVLDCQWIQTLHSYGLLESSFRPESDLVALRTLLRHRAQLIEHRAPHILHMQKALLQMNIQLSQVLSDITGITGQAIIRAIVAGERDPYKLAALRNYRCKKDEGEIAKALTGTWRDEHNFILKQSLEMYDFYTRQIEASDEEIERVYALTRPSQGNEIDDLPPIPEHKRKTHSKNAPQNAAGVRRHLKRICGVDITAVHGISAALAQTIVIEVGTDMSKFPNEKHFCSWLGLAPKHEISGGKVLKNRTMKTKNRAGQAFRMAAGSVMRADCMFGAYYRRQKARLGPAQAAVATAHQIAKIVYRMLKYQVEYEPLSAQSYEAHYKEQQIKYLVKKAAKFGFQLAPVSAVS

SEQ ID NO: 487168 - protein, 417 aa, unidentified
MNSPPETNPIQRYIGIDIHKYYVMIGGQNRHQEWTLRPRQVQMARFRSWAEKNLKPEDEVVVEATSNVWDIYDIVVPLVRKTVVANAYKVRQIAEARVKTDKEDIKRLITLLIADIVPEVWVPPMYVRELRSLISFRWRLTKQITMSKNRLHSVVQRFNLDPPEGGLLTDKNKSWWDRQEFSDLTGFQVERDLEIVEHLEGQKEAIDQKLAELSNTEPWASDMVYLMQIPGFGLIFSMVILSAIGDISRFARPRELVGYAGLGAGVHASGEKYQEKSITKAGRKELRWALVEAAWVAVRSDPYWKAQLKRLEKRMHRNKAIVAIARRMLVSIWHILTKREPYRHFDEETIAYKMLIWSWAMDEKSRDGMTPQQFAKYGLLRLGIGQDLERIVRGGAPRRIAPTEEILALKPELAPPR

SEQ ID NO: 487169 - protein, 312 aa, unidentified
MNDKKSSVYAGLDIAKASLQLHLQNKDHDLANTPAGHAQLGKLLALVPEAHIICEATGGYERAVVAALQADQVKVSVINPARVRQFARASGHQAKTDPIDAAVLTAFGHAFAPEPTPARSAPEAELAALVARRTQLLELRVAENQRADTCALPGLQKHFRQWLGQLEKQLEKIEALMAALLAQQTVLEQRVQRLDDITGVGAITAMTVLSQIPELGQINRGQAAALAGLAPYNRDSGQWSGKRHISGGRAAARRGLYMAALSASRSNTILKAFYQRLITAGKPAKVALTAVMRKLIVLMNHVLKNPEFSLAN

SEQ ID NO: 487170 - protein, 320 aa, unidentified
MSVTSVVVGIDVAKAHVDVSVLGVKLDVQRFDNDADGHSALVVALQPFAVSLVVMEATGGYEAAIACALQAAGLSVAVVNPRQARDFAKSMGQLAKTDAVDARLLAEFASVLVRREDLASFIRPLPDDKQQTLAALVTRRRQLLTMLGAERQRLQLAIAKVRPSIEAMIKAIRAQLDDVEAQMVGNVKEHYEELDKLLRSASGIGPVASATLIAELPELGRLNRREIAALVGVAPMANDSGTTRGRRRIQGGRFEIRRVMYMAALVAAKHNPAIKAFYQRLLAAGKLPKVALVACMRKLLTTLNAMVKTNTPWDAEFNHA

SEQ ID NO: 487171 - protein, 410 aa, unidentified
MQTFIGLDVHPRYAHAYLWCPQTQQGRHLRFATDPDAWAKFIRQEVHRGVGIALEATGNAFWVHDTLAPHAGNVVVADPLHLKRYGDGRHSDRVDAERLAHMLALGTLRSVWVPPQPIRALRSLLGYRDRLVADRVRVTNRARALLRQQGVWLPRHVNPWKVVEERNATWPATVRLILESTRREAELLEEEIERITAEIHRWALGNETARRLMSLPGVGPVVAAALVAYVGEPSRFRRAKQVVRYAGLDPRLHQSGEQDRRGRISKNGPPLLRKLLIQAAYQIVRYGEGPLAAFYQRTVGRLGVKRAIVALARKLLIAAWRLMQEDRLAYEADPQKYRRTLQGVEWRLRRAERRRCQATAAEDDAGGPAPCPSEATRLPEPGSKEEGIASLLTRSRAQPGCRLRSTKLPA

SEQ ID NO: 487172 - protein, 353 aa, unidentified
MANPMANLTIGVDLGDRYSELYVVDAAGACVETGRIRTTVAGLEQWFGGRPPARVVLEAGTHSPWASRVLPRLGHEVLVANPRKLRGLYENDSKDDRVDAEYLARVGRLDPALLKPITHRGEAAQADLAVLSSRDVLVRARTLLINHTRGVVKALGGRLPRCSAEAFARRVGPHVPPAVRPALAPVLEQLQQLTTTIRGFDRAVEHRCAQSYPETARLRQVTGVGPVTALAYVVVLDDPTRFRRSRAVGAYLGLRPRRSQSGEQDPQLRITKAGNPFLRRLVVQAAHYILGPHGPDCDLRRHGERIAARGGKNAKKRAVIAVARKLAVLLHHLWISGEVYEPLRHHPALAQAS

SEQ ID NO: 487173 - protein, 345 aa, unidentified
MSTLAALRSYELFVGIDVSAATVTVSWMSAAGRPSRSVTIDQSADGYRQLQVQLLASGLDAPAILIVLEATGSYWITLATTLAEARFAVAVITPAQAHDFAKALLKRAKTDALDAQMLAELGARLQPEPWTPPPDVYAELQQRLMQREALIQIRTQVRNQRHALLRQPRVIAAVQRRMDSLIETLNDQIADIEGELAIALRQDENWAAAAERLQTIRGIGMLTASWILVTTLNFTLCPTPEAAASHAGLAPYVRSSGSSVRGRAQIGQFGNRHLRRALYLATFSAVRYNPIIKAFYDRLRAAGKPPKVARCAAARKLLHIAWAVVTKEQDFNPQQCVRPALRAAA

SEQ ID NO: 487174 - protein, 352 aa, unidentified
MERFIGIDAHAQSCTFGVIDAKGKQLRTDVVETNGESLVEYIRLIPGRRHLCIEEGMHSQWLSEILSPHVHELAVVFAQKKSGNKSDALDAFGLAERIRSGSIGPKIFKAPKTFTPLRDWARVYAMVTKDVVRTKNRIKSFYRSRGVRMPTRKEVFSPDGRSASLLSFKPSTRKAIEVLCKQLDVLEEVKAETQEAMITQARKHAITKKLETAPGLGPVRAAQLLAVVMSPHRFRTSRQFWAYCGLGIVMRSSADWLQTQDGSWVKSDSAQTRGLNRNRNPIAKGIFKAAATTVITQKHNNPLFEDYSRLLDRGTKPNLAKLTIARKIAAITLAMWKNKEAYNPAKYRKQIK

SEQ ID NO: 487175 - protein, 342 aa, unidentified
MNQYVGLDVSLEETKIHVLDEAGGRVWRGKCASHPDELETAICKHAPGAVRIGLETGPLTTWLWTELSKRRLPMVCLDARQAQRALDMRANKTDANDADGLAHLVRAGWYKEVRVKSRDAMLSKAVSAARRQLLDISTNLSNQVRGLMKTFGLVVPKGKGRIFEANVRRLLDEEHALAAVVLPLLEAWCAIRNRAAELDRLLLRKVRDDANCRRLMTAPGIGAVVAASYVAAIESPANFKHARDVGAWVGLTPRRFQSGEMDYDGHISRRGDERLRALLYEAATVILTRVRSASALRSWALALKKRLGFKRAAVALARKLAVVLHVMWKTRKNFDPNHRLAA

SEQ ID NO: 487176 - protein, 337 aa, unidentified
MEYFAGLDVSMEETHVCVVTRNGTVIHEAKVPSTPASIAAALARVPSCQRVLFETGRMAPMLYHGLSQLGLPVVCVESRQAYQALKSLATHKTDRNDARGLAHLARTGFFKPVHVKSLPAHAVRSLIIARKKLVGQRVTLENQIRGLAVVFGVRLPRALSPAFIRQALQASEGIPGLSAAMKGLVAARAAVLAAVVAIDGDIRKMARASAACRRLMDIPGVGQLTALAFTAAVDDPERFRRSRDIGAYLGLVPRRYQSGEVDYTGGISKCGDRRVRTLLYEAANVMLTRYKGPLKLKAWALAIAKRSTMRKARIALARRLAIIMHAMLRHGTEFKSA

SEQ ID NO: 487177 - protein, 372 aa, unidentified
MNNTTIFVGMDVHKESFTLCEYQIETEKASHFRHMPADYKEVLRYLEFLRTIYGRDTIFVCGYEAGCLGYTLYHQLTNHNVNCVILAPTTMLEKRSGKRIKTDKRDAELIAKCLAQHNYSPVHIPTATDEETKEYLRMRDDHKLALKRIKQQILSFCLRHNYRYEGKSHWTVGHVKWLKNLNPEALYKEILDEYLLTYTTLSDKIERIDKRIEELAAKDEYRESVKKLCCFIGVRTHTALSVLVEVGDFKRFPSAEKFAGYLGLVPGENSSGDSTTRLGITKAGNRHVRVLLTEATQGYTRGAVGYKPKALKARQKGNTPQVIAYADKANERLKRKFFKMVLGKSKKHNVAKTAIARELACFMWGMMTDNIA

SEQ ID NO: 487178 - protein, 338 aa, unidentified
MNSTHIIGIDLAKHVFHLVGHDCCGRETFRKKLTRQKTLQLLSAHEPVIIAMEACGGSHWFARKCQEYGHQVKLIPAQYVKPYVKTHKNDFIDADAIAEAAIRPKMRFVSPKSEQAQLSIVVRKIRSGYIKERTACMNRIGSMLLEFGISFPRGHHQMKNLFQWLADSKEVVPPLLILELRSQLDYYNLLNKWIKEQEEKLEALNKDNELMTILQSVPGIGPMTASCCLSVVADPKDFKNGRNFAAWLGLVPYQYSTGGKPRMLGISKRGNKELRELFIHAARAVMWRDTSAEKYFGTWLIELKQRKPFNVALVALANKLARISWSVMVTGKVFEIRT

SEQ ID NO: 487179 - protein, 339 aa, unidentified
METFVGIDLHKRVSQLATLREPKAASQLRFLNNRATVEKVLKKLPQQSKIALEATGSWWWFVDLAQKSGHEVIMSHPKQTKAIASARLKSDKVDALMLAKLLKSDLLPTVWIPPAKQRYIRELLTHRARLVRQRTAVINEVHALYSKRNMDPGMTFHRVRPPAFKVEELSGYGPRIVEEDAELLAFFNRQLRGLDSELKKIAEEDEESKRLMTIPGVGPLSAVAANCWIGTIDRFSKAKKLSSYFGLAPRVRQSADRERHGHITKEGNRMVRSLMIQAALWHVRIGKGDARKHYLGVLKRRGKHIARVAAANKLLGIIFHMMKDRIDYQEFLKRGGNAQ

SEQ ID NO: 487180 - protein, 351 aa, unidentified
MRSIARIEPEVIGGVDTHQDLHYAAVVSPDGTPLGTGSFPTTRAGYRRLLAWMRSHGKLLRVGVEATGTYGASLVRLLSREGVPVLEVTGPDMAARRGKGKDDTIDAIAAARAAASGQRVQVAKDRNGRVEALRVLRTTRKTAIKCRRAALQQLHNTIVAAPEDLRDELRHFTRMRLLQTCAAWRPNTTAYRDPTVATRIAIKSLCRRVLLLNDEIAELDSLIEPLVAELAPTLVALEGVGTNCAGELLVTAGENPERLRSEASFAMLCGASPIPASSGKTQRHRLNRGGNRQANSALHMIVKCRMRTDVRTKTYVARRVAEGLSKREVMRCLKRYVAREVFAILTARIAT

SEQ ID NO: 487181 - protein, 354 aa, unidentified
MKKNITPASQIPELTIGLDLSDRSFQFCELNAAGEIVDEGRLKLDRATLRKYLAAQPQARVALETGGQSAWVKQAIEELGHEAVVANARELQAVTGRSHRTDHHDARQLARLARVDRELLNPVQLRDARPQADLFVIRARALLVEVRTMLINFARGITKTTGQRLPSSVSHRFAERVREAVPEALRPALLPLLKVLEQVGEELDGYDENLEALASERYPETRWLRQAPGVGTLTALTFVLTVNDARRFAHSREVGPYLGLVPRRRQSGEQDPQMRISKCGDGYLRKLLVQCAHVVMGRFGPDCALRRWALEHARGGRTAKKRTVVAVARKLAVLLHRLWSREEVFEPFPAAAAA

SEQ ID NO: 487182 - protein, 311 aa, unidentified
MAQIVRVAGLDVSKDKLDVALRGGEHCMVSYERRGLRQLARWLHEHQVTVVALEASGGYERRVSDVLEAAGFVVRLLNPLRVRRFAEARGRLAKNDRVDAQTIALYAETFDEVRPRRDKALDRLAEFITTRRATQEAIAICGGQLEHLREPELRREVKRHQGFLERSLARLDRRIAGLVAEHADWARLAGRLQSVPGVGPVLAYTLLALLPELGRLDRRQIASLVGVAPFDDDSGRYRGERHIAGGRQSVRRVLFMAALVARRCNPVIAAFAKRLAGKKPKVIIVACMRKLIVILNAIVRDGTEWRQRRHA

SEQ ID NO: 487183 - protein, 400 aa, unidentified
MPVAYVGIDVSKAKLDAAIQIGTHPDKKSRHKIFSNCEAAIPAVVAWACGHAKCQPAELRVTMEATGVYYVTAAYGFNRAGCEVVVSNPWRSRNYAVGIGSVNKTDKCDAEALAAFGTQEQLRLWEPRPPEIVELQWILQRINRFTMDMVRETLRNENYQIGLATETVVQSINRVRAFQKSERSLLLQELEALFARQPTLSADRDLLMTIPSIGPIVASYLLCLLRGRNFPTARDAAAVAGLVPKQAASGTSTGLRPRVAKAGNRALRAMLYMSTMSMLKTPNARAFYERVRGNGARPMQARVALMRRTVQIAFGVLKHARPYREDWEDCRRAEAAGLSRDKTSDSRSNAPAEIEAMAEVRRTPSSVIWTKRSGGVPTLVKKAKVARKRKLRSIQDYESI

SEQ ID NO: 487184 - protein, 357 aa, unidentified
MKYIGCDFHPSFQQMAMLDKETGELVERRLLHTEEARAFYEGLQGPVLVGIEASGNTHWFESLLARCGHELWIGDAAAIARQEGRKQKHDRRAAELILKLMLENRFPKIWVPTVVERDLRQLLMHRQHLVRMRTRVKNQLQHIALNQGWQKKRKLWSEAGLELLRSLKLEPWTQQRRDTLLQMLKELEEKIQPLDQAVEREAQARAAARRLDTHPGVGPVIALATVLTMGDVQRFPDSRSWVSYLGLNPSEASSGQRRRLGAISKQGNPFLRYLLVEGAASAVRGDKSLARMYARLKAKKHHGVAKVAVARKLAVRLYWMARTEKSYPEVVRTQGSQSHSVAEVRTDRLNRPPASHR

SEQ ID NO: 487185 - protein, 414 aa, unidentified
MRIVFERCAGLDVHKKTVVACRIIPDGKEGWSIEVRTFGTMLDDLLALADWLRIGGVTHVALESTGVYWKPVFNILEGEFEVILVNARHIKFVPGRKTDVKDAQWIADLLQHGLLSASFIPPAPQRELRELVRYRTHLIEERTREVNRVHKVLEDANLKLSSVATDILGVSGREMLAAIIVGKDDPAALAQLAKARLRLKIAELERALTGHVKDSHRLLLKLHLEHIDDLNAKITALEEAIAKLLPPFDQDDLLARLQTIPGVGEKVAQAIVAEIGTDMSRFKTANHLASWAGLVPGKNESAGRNRSAKTNKANRYLKSILVEAAQAAGHQHDTHLAAQFHRLAARRGKKRAAVAVAHSILVIVYHIIQRGTLYTDLGANYFDQRKAEAVQTQLVRRLERLGFKVTLEAQHAAA

SEQ ID NO: 487186 - protein, 342 aa, unidentified
MEKSLFIGIDFSKKRFDVSVIHQDNLQTVDYQQFENSKEGCISLLQWIKTLTKEPCTNWLFCGEHTGLYSLCLSEFLIKKELFIWLENPLQIKQSCGIRRDKNDKVDSREIAFYAYRFQDRSKAYCLPDKALKSLELLLSFRERLKSNKQTLLVSAAEIRRVMQRDATARFIYEQSQKDIERINKQIKEVEKRMLEQIQSNEKLQENYELVSSIKGIALINTVAILVATQNFTRFENSRQFACYAGMAPFGKQSGTSINTKPRVSRLANKKIKVLLTQAAKCAIRHDTNIREYYERKIKEGKNEWLIVNNIRNKLIHRIFAIVRNKQLYQVNYINFLDKDIA

SEQ ID NO: 487187 - protein, 411 aa, unidentified
MLVRVNAGHPLTPALVCDSLAGSGTGAADRPLPKVAKTVGEQGSPRPEPRPRARTVAGVKARIPQGWAKAGSSRSTGKRKIGRDMKPGLFVGIDVSKANLDVALGSDGEVMQVPNDEGGIGRLLARLAELAPTLVVMEATGGYESLVAGAISGQGISVAVVNPRQVRDFARAAGILAKTDRIDARVLARFAEAVKPEPRPLPTAEAKELQEFLSRRRQIVDMLTAEKNRLQIAATERMKKSLRKHIQWLEEALRRADDDIDKAVRNSPAWREQEDLLRSVPGIGPVTARTMLAELPELGALNRKEIAALVGVAPLNRDSGTMKGTRTCWGGRASIRQVLYMATLTAVRRNPTIRSAYLALVGRGKKAKVAHVACMRKLLTILTAMVRDRRRWSLDLSRPPLTTATVPGAPA

SEQ ID NO: 487188 - protein, 446 aa, unidentified
MATRTVGIDVAIRGPHVAIILDEQGRPLGTPIRVRLSAAALAELVTKIRAGLQADDTVMVVLEPTGMAWFPLARRLTQAGCTVIRVKGQRVKALRRYLSEYAKTDVTDAQVLGRMLAFGRRGLLPLYVPAAKQQALNCLTKQRARYQDAISSIRRRLLDLIRWAQPTLEPVLPSIGTSVSLAVLEHYFNPAQLQALGAHRLTEFIGRHVGGNHPAHGPFVEELARGLLAAAADAVALFGADGVDFELLQLEVRQEIQLLRHHRELLVELDRAIEQLYRELHPVEALRTLPGIGDTLGPALLGVLHTASRFGAQRRLRGFCGLFPRRQESGGVAHPGQPITQDGNNRIKRNLMLAADVARTVDPELAAVYYRCMVEKGHHHRQALCAVATRLVNRIHAVLRDGRPYELRDLDGHPITVSAAKQLIQTHLRVPDVIRRTRKKAPVAAA

SEQ ID NO: 487189 - protein, 326 aa, unidentified
MNKCYSNTELSSHEGTRCQFNGGRCAIKLGIDVHQDFYVVVEQVDGSNPKPPQRFAKAAFLHWAAKLKSQAREVYAVYEACGFGFSLQRNLAALGIKCYVVCPQKLDEHNKRVKTDGLDAKALCLKLDRFVQGNRAALALVRVPTEEEEHSRAIHRQREQLVGARKRLEAQGRSLMVNHGLEPVQNWWKPRTFAALPLPQWMRELLQNSQPILLALQKKIALLTLQLQSAAASNQPRGLGKMTSVVIDREIADWHRFNNRRQIASYTGLCPGEYSSGNTRLQTQVTKHGNPRLRAALVELAWRDWSASSPTTTQYASGGRSWPKGR

SEQ ID NO: 487190 - protein, 344 aa, unidentified
MQITTIGLDLAKSVFQVHCVDATGQVVVRKPLRRSQMLPFFAKLPACLVGMEACGTSHHWARELIKLGHEVRLMPPAYVKPYVKRGKTDAADAEAVCEAVTRPTMRFVPVKSPEQQAALSMHRTRDLLVKQRTQTINLIRGLLAEFGIDIPKGLERALLMARQIVDGKSPNVPIEAAKIVGTLSQQALDTHVRLREIDRDLAVWLRGNDVARRLMTIPGIGPVGATALAASVTDPHQFRSGRQFAAWLGLTPLQKSSGGKERLGRITKMDDKYLRKLLIVGMTSLVRRAKYSPGKIDPRLADLLARKPTRVATVAMANKTARTIWAIMARGETYRAGHRAALAA

SEQ ID NO: 487191 - protein, 343 aa, unidentified
MDYFAGLDVSVKDTSVCIVDGTGKIVREVKVASEPQALLAVLRNATYCFKRIGLEAGPLSQWLYGALAETGLPVICVETRHMRAVLKAQINKTDRNDARGMAQMMRVGLYRPVHVKTLRSQKLRMLLTHRKLVQSKAIALDNDLRGTLRNFGLKVGVVGTVKFEARVRELVENLPDVAELVEPLLIVRQVLREQLGILHRRLLAIVRDDDVCRRLMTIPGVGPVVALTYRATVDVPVRFRKSKSVGAVFGLTCAKYQSGEIDRTGAISRCGDEMVRTTLYEAAQILLVRSTKWSWLKAWAMQIARRRGMRRAIVALARRLAVIMHRIWVDGTEFRWTRKAAAA

SEQ ID NO: 487192 - protein, 341 aa, unidentified
MQDVILIGIDLGKHSFHLHGQDARGKAVFRKKCSRKQLITFLATFHPCTVVMEACAGAHHMARHLMTFGHQVKLISPQFVRPFVKGNKNDFIDAEAICEAASRPNMRFVTPRTEVQQILSALHRVRESLVRDRVKASNQIHGFLLEFGISLPIGSAAIKRLPSVLAEHPLPARLIAVLNRLHAHYKYLDEQIAEVEKELQLQLQEDDLGQRLMAVPGVGPITASLLSAELGDGKQYGCGRDFAASVGLVPRQYSTGGRATLFGISKRGDKNLRRLLVLCARSYMQRLDKQKGVLADWVRAMLSRRHSNVVACALANKLARTVWALAARHTEYRAAQASMAA

SEQ ID NO: 487193 - protein, 413 aa, unidentified
MDWVACVGIDWGDREHAYVGRTRGGSTFRGTFKASAEEVHQWARQMREQFGGGKLIVAVEQGRGSLLYALMSYEFVVLVPINPCASKAYRDSLRLSGASSDPADAALICEFAFKHIDELRAVKPDDVLTRKLRLLAEDRRRLVDQRTAFTHMLAETLKQYFPQALEWFGGESSPCLLTFLGRWLTLAKMRKATAGQLTTLFRSARAQHACRRGEELLAKLRAAVALTDDEAIVEAKSRYAESLILMLVPLARQIEAYDQAIAALWAEHPDRAIFDSLPGAGPVLAPRLAAAFGQDRARYSAADELQCYSGIAPVVEQSGKQRWVHSRYGFPKFLHQTFHEFAQSSMLKSRWARAFYQEQRSRGAGHHQAIRSLAFRWIRIVFRLWKTRTTYDEQHYIDALTAKVSPIVARLAA

SEQ ID NO: 487194 - protein, 458 aa, unidentified
MSKKRPAVKSPAPRQDWKALEVVHPDAAGIDVGGSEHWVAIHPDRDPEPVRRFECFTADLREMADWLLQKGVRSVAMQSTGVYWMPVLEVLEEYGLEMYLVNAQHTKNVPGRKSDVQECQWLLKLHTFGLLNNSFQPTDQIRIARTLWRQRGNLVAQASSVIQRIQKVLIEMNVQLSRVLSDLSGVSGMSILAAILEGERDPATLAALVQPEVKATPQEIAKSLEGNWREELLFVLRQEVELYRVYQKKIDDCDLQLRQHLKTFGSVVDLQKQPLGPRPKGKKGSKNAPQFDLRTELYRITGIDWAQVDGIDVLTAQTVIAESGADLNAFASEKQFASWLGLVPTNEQSGGKILNRRTRKVVNRATVALRNAATTLLRSRSYLGAQYRRLRTRLGAPKAITAMARKLACLFFRLIKHGQQYVDKGNEYYESRYREQQIRSLTKRAQRLGLELVIPTAM

SEQ ID NO: 487195 - protein, 342 aa, unidentified
MQISTIGLDIAKNVFQVHGIDAAEKVVVRKRLRRRQVLEFFKALPPCLIGMEACATAHYWARELTKLGHRVRLMPAKDVKAYVKRNKNDAADAEAICEAVRRPTMRFVRIKSAEQQGQLMQHRTRDVLIRQRTQIINALRAHLAELGLVAAQGDKGVKELLAIVADKEDTRLPIDARASVIVLAAQLEAVQTLIGSIEKRIKMQHRSNEASQRVETIPGIGVLGASAITATAADPTVFRSGRDFAAWIGLVPRQDSTGGKQKLGPISKQGDRYLRRILIVGAISVLRRARENPGKFPWLTQLLARRPFKVVAVALANKMARMAWALLAHGGTYRAPELAETA

SEQ ID NO: 487196 - protein, 366 aa, unidentified
MKKISTVETFKSEIFKEQKLTIGLDLGDRWSFYCILDEAGKIILEQKLATTQEATKQIFGKIPRSLIALETGTHSPWVSRLLTELGHEVIVAHAQKVQLITKSNQKDDRHDARTLARLARIDPELLGPVRHRSVQAQIHLTVIRARAELVSARTALVNAARGLVKSYGERLPKCGTQQVSRELAAALSTELRDVMEPLLKEIESLNERIKEYDERMEKIAKEVYPEVSLLKQVKGVGTQIALTYVLTIEDPHRFLKSREVGCFLGLKPGRRNSGESEPQKKISKAGDRYLRTMMVQGAHYILGPFGEDSDLRRWGRKLSERGGKNAKKRAVVAVARKLAVLLHRLWVSGEVYEPLRNSQKLVQAVA

SEQ ID NO: 487197 - protein, 419 aa, unidentified
MLSVKHFVCCGMDVHKKFVVATIATTDYRGVTTYKKKRFATFNSDLKVLKDWLLANNCTEVCLESTGKYWIPIFNILEDSCHVVVANPKYVRAIKGQKTDDKDSAWIADLFKFDIVPSSYIPCKEIRMLRELFRYRQKLIGHRSSEKNRFQNALTVSNIALASVLTDTFGKSATAIVDYILTCETFDPEHCKSLLQKKAKDKADDVVKSIIGYELRGDQSVKMKVCRKHFDYINQCVDTLEETISDLAKPYHKFIELATTIPGVKEQSATFMIAEIGVDMAVFKSSKRLCSWAGLTPQNNESAGKKKNVRISRAGVYLKPLLVQCANAAVKDKKNPYFKYKYDRIKKRRGHKRAIIAIARMILTCIYHMFQKQEVFNPMDTDYSAIPEEMYQKFQEQYDKNAIKRLEKRGYVITPPVPA

SEQ ID NO: 487198 - protein, 373 aa, unidentified
MHGPAHPTTFARLLALDLGKFTSVLCVYDPLAPDAHRFVTGVRTTPQSLHDLLAAHATDDPAATLLVIETCDVAGWVFDLATALGLTVLVANPAHEAWRWTRVKRKTDKDDALKLARLAALGQLPLAHMPPPAQRQRRRLVHYRRVLVDRRTRVKNQVRSIFSQQGLSLPPRSKAWTKAGIAQLAREARPLRECDDVLDLWRGRLHLELQQLESLTAQVNEVDAQLDALGAADEKVRLLRTVPGVGPRLAETVVAHLDDPKRFRTAAQVAPATPGWSRSSSRAARSSGAAASPAAARRCCGRCWWRWRGWCTCGTAGPKSSSSASAAGSRRGRTSRSSPSPENCSSCCGRCCGRTSRGARRDSPPPPARPQWR

SEQ ID NO: 487199 - protein, 401 aa, unidentified
MVSDFKKGRYNLMKIFVGIDIAKLNHFAAAISSDGEIIIEPFKFTNDADGFQLLVSKLESFDKNSLIIGLESTAHYGDNLVRYLVTELYQVCVLNPIKTCQMRKNNVRKTKTDKVDTYVIAKTLMMQDDLRFITFFDLDMMDLKALGRFRQKTIKQRTRLKIQLTTYVDQVFPEIQYFFKSGLHQHAVYALLKEAPSPKEIASMHMTHLANLLKVNSHGHFTKEQAKELRVLAQKSVGANDSAISIQITQTIQQIELLDSQLEKIEAEMTDIMKFNDSVIMTIPGIGYINGGMILGEIGDIHRFSNPNKLLAFAGLDPSVYQSGNFQAKTTRMSKRGSRVLRYALVNAAWNVVRNNATFKAYYDAKRAEGRSHYNALGHCAGKLVRVIWKMLTDEVKFNLE

SEQ ID NO: 487200 - protein, 351 aa, unidentified
MPRTATVHAVTAIGIDMGKNTLHMVGLDTRGTIVLREKVSRGRITSRLANLPPCLIGIEAGMATHYVARELAVLGHDVKQVPPAYSKPFRQGQKNDFRDAFAVAEAVQRPTTRFVPAKTNEQLDLQALHRVRSRLVSERTAVINQIRGFLLERGIIVRQGLRFLRQALPDILAKRTDVLSPRMVRIIADLASDWRQLDERIEPVTDEIETLAKSDSSCRRVMTVPGIGPIISSAMVAAIGSGAAFARGRDFSAWIGLVPKQMSTGDRTILGRISKRGNGYLRTLFMQAARVILLRPASWPKHGFGVWLARATQRLHPNVLAAALANKLARIAWTVLAQERSYEAPVTKAAA

SEQ ID NO: 487201 - protein, 384 aa, unidentified
MALKIVYKICCGIDVHKTFVVACIASTDNKGITSYESHRFSTYTSGLKDLLQWLLTRNCKDVCMESTGKYWIPVYNILESDCSIVLAHPKYVKAIRGKKTDKKDAKWIADLFKHDLVAGSFMPPADIRQLRDLMRYRFKLTCFKSSEKNRLQNCLTVSNIQLGNVVSDTFGKSAQAILDKLLENPADTSFDLEPLVYKSLKKKLPELRDAIDGYITPEQAGKLKVIKAHYENLESRKAELEELILALAAPYQQELTILQTAPGISSPFTAIGIISEIGTNMEAFPSAKHLCSWAGLTPTNNESAGKKKSVRVSKAGCYIKPLLVQCANAVVKSTKHPEMRNRYLRLKKRRGHKKAIIAIARMLLTALYHMLKNGENYNAELYQK

SEQ ID NO: 487202 - protein, 401 aa, unidentified
MNVVGIDVSKGKSTVAILTPGVGMIDPFRITHDRDGFDYLKDTISSLSGETRVVMESTGRYHTLLADNLYRSGYFVSVLNAKLLSGFDNNSLRKVKTDCQDSIKICNYGATYWSTLEKYVPEESIRKDLKNLCRQRTDLLKMSTTLNNQLISVSDIVFPGVNKVLNSVKTDGSMKWVDFIESFHSAAKVAKMKLPSFRNSYKKFCIKHGYCYQETKADELHSKATVFASAIEESEAACLITNIYARQLQEINRSVAQISVKMHELSERLPEYEIVMHMYGVGKELGPQLMAEIGDVRRFHSKNALVAYAGIDPPPFQSGQFVSKSRKISKRGSSQLRKTLFLIMKIYVVNGAEDQDIFKFIQAKRSEGKHYYSALVAGANKFLRQYYAKVLEALGPIEEKD

SEQ ID NO: 487203 - protein, 313 aa, unidentified
MEKNLFVGIDVSKDTLDVGIIPTEEVKRFTNDDNGCRELASWLSGSPPNLIVLESTGGLEMQAAGVLSSAGLPVVIVNPRQVRNFARALGKLAKTDAIDALVIARFAQAVQPKVRPLKDDQTLELKALVTRRKQLNDMLVAEQNRLKGSHHRVKKSVTATISWLKNQIEDTDKDISDSISNNDIWRDKEEILTSVKGVGPVLSASLLCLLPELGTLCRKKISALVGVCPYNRDSGQYKGKRSISGGRADIRCVLYMATLSATRYNPIIKAFFERLKAAGKPPKVALVACMRKLLTTLNAMLKTNQKWNPAVAS

SEQ ID NO: 487204 - protein, 342 aa, unidentified
MEHYAGIDVSLECSSVCVVDGNGKIVREAVVPSEPGALIGWFHSLRLGLARIGLEAGPLSQWLYAAMKQAGLAVELLETRHVRDAFKAMPVKSDRNDARGIAQLMRLGWFRPVHCKSLGAQEVRAVLTARKLVQTKLQDVENSLRGILRGFGLKVGKTTDRSFAGRIQELVEGHPTLEAIGEALLSVRSVLLREFNAFEKRVRAMSRSDARTRLLMSTPAVGPIVALTYAAAVDDPARFRSSKQTGPHFGLTPRRYQSGQTDRSGRITKIGDAAVREALYQAAHVMLTKPVKGCTQLKSWAMRIAKRAGMSKAKVALARKLAVILHRMLANTTPFTPAAAAA

SEQ ID NO: 487205 - protein, 312 aa, unidentified
MEKITVGIDVSKDRLDVAVRPSGERLVVARNAVGLEELCAKLQVLKPHVVAIEATGGFETVVAAALVAAGLPVAIVNPAQIRAFAQAIGQRAKTDPIDAEVIAHFAEATGLEPRPMPDEATRLLGDLIARRRQIVEMIVAERQRERRAPARLKKSIARLVKALEKELSSLEGDIDQEVRGSPAWREKENLLASVPGIGRTIARTLIADLPELGSLDRKQIAALAGLAPFTRQSGRWKGRSCIGGGRTAVRTALYMGALVATRCNPALRAFFERLVAAGKPKMVALIAVARKLLTILNAILRDRQPWRQPAHA

SEQ ID NO: 487206 - protein, 331 aa, unidentified
MKLENSIPALSAVSYIGVDVAKATLQVFSRGQQREIANTSGDYAKLCKDLKSIAGAHVVCEATGGYERGMVRALHKAEIRVSVVNPARVRASAQADGQMAKTDRIDAVMITAFGRRYNPEPTPEVSKVQAQLCALTQWLKQLIDARAVAKTQGEHHEDAFVKKQHQVLLNHYQSQIEKVEAKLDALMETDQELRQRAQCLESIEGVGMRTALLMLSNMPELGQMSRGQAAALAGLAPWTRESGTMKGMRFIGGGRPQVRLALYMAALTASRCNPILSPFYQKLIQKGKLPKVALTAVMRKLLIHMNQKLKVLAAKLPTEIAQEKEKNPCKN

SEQ ID NO: 487207 - protein, 353 aa, unidentified
MQIVGALDVHRRQITHKTLDLASGDVRRGRLSPANRQSLREWLERFRGCEAEFALEGTTGWRYVAEEIARAGHVAHLADPAETAAKRGRKRRAKTDRADCDLQLKLLLAGELPESWIPPAHILELRTRVRTRKTLVDQRSAWQLRLTAQLFHQGVPAGINPRTRAGREALAHVELSPAGRELVSIALRMIEALDLELLPLDRELRAFAARQPGCRALSERLYGVGPVAATAILAELGDCRRFSSSDDAVRHAGLDVTVYQSDSKRAAGHLSHEGSPVLRWALYEAGQQATRQTSPDHEYFLQVRERTDHKSASLSVARKLCRRAYHILRELGEQAIAPVDVDAHVEEAIDAAA

SEQ ID NO: 487208 - protein, 421 aa, unidentified
MNEKYAVLVGLDWADQKHDLCLIETATGQKERLVLEHKPERINEWVRDMIARYPGQRIAICLEQNRGPVAYALMGYAELDLYPVNPARLADYRKAFHPSGAKDDPVDAALLLDLLMRHRETLKAWRPDMKETRLLAALCRDRRKAVDLRSSMCNAMRSTLKEYYPQALSLVGEELYSDLSCGFLMKWPDFQRLASTSQDKIRRFYYAQNCRSEKAIKERLALIAGSCPLTTDETVTEANPVMVKTLIGQIRALNRSIADYDKRISQLFKEHPDAFIFKSFPGAGKQQAPRLLTAFGDDRDRYESAANVSSFIGVAPVIERSGKQVWIRWRWHVPKFLRQSVVEFAGSSILFCPWAKIYYNEQRKRGKGHHAAVRALAFKWMRIMFRCWQDRVPYDEQKYLAALERHGSWLASTVKKAQKAA

SEQ ID NO: 487209 - protein, 318 aa, unidentified
MPDSIVVGIDVAKRSFDAALGVAGSIKTFSNEDAGHDALVAELGGQSVELVVMEATGGLERDLACALQAAGFAVAVINPRQGREFAKAMGYLAKTDRIDAKALAELAQVLSRHPERERFVRALPSAEQQTLQALVARRRQLVTMQVAERQRLSSSHAVARSSIEAMIIAIRAQLDAVEAELSAHIERHHGELAHQLGSVRGVGPATVASLIAEVPELGRLSRREISALIGVAPFNRDSGQMRGKRTIYGGRAQVRRGLYMCALCAIRFNAVIRAFYARLVLAGKPKKVAIVACMRKLLTILNAMVRSGKSWDDSLHSA

SEQ ID NO: 487210 - protein, 318 aa, unidentified
MEILPSCCGGLDVHKKTVVACLRKVDSAGRVHKEGRTFGTMTADLLAVAEWLTTEECTPVAMESTGVYWRPVFNLRHDRCEVMVVNAQHIKAVPGRKTDVKDAEWIAELLQYGLLRGSFIPPQAQRELRDLTRHRTTLVQERARVINRLQKVLEDTNIKLAAVATNVLGVSARAMLEAVLAGTTDPSLLADLAQGKLREKRSQLEQALVGILRPHPRFLLTELLGQIDYLDDAIARGSEEIGKRLHEEEESLALLDSIPGVSRRTAEVLLAEVGTDLQRFPAAKPLASWAGVCPGNHESAGKRLSGRTRKGSPWLRQA

SEQ ID NO: 487211 - protein, 423 aa, unidentified
MSYRIAGIDVHKKMLAVVVSDVEVDGEFQFERVRYNSSPEYLQRLAEWLIAQRVEEVVMESTAQYWKPVWGALERYWKPICQEREGAGPRSGTLHLAQAQSNRGRRGRKKDFPDAERLVKRLVADELVLSFVPDTEQRLWRTVTRRKYQLTRNHVRLQNQLEGLLEECHIKLSSLVSDLLGASARRMLKALAEGETNPVALAAMADKNLRATQAQLCDALGACAELRPIYRRLLKMFLEELQFIDQQISELDHELASLLSRHHDAVVHLAEIPGLGVDSAQQIIAEVGAGAATFPSAKQLSSWVGACPGEEESAEVSKSHRSPKGNRHMRRILNQAANAAAKSKGTIFEIVYRRLVSRLGHNQTIGAIAHRLCRLIWIILHRSVRYEERGPSVNAKSRRHRTNRMIRELRSLGYRIEPLVATA

SEQ ID NO: 487212 - protein, 365 aa, unidentified
MEDKKQYIGCDVHKDYSVLRVMDERGTLGPSMKVKHSDGELERVLRSFPPGSPVAVETSGSAMWALGIVEAAGLEPHLAHALEVKKRIAGAFKTDDSDAAGLAMLLRNGTLPEVWIASPNVRDLRGLVRSRLAIRRYQTAFKNRIHGVLNQYGLKNRVAEEEDIEVRDWFSVKAHAQLMRAIESLPPASREALRQEYFLVRELELKIKSLETAIKARTGKLGWLRLVQTLPGVGPILGATIWLEIGDVRRFPSAQHLAAYAGVVPRVQSSGGKTWRGPIPKACNQYLKWAFVEAANVVVARQKKWEEKYPHAVGLYRRVKATTKISGKAKVAVGRHLAESSWWVLTRKQAYREPTSAQVTSSSNG

SEQ ID NO: 487213 - protein, 419 aa, unidentified
MTRKDDSRIIRIVHPICCGLDVHKESVSACVIFPDSNGEEQHEIKVFGTFTDDLKLLRQWLLDHECPVVAMESTGVYWRPVHNVLEQTVQVVLANARNMKNVSGRKTDIGDSRWIAGLLRHGLLKASFIPPKTVRQWRELTRLRKKYVQSVGDYRKRTHKLFESANIKIDSVVSDLFGVTGRNLMKLLIVDRELTLTDIEACIRGKLKGKEVELFRSIQGFFMGHHRFILKTLLGTIANLEGQIEALDQQIRNLMKDQSDLLERMKKAPGISDVSACDILAEIGPTLDSFPTDTALVSWSGLCPGNNESAGKRKSGRSPVRKHHLKTIMIEVAWAAVKKKGSYFKDKYYRLKARRGAKKAIVAIAHRILLGIYHVIKDGAEFRDLGEDYLTLRNKEKKVLYLQKQALALGFNLIPQTIQ

SEQ ID NO: 487214 - protein, 412 aa, unidentified
MPMPKIVYPICCGIDVHKSFVVACIASTNEKLVTSYKRKRFSTFTGDLRRFAQWLEFNNCRDVCMESTGKYWIPVYNILEPTCKIVLSHPKYVKAIKGKKTDKRDAQWIADLFKHDLIQGSFIPPHDIRQLRDLVRYRFKLTSFTTGEKNRAQNCLTVSNIKLDDVFTDVFGKSASAITERLLENNEPFDIKPYLTKGIKASPDEIQAAVDGSMCVEQAEKLRIIRSHMDSLELCKANLDSLILTVAEKFLPQINIVTTVPAIKSFAAVAIIGEIGVDMSVFASSRHLCSWAGLTPQNNESAGKKKTTRISRAGVYLKPLLVQCALCAIRCKNNPEFANRYNALKRRRGHMKAIIAIARLLLTIVFNLLKKNEVYNPEFLRRSDNPPVQREVSVEQAIFILQRQGYLVTAAI

SEQ ID NO: 487215 - protein, 367 aa, unidentified
MQDYIRNTGRPGRGEWDLSIGLDVDKSSISVSVHDQQDIIRSLKMPHDAQNLLSFVRNTYPRKRLIFAYEAGPTGFGLYDAIVDGGHDCLVVSPASIPSPANSRVKTNRLDSMKLARLLSGRQLRGIRVPPEAIRQLRSLVHLRYTYTQDIRAYKCRIKAELLKEGVKFPEAPKGGQWSRTVMEKLRNLECVAITGFKISSMVNHIEHLTEQMNLTEVALKSHINGNADLKQCFSYVMSCPGIGPKIACYVLARIGDWRLLGSSKEAGGFFGLVPTENSTGDDIDKGSITKCGDPRLRSMLIQGAWTAIRKDEELKALYDRICASHTQKHAARIAIVAVARKLAERMHCVLKEQRYYEPRAAGKIAA

SEQ ID NO: 487216 - protein, 392 aa, unidentified
MEKYSEVFVAFDVAKKKHAVAIAEGGRSGEVRFLGDVENNPLPIERTIKRLADRYDRLHVCFEAGPTGYGLYRQIEALGHDCMVVAPALVPKRAGERVKTNRRDAVTLARLDRAGELTGVWTPDVAHEAVRDLVRAREAAGDDLRRKRQQALSFLLRHSRIYRGGGHWTLAHRRWLAGQKFEHAAQQIVFQEGIDAIEDAIQRLRRIEKQLAVIVPDWSMAPVVAAYQAMRGASFLVAVTFAAEIGDVRRFDTPRQLMSFLGLVPAESSTGDTVRRKGLTLAGNRRARRALVEAAWTYRYPAPVSETLRARLEGLPKPVRDSPGRRRSVCAPVIVGSAPRARRRLSSWPRSPAKWPPSFGPSDGRSRQRKRALSPSAAQSRGWSTKVGNSRR

SEQ ID NO: 487217 - protein, 457 aa, unidentified
MKTPYFMGCDVSKGYADFVILDEFKHCIENNFQLDDTFSGHNCLFERLNTFFSHYPDAELFAAVESTGGYENNWYSTMHQFQATFNIKAARLNPCGVHASSRAEMKRTITDAVSARSIAEYLIAYPDKVTYEQEDSWASLRKQWSFVQMLSKQKVQLLNQLESLVYTANPEVLSYCRDGVPEWVLTLLKRYPTAIKLAKAKKSALAKIPYISQKRAEQLIAQAKISVASSLDVITSQLISATVEQVLILRQTIASQNKILSQQCSTPEVDLLKTFNGIGNYSAVGLLLEIQSIKRFSSAKKLASFFGLHPIFKISGDGSSGFRMSKQGRKAPRSILFMVAMSAVKSNALIHDLYREKVSKGMAKMSAIGLCMHKILRIIYGMLKNNTAFNQEIDLQNRKKAALIKAKPAQDKNRRFQTYDKSAPISRRNRKKRLERELSQDAINIKCGIEVPAPASN

SEQ ID NO: 487218 - protein, 475 aa, unidentified
MNVKGTKKKNQVVTANIFEQQELLKKAEAIKESLTASTWRELETNGKFDKNEKLSFISDDMLILGCDVGSETHYMRAIDTRGRELSKSVYSFNNDSEGFRSAKEWAVQIAAEHNKSQIVLGLEPTGHYWFCLAAWMISNGISVVQVNPYAVKQTKEVEDNSQMKDDRKDPKLIANLVKDGNFGMPYLPEKLYAELRRLSMFRDQLNEDRIRTINRMHREMKIYFPEYKDALGKVDGAFSLELLRQAPFPDDLISLGEDGIRKIWHDARLRGRGYSRAGEILQYAKVSVGIKDGAIAGKAAVKWFVQKILELDAELAVIENQINQKCQEIPHAGNILEISGIGENILSGILAEMGDISRFDDVKEIQKLSGLGLVACSSGKHKGETRISHRGRKRLRYWLFQAAKSAVAHAEEFKELHIYYTTRADNPLKKMQSLIVIACKLLRIIYTILKKGIVYDPKKMLMDIRRMEKKEAIVA

SEQ ID NO: 487219 - protein, 340 aa, unidentified
MNEITTIGLDLAKHVFQVHGIDAQGRTVLRKRLRRGQVLAFFSRIPRCVVGLEACATAHYWARELGALGHEVRLMPAQYVKAYIKRNKHDAADAEAICEAVQRPTMRFVPVKTAEQQATALLHRGREQLVRQRTMLVNALRAHLAEFGIVAAQGLRNVGELIAIVRDDGDRRLPDVARQVLQVLAAQLEQIEAAIAALEKQLMAWHKANAVSQRLASIPGIGPIIATAIATTVADPGVFRSGREFAAWLGLVPRQNSTGGKTRLGGITKRGNRYLRRLLINGASANLLRSKATKADPWVIGLRRRRPPLVVAVALANKTARIAWAVMLREREYQPRAVAA

SEQ ID NO: 487220 - protein, 430 aa, unidentified
MSIFAGVLRRMTAREMAMEVLYPRCCGLDVHKKSVTACVLRAEAKGKVQKEKRRFGSFTQELLKMADWLRESGVTHIAMEATGVYWKPVWNILEGQFTEVLLVNAQHIKAVPGRKTDQKDSEWIADLLQHGLLRGSFVPPRPTRELRDLTRYRVSLTQECNRIANRVQKVLEDANIKLASVATDALGASGRQMIQAIIGGQQDSTELAEMAKGLLRNKIPELRLALEGRVTDHHRFLLKEILDDLRRVETKISKVEGEIEKRLEACQEDVDRLCTIPGVDRVTAWGLLSEIGMKMEQFPSAGHLASWAGMCPGNFESAGKRLSGKTRRGSAFLRRHLCQAAWAVSTKRDSYLSALFRRLAARRGNKRATMAVGHAILVIAFHLLKRKENYRELGANYFDRKNTDALCRSLVNRLQRLGQAVTLTPIAQPA

SEQ ID NO: 487221 - protein, 327 aa, unidentified
MILPILGIDIAKLKFNVCLINTSGKLKHKVFGNTADGFQQLAAWLIKQGAQRTHACMEATGAYGEALALHLHTAGHTVSVVNPAAIKAFAGSRLSRTKTDKVDAELIARFCVALQPLAWTPPAPEVRQLQALVRRLEALVEMRTAESNRLEAIISVDVVKTSVEEHVAYLDQQIEQTQALIRTHINHHPRLKQQSALLDSLPGIGETTAALLLAEIVDVTQFASARQVAAYAGLVPRERRSGSSVRGRTRLSKIGNARLRKALYFPAITALRCSPFFKAWAEGLRGRGKCKMSVIGAAMRKLIHLAYGVLKTGKPFDPEWMQNAKSA

SEQ ID NO: 487222 - protein, 316 aa, unidentified
MSTSPEIFVGIDVSKHQLDVAVRPNSEMWSVANAPQAFESFIKRVKALHPALIVLEASGGLEAAVVAELAHAGLPVAVVNPKRVREFARASGQFAKTDQLDAQVLAHFAEAIRPPVRPLPTADSDRLAALVTRRRQVLDMLTAERNRQHTAPGPMCDRIGTHITWLAEEVQALDDELRQFIDQNPTWHATDDLLQSTPGVGPITAMTLVAELPELGQLDRQEIAALVGVAPMNRDSGRKRGKRRTQGGRARVRSVLYMAALSASRFNPVIRAFYENLMQRGKEHKVALTACMRKLLVILNTMVKNREPWRHVEKTT

SEQ ID NO: 487223 - protein, 342 aa, unidentified
MLYVGIDVAKNKHDVTALNVPGKTVLKPLTFSNNKAGFELLDLSFRQLNQDCLIALEDTGHYAFNLLNFLHEQGYKVYTYNPLLIKEFAKSLSLRKTKTDKKDAHGIALKLLSDPNREQFQHDNRQVELKILARHIHRLKKKQSDWKVQYTRCLDIIFPELDKIVGKHSEYTYQLLTCYPNPQKRLETGFDKLIEIKRLTASKIQDILSVAPRSIGTTSPAREFEIIEIIKHYKRLIDKAETCVNDLMAEFNSVITTVTGIGGRLGAVILAEIRNIHAFDNPAQLQAFAGLDSSIYQSGQIDLAGRMIKRGSPHLRWALIQAAKACARFSPAFKAYLKTKLE

SEQ ID NO: 487224 - protein, 406 aa, unidentified
MKQIVSVGIDVSKGKSTVCAMIHPNTIIKESFEVLHIVEEMSMLADYIGSLDGEIRIVMESTGHYHLPVAQFLYQKGFFICVENAYIIRQFSRIMLHGAKTDPLDAKKLAKYGLAYWSELKPYKFHPSCYTELSLLSKQYQTYIKLLIAAKQNVIHLMDEMLPGFKEALDTASGVQFSKVKYVDFAKEFYHVDMIKSMGKEIFRENYKQWCKEKGYRFQSEKADELFHLAEDGIPTLPTEFPSTRLCMEVATEQVSQLGYALEQILSQMQNLAKTLPEYQTIRQMGGMGEKLCVRFIADIGDVRRFHNGKALVAYAGIDAPPYQSGQYTGTKRRISKRGNSALRKTGYEVMKSLKSHPPKTDTRVYDFIIKKENEGKSKKQAKIAGLNKFLQIYYARVIEIYKNIV

SEQ ID NO: 487225 - protein, 446 aa, unidentified
MEEARSFGGMRQVHGHAAGVDIGAHEIMVCVEAGEGLQLVRSFGTYTVDLQVLGQWLAEHEVETVAMESTGVYWIPLFEELERCGFHCHLISSRSLRRVPGRKSDVADCQWIQTLHAYGLLESSFRPEADLVALRSLLRHRAQLIQHRAPHILHMQKALLQMNIQLSQALSDVSGITGQTIIRAIVSGERDPHKLAALRNYRCQKNEQEIAKALTGTWREEHLFILKQSLELYDFYTQQVEVCDAEIERMYSLIRPAWNAAEQEGISPKPRNSHSKNAPKNVNVRKHLQRICGVDITAVHGVSASLAQTIVIEVGTDMSKFPNEKHFCSWLGLAPKNEISGGKILKNKTLKTRNRAGQAFRMAAGSVMRADCAFGAFYRRQKARLGPAQAAVATAHLIARIVYRMLKYKVEYEPLSLAQYEQHYQEQQLKYLQKKAAKFGFQLIPT

SEQ ID NO: 487226 - protein, 469 aa, unidentified
MAIRIGIDVACRAVHRAACADATGSLLWKNVRFRTSAEDLEALWQRIPAGEDDITVVMEPTRNAWVPLAAWFRRHGAKVVMVPPEQSADLRDYYNKHAKTDRLDAELLARLPGLHPDGLHIEQGLGCAEPLRRAVKIRSTLVRRRVTCTQRLDALLEILGPDWTCALGTVMTATVLLFLTRWPDPQQVLRLGHKRLTDWLARHSRGIWGAQKAEAILNAAAATLRLWGTDGMDFAALAADIALEAQLARDLDRQIKAIDKRIATYYDQADPEHIALSAPGVGQVLAAQIVGRLGDPQRFTNLAAVRSYSGLVPRQNSSGVASAAGGPTKQGDACLREAIFLAADHARRSDPTLAQRYHRLMVENGKHHTSAICSIGAVLLTRIAACLRKGESYVLRDVDGTPITVQEGRATIKERYSVPEAVRKARRTVHRSDSQQPTDVMMGGRGSSTKKGVARRSKVTTTPQPACIG

SEQ ID NO: 487227 - protein, 306 aa, unidentified
MLRPDGRHRTKKFANTTKGHDELVSWLKGHKIDHAHICIEATGTYMEPVAECLYDAGYIVSVINPALGKAFAQSEGLRNKTDTVDARMLAEFCRQKRPAAWEAPHPLERALRALVVRHQALTDMHTQELNRAETAREVQRPSIDAHLLWLEAELKRLEKQIKDLTDDDPDMKHRRKLLESIPGIGEKTSAVLLAYIGLKDRFAHARQFAAFAGLTPRRYESGSSVRGASRMSKAGHVSLRRALYMPAMVATSKTEWGRAFRDRLAANGKKGKVILGAMMRKLAQVAYGVLKSGVPFDASRHNPVAA

SEQ ID NO: 487228 - protein, 405 aa, unidentified
MIEPIVKRIAGLDVHKMVVVGTVLIEEEDGSIKQETREFGTFKRDRRQMCQWLKDHDVELVAMESTGIYWKSIYATLEKAQILAYVVNARHVKNVPGRKTDVSDSQWLAALARVGLLRPSFIPTKDLRELRIISRQRTKINVTLSAEKNRLNKVLDDAGIRLGGVASDIDGVSAQKIIEGIIDGKPIEELIACARGRLKAKTDDLRACLDEELSERHIFLLKALQKHIQFLKSELEDIDAYLFAAMSPYQKQWEILQTLPGVDKVAAMVLIIEIGIEMERFGSADQLSSWAGMCPGNNESAGKRKSGKTRKGNQAIRSILCEIANAARRTKSQFKGKYESLVIRRGHKRTIIALGHKILRVIFVMLNNVRPYFDPGIDYEELMVDRNAPRWLQALKKFGYLPQTV

SEQ ID NO: 487229 - protein, 401 aa, unidentified
MPELWAGTDAGKAAHHCTVIDTDGTKVLSRRVPNNEAELLELIGDVLALAEDSPVTWAIDLNAGGGALLIALLTGHGQRLLYIPGRTVHHASRGYRGDGKTDAKDAYVIADQARMRRDLQPLQEWDEIAVDLKILTARRYDLAADRTRSINRLRAQLLEYFPALERAFDYAASKAALVLLTGYQTPAGLRRVGPSRLATWLKNRKVRGAQALADAAVAAAQAQHTAVAGESTAAAVVNTLARSVLALDEEIAAVDARIAARFREHRHAEVILSMPGMGSLLGAEFIACTGGDMDAFGTAGRLAGVAGLAPVPRDSGRISGNMRRPHRYHRRLLRVFYLSAQIAARFCLTSKTFYDRKRAEGESHKQAILALARRRLDVLWALIRDQRTFEAQPPQRALAAA

SEQ ID NO: 487230 - protein, 373 aa, unidentified
MVDGTPCASQPLVSGRYGNVCKRAVVISNRPSLDFNPNSCVGASARTSKEGSGRMPQQGRIVGIDVSKLKAEACIRSLQLRLSQPSTPAGEQELIAWLSDNRVGLAVMEASGGYERGWAQALRKAGIAVRIVDPKRVRYFAKSAGRLAKNDPIDAEMIAWFAETFATEAPPAPDPDRDGLDRLVTERRMLVRLSAQIGQLGEHQQPRVVETAQRAIIKAIGAQLAKLETAIGAQIQANAVFAARRAIIQSVPGFGAHFVAGAIAWLPELGRISNKAATALVGIAPYNDDSGAHHGERHIKGGRREIRDLLYMATLGAATRHNPVIKAYYQRLRARGKRAKVALVACMRKLIVILNTMLARAQMWNPAGATAIA

SEQ ID NO: 487231 - protein, 417 aa, unidentified
MQPQLLSVGVDVSKAKLDASFLDSDGRMVHGLTTVPNTPPGWDELKALIASVARQLGEEVRVLCTMESTSYMHRGVAAALRDIPDCAVDVYVANPRSTNYFAKALLRDCKTDHKDSVQLAEYGLRMRPQSQEPLSSQVEQARDVTRTRRRLVEERTSYVNRTHKFLGCYYPGYEQVLGTKHLAKGLLVVLSQYPTPRQILEAGVETLAKLRTGPRHYVGAKMAQKLVRLAEQAPVQELSEAVALVIVGTVRHILELDTLIKQLDRAIEKLLEEVYPDDTLTTIPGIGPVTAASILAEVGDIRRFPSKRQFVGYCGLYPTVWQSGQSKRYYRMTHKGNRMLKMALLVASASARQYNPVIRAYYERLRARGKSKKAAGGAVARKLAELVYTLLSRGEKWSEEKALKGLAKAEQMAASAA

SEQ ID NO: 487232 - protein, 372 aa, unidentified
MNNNKSDEGISGSGSNQASVTNNGNRVLKLGLDMHYRQVTAAMQEDGGRIKAAGKMRHADFLNWVHKKLEESWEIHSCYEAGASGYWLHRELVELGVKNLVVVPKAMGQGGKKQKTDKRDSGELCDSLDRYLRGQDKALSIVAVPTEDQEQKRALIRYHRQIMADRGRCEARGKGLLCAQGIEVHGRWWQGDGWIEVQHNPRLKDWMKEQLIGWRNKILSTDEEQSALRERIAALAPAILPKGVGAYSAAVLEFEMRGFERFKNRRQVGSMTGLCPGIHLSDGRGKEGSINRCGIGIVRWTLVEMVWRLMKWQPQYPPVRRLAVGLVKSKRAKKRLAVQAARRLAIDLWRLSTRQTTPEKLGLMMHCTHLEK

SEQ ID NO: 487233 - protein, 362 aa, unidentified
MEKRFHGIDLHKRYATINVRNSEGSEIQHILRCEDLSGYVGNLTGEDVVVVESINNAFFWSDQIEERGARCYIVDPHRFKIIKDSWNKTDKRDAANLSLALWMAEMRYEFKMPTVYKPSPEIRELRKLFSHYQTITEQITQHKNSIQSIFMENGISLGKDEKTKLFKAGNNRSAIAANGLTPASRLCIEMSLSIIGCLTEQKEKVKDSIIKMGAFFEREIRLCTAIKGVTPFLVLAFLADVGDITRFKNVRGFNAYLGVVPTVKSSGGKTQLGHINRQSRKLARTLFTQPLSHMIRSSDMMDAFYNNVKSRRGAGRSRIAVIRKIFNIMRSMILTGEEYRWKDEENYQRKIKEFEKIICEAA

SEQ ID NO: 487234 - protein, 347 aa, unidentified
MVVIGVDAHKRTHTLVAADEAGRKLAELTVVATPDGHLDALAWASRFPDRRFAVEDCRHLSRRLELDLLRAGEAVVRVPPHLMAGTRQSGRERGKSDPIDALAVARAAIREPGLPIARLDGPSRELRLLVDHREDLVRERARIMSRLRWHLHEIFPGLEIAPRALRRSNVIADLEARLAGVDGMVAEIARELVARCRDLTVRVNELEHQIAQLVRGLAPSLVSLPGCGTLSAAKLVGETAGVARFRSKEAFARWNGTAPIPVWSGNVTRHRLSRSGNRQINAALHRIAVTQWRGVGDQGRAFVEARLAAGKTKTEALRLLRRHLSDEVFRRLQADELGAGDALRKVA

SEQ ID NO: 487235 - protein, 415 aa, unidentified
MERVYERCAGLDVHKQQVTVCVHVPDQAGVRSELRAEFATMTGDLLGLRDWLKGLGVTHVAMEATGVYWKPVYYLLEDDFELLLVNAQHVKNVPGRKTDVQDAQWLCQLLEHGLLKSSFVPPQPIRELRDLTRYRKSLVWERGREANRLQKVLEDANIKLASVASRPLGVSGKAMLKALCDGESDPEALADLAKGKLRAKLPALRAALEGRFREHHALLVSHLLAHIEYLDETINSLSAEIEERVRPFERQVELLCTIPGVAERTAEVIIAELGPDVERFPSHRHAASWAAVCPGHDESAGKRRSGKTRKGDSWLRVALIEAANSAAGRTKDTYLRAQYLRIRRRRGHKKAIVALAHSILVSAYHVLHDEVSYQELGGDYFLTREDRNRITQRLVRQLERLGQTVTLEPTTVEAG

SEQ ID NO: 487236 - protein, 345 aa, unidentified
MEQISRIGMDTSKHVFQLHGVNAAGVPVLRKKLRRNEMVAFFKKLAPTVIGIEACGASHHLARLLQSFGHTVKMIAPQLVKPYVKRGKNDAADAEALCEAMSRPTMRFVPVKTVDQQAALMLVGVRNRLIRNRTQLANTIRGHATEFGLIAAKGMAHLVPLLERIAADEALPALARELFASQAGEYAQLQAQIDEVDAKLTAWHRADECSRRLAKIPGVGPVGAALLKMKTPDPTQFQSGRQFAAWIGLTPKDHSTAGKVRHGGITRAGDEGLRSALVLGATAVIQQALRSDTASPWLAALLKRKPAKLAAVALANKTARIAWKMMLTGQAYGAKAAVAASAGAV

SEQ ID NO: 487237 - protein, 494 aa, unidentified
MKAIAGKAKAKHSNSSKRNAKMAARGEPKGMEIVNPHAGGIDCGAEEHYVAVPPQSVEPGQPAVRCFSAFTEGLDASVEWLKACGVTTVAIESTGVYWIALCQKLEAAGIEVFLVNARHVRHVPGRKTDVKDCQWLQRLHSFGLLSASFRPEDGICQLRSLQRHRLNLIWTAGAEIQHMQKALQQMNLHLHHVVSDITGLSGLRIIDAILAGQRDAVQLAKLRDYRVCKSTVAQMEAALVGDYRPEHLFVLGQSLQAYRFYQARIQECDVQIESHLQQLAQRYESSSALAAKLPEPEVLNDAQAQNPQPAKPKVKRKPQANEPKIDLADYLRRICGVDLTQVIGLNVLSVLLIVSEIGVDMSKWRSAKAFSAWLGLCPRNKISGRKVLDTRTCKVISRVATTLRLAAQSLGRTNTALGLFYRRKRAHLGPAKATTATARKLACLVYHLLKYKEQYREPDPTTYQLKVEKAILARIQKQAAVLGYKLLPTALVPA

SEQ ID NO: 487238 - protein, 348 aa, unidentified
MGQYVGLDVSLEVTTVHVLDEQGKRVWHGTCISHPAAIEATIRKHAPEVVRIGLETGPLTTWLWQALTDAGLPMVCLDARQAKAALNMRINKTDDNDAEGLAQLVRSGWYRAVRVKSREAMLVRSLIGARTQLLDIVTELSNQIRGLMKTFGLVVPKGAGKVFEANVRRLLEDDAAVAAIVVPLLDSWRAVRTQTADLDRQLLAVVRENADCRRLMTIPGVGAIVAASFVAAVEAPENFTTSRAVGAWIGLTPRRYQSGEVDYDGHISRRGDARLRALLYEAATTMLTRVQGESDLRRWGLALKKRLGFKRAAVAVARKMAVVMHAMWKKGVDFNPKAAPSAAPSAAT

SEQ ID NO: 487239 - protein, 429 aa, unidentified
MNYNTQNAKIASITEKTLIVGIDVGSETHYARAFNWRNYEYSKKPFAFSNDEAGFASFKAWMNDMAEKHGMETIIPGMEPTGHYWLNLGAYLQEQGMKPVHVNPHHVKKSKELDDNNPSKNDRKDPKTIAGLVNEGRFSYPYIPTGIYAEIRNLSNLRIQTQEEITRIKNRIARWFSIYFPEIKDVYRNPDAVSGLMVIKQAPLPCDIKELGVNGVNKIWRDARLKGAGIKRAATLVTAAEHSIGNTEAPRSARKEIRNLLNDYEIYKNRMDELMQEIKETLSEIPYIDKLMEINGIGIKTVSCFIAEVGDIGRFDNPKQVQKLAGYAIVADSSGKHNGESRISHRGRKRLRYALYEAAISVIGKNKEFKEIHSYYRTREKNPLKKMQSVIAVACKLIRIFYTILTKGVDYDSQKMLNDIVRPEIQLAA

SEQ ID NO: 487240 - protein, 332 aa, unidentified
MTYVGIDVSKATFVVAYSSHKSSKTKSFKNTTKGIHQFIKTISKDEHHCVLEATGNYSALLVYLLSKAGFSVSLENPLKVKNFSRAMLSVTKTDEADAYLIALYGERMQPAPYKMRSDLILILKQKRTVIRQLKKQLVATHNLKQSMEALPHFDSKCKRSLEKIIAYLEKQIKSLEEDLANLAHDEFKKQMNLLTSIKGIGTTLAVALIVTTGGFTYFDNAKQLTRYLGLSPTYQQSGTSVNVRGHINHNGDPNLRGQLYLAAMSSIRCNTECKACFERLKANGRPGKVAIIAVANKLIRQAFAVVTKEKTYVDGFISTKNKLVQSECYTVV

SEQ ID NO: 487241 - protein, 362 aa, unidentified
MNKHIFVGIDLGDKNSVARIGVDLEKSERFGFVNTNAGRARLILEVKRRSEQVGGAVVVMAYEASSCGFVLRDQAQVAGIDCKVLAPTKMEKSVEQKRNKNDDRDADDVLEKLRGHVLAGNRLPIVWVPDPETRDDREVLRTRLALSEHQTQVKTQIQMLLKRHGLEKPSDLGSTRSKQYRQWLEGLSRWESLGWGTRQSLASLLRQLSGIEGEMENLDKLVRELGSQLRHKPIVEALMKEKGVGLLAALVYRTEIGTARRFHRGRHVGKFVGLTPTSHESGQQNDRKGHISRQGPPRLRKVLCQASWVHVRYDPHSREAYQRLVAKNPKKKKIALVAVMRRLAVRLWHRMREAESLQQTSL

SEQ ID NO: 487242 - protein, 364 aa, unidentified
MSSTTTTPTFLGLDVHKNTISAGILRPGEDVADVERISSDDDAVRRLIARMGSPRRLRACYEAGPTGYELARLLTSLGVACQVIAPSLIPTAPGDRVKTDKRDCRRLARLHRAGELVAIRVPTVAEEAVRDLCRARADMVIDRTRARHRLGKFLLRHGRIWRGGDNWTLKHHASLGAQRFEDLALEATFAHYRATLNAREAAVDAIDADLVGWYSRAPFADTVARLAAYRGITQLGALTLAAEVCDWRRFGSAGLFMAFTGLTPSEHSSGERTRRGHITHAGNVHLRTQLVESAWAYRSRRGVGVELRRRQEGLDRDVVARAWAAQLRLCGRFRRLDERKTNRNLVVTAIARELAGFVWAGMTA

SEQ ID NO: 487243 - protein, 389 aa, unidentified
MVAMVIIGVDPHKSTHTATAIDPQTNRTVASVRIEASLVDYRRLLRWAGQFDHRRWAVENAEGLGRHLSSWLLARGEDVVDVPSAATARVRQLSRGGGRKNDQIDAAAAACAAALQGDGRPLQAEDLTDALALLDESRTNLAQSRVRLVNQLHALLRDLLAGGAPTDLSATRAAALLRLVRPSGDAERVRKQIATDLVGQIRSVDSLLKSNARQISELVAASASTLTSTVGIGAITAGRLIGRTGRAARFPSSAAFANYAGAAPVEVASADKARHRLSRSGDRQLNAALHTVAITQIRTPGSRGHTYYNAKLAEGKTPREARRCLKRRLANHIWRTMITDEQRQAASPGGHLGTTLTTSAAGSTPTTSSSDKSLPGLANHDSTTAQPAA

SEQ ID NO: 487244 - protein, 387 aa, unidentified
MSQPNDLSRSLVALDQDSTIIAVVEMSQSSWLVGGILPGIERQPRKKLEPNPERLLALLHRWRDESVRAGRTITRIAVAFEAGRDGFWLARWLEARGVETHVIHPSSVAVSREHRRAKTDRLDTELLKRGFLGWLRGERGHCSMARVPTIAEEDAKRPNRERECLVKERTRLVNRMKGTLARLGIRNFRLTLRNAAEHLAALSTPEGSPLPPNVAAELERDIARLRLVIGQIKQIEEARRQRLEEQPERGPHAMVRLLARVVGIGIETADMLVNEVLSRPLRDRRAVARYAGLTGAPDESGAKRREQGLAKAGNARVRRGMIQLAWRFLRFQNNSALAKWYQARTADHRGATRKTMIVALARKLLIALWRFVTIGEPLDGVTLRPAS

SEQ ID NO: 487245 - protein, 390 aa, unidentified
MYYCGIDVAKRKHAIALIDQHGQAVQRSFTMENTRAGFDQLLQALTALDGPVLIGLEATGHYGWALYDELTHHAYPVVGLHALQVHAFRKSGVRQVKSDRTDAVWIAEFLRFSQPEPAQPTTAVFLQLKDLSRFHYHLSEPIGDAKRKLLSVLDRVFPEYETLFSSVFLTTSRQLLAQAASAHELAEFDLQELTEQLHTARRGRFDRTKAAALHTLAQQSLGVRFLADAAQLQVRCLLAPIDLLEEQRHLVDDALAQLRDQIPPYITSVPGVGPTTGAALLAEIGDIHRFDAPEKLVAYAGIDATVYQTGQFEARQMHMSKRGSPYLRHALWQAASRAIMHDAELRAYYDRKRQEGKAHGTALGAVCRKLLTRVYIVLKENRPYQIRTAR

SEQ ID NO: 487246 - protein, 316 aa, unidentified
MSEKLLQSFVGIDVSKASLDVRIEPPDESLHLAYDEAGVAQIVRRLVEVAPTLIVLEATGGLETRLASELAAQGLPVAIVNPRQVRDFAKASGQLAKTDRVDAVVLAAFARAIRPAIRPLKDAETRALDDLVTRRRQLVAMRVQETLRLGSAASKPLQKNLKAHIAWLDKQIAKLDDDLTKGLRACAVWRAKDDLLRGIPGVGAVTSLTLLAKCPELGVLNRREIAKLTGVAPLANDSGKHRGKRFIWGGRADVRVVLYMAAVSAIRCNPAIRAFADRLKRAGKPPKVVIVACMRKLLTIMNSMLKNNTPWSVQTT

SEQ ID NO: 487247 - protein, 390 aa, unidentified
MIYVGIDVAKDKHDCCILGSDGEILFSPFTIQNTLQGFDELYEKIWSLTSDRAKIKVGLEATGHYHLNLLRSLLDNGLASFVINPLHTNLYRKGLSLRKTKTDKVDAASIAMMLLTDRTLKPYSVTSYHNEELKSLTRYRFDKVQERARLKASIARLVSILFPELEKLVPSLHMASVYALLSEFPGASFIASAHLTRLKHLLHDASKGHYGRDMAVSIRSVASSSIGSVLPAKSLELKHTIRLIEVLTAEIDEIETTINAIMDTISSPITTIPGIKNRMGAMILAEVGDFSRFDNADQILAYAGLSPTTYQSGQLTSSYAHMEKRGSRYLRYALFNATQYVCIWDPTFKAYLARKRAEGKHYYVAISHACKKLVRVIYRMQLTGESYKTV

SEQ ID NO: 487248 - protein, 416 aa, unidentified
MTYRIAAIDIHKKVLMVVVATAAAEVADAAGEALEFTCRQFGTGALERQHLVSWLQRQGVTEIVMESTAQYWKPIWLELEPHFQKLHLAQAQSNRAPRGRKHDFKDAKRLARRLLAGELSLSYVPEPEQRLWRIMTRGKQQLVRERIRIRNRMEALLEEMQIKLDSVISDLLGVSGRRILKALSEGETDPNRLAQLGDERLKCSQEELADALRGNPTPTHISMLKLYWEHVELMDRQIADLDRLVAQALKPYEEAVQRLAEVSGFGVDSAQQLIAEVGVLADAFPSAGQFSSWVGTCPGSNVTAEENHSSRSPKGNKFARRLLNQAANAAIKKKGSHFQNIFRRFVGKLGYQGAVWVVAHRLTRLVWLILNRQVRFVEQGEETNPKAKLRRAQKLARGLRRLGYQVSLTPIQPAHA

SEQ ID NO: 487249 - protein, 345 aa, unidentified
MQSMYYVGMDVHKKVISYCVKDVSGSIQAEGVIPATRIDLNRWMKALPQPWTGAMEATVFTGWIYDHLKPHAAALKVAHPLMLRAIAAAKKKNDRIDAKKICDCLRCDFLPECYMASTAIRERRRTLRYRNLLVRQVVQLKNKIAVLLMEAGVSYNKQKLHKVGYFRELLATNPDIDEGLRSLLRACRETMVRLAKTESALVRSLERDSFLMERVERLMTIPAVGPVTALTWALEVGDVQRFSSIKKAISYCGLCGAERRSADTIQRTPLSKQRNKHLQCVLIEAAKMAPRNSPDLALLHDREKRKGNANRATLAVARKLVAYLVAVDRRQKDFRVIERQNQTAA

SEQ ID NO: 487250 - protein, 345 aa, unidentified
MQIKSIGIDLGKTTFHLIALGNRSQVVIRKKFSRSQLLVYTANLPASLIGMEAGVGSHFLGRALREQGHEVRLIPAQFVRPFVKSNKNDYRDAEAIAEAVERENMRFVPIKTEDQLDLQAVHRVRDRLVARRTSVINQIRAFLLERGISFRKGPASLRRQLPEMLENADEQLSPGMRRLLDFLWQEWKGLQSQIESLNADLEQTASSDPACVRLQQIPGVGPLVSTAVVSAIGNGAAFKKGREFAAWLGLVPRQWSTGGKTKLLGISKRGNPYLRKMFIHGARAAVLRVKREGSSLGTWMSGLETRAARNVVIVATANKLARISWAVLASGNDYHPRHKALVFSN

SEQ ID NO: 487251 - protein, 369 aa, unidentified
MKKDSTLYVGLDLHKDSIVAAYASSEGGDPVHLGAIGTRQCDIDALVRKLQSKGARLVFVYEAGPCGYWLYRYLTGKGLACLVVAPSLIPRKPGDRVKTDKRDALTLARLARSGDLTPVYVPQVADEAIRDLARAREDALGDLNDARFRLKALLLRHDIRYTGRANWGDEHRRWLARFVFPTPAQQIVFQEYVRTVTERTELLGRLEAALLEQAKTWRMYPVVEALQALRGVQFTVAIITVAELGDLTRFEHPPELMKYLGLTPSEYTSANRRRLGGITKAGNGHARRALVEAAKAYRHRAKVSEQIQARQQHLPKAICDIAWRAQVRLCGRYRKMLARGKHPNTIAAAVARELIGFMWAIAKEQPVAA

SEQ ID NO: 487252 - protein, 391 aa, unidentified
MVCVGIDVAKDKHDCCILDSDGTVRADCFTIPNNMDGFKQLIQTIRDCTQKSDKIKVGLEATGHYSYNILGFLLDNDLPVYVMNPLHTNLYRKSLSLRKTKTDRVDARTIATMLLSDVDLKSYTDTAYHNEELKSLTRYRFDKVHERAKLKQSVSRLVTILFPELEKLVPSLHIASVYALLSEYPGAKQISEVHLTKLTNLFATASKHRYGKEKAAQIREAARTSIGSVMPAKSLELKHTIKLIQELTSEINEIEGFIQQIMDELNPQILSIPGIGVNSAAVILAEIGDFSNFSSPDKILAYAGCSPSTYQSGKLTSCYAHMEKRGSRYLRYALYNATKYVCHWNPVFAEYLAKKRAEGKHYNVALSHATKKLVRLIYALQKSGKAYLAVA

SEQ ID NO: 487253 - protein, 373 aa, unidentified
MSSSVIYVGVDVHKDTNSICMYDPEESSFFSEAKLDSGTENICKYLKKQTKDFALEEKEFIIGYEAGPTGFGLQRGLAKKGYTCYIIAPTTIKRASGERTKTDRKDARMLALTLATDAYRSVHVPEEEDESAKELTRTRTALKKHLKRAKQNLLSFLLRQSKSYPFPGNYWTQKFNDWLDSLVFADKRLQYSLETYRQEIRDLNDKIEQMDDFIEEVASSERFKERVDKLVCFAGIDTQTALSVVCEIGDFSRFATPEQFSSFLGLVPGQESSGKTVRYTGITKTGNSRLRLLLTEATKAIKRSNPYSKSKRIKERQAGQSPEVIAYADKGTKRIKAKMRNMEGNGKNANVSTAAGARELSCFIWGMMTGNIA

SEQ ID NO: 487254 - protein, 421 aa, unidentified
MPTTLCVGGDIHQATLQLRTLDKTDGHEVGKMLTVQNNRPGADQAIAHLVQVLTQHGYTHLELGLEATGLFWLPFYTYLQQSPALAPFHPTWVCFNPKLVAKFKEGVTLSEIKDDEHDALAVAERLRFGHLPTTYVPSDEWLALRMLTRYRYRLSRQIAQEKLRALTRVFLKASEWHRGQPFSDVWGATSATLLTEFTTTEIAAMTLPQLTELIQEYGRKHFDDPQATARHVQRTLQNSFPVTPDLDAALTTVLQIAWAHIRDLEKLMHRLDREIAHRMERIPNPLLSVQGLGPVITAGIVAEIADVHRFPDHPQLAKFVGLVWRKHASGQFVAEETRLAKMGNVYLRYYLIEGANLMRQHNLEYRAYYQRKFAEVPKHQHKRALVLTARKLVRLVFALLTKNQPYVRPQAKQSQEVSPTA

SEQ ID NO: 487255 - protein, 343 aa, unidentified
MQAVKTIGLDIAKSGFQVHGVDADGQVVFRRQLKRRNVLAFFQKVPSCLVGMEACATSHHWSRELQALGHTVRLMPPAYVKPYVKRQKNDATDAEAICEAVTRANMRFVATKTPEQQSGLMLHRTRHLFIRQQTAVINAIRAHLAEFGIVAAVGRNGLEQLLNVVADAGDKRLPEVARTCLMALGTQLQALKAKLLEFDRMITAWHRSNETSKRLDAIPGVGHVLATALVASIADPKVFRSGRDFSAWIGLVPKQHSSGGKDRLGSISKQGDRYLRSLFTAGALAVIRYAKIYGTKHRPWLTALLARRPTKVAAIALANKLARMAWAMMTKGERYKEPVALAA

SEQ ID NO: 487256 - protein, 345 aa, unidentified
MSEDYDGRQVVGMDLHRRRSVLVRMTEDGRRLGTARITNSPAVLRQQIARAGKSPRVVLEATYGWYWAAGTLAAAGAEVHLAHPLGVKAFTYRRVKDDFRDAADLADLLRMGRLPEAWIAPGEVREVRELTRYRHKLVGLRTSCKDQVHAVLAKLGIPVACTDIFGTQGTQWLDELRLPQPYAGKVTSLRQLIGELSTEIIMLSEVIASLLAGDRGYQVIQELPGIGPVLAAVIVAEIGDVTRFKTAAQLASWAGLTPRHREPDIKVVRGHVTKQGSRPLRWAVIEAIQRSPAASRPGQVKAAIIARRGTQARNIAKAAAARQLLTLIFYGLRDGHIRCLAALAA

SEQ ID NO: 487257 - protein, 340 aa, unidentified
MPLYGGIDLHANNSVVALMNEQDEVIYQKRLPNDLPTILEQLAPYHADIEGLVVESTYNWYWLVDGLMEADYRVHLATPAAIQPYNGLKYSDDHSDARWLGHLLRLGVLPEGHIYPKADRAVRDLLRKRAHFVRQHTANVLSVQNIMVRNTGSRCSVKRIRELTAKELKHLLPEAYQVLAITSSLAILDCLSQQIKTLEKAVSKRLKHTPSYEQLLTVDGIGTILAQTIALETGQIGRFPTVGDYASYCRCVNSTKLSNGKRKGTGNVKNGNPYLAWASMEAAQFALRFQPAAQRLYHRKLAKSRNNTVLARKSVAHKLSRACYYLMRDLVPYEATKAFG

SEQ ID NO: 487258 - protein, 347 aa, unidentified
MRFYNRQHRHYCGIDLHVKTMYVCILDGVGQVLLHRNMPATPAAFLEAVGPYREDLVVAAECMFTWYWLADVCAAERIGFVLGHALAMKAIHGGKAKNDKLDSFKIATLLRGGLLPQAYVYPAAMRSTRDLLRRRLHLVRKRGQLLAHIQNTRAQYNLPEFGRRLAYPANRDGVPERFEDASVRKSIEVDVALLERYDTLITDLELMLVRTAKQHDGDAFHRLRSVPGIGKVLALTILYEIHDITRFDRVQEFASYARLVKGRKESGGKMLGTSGAKMGNVHLKWAFSEASVLFLRHATGGKKFLTRLEKRHGKGKALSILAHKLGRAVFYMLTRRTVFSLEKFMAA

SEQ ID NO: 487259 - protein, 335 aa, unidentified
MEHIAIDLGGRESQICVRAADGTILEECRLATPDLPRYLVSRPPARAILETCAESGWVAAAGQAAGHDVRVVPAGLVRMLGVGARRTKSDQRDARALSAASCRVELPSVHLASPTARARRTLCSTRDALVGARTQTINTVRGWLRQQGVRPRSGEAESFPRRVGALVPAALPPPIARQLETIDYLTAQIAAANRELTALVEGDGVCHRLCSVPGVGPVTATRFTATLDTPDRFPAAHTVGAYLGLVPGEHSSGDRHARLGITKAGAPAMRTTLVQAAWALRRARPTDPMVQWARRIERRRGRKIATVALARKLSGVLYALWRDGTVYDPARATRR

SEQ ID NO: 487260 - protein, 482 aa, unidentified
MKKKNIFQNRSQQLLRLFEKAGNRLKMMCVPIDYAKKDHMVMFCNGYGDIVRKPFSVKNTLEGVKYLIDQVMRSCRQRHIKKEFVFFGGEDVNSYAENFANALRTKGFLVANVNAHDAKKQRENLQASTDRIDLMGIAMMLLNLRAKCSPAQDGIYRNLRTLVRHRKKLVVMKTEVKNRVHTLVDRLFPGFLNEKNTGINPFSKSSLVLMEDRFSAQQIRRRQKSTLIKILKRCATPNAEKIASKLHSYSAQVITTPNEYAATLQLSLQHHIKHFRCLQENIDQLLSEIALVLAQTQGAFLTSIKGVGIVLAAGVSSEIGNPFEQKPLNNLTSYSGIIPRVKQSGGLEGHTHTGRVSKRSNHILKDYVVQSALQMGLRGPEPLLQDYKRREAAGQHADFGIGRRFLRMAMCLMRSSQVYLPPTLRSPKTQMQERAAYYLTTWPLLRDKWKKAHAHQAAFAKDQPLGQWRQVVQELYDIKLKL

SEQ ID NO: 487261 - protein, 338 aa, unidentified
MSIIRIGLDTSKHVFQVHGVDENEQPVLRRQLRRQDVVKFFAKLAPTRIGMEACGASHHWARVLRSLGHEVVLIPPQYVRAYVQRGKNDKIDAEAICEAMSRPKVQPRFVPIKTVQQQAALTMLGVRDLLVKQRTMLINAIRGHAAEFGVTAPKGPEQVAELLRRLVSDAGVPALAQEMIGELTGQLAALDAKLTAVQARLTAWHRYNQTSQLLATIPGVGPISGVSFALKVPDPKVFRSGRHFAAWVGITPRENSTAGRQQLGRISKQGDEDLRRLLVLGATAVIQQAKPGRASPWLVDLLARKPKKLVALAVANKMARIIWAMMISGEIYRRPQAA

SEQ ID NO: 487262 - protein, 414 aa, unidentified
MEDYKIAGIDVHKRMLAVVITNAAAIGEFRFERRKFGATGADLGQLRDWFTREGVREAVMESTAQYWKPVWQSLEKDFSLHLAQAQSNKGPKGRKRDFTDAERLVRRHIAGELILSFVPDGEQRMWRTLTRTRKQFIRDRVQLQNQMEAYLEQIRIKLSGHLSDLLGLSGRRMLKALAEGETDAGKIADLAAKGLQATREDLVNALAATPSLKAIERDMLHLFLERLELLERQIATLERATAEALREHEQAVRRLAEVPGLGAESAHQIIAEVGPQAASFPSAAQMASWVGCCPGREESAGISASDASPKGNRYVREVLAQAANAAVKAKGSVFEVLYRRLTGRRGHFKAIWAVAHRICRIAWKILHEGVRYEERGIRTNPQAERKRAARLIRNLRQLGYKLEITPPMTGQSPA

SEQ ID NO: 487263 - protein, 460 aa, unidentified
MNEYFIGIDASKGYSDFVMINAKKQTVIENFQLDDTFQGHTRLYELLHGFNQDYPEATIYAAVESTGGYENNWFQSLLKFQASLPIKTAHLNPLGVSHNSKADLKRNNTDKISAKNVAEYMIAHPEKVSYQHQDSLASLRKQWGFVTMLTKQSTQLLNQLESLVYNANPEILIYCKGDTPQWILKLLTSYPTALRLSRAKVKVLARIPYISLDRAKQLIATAKKSVASASDKVTEQLIVATVKQIVHLKKTIKVQSEVLANECQIPEVALLKTFTGIGDYSAIGLMLQIQSVNRFLTSKKLSSFFGIHPEYKKSGDGTYKYRMSKKGRKEGRRVLFIVAMSAIQSNPLIRDVYQQAVERGMEKMSAMGLCMHKILRIVYGMLKHNKAFDPQVDLKNRQKKPSRQRKVGQDKDRRYQNFDSNAPISRRQKMKRKERKQSQNVINVEYGISEASVPSTQLAN

SEQ ID NO: 487264 - protein, 351 aa, unidentified
MNEQATSDVGIDVSKRKLDIALLANNKTKSKVFDNTPSGHRELAQWLIERGAEQGRTHICMEATGPYSEAVAIALVESGWRVSVVNPARIKGFAQGELARNKTDRADASLLARFCAAMRPSLWTPPSAEWRELRGWVDRLQALKDMHQQESNRLEAHTVTGQTSLVGSVQVHLDWLAQQIQTLERDIDDHINRHPELKRDAELLHSIPGIGSTTVAKVLAYAGDVRRFANAKALAAFIGVTPRQRLSGSSVKGRTMMSRTGHADLRRALYMPGMVARRHNPVLRAFGDRLRATGLAPKAVVGAVMRKLAHLIYGVIKSGSRLMPVSQVSNLTSKTVPTLAHRPVISSGTQG

SEQ ID NO: 487265 - protein, 414 aa, unidentified
MIRENYIYVGIDPHKAQHTATVVNCWNEKLKVITIENKPSEFTKLAQKVQRVALRLGLQPIFGIENAHGYGRSLTVWLIEKKYIVKDVNAALAYDQRKSAPTFKKDDEYDAYAVATVLINKLHELPDAKPEDAHWTLGQLVSRREKLVKDGTRLKNQLHQQLYVAYPSYKTFFKEIDGKTALYFYKTYPSPVHLRGKSAEDLLDEFRSVVRSSNKSRAAKILECIQNDGDTTREHQQARDFITQSLARGIESQMEELRLIESEIDKMLPIFGYKLTTLPGVDTVTAAKLISEIGDIRRFRNADKLAQYSGVAPVTFSSAGKGKDYSSKQGNRFLNGVFYMMAMSMIVVSPKLKRPYQPIFRDYYLRKLSEGKTPSQALVCIMRRLVSIVYGMMRTKSEYRPYVSKDQTPQEQDC

SEQ ID NO: 487266 - protein, 361 aa, unidentified
MSESMALVGLDVHQAQSVAAVLDPLTGELRVERLRGAPGDVVPVFLEGLGRPVRAVYEAGPTGFALARAAGGRGLDLRVIAPGSIPKASGDRVKTDRRDAKRLVRLFAAGELSFSFVPSEEEEHFRDLVRCIDDARKDLMRCRHRLSKFLLRRGLRFPGRAWTQPHQRWLGKVTFDDALSRAVFIDYCCAIDALVQRRRALIAVLEDSVAGSPHAETITRLRCFRGINTLTAAGLCAEVGNFQRFAKPGLLSGFLGIVPSEYTSSEKRVQGHITKAGPTHARRLLVEAAHHYRRAPRISSELAARQAGQDPRVVQVAWRAQRRLYSRWTHLAGERGKPTGTVVVACARELAAFCWEAATLN

SEQ ID NO: 487267 - protein, 418 aa, unidentified
MDIVHERAAGMDISKRDAKVCIRIPGARAGTSSRTVTTYGATTNEIVRLRRDLEAATVTVVVMEATGDYWKPFYFLLSESLNVQLVNAKAARNIPGRKSDVSDATWLAELAAHNLLRASFVPPEPIRQLRDLTRTRSNLTHERTREFSRLEKGLEDSNIKLSSVVSTLGTRSARSILDALISGERDPQTLASLAHVSMRRKSAALVEALTGRFTDHHGFMVQLHLDRIDQIEATLAALDARIDTVMGPFSLARELLMTVPGISKNVANVIIAEAGVDMNVFDTAGHLASWAGVCPGQNESAGRIKSTQTRPGDHYLKAALGIAALAVSRSKTTYLAVKYRRIQPHAGALRAVVALQHTLLVIVWNMLHDGVAYDELGVDHFDKTNPERARKRLQRRMVSLGFEPNLIPISAGGSPSFS

SEQ ID NO: 487268 - protein, 350 aa, unidentified
MSSHEMTNHEMSSHEMTNHEMTSHEMTSHEMIGIDIAARELAVIGERVTLEPTYENTPAGRQALVKALRRSKRPVRVVMEATGIYFLDVACDLADAGFEVMVVNPRVAHHFAEAILQRRKDDPTDAAMLQEYGRRMTFVPWVPPRAEVLALRALTREVQAQTKATAAAKNRLHALRATRLTPASLLRALERQIARAEALIDELMTAAVALVEADPELAQRFGRIDGIPGFGAKATVTVMGELVTLPRMSARQWVAQAGLDVREERSGTSVQRRSKISKRGNKRLREALFYPALTAGRCCPEAHAFVTRLIARGKTPLQAEVALMRKLLHAIHALWHNNEAFDAKKLFAQV

SEQ ID NO: 487269 - protein, 410 aa, unidentified
MERVIERGCGLDVHKKTVTACVRRPGPRGEREQPVRTFGTTTAEVLALRDWLEAQGVTHVAMESTGVFWKPIFYVLEEAFVCVLANAAQIARVPGRKTDVEDCRWIAQLLEHGLIRSSFVPPAPIRELRDLTRYRKVLIQERTRDANRLHKVLEDAGIKLASVASDVLGVSGRAMVEALVSGTTDPTVLAELARGTLRKKLPALRQALAGRFRPHHAFLVSQVLAHLDYLDEAIETASARIDEAIAPFAAEVIRLDTIPGVNKRTAEVLIAEIGVDMGVFPSAGHLASWAGVCPSNNESAGKHRSGKTRKGNRWLRGALTEAALAAGPRTAKGALAARYRRVMRHRGHKKAVVAVAHAILVTAYHLLARKTTYQDLGRDYYDRRHAERARHHAIQALERQGYRVILEPAA

SEQ ID NO: 487270 - protein, 429 aa, unidentified
MSSSTLTSGADFPAGTLFVGIDVAKGRHCGRAISNRDSRESAPLFFGNSREGLELLKRHISEWQRSFGCDVVVIGMEPTAGYWMPMFTCLEEWGYDVRLVSSLKVRRSKDIRDNSPLKSDPKDALVIADLVRQGICLDYRGHDESVNEVRVLVKHAEDLEKTASVYKNHLEHLMSVHFPEIGEVFKDMGSTTMLSFLRECPFPKDVLDVGLEKVGQLLWDASRGRMGPGKAKRLVELARVTIGLREVGSARRLELYNTLNLLEQVESGLASMKELLSAVLETMPQYEILRSIKGIGLMTAASIIAALGDLSRYGSARQVLKMVGLNLYRLSSGNRRGVDKISRRGMSLVRKHLFMAALSASRTDGVFGEKYRSMTAKGMKPKKALVAIMRKLLKLAYALVRDNRMFEENYSPQRRAERDAVVIKRAEAA

SEQ ID NO: 487271 - protein, 433 aa, unidentified
MKHNRNRNQRKSPKPGDPVLANGRAVCGIDIGKRRHAAAALSPQGEILARIDAFSNTQAGIDRLEQEVLLKAGGPGKVLVAMEATGHYWMCLYVNLRRRGYDGVVLNPLQTSARGNVRIRKTQTDRIDAVGIARLILCGDAKATRVPDPAIIELRLLVRHRRRLLRAIGGIERYAHTLIDRVFPEYADVFCNPFLPSSEKLIRQVGLSPRKLVEKESEVREILRIASRGRLTTDTIDQLFQAAGQSIGTGQAEEVIDRQLSSFFDFRAVLRGQIEEIEAELEKRMASLDSPLLSLGISSVLAATIHAESDPINDFNAADRYVAYVGLDPSLHESGDTIRRRGKISKRGSPLLRHALYLAAFVVYRKHDYFRSIYRRHRKRGKGHRNALVIVARHLALVIWRLLTDRRPFTKRPPQKTSFPLARGIQSISKSKA

SEQ ID NO: 487272 - protein, 428 aa, unidentified
MSNQEIIRRGKFCQIVKEICGSNEYLVVGIDVAKDKHHAFMGTATGKSLFRKLIFENNIEGFSRLLRTADEIKSQNDLSKIVYGLEPTGNYHKPLARHLIRCDCNVVLVTGQAVKKNRYLLDGRWDKNDTKDAANIADLVSRGRCLYYDCPSPSIIEIRSLLSLRRRLKKEEHGIRMRIRNNLLAQYFPEFDRFYSACESESLSIIKYFLYPDTISAMEFGEFFHLVARTRRGIAQTLRLRKIHGLAIESVGCPLGPAGEYESDLLVEKLNQVREQIKKTDNLIKDFCLEFDEYSYLLTIPGFGPYISARVLASIGDPFRFKNRKQLIKMAGYDLCAERSGRTSDKAIPVISKKGNGELRYALYQAAKVASARVDLFRTYFTKLLRGRERERGIKTKMCVKLAAKMLVIAWTLMKKREPFDPAYLNIE

SEQ ID NO: 487273 - protein, 321 aa, unidentified
MQFLGLDISKETIDAVVLDLEDAAVWRKISNNAKGIGQLKRWLKNRHVGEVHVCMEATGSYYENVAESLVDDGFLVSVVNPAQIKAFAQSMLARTKTDKVDALIIAQFCRSLSPAAWIPPTPEERQLRGLMRFCSNLKETRASYQTQLQTPNILPTVQRSIEDLIENLSEQIQEIERQIDRLFDDNPPLRKRRDLLTSISGIGDSTAALFLAECPHLEEFADGKALAAYAGLSPRIRTSGTSVRGRNGICKIGNAWLRKGLWWPAIVAMTHNPRLRAFAQRLREAGKPNKKIIIAVMRKLLVIAMGVLKSGRPYDGALANS

SEQ ID NO: 487274 - protein, 340 aa, unidentified
MKEIVTVGVDIAKNVFQVHGVDAQGVVVVRRKLRRSKVSGFFESLPPCLIGIEACATAHHWARHLMALGHEVKLMPAAYVKPYVKRQKNDAADAEAICEAVQRPTMRFVPVKSEEQQGVLMLHRARELLVRQSTMLINALRAHLAELGIATRLGPMGVKDAVAVIEGIDQHLIPEIVQHALSPLCDQLRHVHTKIEEMDRQILEWHRSSALSQRLATIPGIGPVTASAIAATITDVSSFRSGRQLAAWIGLVPRQSSSGSKERLGRITRQGDPYIRRLLVIGATAVLRFSRKSNAASTQWARQLLERKPGKVAAVALANKMARIAWALMTKDTSFRSAMS

SEQ ID NO: 487275 - protein, 371 aa, unidentified
MGWSAPHPGVTLGATTNRKECRMRTKPKPNATAYGIDIGKKVFHVVALDADGRPLQRAKFSRETLMNFFEAADSALIGMEACAGSQWLARKLAAFGHDAKIIPAKFVKPYVKSNKSDTIDAEAIAEAVTRPTMRFVQVRSEARVDLQALHRIRDRLIRNRTGLMNQARAFCIEYGLAMRTGAGGFHADIRRHLADSENDLTGTMRALLTDLLDDLAHIEKRVAELTKEIEAIAHSNETVRRLLTIPGIGALGATALVAAAGDGRQFRKARDMAAWLGLVPAEHSSGGKQTLLGISKRGNGYVRRLIIHGARSCFLHLHRETHALGRWLSGLEERTHRNKAVVALANKLTRIAWAILTRPGENYLRTKGAAA

SEQ ID NO: 487276 - protein, 412 aa, unidentified
MDLFAERCAGIDIGKADLKACVRTPGARGGRRSETRTFATTTAGVLALQGWLTERQVTLVGMESTGVYWKPIFYPLEDHFECWLINPQHIKKVPGRKSDVSDAEWIARLVETGLVRASFVPPLQIRVLRDLTRYRTSLLRERTREVQRLHAMLEDAGIKLAVVATDIMGKSGRDMITALIAGQRDPHVLSDLARRQMRTKIPALTEALDGRFTDHHALLCQMMLNRIDGVDATVAALDEQIAAATECFAETIDRLSAIPGVARRTAEVIVAETGADMSRFPTAADLASWAGMCPGNNESAGKHFTGRTRRGNPWLRGALGTAAAAASHTQGTYLSERYHRIAKRRGTKRALVAVGHSILQASWHIMHNQVDYVDLGADHYIRLGDPARRASRLVQQLRQLGYPVVLPDRAVT

SEQ ID NO: 487277 - protein, 462 aa, unidentified
MATKKKSTKKLEKNPFAGLPLMNLNAAGIDIGNAAHYVAVPADRDIEPVRKFDCFTADLRRLADWLEQCGIETVAMESTGVYWIPLFQILEERGFDVKLVNARHVKNLPGRKTDMLDCQWLQKLHTFGLLNNSFRPTDQICILRSYWRQRENLIAATSTCVQHMQKALTEMNIQLANVISDLSGYTGLAIVRAILNGERDPQKLAELRHERIQATKEEIAKSLEGNWREELLFNLRQSLEIYDLYQQKIDDCDRQINRHMQTFQSKVDQTVIDTASKKRKKASGNVPHFDLPSELHRITGVDLTRINGINAVTAQTIISEIGLDMTKWKTEKNFASWLGLCPDNTISGGKVLKRGTRKVINRAAIALRMAAHALLRSKSALGSNYRRLRTQLGAPKAITAMAHKLARLVYRMLKYGSDYVDKGIAHYEAKYQQSKLAWLKKKAAELNMTLIPVAHRPRLSSI

SEQ ID NO: 487278 - protein, 366 aa, unidentified
MKKISTVATKQSRNFREQKLTIGLDLGDRSSWYCVLDEAGNVVLEQKLSTTPKAMKEVLGAMPRSRIALETGTHSPWVSRVLSELGHEVIVAHARNVRLIGESRRKDDRLDARTLARLARIDPQLLAPVQHRSAQAQADLMVIRARAGLVRARTSLINTARGLTKSYGERLRGCSPRNMNAEKARPLSPELQAALEPLLAAIEALSERIYEYNQQIEKIAKESYPQAARLKQVKGVGTLIALTYLLTLEDAQRFRKSRDVGCYVGLQPGRRNSGQSEPQLHISKEGDPYLRTLLVQGAHHILGPFGAGSDLRRWGLKLAERGGKNGKKRAVIATARKLAVLLHRLWVSGEAYEPLRNSNRAMLAAA

SEQ ID NO: 487279 - protein, 350 aa, unidentified
MLHAGLDLSRTRLDVCLLDEQGSTLQVTQAPPDTDGLRGLARQTAAYGQPVRAAVESMNGARFVHDQLELCGWQVAIADAAKVKGLAPLACKTDRIDARVLAELSRRDLVPEIWLPTPEVRAERERARFRLHLVRHRTSLKNRIHATLLAFGKPCPTSDLFGGGGRELLARLALPQPWAGSVAASLALIDDLEAQIDTCERDLRRLGADHPYIRLLVTTPGIAWVLGYTIAAEIGDIARFPSPKRLGGYTGLCPRVYQSGSRDHRGPLAKNGPTWLRWALIEAATHAARHPVYRDHHQRIRTRLGKQRGPKVARVEVARKLAEAIWHMLTRSQPFAPTAPARPPAHPLVA

SEQ ID NO: 487280 - protein, 360 aa, unidentified
MLIIGCDLHTRLQDIAMLDTRTGEMVAETLQHQEGEAEKFYRELQEKAVVGIEATGYTQWFERLLARLGHELWIGDPAEIRARVVRRQKTDRRDAEHILELMITGRFPRLWVPSPAERDVRQLLKHRDKLVQMQTSVKNQLHYLAMSQGVCRKRQLWSERGRAELQGLQLDPWASRRREELLELLERLGPGIQELDQAVEEEVAKRPEAVLLRRQKGVGPVTALAFVLTLGPVERFANSRKLVSYLGLNPSEDSSGGRQRLGHISKQGNEMLRWLLVEAGQSAARFDPELRRQYRRLKFRRGRNVAKVALARRRAVRLYWLLREARTKAVPEAGRRASHEAMVVVPQMATERGAAGPHVR

SEQ ID NO: 487281 - protein, 359 aa, unidentified
MIVIGIDPHMKSHTAVAVDAASGRTLAETTVGADAQGHEQLLLWARSLGPERCFALEDCRHLTGRLERHLLPRGGRLVRVPPKLMAAARSSARSYGKSDPIDAAAVARAALREPDLPVAALVGPEQEVRLLADHRDDLVGERGRIQKRLRWHLHDLECGLELPPRVLDRYVWLERVEAALHGLPPSTRRRIALEQVQRCRELTAEVRALEREIRSLMRALAPELLALPGCSALLAAELVGQVAGAARFSSDAAFAMHSGTAPLPVSSGNSTRHRLNRSGNRRLNAAIHMIAITQARMHPPAIAFMERKQSAGMSSREARRCLKRYIARTVFRTLLRSEQARAGEVVQAEFAAKELAVAV

SEQ ID NO: 487282 - protein, 331 aa, unidentified
MRFVGIDLHKRFLVVAVEDERGRPRKSRRFDCREVEEIRGYFKALGRFSAVIEASSSYRWLYELLEPLGDVILAHPLRLRAIVSGRAKTDKLDAALLAKLLRGGLIPPSYIPPRPYHELREITRARARLSRKRTEARNEAHALLTRANVHVPFVNAFCKAGQRWIGQVDLGASSNLIRDELLRRMDYFDEELALIDGRLSDVAQSFPEVEALQDVHGIGRYSALLVIAEIAEPWRFRDGRLVGAYAGLTPCVNQSGEHCYHGHITHQGSPWLRWILVQIAMHVVRRDPALGNFYQRIRKRSSAKIAGVPVARKLAAICWVRLMRWHQLQAA

SEQ ID NO: 487283 - protein, 316 aa, unidentified
MSCFVGLDVSIEETAYCARDSEGRVLGQGKTATDPDAIAVALERFGRPVRIVLETGRMANWLHRGLVARDLPAVCVDARQAHAVLSRMPNKTDANDAAMLAELARTGFYRAVRVKSEVAQAMRALLKARDLVLRQRMDLDNTIRGLLTSMGVRLPKGLALRPLLRLREDIIASLAELTRRLLAETKGSELCRRLMGVPSVGAITAYAFVATVDDPTRFARSRSVGAYVGLTSRRYQSGEVDYAGRITRRGDSMLRTLLFEAASSLITRASGGGALREWALRLRARVGHKKASVALARKLGVILHRMWVDGTKFRAA

SEQ ID NO: 487284 - protein, 330 aa, unidentified
MKKYNYFFGVDISKKTVDITCIVNGEMIHCRFTNDPDGMQHLLQWLKELNISFEQTVFCMEATGLYCFPLTEFLTINEIDIWIEHAAQIKKSTALSRGKNDKVDSKRIAVYATKNLDRLRLWRPVGATLQKIKHLASMRERLVDTKKRLITPIKEFEDLGNLVMAKLLSKTIRSSLAALDKDLKNTEAKIIEIINEDDKLKQLYKLITSVVGIGFVTAVNLLIYTNGFTVMKDARKLACYCGVAPFEYSSGSSIRGRTKVHFMANKKLKCNLHMASLSAVKLDADLKTYYEKKVAEGKSKLSVLNAVKNKLLARVVAVVNKQEVYVKKVA

SEQ ID NO: 487285 - protein, 370 aa, unidentified
MGEVSTIGLDIAKSVFQIHGVDADGAVVIRARVSRSKVLQFFTDLSPCLVGIEACPTAHHWSRQLQSLGHTVKLMPPSYVKAYLKRAKNDANDAAAICEAVTRPSMRFVATKSKEQQAALMLHRSRQLLVRQRTMLSNAIRGQLAEFGIVASTGRLGFNRLLEMVDGPEELGIPKVAWVSLMALAEQHQRLQVEIGKLEQCIQAWHRSSELSRRLEEIPGVGPIVATALVGTITDPHAFASGRHMAAWIGLVPQQNSTGGKDRLGGITKQGNRYPALAACCRCDGRDPARAETWHSQAAVAGASDRAKADQGCGRRACQQDGAHRLGDHDPWRALSCANPAHRLIAVERATTELGGANERNADIGGATDW

SEQ ID NO: 487286 - protein, 371 aa, unidentified
MAGPYTQNNHQESKRREISTFYLKIIGMKKLLKQVAGIDVAQQELVVSFGRMYDDLVPEIYANKTFANTDKGFESMAQWVNKMADPEAAVHYVMEATGVYHENLAYYLAAKGHPLSIILPNKISNYLRTLEVKTITDKTASVGIARFGLERKLDTWQQPKPIFKRLRQLTRERDQLVQTRTTIKNHLHAEQAGADPNKSSLSRIKKQIALLDKQEREIIEEMRSLLKQDEQVKQSVKLICSLPGVGFLTAAIVLAETNGFELIRNKRQLTSYAGLDVKEKLSGTSVKGKPSLSKKGNKYLRKAMHFPALAAIRHDERFKAIFIRLVARQGVKMKAVAAIQRKLLEMIYTLYKNNTAYNKDYLSSNQPLATP

SEQ ID NO: 487287 - protein, 387 aa, unidentified
MNPKIVQVGLDVHRTFSRVTARDAEGKVAWRGRLEHRDRWKLRAGLREWPAGTPVVLESTFGWGWLSDELLAAGLDPHLANSRKVAAWRDARGIAKSNRTDADLLSELPCESEPWWEVWLAPPEVRDQREWMRYRMTLVQIQTGLKNRIHAVLHRHGIVQEHSDLFGVAGRALLAGLAAAEDITLRTSGRVTLRGYLELLAQVRRMIAAVTQQLRKQLGETPVGGVLRSLPGISWILGYVIFAEVGRIERFASAKHLCSYSLLVPRADDSGEPTQDTPKGRHVGYVGRRTLKWAFIEAAHGAVRKSGRFRQMFDKRTDSGKRDRNRGYIAVARELCRLTYVVWSKQVAYTEHAPRRPGQDARSGRSKRRRRSRSGTGQPDGPMVVAS

SEQ ID NO: 487288 - protein, 349 aa, unidentified
MIIIGVDFHPEFQQIAWMDTDSGEFQEKRLMHREEAEQFYRALAAAGQKVRVGMEASGFSRWFERLLAELPIELWMGDATEIQRKRERKQKTDRQDAQHILKLMLKDDFPRIWVASWENRDLRQLLWHRHRLVQARTRIMNQLQAVAINEGLRCKKRLWRAGGRQQLESFPLGPWASRRRSDLLELLDGLSPTIAELSQAIEQEAEKRPAAQRLRTHPGVGALTALAYVLIIGEVERFQCGKQIASYLGLVPLEKSSGNRRRLGHITKQGSSMLRFLLVEAAQVTARSVPAWRNQYFRLMMRRGRKTAKVAMARRLAIRLFWMWRQGLEYEELVKFGSHAGQPGNPDGV

SEQ ID NO: 487289 - protein, 346 aa, unidentified
MRTIALDVHTGKSQLCVADGDGTILLERTVATNAEELRKAVCAVQGPKRVVFESGPLAGLIQDALEGVVEDIIACDPTQNALIAKAEDSNDERDARRLSLLARNGSLQRVYVPSKPFRTLRSLVCYETRLTRLVCEYKLRIKAFFRSQGVAYRGRGIYAVKNREEGLNAFTAGAARFQIESLYRMLDTTRKERVRLRGELRRITKPMPVIERLQSIPGIGPVVARVLVAWIVDPGRFQSRGALCSYAGLALRQNFTNWKATGRAHASKRGQRDVKRVLFLASRAVLRIKTSALAQRYQARREAGWEDRKAIRDVARTLLLMAYHVWKTGEVYDHGRVTVPGSPRAR

SEQ ID NO: 487290 - protein, 400 aa, unidentified
MSKRKAQVWAGVDAGKGHHWAAVVDETGATLWSKQVDNDESAILTALGEILELADQVHWAVDISGTSSALLLALLAAHGQRAVYVPGRTVNRMSGAYRGEAKTDARDAYVIAETSRQRRDFATIDVPAQLAADLALLTAHRSDLVADRVRMINRLRDVLTGVFPALERAFDYSSHKGALVLLTGYQTPAAIRRRGRARLTAWLANRTVRGADTVAVTALEAAQAQQTSLPGEDVAAQIVADLATQILALDDWLKRVDKQIRETFRGHPQAEIIESLPGMGPILGAEFVVAAGDLTTYADAGHLASAAGLVPVPRDSGRRTGNLHRPKRYSRRLRRVFYMSAQTSIIRDGPNRDFYLKKRGEGCKHVQAVIALARRRASVLWALLRDNRVFTPTQPVPQTA

SEQ ID NO: 487291 - protein, 430 aa, unidentified
MGLIVPTTLHPAREDQPLPYEWFVGIDWGSQRHQVCVLDRDRRQVGERVVDHDGASLAQLADWLWTLSGGQPQRVAVAIEVPRGAIVEGLVERGFHVFAINPKQLDRFRDRHSVAGAKDDRRDAFVLADSIRTDQPSFRRLQLDDPQLLRLRELSRAEETLLEDFRRSANRLQDQLHRYYPQMLKLCSAADESWLWELIDLAPTPAHAALLSEEQVQRVLKAHRIRRVKAQEVLTCLQAPALPVAPGAAEAAQAHCAFLLPCLRVLAEQLQACSQQVSALLRALAQEPGEGEGPSDVAIVLSLPGVGRKITAWLFAEAAQPLAERDYQVLRTHGGVAPVTKQSGKRRLVVMRHGCNPRVRHALYHMARVAMQHDAHFSSVYAALRAKGQRHGQALRNLGDRLLRILMAMLRERTCYDATRIRREPVVQMG

SEQ ID NO: 487292 - protein, 430 aa, unidentified
MTKPQLTPTQGILVAIDIGKTRNEVLIEIPGQARRRRLTVLNTRADYDRLIDLLSGLGQPVTCAFEATGNYHRPLAWRLLQAGFTVRLISSLALARTREALHNGWDKNDPKDAQVALHMLRIGASQHYHDPLAAGLNDIQEVSKTHEAISKAKTEVLHRILTHHFPLYFPEIGRFRHNSRSDWFFAFLDRFPTPGSITALSKEAFIAAAWGVVGRKVAKERLLGDIYETARASIGLPIPIDAPAVRLFRLVIAEARSLIEQRNALEAMAIELLHESPDYKLLCRIPGVGPITALTILAEAGDLRRFGHHRQFLKFCGLDLATHQSGAFRGQTKLSKYGNARLRRALWLAGQVAIRQKENSFRDKFERTIARDRHNADLRRKALTAITAKMARVVHAIIKSGADYRPFVEGPVPGGRTSLSMGREGATATL

SEQ ID NO: 487293 - protein, 386 aa, unidentified
MTQPYDPTKPPVALEHDGTLVVVIEMSQASWLVAAIVPGVARRPLQKLKPDQEALLRLLTRWREEAAEAGKPVTRTALAFEAGRDGFWLARWLRARGVEAHVIHANSVAVAREHKRAKTDRLDTILLLRAFLGWLRGEPAHCRMAAIPSLADEDDKRPSREREHLVGERTRLVNRLKAVLVRLGIRGFKPTLRKAAGRLDALRTPDGEPIPPNTLSEMRRDLERLRLVREQIAAIEAARLERLARAPATGPDAMVRLLARVHGLGIETADMLVREVLARDLRDRRAVARYAGLTGTPDESGRRRREKGLSKAGNARVRRGMIQLAWRFLLFQKDSALAQWYRSRTESARGGVRKVLIVALARKLLVELWRLVVAGQVPRGVLLRPA

SEQ ID NO: 487294 - protein, 324 aa, unidentified
MLPTLGIDISKDSFHLELSLNEKLRHRKFANRQEGFGELGVWLTKHKATQVHACLEATGPYSEALALYLHQQGHTVSIINPVQIKAFGQSELRRNKDDRPDAGLIRRFCEKQRPDPWMPPPVHLRELQALTRHLENLIETRQQQINRLEATNTKNVAKSLRKLVAHLDAEIKRTEQQIDDHVDRHPDLKQQSELLESIPGVGKRTAAKLLAELTDISQYKSARQVAAYAGLTPRNNRSGTIRGKTRLSKTGNARVRKALFFPAIVAKRHNPIVRAFCERLSSHGKNKMQVIGAAMRKLIHIVFGVLKSGKYFDPTHELLLNSVS

SEQ ID NO: 487295 - protein, 420 aa, unidentified
MNSHLKVDLGERFERYVALDIHKHYVMVGAVNLRREWVLKPRKISMAKFRKWVRKNLRQGDAVVLESTSNAWDIFDLVDPLVSKTVVANPHKVGQIAQARVKTDKLDVERLLVLLVANIVPDVWVPPHHVRDLRSLVSFRWRVNKQIGMSKNRLQSYIQRFNLTPPEGKLWAKKNAGWWDQQTFPDLVEFQIQHDLEILAHLEERKAAIDQKLAELSNTEPWASDAVFLLQIPGFGVIFSMIVLSAIGDVSRFPSAKELVGYSGLCSGVHISGEKNQEKPITKEGRKELRWAMVEAAWGAVRSDPYWKAQYNRLKKKKHPNKAIVAVARRLLVGIWHILTKREPYHHADDETLAYKMLIWSQVMDEKARRGMTRRQFAKYGLLRLGTGQDIERIIRSGLPRRLAPAEEVLALKPELRPPR

SEQ ID NO: 487296 - protein, 408 aa, unidentified
MEVMHARCAGLDVHKDSVVACVRIQEAATAHYVVETFGTTTKALLALSDWLSQHEVTHVAMEATGVYWKPVWHVLEDSFELVLANAMHIKNVPGRKTDVNDARWIADLLAHGLIRASFVPPTAIQAMRTLMRTRKQLVRERAQHVQRIQKTLEDANLKIASVVSDVSGMSGRAILRALIAGETSPEKLLEVTTGRLRADRKTLIEALRGRIRSHHRFLLKLHLDQIEGLEKSIEAVDAEVGSTLDPFRDKVARLITMPGISDVTAQVIVSEIGIDMSRFPTAGHLVSWAGLCPRNDESAGKRRSTRLRQGAPWLKATLNQAAWSAARSKSGYLRAQFLRLKSRRGPKKAIMAVAASMLTAAYYMLRDDVDYRDLGTDYFDRIDRSKTAKRLVKRLKDLGFTVEIAAAA

SEQ ID NO: 487297 - protein, 416 aa, unidentified
MKQTQNTRGYERYFAIDTHREYHLVGGQNEDQEWVVNPRRVSIEKFAEWAQKNIRAGDIVVLETTTNVWDTYDIVSPLAGRVLVANAAAVGEIAVARVKTDTKDIERLLKLLFGGIVPEVWVPPMHVRELRAFISYRNRLVKMATMIRNRLNSLLHKHSLMLPEEGILNQAWWDAQASISALEKMQIRQELGLLDEIKKLQAAVNEELEKQSTGELWGKQALQLMQLPGVGVIVAMTVLSAIGDISRFEDAKHLVGYAGIGAGVHDSGKTHKEKHITKKGRKELRWIMVEAAWRAVRMSPYWKEQYEKHLRRMRKPTQAIVAIARKLLVAIWHVLTKEETDIHASEDDLAYKMLLLSWSLKANVRKGLTYKQFAKYALMKLGIENDITRFVRREVPRRLAPREEVLTRMAELGIAQ

SEQ ID NO: 487298 - protein, 371 aa, unidentified
MFHVGLDIHTKRISICALDEKGQVVHRSQVRSIQDLLRVLTDLPDRFQVCYEASCGYGHFHELLRPLATRVVVAHPGQLRLIFRSRNKNDRNDAERLAKLLYLGEAPAVHVPSADVRTWRELINCRSQVIAKRTRAKNAARALLRGAGVTPPKHPGLWTKEGLAWLRRLELPTASQQLRRDLLLEEMETLLRQVQRIERQLAQQAQRTPAVVRLRSIPGVGLRTAEAVAAFIDDPHRFPNAKAVGSYFGLVPCQDQSGDRNRLGHITRQGAPVVRQLVAEAAWQARRRSPTVRAYFERAQRDDPQRKKIALVATAHYLVRVMWALLKRGTDWQENPALAKAPASASCGGPAAERGEGEREKERGERMSESA

SEQ ID NO: 487299 - protein, 439 aa, unidentified
MEVVYRRCCGLDVHKDSITACVLVLDGKGQREVRTKEFQTYWKELQRLKLWLYASNVECVAMESTGVYWKPVWNVLEGHFPLLLANPYHMHNIPGRKTDQKDSEWIADLLAHGLLRASFVPPRPVQELRDLTRYRVKLMGEYNRVHNRIAKVLEDANLKLGSVVSDILGGTGRAIIRAIIAGEDRPEWLADKALSALRNKREQLRLVLRGQVSDHHRYLLQELMQDVERIEDKISRIEAEIVQRTMPLQETLERLTTIPGVDWITAWTLVAELGTDMSVFPDADHAASWAGLVPGNFESAGKRKSNRTRHGNCWLRRALCQSAWAVSHKKDCYLTAHFYRRAARAGVKKAIVATAHQILIVAFHILRDGTTYQEHGGDYFDRLNPHRTQRRLTNRLQQLGFEVVLKPRKVPDPQPLPSPSGRTPSCQCAKRGIGCKHRH

SEQ ID NO: 487300 - protein, 377 aa, unidentified
MSKVRFIGLDVHAETIAVAIAEPTGEVRPVGVIPNRPESIRKLVKKLGPAEQLRVCYEAGPTGYVVYWQLAALGVPCEVVAPTLVPVRPGDRVKTDRRDALKLARCYRAGDLTPVWVPDAAHEALRDLVRAREAAKKDQLRARHRLGKFLLRQGRRPPIALKAWTQDHLTWVKSAVHFDHPAQEATLLDYLHEVDHVAGRIARLERAIDAAVQTAPGHIRAVIEALQALRGIALVSAVTIVAEVGRLSRFVKPRQLMGYSGAVASEDSTGERIRRGGITKTGNAHLRRIIIEAAWAYRHRPAVGATLRKRQAALDDEVKAIAWKAQHRLYGRYRILTAKGKNKQQAVTAIGRELLGFIWAIGITVEAKGHTMQSTTA

SEQ ID NO: 487301 - protein, 385 aa, unidentified
MTFAYWGFSRSARFYQSNVFNDMFASCDKKTTLFVGIDVHRDTHTAVGVSPFGEKLFELTVGNYEKDFRLLTEKVDEVSEKAMLSPSYGLEDCHSYGERLSAHLVSEGLRVVSVPPILVDERRKHETHPEKSDPLDALGVARVMIQRIDSLPVFTLSEESKKAKQIKELSMDREFLVCEQTRIKNQLHTLIHRLWNTEYRVKFKDPFSKKALVFWNKHVPKGSDSFLVRSMKRKVKRIQDIKKEVVELEGELATLIKTSGHTLTTASGVGIVIAAEIVGEVGDINRFHSPGALAKYAGCAPRECSSGKTSRHRKTRSGNRRLNRAFHRIALSQISRMGNPAAQKYFKKKVSEGKSKSQALVCLRRQLVNVVWMMMKHKTPFRLPT

SEQ ID NO: 487302 - protein, 408 aa, unidentified
MNAVGIDVSKGKSMVAALRPMGEVALLPQEFLHTAPGLDQMAHAILALGEDTRVVMEATGRYHEPVAAALSAYGIYVCILNPLYIKQSGAGSIRKVKTDKADSLKIAKYGLDNWVDLREHTAMDTIRQQLKLCSRQYNIYMKTEVSLQNNLISLTDKTFPGVNELFSSPARADGHQKWIDFVMTFWHCDCVFRISEKAFTARYEKWCKRKGYHFRAEKAAEIYAQSCELFVTLPKDDNTKLLITTAAQQLLAGKMTLAALRAEMTRLAQQLPEYDTVRAMYGVGETTAAQLMAEIGDVRRFPRRSSIVAFAGVDPAITQSGKHEVQSTATTKRGSPHLRKTLYHIVCTYLRKSPEDEPVYQFLDKKRGEGKPYFVYMTAAQNKFLRIYYARVKECLEAFDTQQNTVQD

SEQ ID NO: 487303 - protein, 352 aa, unidentified
MGTNKEKIMTYYAALDVSLRSVCLCIVDAEGSYCFEGKLPSEVEDIARCLEGFDGEIELVGFEAGMLSQYLSYGLTAAGFNVVCLESHHVKQSLKAMRNKTDRNDARGIAQLLRTGWYQPVHIKSVESHQVRVMLSSRRVILRKCIDLENELRGLLRIFGIKLPSKLSHGAFDEVVRKPIEANPALTRALIPMLDLRGTLYSAYVKLDKEVRAMAHEDTVCRRFMTVPGVGAITALTFKAGVDDPTRFKNSRLVAAHFGLTPKRHQSGEVDYDGRISRAGDAEVRCALYVAAHVLVTRHGEWSSLKAWGIRVTRTKGHRKATIAVARKLAVILHRMWIDDTDFRWHSENRAA

SEQ ID NO: 487304 - protein, 315 aa, unidentified
MAMPVPVSKPIVGVDVAKNELVIYHAELDLLEVIPNNKTAIKKWLKALPGTVAVAIEATNIYHLEFADLAYEAGCVIYMVGGYELSHYRKGVNIRAKTDAQDAKLLARYLKNEADELRPWTPPSPLYRQLLSLFRRRAALVQARVSLTQSWANEPLLKASFTEQVKSMQKLEGLIEKMIGDRLKEAGLSDQLKRCLKVEGIGFLTGARLVTSFQRGDFRNADAFIAFLGMDLRVSKSGQKDNRRSLSKRGDSEARRLLHNAAMAASRTAAWKEFYQAQRARGYSTTQVLVMLARKLARVVFALLKGQSEYQPKVG

SEQ ID NO: 487305 - protein, 366 aa, unidentified
MEVTTVAIDLAKNVFALCGADAKGRVVLRKELRRAQLPDFMRRLGPCVVGMEASGGAHYWARQLTALGHEVRLISPSLVTPYRKVNKTDRNDAEAILEAVTRPTMRFVAVKSVAQQDLLALHRVRSQLVKARTALCNQLRGLLRERGVVVRIGPTALKRALPRALADESNELSGEIRELLGEMSQWLRALEERIASCEAKIAHQFKRDERCARLAKVPGVGPLAATALVAAVGNAQEFKNGRELSAFLGLVPRQHSSGGKRVLLGITKRGDRYLRTLLIHGARSALRWCTLKGDKPSRGAARIKTQGGPNVSAVAMPNMHPRVLWALLSRGDRYRSDSAITHTVLRSGSPSPVERARGAKLLLTQN

SEQ ID NO: 487306 - protein, 358 aa, unidentified
MRKGNTKSGNGKQVVVAAGDRVFVGLDVHKKSYHAAVRVNGVEVRTSVLAPRSEAVLIFLAPYRSGRLHVVYEAGPTGFGLARALRQAKVPTDVIAPSKTPRAPGQENKTDRLDCRELAFYHEKGMLRQVAVPTEEQEQDRQLIRLRDQVVDARRRVKQQIKSFLLQHGQAEPAGLAHWSKGSVQALRDMVLPATLRFCLDVMVMDLAHLDQQLGQVNNAIENLSREPRHASMTARLCKHPGVGVITAMQYRTELFRPERFANQRQVAAYLGLAPRVSQSGERHRTGPLLKAGRGRLRALLVEAAWRWIQVDDDARVIYRRLVQNTGQPNKAITGMARRLAIRLWRELVPPEEQDRAG

SEQ ID NO: 487307 - protein, 417 aa, unidentified
MSQRFFGFDVHKNFIVAAAVNAHQDVIVRPHKISSADLEDWVQKHLTQNDEVVIEAMSCSWVVYDLLVQYASRVVVAHPLHVKLIAASFVKTDKRDAIALARLLAANILPEVWVPPRHVRELRSLIYHRCNLIHRRSSAKCRLRGVYQQYRIVAPEGREAFEPEYWDKLDLPPVEKLRVRHISDDIQRLTRQLQETEAMISQLSVQEPWVKDVPYLVQLPGISFITAMTILAAIGEIGRFPSAKKLVGYAGLGVRVYSSGETTKTGGITKQGRRELRYAMIEAAWNAIGNSPFWKQKYEQLARRMDNQKAATAIARKLLVVIWNVLTRHELDREADLEVVGRSLWIWGSKNRLATSQGMKRIEFAGKQLHQMGIRLEKITYGSTVYKVPVSEPAEIPGDPEKSERRPKQVELACTVT

SEQ ID NO: 487308 - protein, 440 aa, unidentified
MAMRKRNEEVFPNAAGIDVGASSHWVAVPPHVAEDSVREFGAMTDDLNGMADWLLACGVDTVALESTGVYWIPVHEVLEQRGLKVWLVDARQLKYVPGRKSDVQDCQWLQKLMSLGLLRAAWRPAGEVCVVRAIVRQREVLLTEQARWVQRMQKALVQMNLQLTEVLSDIMGMTGEAIIRAIVAGERDPQVLARLRHRRVKASSEDVVKALTGNWREEHLFVLGQALAMYDDIARRLTECDAKLQTLLAERGQTQLDLGQAPRSGSKLATAFGLRQALANWAGVDLTRINGLGVTVVMKLLSEIGPDLSRFASVKHFCSWLGLCPGTKISGGKVLASSTKRSANRARHALKMAAMTLSHSNSALGAFYHRLCARMDKPRANTAVAHKLARLVYFMLTRGEQFVDQGQQRYEEQQRQRSITALKRRAAALGFQLQPTAVAA

SEQ ID NO: 487309 - protein, 373 aa, unidentified
MSVTTKYVGLDVSKKKIAVAIADEGRESSRYWGVIPHTKEALRKLVNQLRTEGVILKACYEAGCTGFEMHRWLLEMNVDCDVVAPSLTPIKASDRIKTDRRDALRLAQLLRAGELTNVYVPTVEDEAFRDLVRAREDSQQDLNRQQQRLGKFLLRQQRFPPDGVRKGTTKYEEWLDTVRFIHSSQQFAFEEYRQAIRETKQRLARYEKEIERQAETSSQAPLIKALQALRGIKVLTAATIAVELGDIAGRFRNPSFMMSYVGLVPQERSTGDSRWQGSLTKAGNAHARRVFVESAWSYRYTPGVRRALRERLAGLPPSIEAISWEAQVRLHKKFKMLKSQGKPDGVVVAAVARELVGFVWAIAQELNKISKAG

SEQ ID NO: 487310 - protein, 321 aa, unidentified
MSNKKSRRSWIGIDVSKQLLEVALHKSDYHFRCPNAPEKFPALIAELIACRPARIVLEATGGLERPLLQALQAVGLPVVLVNPRQIRDFAKALGLLAKTDRLDAQVLAHFAAAVEPPLRPLKTSEDSELDALMGRRNQVSDMLVAEKNRRGSAATKAARADIEAHIEWLEQRLKALDKQLKEQLKHCVAWQRKDQILQSVKGIGFVTSVSLLADCPELGQLNRHQIAKLVGVAPLNRDSGKQRGTRHIFAGRAQVRAKLYMATLTAIRCNPVIKAVYQRLITRNKLKKVALVACMRKLLTIINVMIRDNKCWNVNAQPLSA

SEQ ID NO: 487311 - protein, 423 aa, unidentified
MKYALIRVLPEVPSGGVCAGIDWASASHAACVVDMGGKVKDQFTVAHDKAGIAGLIARLRAAGAAEAAIERGDGVLVDMLLAAGLTVVVITSRQVRNLRSRYVASGAKDDRFDAYVLADSLRTDRARLRPLVPDGPATAALREVVRFRKELVRDRVRAANRLRAHLETAFPAAAGLFSALDSPLSLAFLAAFPSRQAASGLDEQAIAGWLAALPHRGRTAPAAVLAARLAAAVPGTGDDAAQGALTVQMAGAAADAAARIRALEADIAAQLAAHPDQHIFTSLPRAGTVRAARLLAEIGDCRSRYPDPQALAGAAGVSPVTRRSGTWISHHFRWDVNAHLRDAICDFAADSRHASPWAAEIYAAARARGKDHPHAVRILACAWTPVIWRCWQDGTAYDPAKHNALHAALTRQAQAASQNQQDQ

SEQ ID NO: 487312 - protein, 347 aa, unidentified
MKFYTNMHKFYCGIDLHARSMYLCILDQEGNTLVHRNMPTNGDQFLKAIAPYREDVVVAVECIFTWYWLADLCHREGITFVLGHALYMKAIHGGKAKNDKIDADKIARLLRSNMLPQAYVYPATMRATRDLLRRRNHLVNKRAELLAHIQNTNSQYNLPAFGKNIARQSNREGLSERFIDPCVQQSIELDMALIDTYDQRLTELELYIVRTAKGHDANTFYRLRSVPGIGKILALVILYEIQDIGRFEQVGHFLSYGRLVKCARESAGKRYGSSGAKIGNVHLRWAFGEAACLFLRHNPEGQKLHQRLVKKHGKAKALSILAQKLGRAVYFMLKRQQAFDMNKIIQR

SEQ ID NO: 487313 - protein, 354 aa, unidentified
MATTSKQKTFALASLGIDIGKEVFHLVGFDSDGKIVLRRKIKRLALVSELEKLPPCIIGMEACLSAHFVSRTVRKLGHAPRIIPAIYVKPFVKGQKNDYNDAEAIAEAALRPNLKFVTEKTQDQLDLQALHRVRSRLVSRRTATINQIRAFLIEQGITVRTGAHALRNSLFAILENRKAEISPRMSDLIVGLYEDWLGLDERIETITGEIERISKCEVNCQRLMSVPGIGPIISTAVVAAIGTGDAFGRGRDFGAWLGLVPRQYSTGGKTVLGRISKRGSKYLRTLFIQAAHVILMRPHNWQKFSFGPWLTEAATRLHRNKLATALANKLARIAWSVLANQRAFDTNRDEVTAI

SEQ ID NO: 487314 - protein, 322 aa, unidentified
MDEHGKLVKETKVASDPGALNACIRNMPGVVEAIGIEAGPLSQWLHKSLTDLGLPVVLMETRQVKAALKAAPVKTDRRDAAGLARLLQMGWFRPVHCKSLSAQELRVLLGARRSVQDAAINIEMSIRGMLRNFGLRLGRIGKVSFEDRVRELTDGNKLIQLSIEPMLRARAALRSELVRLERMARDITREDPVCRLMMTMPGIGPVVALTVRSTIDDPGRFRRSKDVGPSIGLTPRRYQSGETDIIGGVTKAGDLDMRTALYQAATVVIHRSKKPTWLRAWAERVVRRRGVKRAAVALARRMGVILHRMWVDNTEFQAARMA

SEQ ID NO: 487315 - protein, 418 aa, unidentified
MNKHSKSSQRSEPTLKRTKARGPVQRDAKEVLAEVLGKLTGKLDARAVSTSAKENRKGNTVGPNRDRLTVGVDRGDRWSQYCILGLEGETLAEGQLRTTQEDVREFFQALTVARVVIEVGTHSAWVQDVITEWGHEVLVANPRLMEGSKRRKRKSDRIDANKLARLGRVDPQSLYPIRHRSREVRQDLVVLRARDALVSVRTELINTTRGLVKSMGTRLPRCSSPSFAEKVKDAIPVEVREALLPLVQLTETVNDCIARYDQKIEELGQKKYGHTTLLRQVKGVGPITSLAYVLTLEDPQRFSSSREVGPYLGLVPKQEDSGDSQPQLGISKTGDRMLRRLLVGSSQYMLGAFGPDTHLRRYGLRLCERGGKNAKKRAVVAVARKLAVLLHHLWVTGDVYEPLHHTGAETRTAQATAA

SEQ ID NO: 487316 - protein, 359 aa, unidentified
MQTQSNKIDFNGQNIYVGFDVHLKSWTVTIMTERLTHKTFTQPPKPEVLHQYLLKTFPGGTYHTAYEAGFCGYWIHNKLIKFGINSMVVNPADIPTTGKEKVMKDDPRDSIKIARSLRNGDLKPIYVPSITTLEDRGLVRMRATLVKDLTRYKNRIKSFLYFHGIEYPEAFCKSSTHWSNRFNKWLEDIEFNDLTGKATLTSFLGQSKSLRVSILQVTRQIRELAKTDRYKMQQELLRSIPGIGLLTAMIILTEIETINRFANIDQLCGFIGLVPSTSTSGDKEVIGDITPRGHSILRSVIIESAWVAARMDPALNKCYHDYCKRMEPNKAIIRIARKVSSRISFVLKNNQPYVYSIVK

SEQ ID NO: 487317 - protein, 337 aa, unidentified
MKYFIGLDVHKKKTTYVVLDKIGNTLLEGETATLYSELFERLKTYLKSSVIGLEACTSYYTLYQSFLKNNYNIKVANTIQLRQLIAKNDRLDAKRLAEVLRLGTFPTSYIPDEKIQRIRSLVQVRHSLMEEKVRCNTRIQAFLDRNGVVMPPHKAFSKKWRNALMQYMGSGLVSMELRHEYDHFVFLEKKTEQLDQELQGYAHKNWKKEYQLLQSITGIGPVIACYAIAHILPIERFQSNRKLRRYAGVVPTSKQSGNKVSRGRIPKTSSRKLLRWSLIQAANTIGKTDTNLGRYYRRKKKQKKNAGIAKIAVASSLIDILYKVLTTKQPYNPKNTK

SEQ ID NO: 487318 - protein, 391 aa, unidentified
MPEDAPRPAQAAIRTDLGAIFVSLELSRRTWLITSLSPGAGEKMSKHSVPASDVSGLLRRFAELRRKAVARTGRDFPIIVIQEAGLDGFWIHRVLQSEGIESHVVDAASILTSRRGRRAKTDRIDGEPLVRTLMAFKRGEPRVCSMATAPTPQEEDRRRVCRERRTLVGERVRHVNRIKGLLFAQGVFGYEPLRKGRRERLEDLRTGDGRPLPVHLKAQIIRELDRLEVVLEQLKTVEAERDALLKPANDEMPSPAAMLAQLKGIGSETAVLLWSEGLFRRFDNRRQVAAYAGLAPTPWQSGSIDHEQGVSKAGNPRLRATMVELAWLWLQNQPTSTLSLWFHERVQRLGGRMRKTIIVALARKLLIALWRYTTAGIVIEGAMMKPSPATT

SEQ ID NO: 487319 - protein, 336 aa, unidentified
MLLDKKMSISNVFIGIDVSKERLDCYCRPTGITSSYRNTPTGISDLIKWAQAQQPQLIVLEATGGLERPLVSEIFAARLPMVVVNPRQVRDFARAIGQLAKTDQIDAAVIAHFGEAVNPEVRPLPDQLTQQMDALMTRRRQLVQMLAAERNHLVSAPAHVQNYVKEHISHLEELIKKLDQDIDQMITSSPIWKTKDDLLRSVKGVGPVLSRTLLAELPELGQLSRQEISKLVGVAPLNNDSGKYKGKRSCWGGRASVRGPLYMATLSATRCNPMIKEFYQRLIAKGKAKKVAIIACMRKMLITLNAIVKSNKPWEANFAQSIGHRRGITTGFLVAP

SEQ ID NO: 487320 - protein, 426 aa, unidentified
MKNTQNEKISQIKITTLVVGVDVAKETHYARAFDYRGIELSKLLRFSNTAEGFQRLEEWMQNISQQHKKTDIIVGFEPTGHYWFNLGDYLKDQGHKLAIVNPFHVKRTKELDDNSPTKNDRKDPKTIARLVKDGCYREVYIPEDVYQELREAISERDRLVQRMSSISNQVTRWLDIHFPEFNTIFKDWRRQAALQVLKSFPTPEKIIAAGAVKIERTWKESMKRTAGLKKAQELVKAAGASIGRKTGLTAAEASLQNLLNEHDLYSQQYQQLEQLMLELLQQVPNAEKMLDIKGVGLITAATFVGEVGDIRRFQDPRQIQKLAGFNLVENSSGKHKGKTRISRRGRRRLRHGLFMAMITILATNPEFRQLHQKNITRENNPLNKMQSIIALCGKLIRVFYALLRTGTDYSADKMLGDIEMGMKVAA

SEQ ID NO: 487321 - protein, 392 aa, unidentified
MVASVGIDVSKDKHDCFILNSEGEVLADVFTIPNNMDGFTCLLQKIRDCTTSQDKIRVGLEATGHYSYNILGFLLDNGLATYVLNPLRTNLYRKSLSLRKTKTDRVDARTIAAMLLSDVGLKPYTDTAYHNEELKSLTRYRFDKVKERAKLKCSVSRLVCILFPELENLVPSLHGASVYALLEEFPGAVQIAGAHLTRLKSLLTDASRGRYGRDMALDIRDAARNSIGSRMPAKSLELQHTIRLIRELDAEIEEIETEIQAMMDELHSPITTIPGIGCRMGAMILAEVGDFSRFESPDKLLAYAGLSPSTYQSGQLKNCYPHMEKRGSRYLRYAIYNATKYVCLWDPAFASYLAKKRAEGKHYNVAISHAAKKLVRLIFALEKSRQPYRLVA

SEQ ID NO: 487322 - protein, 364 aa, unidentified
MSDTYYIGFDVHKKRVSYCVKTASGEIIQEGELAARREVLRAWAGAQPQPWRGAMEATLFSAWIYDTLKPYAQQLDMAHPARMKAIACGKKKSDRLDARTIADLLRCNLLPTCYVLSPEMRDLRRLLRYRHLVVSESVRMQNKMAGLLMETGAPFVKAKLHGKKYFTQLLETLEEVPESVKDLLRMSRGALEMFESTQKQLVKRLLTFPTLQERVERLASIPGVGAITALTWALEIADPQRFPSIGDALSNCGLTSAFRSSAGKEQRGPLSKQRNAWLQSVLIEAAKLAPRWNSQLATVHEHELKRGHRNRATLQVARKLVAYLMAVDKSSKPFQLRSSPALEAPLAPKKKGKARRPPKVLQPA

SEQ ID NO: 487323 - protein, 383 aa, unidentified
MKKTQETLRIKDIIKEAILYIAFELSNSKWKLAFSDGSKIRYKAITAGNLAQLQVEIDLSKRKFKMIEDVRVVSCYEAGRDGFWIHRYLESQGIENLIVDSASLEVNRRKRRAKTDRIDVGKLLRMLLRYWGGEKKVWSVVRVPSEQDEDARHLHRSLENLKDERTMHRNRIKGLLVQQGIKVSNPSQKKFLAVLEKVRTWNGQPVPPELKAQVVREYERLQVVEGQIKALEKEKKERLKNPDTVSLQKVAKLASLYGIGSVSSWTFVMEFFGWRQFQNRREVGGLAGLAPTPYDSGKSLREQGISKAGNQRVRALAVEIAWAWLRFQPQSHLSQWYMKRYANGGKRMRRIGIVAMARRLLIDLWRYLEYDKIPEGARLRSAV

SEQ ID NO: 487324 - protein, 386 aa, unidentified
MHQATTLPVPEQTCSRGDCATLFVSLELSRSTWVATALAPGSRKMSKHTLVGGDGRKLLDLLARLKTRAEQRIAAPVKVVTIHEVGLDGFWIHRLLEANGVESHVVDPASIAVPRRHRRAKTDAIDGETLLRTLMAWQRGEPRVCSMTVPPSPSEEDRRRISRERATLLRERIQHTNRIRGLLFGQGITNYNPLHKNRRECLEELRTGDGQSVPVHLKAEILREIDRLELVLHQIGEVEAERDEMLRPAEASSPAALLMRLKGIGPEFAAVLYLEGLFRHFKNRRQLAAYAGLAPSPWKSGSIDQEQGISKAGNPRLRTTMVELAWMWVRYQPDSALSCWFRQRVGSERGRIRRISIVALARKLLIALSRYVTHGEIPAGAVLKPV

SEQ ID NO: 487325 - protein, 351 aa, unidentified
MERYLGGDVHAASVTFSVLDATGKQLRRDVVETNGKALIGYLKQIPGNLHLCIEEGEWSQWLHQILSPHVAELVVYRGQWKPGLKSDAIDAHGLAEKLRTGQIDRPVYKDARLFPALRDRARTYTMLTRDVARVKSRLKSFFRSRGLPCTGEAVFKPEERAKRARALPPATREAVDLLGRELEQLKALKAEAEVAMLQESHRHRIARILETAPGFGPVRVAQMLPVVVTPHRFRTKRQFWAYCGFAIVTRTSSDWVQENGRWVRAPVVQTRGLNFNHNPTLKMLFKGAATTVLAHAASNPLRESYDRQLKNGTKPNLAKLTVARNIAAIVLAMWKTEEPYDPRKIHPLAIG

SEQ ID NO: 487326 - protein, 352 aa, unidentified
MSEKVISEIAVVGIDIGKNWFHVVGLDRRGAIVLRQKWSRGQVGSRFANLPPCLVGMEACVGAHHLSRRLKALGHDARLMPAKYVRAYSKGQKNDFRDAEAIAEAVQRPTMKFVATKTAEQLDLQALHRVRERLVSQRTGIINQIRAFLLERGIAVRQGRLFLRGELPSILSAPSEALSPRMAQIIEELATDWRRLDERIEQLSSDIELLARKDAGCVRLMSVPGIGPVISSAMVAAIGTGDAFSRGRDFAAWLGLVPRQISTGDRTILGSISKRGNRYLRALFVQAAWVVLIRQKSWERHGLKLWIEAARKRLHHNVLAIALANKLARIAWSVLARGRGFEVTFAAPAKAL

SEQ ID NO: 487327 - protein, 344 aa, unidentified
MAGKVTETAVVGGVDTHKDLHVAAVVDQNNKVLGTQFFSTTRQGYRQMLAWMTSFGALKRIGVECTGTYGSGLLRYLQNAGLDVLEVTAPDRMERRKRGKSDTIDAECAAHAAFSGIRTVTPKTRNGMIESLRVLKTCRKTAISARRVALQIIHSNIISAPDELREQLRNMTRMQLIRTLGSWRPDASEYRNVTNVYRISLKSLARRYLELHDEIADLDVMIAAIVDELAPELIKRNAIGYESASQLLITAGDNPQRLRSESGFAALCGVSPVPVSSGKTNRYRLNRGGDRAANSALHIIAIGRLRTDDKTKEYVARRVAEGHTKWSNTLPEALYLTRSLYITA

SEQ ID NO: 487328 - protein, 442 aa, unidentified
MAMRTRFEVAFPNAAGVDVGSGQHYASIPPEREGEKVRQFGVFTADLEALAQWFTDSGVDTVAMESTGVYWIPLYELLERRGFKVYLVNAQYVKNVPGRKSDVLDCQWLQQLMSFGLLSASYRPEDEVCVLRAVVRHRDTLLREQGAQVQRMQKSLVQMNLQLPEVISDVVGVTGQAIIRAILAGERDPQRLARLRHARVKAGEAQIVRALQGNWREEHLFVLGQAVELFDAYQGQVAKCDVKLESLLGKMGQHDAMPEPTAKSRVKIKNAPKFDLHAALFRWCGVDLTRIDGLAVTTVLKVLCEVGPDLTRFPTVKHFCSWMGLCPGTKITGGKRLTGKTRYSANRVKQALKMAAMSLSHSKSSLGAYYRGLCRRMDKARANTATAHKLARMIYLMLTKGQAYVDRGEEYFEKRHRERVLASLKRTASRLGLQLVPTTQPT

SEQ ID NO: 487329 - protein, 387 aa, unidentified
MTATNESSKFKPRDYDIFVGLDVDKKKMVITCSDHGTMQRSLSLPYSAQQLLNYTHKHFPGQRLAFVYEAGPTGFGLHDELTAAQHPCLVVSPSMVPSAPRKRVKTNRLDSTKLSEGLRGGQLQGIHVPPQIYRELRHLVQLRDTQVAQLKATKCRIKSLLLYEGLPFPAANGKWSAQALRALETIPCNASVRFKLDRLLDTLQFHFLTAAKVQKEIRRFCKQAPGLQQAITFLTSLPGVGTITATHAVARLGDWRQIDNVRQIAGFLGLVSQEHSTGDKENKGEITRIGDQRLRNKLIQCAWTAIRQDPELRAFYRQVHDRQPKKVAARKAIVAVARKLTTRMYAVLKQQRPYVIRADSSIAPLAAEETVGLRERLDTAQNDEQSF

SEQ ID NO: 487330 - protein, 353 aa, unidentified
MIKQIVSIGKPVVSFNKLANPQPAMVFCGIDVSAESLAVAVAEPDRPCFQREFANSASGHKALLLWLGKLKAQVRVSLEATGVYSMDLALALDAAEGIEVAVLNPKRIHDFARSLRRSKTDSADAQVLAEFSKRMEFKAWQRPSRTALALRAITRHIEALGVEHTRAFNRLHAARGSMGTPRCVVEDLKRSMAGLQGRMKKLRREARAQVDSNERMREQFRLLVGMPGIAEISALQILGELVLLAPDLNARQWVARSGLDPAHRDSGTSVHKPARISRAGSRHLRRALYMPALAAVRWDPHLKAFYQALLARHKRKLQALVAVARKLLHAIYGIFKSRTPYDGNKLFPQLGNA

SEQ ID NO: 487331 - protein, 335 aa, unidentified
MQQFDYFVGVDVSKATLDFAVAKTNQILFHQQVTNDKKGIIQFLKALHQQTKVNLRQCLFCMEFTGIYNNPLLTALHRHSAPVWVERAAHIQESMGLTRGKTDQMDAKRIALFAYKNRDEARLWTPPRTVIAQLDRLTAQRARLVKEIKMLQTPLTDTEGFVGKADRKADQQACAASLKALKADLQSIDQAITELAQQDPELKRLFERVTSVVGISQTTAAEIIVATNEFTTISDPKKFACYAGVVPFERSSGQRRGKPQVSHMANKKVKSLLHLGAMSAIQHCPQLKLYYQRKVAQGKNKMLVLNNVRNKIVHRIFACVRQDRNYEENYTHQLA

SEQ ID NO: 487332 - protein, 427 aa, unidentified
MNCTQNQKINQVTEHTLVVGIDIAKRTHYACFVDDRGRVLRKSFPIFQSKEGFQQLYEAIQEGRKAFGKAQVIVAVEPTGHYWLNLAYFLEENGIPLVMVNPAHVCRSKELDDNLPTKHDAKDALVIARLAKDGRFLVPRLLHEIEADLRVGSTLKEKLRKEQAAVKNAIICWTDRYFPEFWTVFRDLGKTALAVLEWTPLPADMAGRTAEELLEAYRQSEGLKCPQKAKIQALIDAAKGSIGVTEGTTMARFEIAALVRQYRQFEAEIAALDAELKALVQTTMEYQWLKTVDGLGDATIIDLLAEIGSFAHYRDPRQLVKLAGLTLKENSSGQRKGQKHISKRGRKRLRSVLFRAVIPLIRHNEAFRELHEYYTTRPVNPLTGKQSIVALCRKLLNVLFAICTKKQAFDAERMRQDVLSHVPHRAA

SEQ ID NO: 487333 - protein, 405 aa, unidentified
MDMIIEKGCGLDVHKETVVACIMGTGIKKEIKTYTAMTNDLLRLRGWLQEAGITHVAMESTGVYWKPVFNILEDHFEVILVNARHVKNVPGRKTDVQDSEWLCRLLRSGLLKGSFIPPRGIRELRDLTRYKRKLIQTIVAEKQRVEKMLEDANIKLSSIASDTFGASGKRIIEELIKGKLEAEKMAELSKGRLRRKREHLKEALVGEVREHHKFMIKASLKHIRAMEKVLSEIERKIREKIERDYKEEDELLQTIPGVKENASTVIAEIGVDMDIFPNEMHLSSWSGMSPGNNESAGKKKPGSTTYGNKCLKAILTEFAWVASRMKDTYLRSKYHSLVGRRGKKRALVALGHKILIMCYHILKYKRPYKELGGDYLDKRRKDRITRSYIKRLNHLGYEVTLQEAA

SEQ ID NO: 487334 - protein, 409 aa, unidentified
MRLFVGLDVSSFDIKICILNGEGEKLDAFSVNNDLPGATTLKERLLQHISNQEVEILKIGLESTSVYSFHPSMFLHYDEDLQRFGAKVFLMNPKQIANFKKSYSDMDKTDEIDAFVIADYLRFGRNQMSIVKESQYVALQQLTRSRYQLVRMLTKEKQHFLQHLSYKCNTFSQEVDSSIFGNAMMELFLEKFSLEELANMPLEELAEFLQVKGRNRFGDPKCVASTIQKAVRSSYRLDKVVEDSIDVLLGTSIAVIRTYQQQIKELEKSIKRIMAGLSQTLESIPGVGPVFAAGIIAEIGQIERFDDETKIAKYAGLYWRTHQSGRFTAENTSLSRNGNHYLRYYLVEAANSVRKYVSDYQEYYVKKYNEVPKHQHKRALVLTARKFVRLVDALLRSHQLFTPERCVKV

SEQ ID NO: 487335 - protein, 400 aa, unidentified
MRGVFFVFYTGIDIAKHKHEASVIDAEGKALLDSISFANTKEGCEKLVALFHRLGIAKDDVLIGMEATGHYWLSVHAFFFELGYDVKVINPIQSEAFRKMYIRQTKNDSKDSFIIAQIMRFGQFSATNLSEERIVALRQLSRYRLALVDSCGDCKRRIIALLDQVFPEYARLFSDTFGVTSKEILLKYPTPEDMISVSTRKLTTLLTKSSRGRFGEEKAEQLKTAASGSFGVSFAKDAFSFQIRQLMEQIMFLEKQITELEQEIAALLQEIGSFITTIPGIGDTLGAVILGEIGDIHRFDTPGKLVAFAGLDVKVNQSGEFTGTRSKISKRGSPYLRRAIWLAATRAAFCDPILSAYYQSLRARGKHHLTAVGAVARKLCNIIFAILRENRPYLTHPPNS

SEQ ID NO: 487336 - protein, 456 aa, unidentified
MGHARARKIPAQLVEDEDYQLRCERVAGIDIAKAKADVCTRLPPAREGGRRASRVEEVPATAREILALAARLVADRAELVVMESTSDYWRIWFYLLEAAGLSVQLVSSSQARQLAGRPKTDRLDAQWIARLAEMGLLRPSFVPPPEIRALRDLTRTRLQLVRDRTREWQRLEKLLEGIPVKLSSVVHSLARTETARVILAAIAGGETSPKALAALADYRVRGGRAAVEESLEGMTLAACHPVLIRVHLDHITLLDRQVSAIEDEIEAALGAIPGAWGISAGGVPSPDPGPGAAVLPAAERLAEIPGVSRKLAMAIIAETGLDMTRFPAAAHLVSRAGLAPAARQSGPRNRKPAKGQGDSCLKGYCTQAATGAAGTGTFLGERLRRLSRRIGGTRARCAVGRSILVIIWHLLASPEARYADLGPDWHERKADHDRKTRAHLRGLQALGYDVTITPAA

SEQ ID NO: 487337 - protein, 304 aa, unidentified
MNGIGIDVSKRQLDVGTTDGKTLQVSNSRSGFAELDLWLQGHPAVQIVLEATGGYEQPVLDFLHNAGHPVVRANALRARKLAQGLGHMAKTDRLDAYALAKMAALVKLRSYQPLEPWQREMRDFVRARRQAMHALTVARQQQEMVGNRELRRLLQANITCLQRTVERLGKRISEQVSKQPQLAVLKSMKGVGPGLQAVLASYLPELGKISGKAVASLVGVAPTSHDSGTMRGKRSIHGGRAEIRQVLYMASMSAMRHEPRLRDFYQSLRARGKEGKVAIVAVMRKMLVILNARMRDAQGGSIPA

SEQ ID NO: 487338 - protein, 402 aa, unidentified
MSRIYVGVDVSKYKFDACVKNDDNDLLIKHRTYDQSMDGMDRFIHDIEATKTDGSDNIIIGLESTGIYHRNLMGYMLKFGYNVREFNPIEIYGLRKGRIRKTKTDRIDAEVITNAIKLDAMENTERYLQNEEHMRMRELGLIYNRLTEKSAKLKTELRSALTVLCPGYDILFTDVLGKSSKEILRRSIKHTKLFEISEQEIEQILRKNFMRGSSVQDLPRKILETFEKSTLPQYYRESLIVDVRFTLDQHDLLKKQISQLESRMERVMREIDPISLSIPGIGSVTCAIILGTLGNVKRFHNSSAVVAYAGLDPIVHQSGKSVNLTGHISKRGNKYLRKSLCNAAIVAIRHNPVIKKKYADLRKRGKPHLVALTACARKLLMIIYSVEKNQKRFYVPKHILNE

SEQ ID NO: 487339 - protein, 596 aa, unidentified
MAPSNPLASIGVGIDTARYGHRVSFLRPDRQPAAKPLTVLEHQQGYQDLRQRLESLHQQHPQAHFHIRIDAAGQYAANLEHFLRTLPLPMTISVGEPKRNKDYQKAHFPKRTTDDTESQAMARFAVVEQPLATLPLPPAMALLREVAGRLQAQVKQTTQAVNRLHNLLARVFPELATITKNVATAWVLQLLDKYPTAPRIAQARLSSLEKVPFAPPDKVKKLHEAAPQSVGSLQGELAETLVREWVAQVRQAQAGEVKLRKLLQSAYADLPPAGYVHLTSIPGIGVATAAVLVAKIIDIDRFETPEDLVGYFGIFPQESTSGVDPLGQPLPPGTQHMSHKGNDLVRMYLWNAAFSAMQNNPAVRSLYRRLRAKGKRGDVALGHCMRKLLHLVFAVWKTAKPFDPNHYPWEQAGAASEADQPVPNEKAVGHKREQVPAEKVVTTASSSVESSPQTVNASAPPSEPTTQRPPIDFAFLRQQITLEQVLRHLGLFDDLRGRAPQLRGRCPFHEGDRRQRTLSVHLGKNAFHCFQADCQAQGNALDFWAAYHRLPLYEATLHLADTFHLYRNREEAPVNSASKGQQPEHAKTAVITADGS

SEQ ID NO: 487340 - protein, 402 aa, unidentified
MANVAGIDWASEEHAVCVVDEAGTPLRERVVAHDEAGIAALCRKLIELQVERVAIERPDGIVVDRLLDAGLIVIAVHPNQAKAARERYSVAHGKSDRFDAFVLAELARTDVHRLRAIRPDTDQTRALRALSRTREDLVQARVALANQLRAQLEAFWPGALVFAHVDSPVSLAFLRRYPSPADAKGLRTKRLAGWLTRHGYSGRRSPEQLLERMRSAPEGRAGELELEARRAAVLGLVGALEPIVAQISALTAQIRSALRAHPDARIFAPLFRDRKTVVCPAQLIAELGDARERYPTDAALAADAGMSPVAVESGKRRVATFRRACDKRLRGSVATLADSTRHWHPWAREVYRRARARGQDHPHAIRTLGRAWVRVLWRCWQDGVPYDPTLHGNLRCLQTAGG

SEQ ID NO: 487341 - protein, 472 aa, unidentified
MGYRSTIKRNKGHRQESKRYTVGELETMPLLYPDLAGIDIGSREHYVSVPGDRSEHPVRTFGCTTPDLLEMANWLKLCGITQVVMESTGVYWVPVAMMLEDAGLKVALVDARESHRLSARKTDVYDCQWIRQLYACGLLRNAFRPAAQILLLRSYWRQRQELVSMCATSLHHMQKALELMNVQLHKVISDIAGVTGMRILRAIAAGESNPESFVPMVHPNCKCSSAQIVNALTGHYASEQVFALGQALRRYDLYQEQIAELDGELHRSLGELPPKQNSEPDVATAAPKSPDGKRRKNQSHFDLAGEVRRITGVDLTRIEGIDALTAFTVITEQGIDMSPFPTEKDFASHLGLCPNNQITGGRVRKRRTRRVHCRAAHALRLAAQSLARSKTALGAFYRRMKARHGAAKANVATAHKLAKILYRMLKHGEQYVARGLEDYERRYRERLLKNLKRQAKTLGCELLVLETGEVLS

SEQ ID NO: 487342 - protein, 353 aa, unidentified
MLIIGCDLHTRYQVIARLDTESGEMVTRRLQHENGEARAFYASLPAAALVGIEATGYTQWFERLMTELQHVLWVGDAAQIRARAVRRQKTDTRDAEHLLELLSTHRFPSLWIPSPEQRDLRQLLKHRHKLVRMVTALKNQLHFLAMSQGLCRKSKLWSERGREELKSLALGPWASRRRQELLALLDQLQPQIAELDTAVAQAAAAHPAALDLMTQPGVGPVTALAFVLTLGPVERFRNSRQVVSYLGLNPREYSSGGRQRLGGISKQGNSMLRWLLVEAAQTAARFDPELRRKYQRLKFRRGGSVAKVALARRLAVRSYWRLRQRQAETEAQPVRMPGSSGSGVVPPAAGSRQ

SEQ ID NO: 487343 - protein, 354 aa, unidentified
MKRSTKYVALDVHQAMTVVAVREENGRIISRTILPTEEQAILEFFRSMRGSIHVTFEEGTQAQWLYDLLVNRVDRVLVCDRRGEKRHGSKGDQADADHLSEFLRLGSLRAVYHGSPHLSTLKELTRTYQNVVEDSTRVMLRLKALFRARGIKAPGKRVYHPRNREEWMAKLPEDGVRFRAQVLYTQLDGLRELRPKAKAVMVAEARKDPAWEVLRTIPHLGPVRVALVLAIMRTPWRFRTKRNLWAYCGLAVVTHSSSDFVQVNGQVVRRKRAPMTRGLNRNYNRELKDVFKAAATAAIGRPGPLRDYYQARVDGGMREELARLTLTRKLVAVTLRLWKKGQPYDPEKLTVQAC

SEQ ID NO: 487344 - protein, 398 aa, unidentified
MNLNIGIDIAKNVHEACLVNENGEQIGKFIQLKNSKKSIEKFTKHIEKVSKELNAEPRIGMEATGIYWYSLFSELSKKYKIHVYNPSQISGFASVNIRESKTDKIDAKTIANMLRFGESPKTNYSDTQRLELREYGRFYFKLTSIKINLKKRLRRNLHLIFPGYDEIFKNLYTATSKEIITNITTPEKVLEMGEKKLLELMKEKSKNHMDPDKAKILIEKAEDTIPSEIIKESSLFEFQMMLEMIENYEKQIASIENKMMSIWNKVREKHYIQTIGGVTELRAAMIWAEMGNVDDFKHPDQIVAFAGYDPKVRKSGNKEVIGGPNKRGSKILRWVLGWTVQEAKCSNPVLGQYFDKKINEGKHYNNARCAAVKKLIRIIWSVEKNKKPFQIPGNLLSS

SEQ ID NO: 487345 - protein, 366 aa, unidentified
MTTYCGVDFHARQQLVKWCNTDNGEIHERQLWHESIDEVREFYVQFKGEVIVGFETSGYSSWFEAMLEELGHQVWIGHATEIRRRARARQKTDRRDAELILDLLLKHEFPRIHRVSAESREVLRQLRYRHRLVQQRTRSYNSLQAIALGAGVSLKAKLRTRTGQERLLGLAVSEAHGQQRQEWLELITQLNGYIERVERELESRAEADERVQLVRTHPGVGLLTGLALVHTLSPVSRFANSRKVAAYVGLEPREYSSGERQQFGGISKAGSRLLRLLLVEAGHKAINKDAQLKQLYYRVLHRREKAKAKVAIARHLLVRSYIMLRDQIDYAEFVRRGVAVQSARVSYRPQVPGKLIERLASEQQLS

SEQ ID NO: 487346 - protein, 425 aa, unidentified
MNSNTNEKINQVSENTLVIGIDIAKHKHFACAVDDRGRVLQKSFPIMQSRGGFEGFYERLLALKATHEKQEILVGFEPTGHYWMNLAAFLTHYGIPFVMVNPMHVNRSKELDDNLQTKNDQKDALVIARLMRDGRFSYPRILDGVEAELRNGATLRSKIQEDLNALQNRMIRWLDRFFPEFTHVFKSFGKMAYAVLEMTPLPSDIKGKTPEELLFLYRQVDGMKSPQLPKAKQLVEVAQNSIGLTEGVVMAKLEIATLLSQVKLMQAQLDELTAQLIELAKQMPDYEYLASVPGIGDVTIVDLLSEVGSLTQYAHPRQLIKLAGLTLRENSSGQQKGQKRISKRGRRKLRALLFRVMMPIILHNPAFKQYHEYYTTRTKNPLRKKQSIVVLCGKLLKILHALCKKKTMFNEHQMMNDFTRLQTAA

SEQ ID NO: 487347 - protein, 417 aa, unidentified
MGKSKSPKAKCVNDPGMIVGIDVAKHKHFAKILFPDGSESQPFGFENHRKGFETFLAWLSFHRKRVPCDSIIVGLESTGHYWEPLAFFLEEIPGIQVVQVSPKHVKKAKEIYDNSPAKTDRKDAGVIALLIRMGRFQRLVLPKGPFAELRCYARFRERKIVELGVQRNLLHSLVDVVFPEYGSLFSKIEGKASLTILKHFTTPDHILHAGFQNLSQALHQASRGKLPAACAKRLMEAASTTVGGKEGIEATAFAIRNIVASLERIQGEIALIEAELARVLDRIPYVHPLLSIPGVGKITLAILLGEAGDLRRYHKAEELIKLAGLNLFEISSGSHQGRRHISKRGHPLLRKCLFFAALRTVKTGGAFREVYLRWTETNHMQKTKALVAISRKLLGLLFALVRDHVAYQPRRAELRAA

SEQ ID NO: 487348 - protein, 411 aa, unidentified
MIEQVTVGVDVGCHRHRVAIAAPDGKFVEEFDIPADSEGFKYFFGRLDFYRKSFDVPVVVAMEGHGGYGRPLDSSVKSQGYTLLNVNNLKLCRFKEIFSSPAKTDAIDARKIALLARMQDVLSPSREVLQEVRDVPQEHQILKRLSRRRRQLVDEKVVVLNRMQVDLQAVSPGLAEMVEYKDGVAFLNLLTCRSNLEDLSRLDKKELLSIGGIGEAFAGRVIKWQKKAYFSREVAYVGPMIIEDAKRIIEIKRSINELEEKIEDILKSSKLAETIGSIPGFGAVCTAELVAEIGTMERFSSERSLALYLGMAPLDKSSGKCQGTRTPTQINKRGKAAMMTAVAHNIRKVEESKRYYQKKRDEGKSHNQAVRALGRHMIRVIWSMTKRNEVYQIREGENKTCPDKTSAAIPA

SEQ ID NO: 487349 - protein, 526 aa, unidentified
MATKVKSGKKRTRSRSRKFRQAVLGKPDGVIQPRVQQVGPEHFGIVAIDCAKARSKWMLADFYGKVLIPPTTVEHQRTQLDLAICQLRQAREQHHLQDLIVCVEMTGTYHKPVWRAFRKAGFETRLVHPFASSHYRMPEHGDVKTDDNDLAAIFRAAVNGFGLIEKEIQEVYLEMQILCRHRRDLVNKKSKLQCQIRHHLEHCLPGFAALFDGDNLWTQATPIPLLKAIALRGGTPAAVTEAGQSGVTKWLKDASVRFHAKTVERVVVWAANAASHDAMTRSYTRVWQALLEDWQAKQQQIAALERDIASVLVQTPYLLLLSHPGINVISAAELGGELGPIENYASAKAMSGRAGLFPSRYQSDEVDRGGNLSRFRNGRLRRAWMMVAENMVKCNAYWRAKAAAWKAKGHDPRDIRCRIANRLTRIVFQMISGRRLYQHPSRLDRSYVMEKLLTYHREHNTPPHLIVRDLELAAKQIPASAYAEEAKPLQAAYEASCRSRRREPQPIGTLLVAVLARLGVVGLESE

SEQ ID NO: 487350 - protein, 345 aa, unidentified
MNKISVIGLDLAKDVFQVHGVDSAGEVVVRKQLKRSQVRRFFTNVEPCLVGMEACGGAHYWTRELAGLGHTIRMMAPVFVKPYLKTNKNDRNDAEAICEAVQRPSMRFVQPKTPEQQAVLHLHRTRRLLVRQRVALSNHLRGILSEYGIVLPQGAKVLSGRLPALLEDAENDLPMLTRDLLAECKEEYDQLMERIERLEGRIKAWHVTHDVSQRLASIPGIGVLTASALAATVGEGQDFSNGRQLAAYLGLVPRQASSGGKVRLLGISKRGDGYLRGLLIQGARNVIYHIRRRQRAGQPGGNAWVEQLLQRSHPNAAAVTLANKMARIAWVLLVRNQTWCPARTL

SEQ ID NO: 487351 - protein, 349 aa, unidentified
MATTRIKTYTYFIGIDISRNKLDYAIMQGKTFLYHKEAGNNADDISLVIKELKELEKFTMTKAVFCMEHTGIYANHLLITLKKLKANIVMEDALHIRNSLGLLRGKYDKIDAIRIASYAYKNREELRLLIPKRGAIEQLSYMASLRIRLLDTQKRLTVPLGEQQQFLNKKLLQANKNLCQESIVAVKADLVQVDKAILQIIEADEKVSRLTEILMSIPGIGIITATQILISTNEFNDIRCPKKFACYAGVAPFKKDSGTTKVKAKVSHIANKRVKSLLHLCAVRAIRFDTELKAYFERKTQTEGKPKMAVINAIRYKLILRAFACVAQDRIFTKEYQRPGNYELQAILK

SEQ ID NO: 487352 - protein, 324 aa, unidentified
MIIIGADYHPSDQYIALVDTETGEYEERQLNHSEGEAEKFYRELASRGVSVRVGIEATGYTRWFERLLAELGIELWIGDAAKIKTKRVRKQKTDREDARLLLRLLRENNFPRIWVPSPENRDLRQLLWHRHRLVQMRTRIMNQLQALAMNEGQRRKKKLWSEAGRSQLDKLPLAPWASRRRRDLLELLDRMNPSIEELTAAIEREARKWPEALRLMTHPGVGPLTALAFVLIIGTVERFQCGKQIGSYVGLIPCEDSSAGHQRLGHITKQGSSLLRFLLGEAAQAAARCDADWRRRYMHLALRRQRNIAKVAMARRLGVRRWPQ

SEQ ID NO: 487353 - protein, 457 aa, unidentified
MAKNRRKQLRIGFHEGLEQIREDAAGIDIGSKELWVDVGRKKDSQPVRRFETFTADLTAMADWLVAKGIKTVAMESTGVYWIPACQILEGRGIEVFLVNAAHAKNVSGRKTDMVDCQWLRTLHSYGLLPASFRPAAQIGVLRAYLRHRQMLIEYAAGHIQHMQKALAQMNLQLAHVVSDITGVTALRIIRAILSGERDREKLAELRDPRTKASAETIAKSLEGNYRAEHLFTLRQSVELLDFYQKEIQDCDREVSAQLQTMESRIDPVDQPMKKARSRKKKTRNQPAYDCREQAYRISGVDLTQIDGISESAALTLIAEIGVDMNRWETEKHFASWLTLCPNNKVSGGRILQRSTRKSESRAKDTLRLCGQSLLGSSSALGAYCRRMCGRLGQPKGITAVAHKLALLVYRMLKFGRAYVDIGQEQYEQKFKDRALKQLARRAKGFGFQLVPSPQEVP

SEQ ID NO: 487354 - protein, 355 aa, unidentified
MDSRKYIGMDVHQASISIAVMDSAGKLVMESVIETKAATILEFIQGIRGSLWVAFEEGTSAAWLYDLLKPYVAKVIVCDPRKNALLKTGNKNDRVDARKLSDLLRAGLLTPVYHGESGVRTLRELSRSYLTVTKDLTRVMNRLKALYRSWAIPCAGEKVYSPRHRNAWLEKLSEAGVRRRAEQLYQQLDMLLQIRKEARRELLTESRKHPAHELLQQIPRLGPIRVALLIALLQTPHRFRTKRQLWAYCGLALQTRSSGEYQFRRGQLQHSKKLPALRGLNTNHNHDLKNLFKSAATHASTSTDPLGDFYRNLLAKGMKPAMARLTLARKMAAIVLTIWKKGERFDPGELKQQAA

SEQ ID NO: 487355 - protein, 407 aa, unidentified
MELMHPKCGGLDVHQHSVVACARVVTGSTITHDVRTFGTTTAELLALSDWLTVHGCTHVAMESTGVYWKPVWHVLQGSVELVLAHALHVRNIPGRKSDVNDATWIADLLAHGLIKGSFVPPAPIQELRDLTRTRKQLVREITQHTLRIQKTLENANVKLTGLLSDILGVSGRAILQALIAGETNPERLAALARGRIKASRADLAAALQGRVTTHHRFLLQLHLTQIDALEAAVREVEARLGEALAPFRAAVDRLITMPGVSETVARVLVAEIGVEMARFPTAGHLVSWAGLCPRLDESAGKRHSTRTRPSNPWLKTTLVQAAWAAARKKDGYLRAQFLRVKARRGPKKAIIAVAASMLTAAYHMLRDGVDYRDLGADHFDRRDKVKLAKRLVARLHDLGFSVDLRAA

SEQ ID NO: 487356 - protein, 338 aa, unidentified
MELYAAIDLHSSNSVLVVTDAEDHVIFAKRLRNDLELIVTALRSCPGDIRAVAVESTYNWYWLVDGLRSAGFDVRLANTAAVKQYDGLKHGDDFSDARHLAQLLRLGILPEGYICPPELRALRDLMRKRAQLVRQRTAQILSIHNLLARNLAKSVKGDDIKRLEDGEIDALALLEDQKRALRANVAVMRCLEEQIRLLEGAILAKGKLRQEFHGLKTVSGIGDVLALTIALETGDVHRFASAGKFASYARMVDSRRESNGKTKGVGNRKCGNKHLSWAFIEAAHYAVRYDPSVRRFYQRKCAKGLSVVAIKAVAHKLARACYHIMREGVPYDGTRAFA

SEQ ID NO: 487357 - protein, 394 aa, unidentified
MTEYDVYLGLDVGKEAHHACALDRAGKRLHDAPLPQDEAKLRALFDKLARRGRVLVVVDQPATIGALPVTVARACGVEVSYLPGLAMRRIADLFPGSAKTDPRDAYIIAEAARTMPHTLRRVDVGDDALAELNVLVGYDDDLAEEATRLSNRIRGLLTHIHPALERVLGPKTDTKAVLELLSRHGGPAGLRAAGKRRLTTTAIKHAPRAGAALVEDILAALDEQTVVVPGTAAAEAVLPRLASSLRDVLARRAELAKEVEKILDDHPLAEVLISMPGIGIRTAARILLEVGDASAFPTPGHLAAYAGIAPVTHRSGISIRGEHPARSGNKKLKRAFFLAAFASLKDPASRTYYDRKRAEGKKHNAALICLARRRCDVLYAMIRDKKPYQPRLAT

SEQ ID NO: 487358 - protein, 348 aa, unidentified
MNYIGTDIHISTLDFKVVSNFGKVKMARKVTTSSFNFIDFVKSVPAPRQVIIEEGPLAAWLLEVCNKNGEHLIISDPKHNHWIGASGKKEDALDAEKLAQLARGGYIKEIHHPLGQRRRFRELITAYHDTNKSIVRIKNKIKAKFLQNGIQCQGKTVYSSKQRSEWRQKLPQESALLVIIDSLWQQLDQIQENLETILAEAKLQAKRYPEIALIDEIPGIGFIIAATIVAILENPHRFANKRKVWAYAGFGIDRKSSSNKTYAEKLGKEYNRTLKCVVEEAAQAAINTEADNAFRRSYAQLTIQKGIDPHHAILTVSRDIIAAAWAMWKKGEHYNPEIDRPVKIDVEA

SEQ ID NO: 487359 - protein, 335 aa, unidentified
MEFEFFIGIDVSKNELDFSVQRGKCFLFHKEIVNEPEAIKAFIKELSKLEGFSVGNSVFCLEHTGIYSNHLLACLYQKKGSICLESAIQIKKSLGNIRGKNDKVDSVRIAAYAYKNREDLRLWAPRREIVQELAHLSSTRSRLIKTKKILKTPLKEYGAFVKNKVSKQNAAVCGEALKGIESSLQKVEKAITEIIRTDAELNRLFNLVTSVKGIGKITAVQMIVTTNEFKNINNARSYACYAGLAPYLEESGLFKGKGRVSHMANKKVKTLLHMAALVAIQHDEELKRYYERKIHIGKKNKMSVINAIRNKLVHRIFACVNKNRKYEKNYLKLVA

SEQ ID NO: 487360 - protein, 415 aa, unidentified
MQALYRCIAGMDVHRMLYVVTILVELADGTEEKHQRSFGGFKRDRRALVAWLVELGVELVVMESTGIYWKSIYSTLEKAGIPAHVVNARHVKNVPGRKTDLSDSEWLARLGRYGLVKPSFIPPEDLRELRVVSRYRDKVAQTLAGEKNRLHKVLDDAGIKLGAVVSDIHGVSAQAMIDGLIDGTPIEQLPDLAKGTLREKHELLELSLDGELTPRHLFVLKNIREHIRYLESELASLDAYLIDAMAPYADYWRFLQTLPGLDQISAAMILVEIGTDLKAFDNVQHFASWAALCPGNHESAGKRKTGRIRKGNHMIRYLLCEAANAARRTNSVFRSFYQSLVPRKGHKKAIVAVAHKLLRTIYMLFTRRQAYRDPGIDYQAMVVNRNAPRWIRALKKYGFWPKISTLNAPIAAPVH

SEQ ID NO: 487361 - protein, 344 aa, unidentified
MGEVSTIGLDIAKSVFQVHGVDVAGAVVIRKRISRAKMVEYFSELPPCLVGIEACPSAHHWGRELQALGHTVRLIPPSYVKAYLKRSKNDANDAAAICEAATRPSMRFVPIKTTEQQTALMLHRTRQLLVRQRTMLSNALRGHLAELGIVSAKGRNGTAELLRIIADCEDSRVSPAVRGILEVLARQYGSIGAEIASIDKSIMALHRACEASRRLAEIPGIGPVGATALVAEIGDWKAFSSGRSLAAWIGLVPKQHTTGGKDRLGSITKQGNRYLRWLLVVGAMAVIRYARKHGAQKRPWLGRLRERRPTKVAAVALANKIARMAWAIMVRGEKYREPKLSLAA

SEQ ID NO: 487362 - protein, 403 aa, unidentified
MAAICGIDWADQWHDVHVSDEHGRVLCQRRFCHDEAGIEALIALLTEHRVTRVAIERPDGLLVGRLLAAGVTVVAIHPNRLAAARDRFRAAAGKDDRFDAMVLCELCRTDGHRFPALAPCGDQTLALRALVRTREDLVSARVSLANQLRAQLDAAWPGAARIFAAIDSPIALAFLARYPSAAAARGLGPKRLQAFLARHAYSGRRAPETLLDRLRSAPTAAIGEHETQARRAAILGLVGALEPIVGHISQLTSQIRAAIHRHPDGPIFLSFFRDPNSVITAAGLLCEIGDNRARYPHSDTLAADGGQAPVTKQSGKHRAVSFRWACDKRLRNHLGVLADSTRHHHPWARDVYQRAIDRGCDHPHAIRILGRAWTRILWRCWQNGAAYDPTQHRALTRQLAQQG

SEQ ID NO: 487363 - protein, 341 aa, unidentified
MNIQALGVDLGKNSFHVVGLDTQGALVVRRKFTRAQLLRWIANTPACLIGMEACGGAHHLGHRFAAHGHTVRLMPAQYVKPYLKTNKSDFLDAEAIAEAVTRPTMRFVPLKTVEQQELQAQHRLRSLWVRQRTATVNQMRALLLEQGLVIAQGIGSFRRQWPRILEDAENGLSSRLRALAHQLGEQVRELDARIQVLTEELTACAQSEPVCQRLLTVPGIGPLTATAIVAAVGNGQGFRRGRHFAAWLGLVPRQYSTGGKPKLLGISKRGNAYVRMLLIHGARSVLLRADKRDDALGRWLQRLGTHAHPNVVTVALANKTARVAWAVMTGQEPWRAERAAA

SEQ ID NO: 487364 - protein, 412 aa, unidentified
MNAVGIDVSKNKSMVAVARPLGQVVVKPFEVRHTAIELKKLADFLKSLDSETRVVMEHTGRYYEPVAQYIHASGVFVSAVNPLLIKEYGNNSLRRVKTDKADSIKIARYTLDNWAELRQYTPMDTVRYELNTLNRQFSLYAKTRVSLANNLIALLDQSFPGVNRWFDSPARKDGSQKWVDFAAAFWHAECVASVSCAAFTERYRKWCKRHGYNFNADKAAKIHAESREVVPLVSKTETTKLLIQEAAAQLLAVSKTVETIRAEMLRLAKQLPEFDTVMSMYGVGESTGPQLMAEIGDIRRFAGKQSLVAFAGVDPMPNQSGSHESKSCRSSKRGSPYLRKTLFVIMTILLQNAPADEPVFQFLDRKRSEGKPHYVYMTAGANKFLRRYYGKVRDCFAAMDSPPPVESWSIPD

SEQ ID NO: 487365 - protein, 416 aa, unidentified
MNYVGIDIAKNFHVVTIIDENEVKVFKKAFRVENDSDGYSNFITKLNTIANDKDNFLIGIEATGIYGENFLEFLKAQGYNVKLLNPFQTSRYREQTTMKKVKNDNIDSLMIALFLKDGKYSSGYVTDDEYQSLRTLYRNRTTIQNDMKDIKKRILTNLAVTFPELEYIMNPFTNIGLALLDKYPTAHHYKHSSVDRIVKVFRHIKGNNFNNEKAIQILDASKNSVYSGKAKDARAIAIRSSIRLLQMYLTEIDILEQEIFILLEKQNISTKEFEENMKADEKTTTLIDNLKSIPGVAEKTIAAIISECGDLTRFPTTAKFIGYLGLFPTENSSGNSKHIGHLSKRGSSIAKHALYMSSVSCMLHNSQLKQLYDTKKSQGKSKKEALIAVSRKLATIIYAIFKYNTPYNPDRVFSKS

SEQ ID NO: 487366 - protein, 354 aa, unidentified
MNVTHDGGLVAGVDTHRDTHTAAICDSSGRELAQLQVPADPGGYDAVLAWARQAAAGRELRWAIEGTRHYGLGLARHLAAVGEQVEEIDASKHAGKRRKGKSDAIDAVRAARELLARPHPAQMRADGDREALRLMMCDRDNAVGSAKTARTVLASVIVTAPAGLREQLRHIPRDRRVTVCAALACPDDADRQTRVLYQTLARLGERITSLAKTAADLEKQITGIIEDMAPGLVAAEAGLGALTAAQLMLSFSHAGRIRSEAAFAMLSGTAPVPVSSGNTSRHRLNRLGDRQLNRAFQVIAVARMRSDPRTKAYVRDRIAEGKTQQEARRCIKRYLARHFYRVLTHQPGLAPRTT

SEQ ID NO: 487367 - protein, 353 aa, unidentified
MRKMQHYIVENNRIFVGLEDSKKTWKVCVRCDRMIVHETSMPTDYENLRNYLKNRYPGCVKRVMYEAGFNGFWLHDKLEADGINCIVTPPNKVTQEKSNKVKTDKIDARRLSLNLENMDYVSCHVPDKERREDRQISRTLDQIQKNINATKCRIRMFIYYHGIHECLHSGKWKPSDYKRLKELKLSHALKVSLDVLLTLLDELVSHRNNLMKELKALCKKERYRESVQSKRSCPGVGWLSAIRFTLEWGDLVRFRTGKQIAAYAGLTSSEYSTGETIRRGRITRQSYERVRAWLIQCAWRSVNRDPVLLHKYRAVWKNSGSKKKAIVAVARKLVVRMRALELTHQPYCIGVVE

SEQ ID NO: 487368 - protein, 367 aa, unidentified
MSNYVTAIGLDVHARSISACAFDPMTGEVSRARFGYDPASVAEWALGFESPKAVYESGPTGFHLCRALRALGVDCAVGAVSKMHRPAADRGRKNDRRDAEWLAGLLACRNVVEAWVPDERTEAARDLSRALEDARDDLQRARQRMSKFLLRHGLVFDETTPTGRRRSNWTEAYWRWARSIEFDEADDAAAYERYTDAVDRCGEAKRELERRVVEAASRPERAPTVDALRLVKGVDVAAAFLLAAEAGDFSRFPSAPSFAAWCGLAPSERSSGETESRGGITRAGNSHVRRALVEASWHVPMSTRHPKKPRPGHGVAPAASRHAAKCNRRLQDRRDAMSQAGKRPCVANCATAREMACWVWAIALMVR

SEQ ID NO: 487369 - protein, 476 aa, unidentified
MNKRQGNLQAPDAKPKRRRRNKGMCLEDRPVLEPNAAGIDVGAREMFVAVPPGRDEKPVRVFATFTEDLERLTDWLEQCGVTTVALESTGVYWIPLFEILEQRGIRPCLVNARHMKNVPGRRTDWHECQWLQFLHSVGLLRAAFRPGQDVCAVRTILRHRNELVAAASQHVQHMHKALTQMNLQIHHVISDITGSTGRAIVDAILAGQRDGAELAKLRDPRIKADTETIRKSLEGNWRPEHLFTLGQSRDLYRIYQQQIVNCDLEIEKMLQEFTPRIDPGERPLPPDRKRNRAGSKRRRKNGHPHPEFDLRTEAYKLFGVDVSQIPGLEENALPLFSEVGRDMSRWPSAAHFVSWLALCPDNDISGGKLLWRGARRVKNRAGHLFRMAAYALHRSLTPLGNYLRRMKAKLGPQAATMATAHKIAVIFYTMIKNQVEYDETIWDARDAQREKKLQAKLKRQAKQLGYELVPIEPQAA

SEQ ID NO: 487370 - protein, 409 aa, unidentified
MEQQVKFEQVIKCGCGIDVHKKTVVATIRRSDTDFETREFNTYTRSLKSLREWCKSEGVTHTAMESTGIYWKPVFNILEEDFEIILVNARHIKNVPGHKTDKKDSRWISKLLLSGLLKGSFIPPREIRELRDLVRYKKKIVGQIASEKNRIIKMLEDANIKLSSVFSDVSGASASKMILDLIEGKDDIDGLMKHIHGKVQAPRPEIRQALEGTLSEHHRFMLKIIKESIDEKEKIIEKLEKQIEKAAEQYTVEIDLLQTIPGVGKESAVRIISEIGVDMSRFPNEHHLSSWAGVSPGNNESAGKKKSARIIHGNKYLQSTLVECGWGATRKKEGYLKRKYESLVARRGKKKALIAVGHKIIESAYLIIKNKENYKEPLLNSNPKGKNRKIKNYMAKLKELGIEVEIKVA

SEQ ID NO: 487371 - protein, 345 aa, unidentified
MSEFYEGRQFVGMDLHRRRSVLVRMTETGQHLETVRILNDRDSLAEVMSRAGECPEVVLEATYGWYWAADALAELGATVCLAHPLGVKAFSYRRVKNDQRDAADLADLLRMGRLPHAWIAPPETRELRELVRHRAKLVAMRSQCKAHVHAVLAKGGIWVPMSDLFGVEGNLLLDKVTMPAPYTARIASLRRFIEAFDAEIDLFSGLVQRRLTHDAGYTAIQQIPGIGPVLAAVLVAEIGDVHRFAGPAQLTCWAGLTPSHHESDTTVRRGRITKQGSRLVRWAAIESVKILPKTSLIGGIRERVAQRRGNRNIGAVAAARKQLELVYYALRDHHVRALHRAPRAA

SEQ ID NO: 487372 - protein, 345 aa, unidentified
MTQYKRIGIDTSKAVFTLHGIDQQDRPVLRINLRRAQMISFFKKLPPTVIALEACGGSHYWAHELTALGHTVRLIPPQYVKPYVKRGKNDRNDAEAICEAAGRPGMHFVPAKSVTQQAQGMVLKVRETLIGQRTALINTVRGHAAEFGIIAGKGAGKIVPLLSAIEQEVAIPPEAKEMFVLLGRQIDEIEARIKEVDAKLNAAHKASEVSQRLVTIPGVGPITALTLAVEIDPAMFESGRHLAAWAGLTPKERSTGGKQRMGGISRAGNERLRVLLVSGATSVINAAMRPGSQQMTDWLRALLLRKPRKLVAVALANKMARTAWAMMKSGETYRRPSTAAGAVAA

SEQ ID NO: 487373 - protein, 429 aa, unidentified
MQESPLSAPAEGVAAYVGMDWADQKHDVILRAASEPAKVEYRRLAQQPEALMEWVAELQQRFAGKGKILVALEQSRGALIYHLMGYEFLELYPINPSQLASFRATFSPGGAKDDRPDAELICELLYCHRDRLKAWKPDDELTRKLTFLNEGRRKAVDQRTQLANEMKSQLKLYFPLALQVLDNDCSTALAADLLLQWPTLDSLQKPSAHKLRKFFYAHNCRQEQKLLERLELIKAAKPLTPDLAVIEPTALRVQLLAQQLKSLLPYIARYEKLIAELFDAHPDSFLFRDLPGAGSALAPRLLTAFGTDRERFEHSMEISSLSGIGPVRRASGKKSGKHATVHFRSACPKFLRQSFHEFAACSIRYCSWAEACYQTQRNRGKGHHAAVRAVAFKWIRILFACWKQRVPYDPQRYQQALQTRGSEYAEITA

SEQ ID NO: 487374 - protein, 373 aa, unidentified
MPKYSTAFGMDVHLRSTTVCALDADTGEAVTRRFPGNPWGEIAGWMDGFPGPSLAAYESGYLGFAPQRELAGLGVECVVAAVSKIPRSAADSASKNDRNDAARMARAILAHDISPAWVPSPEVEGIRDLAGAYDGATARLATAKQRLLAFLARRGFVYGGTTPAGNPRKYWTYDFLRWLDKVRPEDDGGVRALAALRNEVEAAAEARADLLSEYRAAADASPIAAEVASLQSIKGCAFALAAAFSAEVGDFTRFRSGRQVTAYFGLAPSQRSSGDSVRLGGVSGAGNALVRKLAVEGSWCYAAARHQPKLMPRDTGVPLEIRVHGRKGSERLLRRREGMLARGMPAAKANAATAAELVRWLWALGMMCREGAE

SEQ ID NO: 487375 - protein, 402 aa, unidentified
MISVGIDVAKGKSTVCILKPYGEIVSKPFDIAHIEKDLSELTSMLLRFDEEVKVVMEATGIYHLPVLTYLQEKGIFVAVINPYLMKVYRSGDLRKAKTDKIDSRIIANYGIEHWFTMTEFQASEDIYGELKLLGQQYRHYMKLHINSLHELTHLLDYTMPGIKGMLASWNEGNRKDKLSDFVESFWHYDKITCLDEIEFINQYISWAKEKKYHQSQDKAKAIYNLAHESIPTLSSETPSVKMLVTEAVRVLKEVDATLGIILSRMQELAKGLPEYTVVREMGGVGDVLAPKLIAEVGDVRRFHSGKALIAFAGIDTPPYESGQFVGSNRKITKRGSAALRKVGYETMRCIKTHPRPNDPVYQYIVKKESEGKAKKAAKIAGLNKFLRIYYARVKEVYNGISE

SEQ ID NO: 487376 - protein, 364 aa, unidentified
MTAVQAERQADSSAVEVVGGVDTHKDTHTAAAVDTAGRVLGSAQFPTDAAGYRALLRWLRGFGTLLLVGVEGTGVYGAGLARLLAAQGVAMVEVDRPDRKARRWQGKSDPVDAEAPARAALARVRTGLPKHRDGRVEALRALRVARRSAVGQRADVQRQIKALIVTAPESLRAQLRALPDRELIKVCADQRPDRAGAGDPGTATKIALRSLARRHRALSVEIADLDELLGPLVAQINPGLLALKGIGPDVAGQMLVTAGENADRLTNEAAFAMLCGVAPLPASSGRTTRHRLNRGGDRAANSALWRIVITRMATDQRTKNYIARRTAQGLTKPEIIRCLKRYVAREVFLALTSASAEKRPAKAA

SEQ ID NO: 487377 - protein, 337 aa, unidentified
MDYFAGLDVSMAETHICVVARTGGVIHKAKVPSTPADIAAELAKFPSCRRILFETGRMAPALYHGLSQLGLPVVCVESRQAHQALKSLATHKTDRNDARGLAHLARTGFFKPVYVKSLPAHAVRSLIIARKKLVGHRVTLENQIRGLAVVFGVRLPRALSPAFIEQALQASDGIPGLSAAMRGLIGARAAVLAAIVAIDADIRRMVRASDACRRLMSIPGVGQLTALAFTAAVDDPGRFRRSRDIGAYLGLVPRRYQSGEIHYTGGISKCGDRRIRTLLYEAANVLLTRYKGPLKLKDWAFAIAKRSTMRKARIALARRLAIIMHSMLRHGTEFKPA

SEQ ID NO: 487378 - protein, 342 aa, unidentified
MDHFAGLDVSVKETSVCIVDDTGKIVREVKVASEPEALLRVLKNPAYHFKRIGLEAGPMSQWLFSALAEAELPVVCVETRHMQAVLKAQINKTDRNDARGIAQMMRVGLYRPVHVKTLRSQKLRMLLTHRKLLQSKAIAIENDLRGTLRNFGLKVGIVGKVKFEARIKELVENLPDLAVLVEPLLIVRRVLREQIVILHRRLLAIVRDDEVCRRLMTVPGVGPVVSLTYRATVDVPARFHKSKAVGAVFGLTCSKYQSGEVDWSGRISRCGDEMMRAMLYEAAQSMLRSKKWSWLKAWAMQIARRRGMKKAIVALARRLAVIMHRIWVDGTEFRWTREVAAA

SEQ ID NO: 487379 - protein, 362 aa, unidentified
MSEITRVPVARVGVDLSKRVYQVHAVDGAGRTVLAKAMAVDRFFAWCAQLPQGCMVAMESCGGAHHAARRLRLLGLDARLLAGHFVTPYRMAGKSGKNDANDAAAICEAAGRPHMRFVPVKTAEQQGQLALHRLREGYKEERTALINRIRGLLTEFGLVFAQGPDALRLVLAGVLEDASNELPALARLALQRAQLHWIDIELQICWCDERIAAHVRCDARAAKAATLLGVGPTTASALIASVGELGQFANARQFGAWLGLVPSQNSTGGKARLGGITKRGDDYLRTLLIQGAKSAVMSAAKRRDRISQWLVQLKERVGWQKAVVALANKNARILWAVLTRDGPFDPNHVPQIPVARQKPAPT

SEQ ID NO: 487380 - protein, 341 aa, unidentified
MVKTPAITGGVDTHADAHAAAALDGIGGLLGVSEFPATPAGYARLLGWLNSFGTVCLVGIEGTGSYGAGLARHITAAGIRVVEVDRSDRQDRRRKGKSDPLDAVSAARAAQSGRASGAPRGRDGAVEAIRALMIAKRTARAQRTQAINQARALILTGPDDIRTRFTRHGPAELVAELAALRPRPGRMVRYHTLLSLRELGRRAQFLDDQLERLDLLITPLVTARAPGLLKLYGVGPDTAAMLLIAAGDHPGRLRSEAAWAHLCATAPIPASSGKVTRHRLNRGGDRQANHALWRIVITRMSCHPATRAYVQRRTAEGLSKKQIIRCLKRYAAREIYPHLPG

SEQ ID NO: 487381 - protein, 403 aa, unidentified
MDGVFAGLDWASQTHAACVIDERGSVRVHFEVAHDAAGLAELVRRLRGAGVTTVAIERPSGLIVDVLVEAGLTVVPIHPNIVKATRPRYRSHGGKSDATDAYLLADLLRTDGHRFKPLACQSDDIRALRALVRGRDDLVATRVQLANQLRSLLQSFWPGAAEVFAEVDSPIALAFVKRYPTPEAASRLGPKRMASFCGQHGYSGRRSPAQLLQRLHQAPLVALGELEMQAKGELALSLVHTLSRLIDQIRVLTSRIEHDVGSFDDGKLLMSFPRAGRICAAQILAELGSVRERFDSDEHLAAEAGVAPVTYESGKHKAVTFRWACNHRLRAAITCMADNSRHASAWAAAVYAKARSRGCNHPHAVRILARAWLRVIWRAWIDRLPYDPRRHRAAQLTSQTPGG

SEQ ID NO: 487382 - protein, 361 aa, unidentified
MEVGQTMADHGVVGGVDTHKDLHVAAVVDELDRVLESRCFATTRHGYQQMLTWMRSFGQLRRIGVEATGTYGAGLLRYMMQNAGVEVLEVTTPDTHDRRKRGKNDDLDAQNAAHAAFAGRRTVTPKSRDGMVESLRVLKACRKTAVAARRVALQMIHNTIVCAPDELRETLRRMTRMQLIRTLAAWRPDLTDYRSVVSAYRITLKSLGRRYLDLHDEIADLDTMIVAIVDELAPALVARNSIGHGSAAQLLVTAGENAERLQSEASFAALCGASPVPASSGKTTRHRLNRGGDRAANSALHIIAIGRLRTDPRTKAYIAKRVAEGHSKLEAIRCLKRYIAREVFSLISQRKREINQGRNVA

SEQ ID NO: 487383 - protein, 494 aa, unidentified
MDRIKRNKLKKHDLLVNNMNHRSASERELSPPRSKRTSQRPVPSEENRSKNTNRVPSLEDLYKAALERTRPESNQKEVLAMFYVGIDWADDHHDIFIVDESGNKVNSFRIDHNPQGLSFLRDQVRKLTVPKEQVIFAIETHKNLLVDFLLDEGYTVYSINPKSVDRYRDRYRVSGAKDDTFDAMVLANIIRTDRNQHRAIMPNSDLGRELKVLTQDEQRLIRLKTKLINQIQACLKDYYPQALELFCQIDQPVTLDFLLAFSKPQVVPLAKLMRFLKKHHHAQAEEKAKEIYNKLSGQHIFVEELTIRAKSRMLIALVNHLKMLLVQLDEYQKEIERLFAGHPDADIFKSLPGAGQKNAPRLLAEIGDNRQRYPEAKNLQSDAGTSPVTEKSGKVKIVHMRFACRKSFRNTLYQFSFSSLAESLWAKQFYYSQRASNNTHTEALRTLSNKWLKIIFRLWKDHLTYNEDIHLANIMRYQLKATPVVAQNHFSKTS

SEQ ID NO: 487384 - protein, 345 aa, unidentified
MMVVLGTDAHKRNHTVVAADEAGVELGSITAAATPEGHLRLVKWAQRWPERRWAIEDCRALSRRLEADLLKLGELVVRVPPKLMAGVRRSARTRGKSDPIDALAVARAALREPDLPVAQLDGPSRELRLLVDYRESLVKDRTAAQNRLRWRLHELEAGYDPPPGSLNRYKTLDQIDQLLAVHTSMVAELGKREVARIRELTREANQLERDIRDRVIEQVPTLLEIPGCGGLTAAKLVGEAADITRFKSRDAYAMWAGVAPIPVWSANNQRFRLNRGGNRQTNAAIHRIAITQIRIHPDAQAFITRRLEGGSTRREALRLLKRKLANVVYRTLLTDVQQPALADAA

SEQ ID NO: 487385 - protein, 457 aa, unidentified
MSAPQKVKIKSTRKTNVQLPTLRPHAAGIDIGATQIQVAVPCDADPKPVRTFSSFTDELHALRDWLKKCGVQTVAMESTSVYWIALFQILEAAGLEVCLVNARHCKNLPGRKTDISDCQWLQYLHSVGLLRASFRPPEQICAVRSLLRHRANLIRYAGSHVQHLQKALTQMNLQIHNVISDLTGVTGLAILDALLAGERDPQKLAALKDHRIKASRDTIARSLQGDWRPEHLFVIQQTLDTWRHYQRLIAQCDQQIELLLARFDSKVDLYQHPLSATRLQHKKPQRNEPHFDARSELYRLCGVDLTQVPGIQINTTLVLFTELGPDFVTRFPTAKSFASWLGLCPDNRITGGKIISVKTRDVKSRAAMALRLAAQSLWHAKDYLGDCFRRWKARLGTPKAITAMAHKLARIIWHLIKYRTPYDPAVWAQAEEKLKKKRLKFLQQTAAALGYTLLCAS

SEQ ID NO: 487386 - protein, 372 aa, unidentified
MQNDTTTTVHVALDVHKDSIVAAYSVGLGEVQNLGNIGVLECDITKLCARMQSKGSHVSFVYEAGPTGYGLYRLLTKKGFACMVCAPSLTPRKPGDRVKTDRRDAIKLVKALRMNDLTRVHVPDVQDEAMRDLVRAWGAAKQDMRQARQRLKSFLLMHDVRYTGTANWGPKHRRWLSECVFATPWSQIAFEEHRRAIDERVAQCERLEQALREAAPQWHWYPVVQAIQALRGVQFTVAITLIAEIGDLSRFEHPRQLMAWLGVTPSEHSSGGSRKLGGITKAGNSYARKVLVEAAWSYRFPAKVSRIIQVRHEHLPRSVIDRAWDAQLRLCSRFRKLTAHGKHRNVAVVCVARELAAFIWDIARITRGQPAT

SEQ ID NO: 487387 - protein, 351 aa, unidentified
MDYYKSLTEYNCGIDLHSKQMYVCVMDNDGKILVHKNIKGNDFEFFLKITKPYTHDMTVVCESTFNWYWLADACCEAEIEFVLAHALYLKHIHGGKNKNDKIDSKKLAHLLRTNFIPPAYAYPSAHRPMRALFRQRMNYVWDRASLLGHLKMNQYAEGLVPIPITARKRDEWEKRILDQYTNPLLKMAVKGDVAMIRSYDEQIKLIEKTLVAKAKGVFAREYTLLLSVPGIGKIMALTILFEMDTINRFPTVKDFISYSRLVKGSVASAGKIKGLSGGKMGNAYLRWAFGQIALTAKRCHPLISTYAEQITSKHGKFKGNAILSNKIARCVYYMLQNGTVFDVEQLIAKSI

SEQ ID NO: 487388 - protein, 323 aa, unidentified
MKKKGGVLSREGIFVGIDVSTGSLDIAIHQGKKWQVEYKDRGVATLIDRLKDIAPQLVVLEATGGVEIAVTAALSVAGLPVVVVNPRQVRDFARATGKLAKTDAIDAQVLAHFAAAVRPAVRPLPEPAQRDLQAAVLRRQQLIEMLTAEKNRLRTTHASLRERVMAHISWLEQELEDLDKDLQDAIKKSPLWHEQDQLYQSAPGVGTVLSTILLASLPELGTLNRKQIAALVGVAPFNRDSGKLRGRRTVWGGRIQVRSALYMAALVASRFNPVIQTFYQRLLAAGKPKKVALVACMRKLLTILNAMARDKTPWETDLEFVHP

SEQ ID NO: 487389 - protein, 385 aa, unidentified
MFVGYRVGSGPARSIRQWWEAPVFTERTSIGLDVHARSVVAAAIDGVTGQVSQTRLTPSYEHIQEWIKQLPGSVAVADEAGRTGFGLYRALTGAGIRCEVLAPSKLQKPAGDRVKTDARDALHLARLLRLDEVTSVSIPSVNREACRDLVRAREDCRGDLMRARHRLSKLLLRHGIVYHGGAAWTDAHDRWLRARAVPQLLMPATRMAFDSDYEHVLMLQARRQCLDSAIEDIAADSEFTAVVRRLSCLRGVGTLTAFALAVEIGDWDRFTGNTIGSFVGLVPSESSSGSTRAQGPITKTGNTHVRRLLVEAAWHHRPKYQVRAVMRSRWELAPAAARARGHEGNRRLHNRWLGFLARRKRSTVANVAIARELAGWCWSLAVMDD

SEQ ID NO: 487390 - protein, 337 aa, unidentified
MNEIIRIGIDTSKHIFQVHGVNAAEQPVLRKTLRRGQLERFFTSLPPTLIGLEACGASHHWARLLQSLGHEVRLLPPQYVKPYVKRGKNDAADAEAICEALSRPSMRFVPVRSTQNQAELMLLTARDLLLKQKTMLINAIRGHAAEFGVTGRKGANNIAALHELIASNDAVPELAREILGQLFEQVQSLEQQARTLEKKLVAWHRSNKCSRRLATIPGVGPIGATAMVMKVSDPRIFKSARHFAAWLGLTPKDHSTAGRHRLGVITRAGDEMLRRLLVNGATAVIQCARPGRSSPWLLNLLARKPKKLVAVALANKIARIAWVLMTRDEDYRHSLAA

SEQ ID NO: 487391 - protein, 355 aa, unidentified
MSMKKVEDLSELAVIGVDIGKDVFHLVGFDDGGNLVLRRKVKRLALTATFEKMPQCVVGMEACLSAHFVSRTLRGLGFEPRIIPAIYVRPFIKGQKNDYNDAEAIAEAALRPNLRTVTEKSQDQLDLQALHRVRARLVSRRTATINQIRAFLIEQGITVRKGLHALKSSFLPILEERQDEISPRMRAILSGLCGDWLWLDERIETIAKEIEDISRTEENCDNVMTIPGIGPLISTAMVAAVGRGEVFDRGRDFAAWIGLIPRQYSTGGRTVLGRISKRGSRYLRMLFVQAANVVLMRPHHWPGFSFGDWLARAATRMHRNKLAIALANKLARIAWSVLRHGTPFDAQRDEVMVGV

SEQ ID NO: 487392 - protein, 421 aa, unidentified
MSQQNISRKLAQVKKGTLHVGVDLGLENNVAIVINEHAERLGRFRFPNDREGYEYFHRHIEKAQQKSSAPEILVAMEPTNYLWKLFASDLEQKNVRYRLVNAYTVKKHREGDQLDRSKDDPRDAFTIADLSRTGKFTETQLQHGAYAELRQYVSLYYRLKRQIRREKQHIWHAVGQLFPELARVFKNITGETAKAILSTQAAAVEIRKISEEEFIAKVRSGFDGNRLYVSRLRSAYRLALSSVGVKYGVQALQLALELHVASLNRLQSQEKQTLSALEACYLSLPEANFLLSVKGIGTLSGATILAEIGDPKRFRNARQLVKLAGIQPTPNRSGRKQRSATPMSHQGRPRLRSALYFTCLRLIRVDQRFSQLYQRLQNREKNPLTKMQALGALMNKLLHILWALMKQRTQYKPLGDPLIET

SEQ ID NO: 487393 - protein, 371 aa, unidentified
MGAYYVGLDVHSRETVFVIQDSTGTVVGRGALPTRPEAFARMCHQYQLPAGTPVALETGTSAFYVARALRALDLKPIVIDAHEVRVKARRPGQKSDRRDAFELCDGLRRDVYRSIVHIPSPAISTLRTALSRRRHFVRIQTAEVNATKRLLRGAGWLGGNRGSLRNASGWERLIDALASEPALQTHTRFHYAVWQQAGEQVRALDHLLGDLGRGFRDDVRRLETVPGVGPIVALTAVAVFADVERFGSAKHVASYAGLVPSTYQSADRDCHGHITKRGSAELRTMLCEAAHHARRPSHPLHPYFLKLCARRGYKSAVVAVAHRLCRVLYALLRDGTDFQPSRLGIEEGPFTQTVTRRFRLTPKSAGRLALV

SEQ ID NO: 487394 - protein, 316 aa, unidentified
MNTQNGTPVNIGIDTSQDQLDIFVRPSGEFFSFPNSPQGATEAAKAIRAFKPDRIIIESTGRLEFNFVYAAHKAKLPVAVCNLGNARNFAKSIGRTAKTDKLDAMDIAHFGELTQPRLTELKPEKLRLISDLLAVRSQCMEMSTMQKNRLKRMPKTVHKPIKAVLKTLQTQIADIDKTIDKLATEVPEWKAQRDLLMSAKGVGKVLAYTLMSELPELGRLNNKEIAALVGVAPMNRDSGKYQGKRFIRGGRHKVRTVLFMSMLSAIQCHPKLKPMYERMVAAGKPKKLAIVACMRKQLVILNTMVRNGTEWDPNMV

SEQ ID NO: 487395 - protein, 373 aa, unidentified
MEHSSEAFVGFDTSKLKHAVAIADGGRTGEVRFLGEIENTAAATAKLVRKLAAKYERLTFCYEAGPTGYGLHRQIKSLGHECVVVAPSLTPKRPGDKVKTNRRDAVGLARLLRANELTAVWVPDGRHEAMRDLTRARETAMLDLRSKRQQISALLLRLGRSYPENKNTWTKTHMSWLASQKLEYPEQRLVFEEMMLAARQAQERLKRLEEAIRAAVPDWSLAELVTALMAMRGLDLVSAATLLAEIGDLSRFRTPRQLMAYLGLVPSEESTGDTIKRGSITKAGNRRARRMLVECSWSYQHPPRVGSLKQHKVDAAPPAVREIAWKAQCRLYRRYRALVRKGKLKTVAITAIARELAGFIWAVSREITPAAAP

SEQ ID NO: 487396 - protein, 424 aa, unidentified
MKVTYQTCCGVDVHKSFLVATIIKTTAGIEPSYQKKRFSTFNNSILDFKSWLLENECHDVCMESTGKYWVPVFNLLEDQINVTIANPKWVKAVKGNKDDTKDSKWIGDLFRLGLVKSSYIPCRLIRILREYTRYRYKIVSCRSSEKNRYQNALTVCNIALDSVVSDIFGKSSSSIIDYLLEQSGTTINHEEIASKLLKSLKSKEDAVIESIEGYQMTDAQKYRMRLIRAHMDYITAEINDIDKQIESLISSDPDYDKAIRLLTTIPGVKRDSAITIISEIGIDMSQFCNSKRLCCWAGLTPSNNESAGKKKSVRITRAGVYLKPALVQCAHVAVKSDKSPYYKTKYESLVKRRGKKRAVIAIARMILIAIYRMLSTGEVWNPSDLYKIDMPAPLAEKQKAKAIKQAKKLLQKEGLLPPDEPLAS

SEQ ID NO: 487397 - protein, 343 aa, unidentified
MQAVTTIGLDIAKSVFQVHGVDAEGNVVIRRQLKRRYVLAFFQKLPPCLVGIEACASAHHWSRELQALGHTVRLMPPAYVKPYVKRHKNDAIDAEAICEAVTRPNMRFVATKTREQQSCLTLHRTRHLLIRQQTSVINAIRAHLAEFGIVAPVGRNGVEQLLGVVADASDKRLPELARSSVAALGDQLRALKAQILQFDRLIMAWHRSSEASRRLDDIPGVGPALATALVATVADPRAFRSGRNFSAWIGLVPKQHSSGGKDRLGSISKRGDRYLRGLFVAGALAVIRYAKIHGTKHRPWLTALLARRPTKIAAIALANKIARMAWAMMARGERYKEPVALAA

SEQ ID NO: 487398 - protein, 309 aa, unidentified
MIETICGVDVSKAWLDGWIEAGGYRRFANDEAGIAALADWAGRHGAGLVVMESSGGLEQDAFLALWQAGVPCALTNPRAVRHFAEAMGRLEKTDRIDAEVIARYAAARRLQPAPPPCEEQQRLTALAARLRQVTGDITVQKQRLHSTRDPLALASLKEAIAFFNTQAKALAREIATLIEHDPVWTALDRTFRSVKGVADRTVGTLLAELPEIGTLSNKAITKLAGLAPIANDSGKRSGTRSIRGGRSSVRSILFLVADIVRKFDPTMAEFRQRLLDQGKPKMVVRIALARKLLVRLNAKARETRAEIGQ

SEQ ID NO: 487399 - protein, 400 aa, unidentified
MKGPIVSIDVSNGNSHFQCFIQRGTKMGKVHRIQHTVEGFNFLKSKIEELEKKTNEEVVAVYEATGVYTKPLERFLEKNEIKQYSISPLQSAKQRKTEIHNKKTDKKDPESIAEVYYAKELRKYEKEADLYHELRTANRVYEDCLVHLRKYKVTFQSHLSIVFPGYMKLFQDGYSQISLQLLEMYPHPDRLKNKQPEKVAKKLNKHTDHSFEVCLKTAEKVIEFANKTYPGCDKEDAWVAVLVDDIHHLQDTMEEAEAKLDKIIELAKATPYYSIILSIDGIGPNLASRIIAEFGDISKFKTRGAMVAYVGNDPNRAESGDIEGYHLSISKKGNKRLRCILYLAVTCSIRSRKENPINAFYQKKRQQSTPLKSKAAKVACITKLIRTIHGMCKTGTVFTS

SEQ ID NO: 487400 - protein, 341 aa, unidentified
MKVSTLGIDLAKNVFQLHGVGCNGQTVLKKKLTRDKFLPFLMQLEPCLIGMEACASSHHFARVLRQYGHEVKLIPPQYVKPYVKTNKTDAADAEAICEAVARPNMRFVQIKTAEQQAILVLHTERNILIRERTACANSMRAILAEFGIIMPRTLSQLYKKIPEILEEYDNELSPFVRCSVARQLEHLQGVEDQITLIEQELSRWAKTQPACQRVMKVPGVGLMTATYLVASVGNGQQFHSAKQFAAWLGLVPREFSSGGKQRLGRISKRGDRYFRYLLVHGARAVAADIERHKDNMPWLYRLLNKKAYNVAVVAQANKTARIFVVDAGSSYGISNLIRGLR

SEQ ID NO: 487401 - protein, 340 aa, unidentified
MTIIIGIDPHKATHTAVAIGSDESELATVTIRATRQQTDKLLSWAEPFEERTWAIESAGGLGYLLAQQLVGAGEQVLDVPATLASRVRVLGSGRSNKNDPNDARSVAIAALRSPGLRAVSIADHAEVLRLLAKRNGDIGDHRTQVVCRLHALIAALEAGGIAKELNASDANGLLGSFEPSSPAEQTRHQLALELLADVRHLDHQLAESKQRIKVAVSASGTSLTEVFGIGPVIACALLGYTGDVSRFASRDQFAAYNGTAPIEVSSGGRVAHRLSRRGNRNLNHAIHMVAICQIRHTHSEGRAYFDRKVAEGKTKREAIRSLKRQISNTVYRHLVADAAR

SEQ ID NO: 487402 - protein, 345 aa, unidentified
MNVTAVGIDLAKNVFQVHAVDARGKVVLRKQLRRAQVAGFFSNMPPCLIGMEACASAHHWGRTFERFGHTVRLMASQFVKPYVKTNKNDVADAEAICEAVGRHSMRFVPIKSVEQQAILSVHRVRQGFVKARTAQANQIRGLLGEFGLVIPQGIGNVAKRVPELLEDASNELPVPFRHLIERLTQHLKELDRQVKEFEKEIIEWHRSSELSRKLEAIPGIGPLAASALVASIADAHSFDNGRQVSAWLGLVPRQSSTGGKPTLLGMSKRGDAYLRTLLIHGARSAILAAKNTVDNTQGWLTDLLKRRHPNIAAVALANKNVRTVWALLAHGREFQADYKSTRMAA

SEQ ID NO: 487403 - protein, 336 aa, unidentified
MERQYVGIDLHRRSSTIYRMTAEGETLDCVRIANEPLALADAVSAAGPEPEVVLEATYGWYWAADLLAELGACVHLAHPLGNNWGNRRVKNDERDAKDLAAMLLLGRLAEGWIAPPEVRELRELVRYRFRLVQHRTSCKAQVHSVMAKNGVLPARVEMWGPGGTAQLDALELPMAYATRLDSLRRMIDVYDREVARFDGLIHRQLKGDAGYQAIQCIDGVGRVLGAVFVAEVGDISRFGSPEKLCSWAGLTPRHRESDEKATRGPITKQGSRLVRWAAIEAISKYRGGPKLRADYHRIAERRGKFKARVAVARKLLTLVYYGLRDGEIRCLHQQVA

SEQ ID NO: 487404 - protein, 310 aa, unidentified
MPLIKYLGVDLCKLELVVDLAAEAKPRAFPNDVHGHAALIAVLPEGAHLVCESTGGYQWALVAALHAAQIPVSVVSPSRVRHFALAKGLRAKTDPIDARLLSVFGQAMSCVALPPPCAGALELQALVRARQVLHTQLNEESSHDEHCTVALLQEQALARRALFHEQIRAIERRLRALIAANPVWRARSQRVQEVSGIGEVNAWIVLAELPELGQLARGQPGALLGVAPDPDDSGPRHGPRHISGGRSHARKVLYMAALTASQHNPVLAPYYRHLTEHRHKPHRVALTAIMRKLVELLNRLLADPNFILAS

SEQ ID NO: 487405 - protein, 383 aa, unidentified
MLNLTDTPAANDYATIYVAFELSKAKWKLGVVVPGSPKTSYFNVAGGDSAALSELLAKWRAKATATGKPVRIMSCYEAGYDGHWLHRWLTDRGVTNYEIDPASIEVNRRDRRAKTDRIDVDQLMRTLAAHVRGEPRVCSVVRVPSHEDEDRRRVSRERKRLQNERTQHSNRIIGLLHAQGIRDVQPLKRGLLASLDQLRTGDGRALLAKLKAEIVREHERLCLVNKQLSELEAASQAEVKAAASGSAGAQIKELARLRGIGLRSGRDLVNEVFYRSFNNGRQVGSFLGTVNSPYNSGNSKRDQGISKAGNKRARALAIQLAWLWLKHQPQSELSRWFHRRVGELKGRIRRINIVALARKLMIALWRYVTTGVVPAGAVLGRGI

SEQ ID NO: 487406 - protein, 347 aa, unidentified
MRFYTGQHRYYCGIDLHARTMYLCILEHETGEVVLHRNLRCEPDLFLRSIEPFRDDLVVSAECIFCWYWLADLCLRENIPFVLGHALYMKAIHGGKAKNDRIDSRKIAVLLRGGAIPMAYVYPQGMRATRDLLRRRLFFVRRRSELFSHVRTTFYQLNLPAPAGKLREKRNRTGVAETIHDPVVRASVEADLAVAAGLDVTIHFIEDEIGRQAKTENLDTLELLQSIPGVGPTLSRTLLYELHDVARFARVQDFLSYARLVKSQKASAGKILGTSRDKIGNAHLKWAFSEAAVGFLQKNPRGQKLIQRLRSKHGKGKALSILAARRGRASYFMLRRSTPFDMDRFMN

SEQ ID NO: 487407 - protein, 400 aa, unidentified
MLSIGIDVSKGKSTVCGMKPGGEIVYTPFEVQHTREGMSELVSLLRGSGEEVRVVLESTGSYHCPVVAALLENGIFVSVVNSLRMKRFCSQSIRRVKTDQIDAMQIALYGLAYWQELQPTRLPENTYRELQLLARQYYQMTSLLIKAKVDFNALCDQVLPGMQELMSDHAGRHKLSDFVLRYHHTAHILKMGETRFRKDYCKWAEKKGYRNHERMAALIFATAQNGIPVLPDAPSTQIVITEAIRVLHTVEASRDAILTQMQALAKTLPEYSLVREMPCIGDTLAPRLIAEIGDVRRFHSKRALIAYAGIDAPPYQSGKFCANNRHISKRGNRYLRKTGYEVMQSYVMHKPANDPIFTFIEKKRSEGKSGKLAMVAGLNKFLRVYYGKVTELYRSLSAIE

SEQ ID NO: 487408 - protein, 337 aa, unidentified
MQHVAIDLGGRESQICVRDETERILREEKVPTKWLGAYLASVPFSRVIVETSAEAFAVADAAKAAGHEVRVVPSTLARALGVGAHGVKTDRRDAQALSAVSCRVDLRSVHVPSEQARNWRAICTARDALVKARTKLVNTVKSQLRAELVSCTARTSGLLPDRIRKEWTQVIGTVPPHVERLLEVIQTLNVQVLAADREVRALAESHEVCRRLMSVPGVGPVTAVRFVATLDQVERFDTAHEVQSYLGLTPGENSSSMRVRRTALTKAGSPQMRWLLVQAAWTALRVRPGDPMSRWAKQVADRRGRAIAAVALARKLAGVLFALWRDGTTYDPRRGAA

SEQ ID NO: 487409 - protein, 449 aa, unidentified
MGNGSGVSRGDRNRNARLERLRALVPVTNAIAGIDLAGKKQMVVVTDHDSRVLARRTFRCRAWELGAALDWAAGRAAAMGWAGVTVACEPTGHRWRVLGQLAADRSMPFVCVQPVVTSWSRRTEDLTADKTDDKDAVLIARLTAQLRCYVPEPVDETWGRLRHLGTRREQLITEAGSQLQQMRDLLECVWPAALDTARQPFRSVTWVAALSVIAGRDRGDLARTRRLGAARFEQAVRREVTRHGRQKPCLRIVRGMFAALGDQAGVIAHRPGGLERVQLLMEDWQLTKARLAETESRMTGVVDELGLTALVTSITGLSAVGAAAILAETGDPRRFATGRALVKHAGLAPREKLSGAFAGRTKLTGQGRPGLRLAAWRAVWGAQRSNPVYRARYHHLTSREHNKLRPTQAQAVIAAAILRQLHAVITTGQAWDPDIATHGTRRKPQALAA

SEQ ID NO: 487410 - protein, 415 aa, unidentified
MKSSSNTEFAAFVGIDWADRKHDVCLQAAGSDKRERSVLPHRPESISQWAQELAERFSGRPIAVCLELAKGPLVYALQRFAFLVLFPVNPTTLAKYRETFCVSGAKDDPSDAEFALELLLTHPERLTRLHPQSGPMRMLQQLVEQRRTLVDDVRRLTNRITDALKHYFPQALEWFHDKDTVVFCDFLTRWPTLKQAQRARQARLRAFFQEHNVRYPHIIEQRIQAILAASALTSDPAVIEPNRLLVEALVQQLRALLHAVERFDHQIAELAPSLPDYALFHSFPGAGPVFAPRLLAAFGEQRERYPTPAEVQKYTGIAPVTERSGNKCWVHWRLQCPKFLRQTFVEWAALSIPHCYWAKAFYEQQRARGSSHQAALRALAFKWIRILHRCWRDHVPYDDAKYLNALKRRGSPLLN

SEQ ID NO: 487411 - protein, 396 aa, unidentified
MAAIWAGIDAGKTHHHCVAIDESGRRLLSRRVANDEPELLELLTDVLGLSDEVTWGIDLADGGAALAIAILINHDQPVHYLSGRAIHRASESYRGEGKTDAKDAAVIADQVRIRRDLRPLRPGDETVIDLKILTGRRIDLVADRTRTVNRLRAQLTGIFPGLERALDLTNKGPLTLLTGYQAPAAIRRLGAKRLETWLRNRKVLRAGRLAEAAVEAAERQHTSLPGEKLTAQMVHTLAKEVMALNDQVAELDKLIEARFRDHRHFDVITSMPGLSIILGAEFLAATGGDMAVFGSPDRLAGFGGVAPVPRDSGNISGTLRRPQRYNRRLQRVLYTSALFSIRRNDESRRFYDRKRAEGKRHTQAVLALARRRVNVLWALLRDGRCYELVPPAPLAA

SEQ ID NO: 487412 - protein, 350 aa, unidentified
MKKNIKVAERHPAETIGIDLGDKMSRYMILNEEGLAVEEGSFRNSVESIAKHFGNRGRARVAMEVGTQSAWIAREFSKLGHEVIVANARELKWITSSDDKNDRNDARKLARLARADRNLLAPVEHRTAEQQAELAVIRARDALVRSRTLLVNTARSLAKGFGLRLPASITHTFGARALAGLAEHLQQAMRGLLEQIDAMGVKIRDYDGRIGDVAARHPEMERLASVPGVGTLTAAAFVLTLGRRERFAHSRDVGSFLGLRPRQRQSGERDPQLGISKSGDKYLRKLLVQCAHHILGHGGKDSALRQWGLSKSGGSTNKKRAVVAVARKLAVLLHRMWTTGGNFKPFPKMV

SEQ ID NO: 487413 - protein, 316 aa, unidentified
MSVSQVFVGIDVAKAQLDIALRPTGDRWAVTNDEPGITVLVTRLQEVAPQLIVLEATGGYQRAVVAALAAAALPLVVVNPRQVRDFAKATGQLAKTDALDARAVAHFAEAVRPPPRPLPDAQTAELRALLARRRQLIAMRTAEQNRLENTSARLRADIVAHIAWLDQRVATLDDDLDTTLRASPVWRERETLYRSVPGIGPVCARTLVLDLPELGTLSRQRIAALVGVAPFNRDSGTLRGTRTTWGGRGHVRATLYMSTLVAVRYNPVLKTFYQRLCRAGKAKKVALTACMRKLLTILNAMAKHQKPWHVQEVPSA

SEQ ID NO: 487414 - protein, 345 aa, unidentified
MEHYVGLDVSLKLTAICIVDQTGKIEREGVVPSDPEAIAAFIKSHAPHVARVGLETGATATWLWTELNKLGLPVICIDARHAKAALKMQINKSDRNDAAGIARIMQCGWYKEVRVKDLDSHAVKALLVSRALLVKIKRDLENQIRGLLKNFGLVIGRAKMNVFAVRAAELTVHRPELAAAIAPLLNARAAIEQQIADLDRKVMRLVRNNAQARRFMTAPGVGPITALCFLATIDDPTRFKRSRSVGAYLGLTTRRYASGEIDWTGRISKCGDMMLRSYLYEAANVMLTRVAKWSALKAWGIRIAKRTGLRKAKVAVARKLAVILHRMWIDGTEFRWSKEAANQPA

SEQ ID NO: 487415 - protein, 464 aa, unidentified
MPSKKTPKKRALDELACVFPNAAGLDIGSAEIVAAVPPDRDAEPVRVFATFTPDLHALVAWLVACGIDTVAMESTGVFWIPIYELLEAAGITPYLVNARHVKTVPGRKTDWNDAQWLQKLHALGLLQASFRPAAEIRTLRTLVRYRAELIERRAPHINHMIQALKHMNIQLSLVLTDITGKSGMAMLRAIIAGERDPQQLAQFRESGCKHSEAEITKALTGTWDDAQLFILQQAVEIFDYYTAKITACDDKLEQQYQAMESRAEKDAPLPDLPPAKKDSRSKNALRFNARAQIARVVGVDLVAVMGLSAVTVQTIISEIGTDMECFPTLKHFCSWLGLAPHNDKSGGKVVRSRTMKVRNRANQAFRQAAQSVAQSDSSFGAYYRAMRARLGPKQAIVATAHKIARTVYHVLKTREPYREETAAEYDRKRRERELKHLARRAQKLGYTLTAVPDRTSESQPEPAG

SEQ ID NO: 487416 - protein, 342 aa, unidentified
MKQYVGLDVSQKETSVCVVNEVGRVLFEGKAKSDPGALAALLRKRAPHAERIGFETGAMASWLWHELRRVDLPVVCIDARHAHAALSVRMNKSDQNDARGLAELVRVGWYREVKVKSEESQKIRAILVARSRLVTIRRDIENQVRSLIKEHGLLFPRAIGLQFRNQVRELLGENHQLLDVIAPLLSIHEHICKQQSKFDDEVRRLAKSDETTRRLMTVPVVGVVTALTFRHTIDDPSRFRSASKVGAYLGLTPRRNQSGETDTSGKISRWGDRLLRSYLFEAATVLLYRTKKWSSLKAWGMKLAKRIGVKKAKIAIARKIAVILHCVWVDGTSFDWGQAQPA

SEQ ID NO: 487417 - protein, 370 aa, unidentified
MTTPNILFIGMDVHKESIEIAIADGANLEVRRYGKIGGTHDAMRKTLRKLVSKDKELHFCYEAGPCGYELYRYLVSEGHDCWVVAPSMIPKKPGDKVKTDKRDAVQLARLLRAGELTPVYVPNREDEAIRDLSRAREDTMLVQKSARQRLKSFLLRHDIRYQGKTSWTEAHLRWLADEVRCPSPAQQIVFQEYVNAVTESQQRLQRLDEQIKYFVEQWRLYPAVQALMSLRGVQMIVAVTVVSELGDLSRFANPKQLMSFLGLIPSEYSSGPRQKRGGITKTGNGHVRRILIEAAWCYRYPAKVSRQMQLRQEKMPLVIRDIAWKAQLRLTQRYKHMQAKGKPHNVTVVALARELAGFMWAIVNEVKYPR

SEQ ID NO: 487418 - protein, 482 aa, unidentified
MARRLVGIDLGVATAHTVVVLNEEGRVVARRRCAPTLQRLEEVEQAALNDAPAETRLEVVFEATGAAWLPVAVFFVRRGHRVYGVSTAKASALRKFWSRHAKSNSIDAKTRAQLALIDDGLIPIELAEGPLGSLDRRVRAADRLRDLASAHKMRIRELARQMMPMLDEAIGGELTHGDIALLERYADPRRLVRAGRARLTAVIQKASNGHHGPARADAWVAVARQAIELYGDDPAVAFEDLAAEIAGEARLWHATETEHRVHARAREAAYQVVDPNGLARSLPGVGTTGGPVIVATMGRPGRFPNPDAFKAFTGLTPRASQTGVSDRKGHAMTKAGPRRLRDQLVQSANTARKVDPQLAAVYWSQMVERGAHHTKAVCVVAARLAARAHAVMTRGEPYVIRDLDGRPVTTAEAREIIAAKYHVPEHVRRRRRAQQGKAPQAVPQGTALRGDLPHRNASAHFNRDQDQTTTTSTSTANAATRY

SEQ ID NO: 487419 - protein, 373 aa, unidentified
MEDSITYVAMDTHKKEHKVALHYPGQEEILNLTVRNSSYEISKMVRKILKKAPGEVRFCYEAGVCGFDLKRKIESSGCKCAVIAPSLIPVKPGERIKTDRRDALKLLSMFMAGLLTEVHAPDSQQEAARELTRLHQTARENLMRIHHQLLKFLTRHGYIYTEGDNWTGKHLRWLRDLEFEEPLLREVFDSYFTEMQHCMERLASLAKQVDQLAESEPYKDIVGLLKCFHGIKTLTAISIITEVFDFGRFSKPRDLMSYLGLTPSESSSGEKQKKGPITKSGNKRVRRLLVEVSWHYRHPYCISKTLKKRRNNQPQWVIDIADRTGHRLRKRYWYLINRGKMPCKAMTAVARELAGFIWSVFREYQARNMEKVA

SEQ ID NO: 487420 - protein, 350 aa, unidentified
MEAYDGPQIVGMDLHRRRSVLVRMAEDGHKLSTVRIANSPARLAAEIKRAGLHPKVVLEACYGWYWAADTLTAAGAEVHLAHPLGVREFSHRRVKNDELDARDLADLLRMGRLAEAWIAPAEIRELREITRYRGKLVQLRTSCKDQVHGVLAKLGIEVTCSDIFGAWGTQWLDELPLPQPYSWKVASLRQLIGWLSAEITVLEQVTADLLAGHDAYRAVQALPGIGPVLGAVIVAEIGDITRFRHPARLCSWAGLTPRHYESDTKVVRGRITKQGSRPLRWALIEAVQRTPAGTPIHQARDAIIARRGPQARNIAKVAAARKLLTYVFYAMRDGHVRALDTPGAAAPETA

SEQ ID NO: 487421 - protein, 388 aa, unidentified
MIQVDDLSRSLIAFEQISTLVIVVELSQSSWLAAGVVPGIERRPLKKLDPDPTALLHLVEGWRDRATKAGRAITRTVLAFESGRDGFWLARWLRVHGVETFVMHSTSVAVSREPRRAKTDRLDTEMLIRVFLGWLRGEPRHCKMVAIPTLEEEDARRPSRERESLVGERTRIINRMKAALVRLGIRGFKPGLLTAPQKLDALRTPEETPIPPNMLDEMRRDMARLAWVREQINAIEQARLERLERAPATGRHAMVRMLARVIGVGVETADMLVQEALSRNLRDRRAVARYAGLTGSPDESGSKRREQGLSKAGNARVRRGLIQLAWRFLRFQKDSALAQWYRGRTEDAAGKRKRTMIVALARKLLIALWRLATIGEIPVGVALRPAVA

SEQ ID NO: 487422 - protein, 403 aa, unidentified
MFTLGIDVSKKTSRYLLLNPEGRKVKSFTLENSPQGFQNLLQRLQELSIPQADLLIGMEATGNFWENLYSHLKEKGFSVVLLNPYHVKKYREALAKKAKTDDIDALVIAQFLRTGEYVQSQVAEESIQSLREITRLRYELLTEKKNYQRQAYSLLSLIFPEHAQTALKNPFSISALAIFQRFPTAQDLAQAKPKQIEKIIRSIPGNSFGPEDIQNLIATAQKSIYSGRAKEARATSLRILLGHIANLMSSIELLDQEISKMLSPQGPQDSFPGENLLTIPGIGDKTVAAVLSYLGADGANFSSSTKAVGYVGYFPKIYESGQTKRENKISKRGPKVLRWALYMAAVASLKHNPEMRALYHRKISQGKTQKQALIYLGKKLLQIMLAMLKSGEPYNPLMVFVNA

SEQ ID NO: 487423 - protein, 335 aa, unidentified
MLSNEGGILREGQVTTTKAGMVEAFGPLGRARIAIEVGTHSPWVSRLLQKLGHEMIVANPKQVKLITESSRKDDRLDAQTLARLARIDPQLLRPIQHRSENAQGALMVIRVRAALMAVRTSLVNTARGLAKSMGERLPKCDADQMGVLQAVSLPPKLRHVLEPLLKEVESLTEKIKDSDREIEQIARKDYPETALLQQVGGVGPLIALTFILTVEDKDRFEKSRDIGCYVGLRPRRSDSGQSQPQLRITKEGDPYLRTMLVQGAHYIISRRGPDTDLKRWGLHLAKHGGKRGTKRAVVAVARKLAILLHRRWVTGEVYEPLRNHNSRQEQKKVAA

SEQ ID NO: 487424 - protein, 343 aa, unidentified
METIYYIGLDVHKKTIAYCIKTVGGKPVRQGVVSAERKELRQWLAGLPGPWMGAMEATLFTGWIYDFLRPHAVELKVAHPEMLKAITAAKKKNDRADAEKLADLLRVNLLPECTMMSEELRELRRILRYRNLVVRTAVKMKNKISGLLMEVGAPHNKQRLHGKKYFGELLGRLEDVPDSVNDLLRLSRSNLELFTAIQKKLVSTLREKDLIRERVERLQSIPGVGEIMALTWVLEVGDSGRFSNSRQAVSYCGLCSAQRESAGKEQRGPISKKRNKHLQTMLIEAAKLSPRWNPQLAVLHDKELQRGNRNRATLAVARMLVEFLLAVDRRGTPFTAEAPRQVA

SEQ ID NO: 487425 - protein, 365 aa, unidentified
MNAKYIGFDIDSKKTVACIVQQGQKDRYRTLVTDLQQMQQYLQQQRQDAGELHLTFEISGEAGLRYDALRDCVDTLTVSNPHKMTWVYRTSKKNDRIDARKQAVLLSIGEVPPVHIPKREVRQWRATIQQRRGTVNRIVSVKNRIRALLKANGLSQPPYKGSLWKADNVQWMRQEARTWSEACAEQLWRVHLTNLLEEFKLLGEQLKGVTCYLDRYLADHGGGTLLMSIPGVGPRTAEAILAYTDEVQRFARSKQYAAYFGLTPKLDESGQTRRLGHISKEGPSVVRWLLVESVWRAIQKSPALKAFYEQIVGGQNQRKKVAVVATARKLLTIMRAMLKTGELFNEELVSGKKEQDPPAVNPQNN

SEQ ID NO: 487426 - protein, 338 aa, unidentified
MTLYCGIDLHAKNSYLGIIDEKRQRIFKRNVANDRQTILSFLAPYKAELAGVVVESTFNWYWLADALMEEGYRVHLANVCAIQQYSGLKYIDDKHDAFWLAELLSLGILKEGYIYPKEERPVRDLLRKRSHLMKLRTSLLVSLQNTMANVCGRKIPSHHVKGKEDRVSTHLCQHESLVLMGQVSKASIEALTLQIKTIEAHVEKHCRIEPLYRGLQSLPGVGKILGLTILLETGPISRFPKVGNYVSYCRKADSTWKSAEKVKGKGNIKNGNRYLSWAFAEAADHARMFDTTSRNFYTRKVHERNGAVAHSALANKLARAAYYIMRDHVPYEEAKLFG

SEQ ID NO: 487427 - protein, 430 aa, unidentified
MKNRSNQRLEEITAGTLIVGVDVAKSVQWARFVDYRGVEIGKAMSFQNNRQGFEAIVARIREICKIKTLQYPIDNIVIGMEPTGHYWKALANYLMKAGYKVVCVNPYHTKKAKELDDNSQTKSDKKDAITIARLVKDGRFFDPYLPQEVYGELRNLTNARVSVMKRNSAVKNTITAILDEYFPEIWTVFKKPLKGKASRQVLRSCPFPAFILALGENGVLAEIKKAVKKTVGMKKVRQLIRAAEMSIGVGYGLESAQMRLCWLLDELELIEKQLGQVERSMEKYIHETGYAEQLLGIKGIGVITAAFFLGEVGDPLRFQNARQIANYAGYNLVEDSSGKSKSGTCISKRGRKQLRSVLYQMAYTMVGQNAEMKMLYRHLITRKNNPLKKKQALVVVSKKIITVIYSLLKKKETYKPELVLGAVRKEMIAA

SEQ ID NO: 487428 - protein, 333 aa, unidentified
MKLSEICEVVVGLDVHLKKTQVTIMKMNGDIVKKERVDTTKADLQRSLECVPKGSKVALESVGFCWPWIDFLEELGHNVLLANPLLLKNMGDLKNDKVDSKRLANLTRMNSLPTCYVPSTKLRWLRSLLRHRSFRTRLSTAVKNRSRSEFSKRDIHLDVDLSRLNGRRAACGLDVFEVNQNMELLDLMDRQTKEVEAILKKQYAQVKPVQLLMTIPGIGFLSAVTLYAEICDIKRFSNPDKLAHYAGLVPRVRQSGEHLWMGKETKGDAWLKWILIEASWSHVRYCREGHLAKAFEVACRRKGKSTDAIKVVARKLVNVVWAVLTYEKEFMVK

SEQ ID NO: 487429 - protein, 408 aa, unidentified
MQVLHPRCGGLDVHKDSILACARIATETGVAQHVETFGTTTSSLLKLSDWFAGYGVTHVAMEATGVYWRPVWHVLEGVFDLVLANAMHIKNVPGRKTDVNDAMWIAGLLAHGLIRGSFVPPTSVQELRTLTRTRKQLVRERASHVQRIDKTLQDANLKLGSVLTDIMGQSGRAILAALVAGETDPEKLVTLVSNRVKAPRREILEALRGRVTPHHRFLLKLHLDQIATLEEAIAQVDAEVGNSLAPFRAAAERLTTIPGVSAVAAAVIVSEIGIDMTRFPTVGHLISWAGLCPQNDESAGKRRSTRLRKGAPWLKTTLVQTAWCATRAQNGCLRAQFLRLKARRGPRKAIIAVAASILTAAYFMLSRGTDYHDLGPTSLERGDRQKVARRLVRKLAELGFQVDLRDAA

SEQ ID NO: 487430 - protein, 408 aa, unidentified
MNVIISTKYVCGIDLHARKMSCCVMDLQGNVLSKKNMRCELDKLLEYLKPWKGRITIGVESTYNWYWLVDGLKEHKIQCHLGHALYIKRMSGKKHKNDPVDAREIADLLRSNRFPQSYAYPQEMRSGRDLLRRRHHLVRKRAGALAHIQNTCIQHGYLKIVKADVHRKSTRRTIPDFTNDPILKQILLADLDYIESLDTIIDGVEKDIIKNACNHNKTHFKLLQTISGCGPITALTVLYETHTIGRFASMQCYSSYSRVIRAENSSSGKDYGRSSNDKIGNPYLKWALSEIGSHIILHSVLIRQWYEKQVIEHNKGSAMARLRHKLAVAIYQMLKYNVGFDEHKFLGIQGKQEINPTNNWQEKSGKTSKPQCVIGKSPVSLLTISNNKKKAGRISLRTTGKSKVRTTC

SEQ ID NO: 487431 - protein, 408 aa, unidentified
MDAYYIGIDWADAAHAACVVDAAGEVVWTGAIVHTAAGLAAWRERLEGWRVPGREIAVAIERPDGLLVEQMLAQGVPVYPVNPKALDRARDRFRVSGAKSDPFDAAVLAQWLRTDHAQWVPLQPQSAPAQELRLLTEDHQRLVRERTRLVNQVTATLKAYYPRALELWPDLTTASARGFLRAYPTPDALTAGTRAQWERFTRRQRLASRTRSELWARLRVPQIPVPPHLVRAKASLLGALLDQLDAVIRHLADYQRRIEDFFGSLPAAAWARTLPASQSGTTVATLWAQMGDAPGRWASWHHLQAHAGTVPITRTSGQQHSVRFRRACDHLFRAAMDRYAFLSIRQSEWARAYYRQQRARGHRHHRALRALAAKWLKILFVLWQRQEGYDETRHLAMIARQHLRAAAA

SEQ ID NO: 487432 - protein, 403 aa, unidentified
MNAVGIDVSKGKSMVAALRPFGEIVAKPFEVPHTSSGFHQLVDQLNSLDGSTRIIMEHTGRYYEPMARWLSDSGFFVSTVNPKLIKDYGNNTLRKVKTDKADSVKIARYALDNWQDLRQYTSMDIIRNQLKTMNHQFSFYMKQKTSYKNNLISLLDQTYPGINDFFDSPARSDGSQKWVDFVSSFWHVDCVRSLGLATFTERYQKWCKRHGYNFQPEKPAQIYSFSKELISVFTKDSVTKFLVKQAVEQLNTVSFTVEQLRLEMNRLAAQLPEYQVVMAMKGVDPSLGPQLMAEIGDLSRFSHREALTAFAGVDPGVNQSGTYEARSVRTSKRGSPQLRKTLFQIMDVLIKSAPSDDAVYRFLDKKRSEGKPYYVYMTAGANKFLRIYYGRVKEYLAALPKPE

SEQ ID NO: 487433 - protein, 337 aa, unidentified
MDLKYLGIDLAKNIFQLHGESACGAVLLRRRLGRTRLLDEIAKLPPCTIGIEACTGAFYWQREFEAVGHSVRIIAPQYVKPFAQHQKNDKNDAEAICRAMQQPNMRFVPPKTLAQQDIQALHRGRQRLVNHRTALVSQMRGLLLDRGLAIGLSITRVRREIPKLLSTQRGKLGDLFAAMLEQLFDMLCQLDVRVKWFDREIERVFRTDEACQRIAKIRGVGPKTATAIIAAVGDGAEFKNGRHMAAWLGLVPRQHSSGNRQRLFGISKRGDRHLRTLLVHGAHAVLRTAPKHSDAVSQWAISLQERRGAAKAIVAIANKNARVIFAMLRGGTEFRAA

SEQ ID NO: 487434 - protein, 357 aa, unidentified
MSMLAELVELVIGVDTHADTHTAALVVATNGALLATITVSADADGYAELVELAEQHGGLRAWAVEGAGGYGAGLARHLGDAEEMVLELDRPARPARRGGRKSDVIDAERAARDALARTRLAAPKTGPERAALAALLTARRSAVAAATTAARQLRALVITAPESVRARFRGHTTGGMIEIAAKARPGTATADVEIFTVLTALRALARRIRALDTEARDHERALRAIVRSWRPDLLDLCGVGPIVAAVVLTAWSHPGRVRSDAAFAMLAGAAPIPASSGKTVRHRLNRAGNRQLNRALHNIALSRLRHDPDTRAYAERRRAEGKTDREIKRCLKRYIARQLHRQLENTSTPAKSALAAA

SEQ ID NO: 487435 - protein, 316 aa, unidentified
MVPSPLFVGIDVAKATLDIAVRPTAETWSVSNDATGIDALVLSLGALAPTLIVLEATGGYQGPLVAALVAAALPVVVVNPRHIRAFAQAVGILAKTDRIDARVIAHFAEAVKPAPRPLPDAETQELRALLVRRRQLVEMVSAERARLDTVPPSIQDAIQAHIAWLTTQVAGLDDALTRASQTHPVWQAKDDVLQSIPGVGPVLARTMLGQVPELGTLGPKPLAALIGVAPFNRDSGTLRGRRPVYGGRAEVRAVLYMGALVATRHNPVIKTFYERLLAAGKAKKVALTACMHKLLTIMNAMVRDLKPWQPQEVPSA

SEQ ID NO: 487436 - protein, 307 aa, unidentified
MDHFAGLDVSVKETSICIVDDTGRIVREVKVASEPEALLKVLGNPAYRFKRIGLEAGPLSQWLFSALAEAGLPVICVETRHMRAVLQAQINKTDRNDARGMAQMMRAGLYRPVHVKTLRSQKLRMLLTHRKLLQSKAIAIDNDLRGTLRNFGLKVGVVGTVKFEARIKELVENLPDLAELVEPLLIVRRTLREQIGILHRRLLAIVRDDEVCRRLMTVPGVGPVVALTYRATVDVPARFRNSKAVGAVFGLTPSKYQSGEINRTGAISKCGDEMMRVMLYEAAQSMLRSKNGHGSRPGRCRSPGAVG

SEQ ID NO: 487437 - protein, 474 aa, unidentified
MSVFERLRRGEKLGRSERRELQRQFDASEPVLKIVHPDAAGIDVGNASHFASVPAGRDAQPVREFGSWTSDLHRMGQWLKSCGIKTVAIQSTGVYWIAVQEVLEQEGLEVYLVNARGTKNLPGRKSDVQECQWLMKLHTYGLLRNSFRPPAEIRAIRTLWRQRARIVQEAGEAIQQMQKALTTMNVQLSNVISDLSGVTGMRILRAIVKGERDRYKLAQMRDKRVRASEEEIACSLEGHWREEIIFELRQVLEKYDFHQKQLAACDVQLQIRLAELPSREPGATERIAAEEASTKHRRSGKNAKNQPQFDLRTELHRVFGVDLTAIDGIDVMTAQVILSELGPDLSAFPSEETFSSWLELVPRNDITGGRVIRQKARASKNRVANAFRMAAEALNRSDSYLGARYRKYRSRMEGKKAVKVMAHYLACLVYRLLTKGQDYVDRGAAYFEKKRGERELAKLKRQAADHGMKLVPLS

SEQ ID NO: 487438 - protein, 465 aa, unidentified
MGAGKMNRKQRKELGRRLQSANPGLEVVHPRAAGIDVGNGAHYVAVRPEQDAEPVRRFECFTADLHRMADWLEACEVKTVAMQSTGVYWIALYEILEQRGFEVYLVNARHTKNLPGRKSDVQESQWLLKLHTHGLLNNSFQPTAEIRVVRTYWRQRGEHVRGASTCIQRIQKVLTQMNVQLANVISDLSGLTGQAIVRAILGGERDPRKLAELSHPRIRAGREQIAKSLEGNWRSELLFVLKQEMEMYETYQHKIAECDRQLEATLKQFTVAERASTEQPKIPNAKKTKRIQRNAPGFNLTSELHRISGVDLSRIDGVNAIVAQTIISEVGLDMTRWKTEAHFASWLGLCPDNRISGDRVLARGTRHVINRAATALRMAATTLIKSQSYLGAQYRRLRTKLGAPKAITAMAHRLARLVFRMLKYGQEYVDKGTHYYEQKHREQQLHLLKKKAATLGFQVVETGVA

SEQ ID NO: 487439 - protein, 355 aa, unidentified
MERYIGMDVHAASCTLAVILETGRKLRDFPVETNGQALVEAVRMIPGRKHLVFEEGLQSAWLYETLSPHVEEIVVTGITESRGPKSDKRDAYGLAEKLRAGNLDKSVFKAPRQFARLRELSRIHMTLVGDVVRAQSRIKSLYRSRGILVSGVNVYGVRPREDWQKQLGSSAQTRAMRLYDHLDFLLEQKKQAESDLLREASKHAIVRILETAPGFGPIRSARLVPIVVTPHRFRTKRQFWSYCGLGIVTRSSADWIQTSEGSWVKARVPQTRGLSRQHNRFLKYLFKGAATTVITQRNKDPIHARYERLLDGGTKPTLAKLSLARMIAATVLRMWKDEEEYDPERAGLPSKTREG

SEQ ID NO: 487440 - protein, 413 aa, unidentified
MEPIVEKGCGLDVGQESVVACLMTGPAGERPRKELRTFGTFTAELERMRDWLRAEGCTHVAMESTGPYWVPIYVVLEQAQRFELVVGNAQHIRNVPGRKTDVKDAEWLADLLRHGLIRKSFVPPKPFRDLRDLLRYRRALVNAGSAERNRLLKLLESANIKLASVASDVFGASGMLMLKALLQGGSTPEQMAELAKGRLRQKLEPLKLALRGNLDSHHRSMLETQIRRIEAAERDLVELDQLIDARLEPYRDKHDLLIQIPGVDWVTAAVLIAELGIDMSVFPTAKHVAAWAGVCPGNNKTGGKAKRAAARKGNVYLKTALVQAAHAAAHTKGSYFRNKYFRLRARLGAKRAALAIGHKILTAAYHMLATGRAYAELGETYLDRRDKRGVARNLIRRLHHLGYTVLITEEATA

SEQ ID NO: 487441 - protein, 385 aa, unidentified
MSELNDLSRSLTSLEQDKTIIAVIEMSQSSWLVAGIVPGIERHPLKKLEPNEEELVRLLMRWRAEATKIGRTIIRIAVAFEAGRDGFWLARWLRARDIDAYVIHPTSVAVSREHRRAKTDRLDTGLLKRVFIGWLRGEPDHCHMAAIPTLAEEDAKRPNREREGLVRERTRIVNRMKSCLVRFGVRNFKPTLRKAPERLATLNTPEGVPLPPNTLLELRRDMARLRFVMDQIKQVEEVRAQRLEEDPQEKSHAMVRLLARVIGVGIETADMLVHEILSRKLRDRRAVARYAGLTGAPDESGSKRREKGLAKAGNARVRRGMIQLAWRFLLFQKESALAQWYRTRTESAGKKRKTMIVALARKLLIALWRLVTTGEVPAGVVLRAA

SEQ ID NO: 487442 - protein, 410 aa, unidentified
MAERFVGIDVRLREHRIAILDRDGEAVGPSFTIAASTDGVATLVRALAAREATAAPTLIGLEASGHLWENLEAALGGAGYRVLVLNPLQTRRYRDVVRRKAKTDDIDAHVIAGLLRSGVAQASYVPDEPIQSLRELARLRARLLADCQDYQRPLVAQLAMVLPEHRAVLGDLLTARARGILAQFPTAQHLAKANPRAIRRAAEDAGARGFSLDDATGVRDRARRSLYSGKAAAARAHVVRTLVSQLERLTSAMDEVDHAASTLLPPSEPGTGPPDAELLQTIPGIGPQTAATLLGELGALTRFTDARALVAYVGFYPVIQESGDRAATPSLSRVGSRLARRSLYLAAVNAVRGSGEWRTSYLRKKAQGKTAKQALVVVAVKLLHALYAMLKHRQPYNPSRLLVAPATIGS

SEQ ID NO: 487443 - protein, 416 aa, unidentified
MEHLGSEHNINLVTPNGELNKSKAPHRVSSLYCEPDPARLMEKPNSVIAWLRLLMETAHAIMCSGVTPNPKEVPLKKNVKNFIGIDIASETFAISVFQSPDKPVITKDSLVNSEDGFQNLLPWFKDIRVTPSNSVICMEATGVYGEAISHYLAAQGFRVAIEPPLKVKRAFDQDGHKTDAVDSAQISEYAYRFFDELRFWCPPAEVTEKLKHFLSARELLTKQSVATQNALTAYKRHAIKDPLIIDMYRKNAAQLKEQIAAIDQHVKELMKANPSLHELSLILISLCGVGTLLAAYLIVASNGFQNITDFKHMAAFLGICPYQHKSGKSVYRNAHSRHFGPGYIRKLLHLAARSVATHNPEFKEYYWRKIEEGKSKKVALNNIANKLLKISFAMVKNHKQYIKGYRSVNPLVLQNA

SEQ ID NO: 487444 - protein, 367 aa, unidentified
MKKVSTAATKQSRNISQQQLTIGLDLGDRNSWYCVLDETGQLKLEQRVRTTAKALQEVFGAMPHSRVALETGTHSPWISRLLSELGHEVIVANARKVRLIGESRKKDDRLDAQTLARLARIDPKLLCPVKHRSAQAQADLTVIRARAGLVRARTALVNTARSLAKSYGERLRGCNVRNMNPEKAEALSPELQCALEPLLSTIEEVSERIAEYNDRIEALAQGSYPQVALLKQIKGVGTLIALTFLLTLEDPHRFGKSRDVGCYLGLQPGRRNSGQSEPQMHISKEGDPYLRTLLVQGAQHILGPFGVDCDLRRWGLKLAERGGRNAKKRAIVATARKLAVLLHHLWVSGEVYEPLHNSKRMTLTAAA

SEQ ID NO: 487445 - protein, 362 aa, unidentified
MKQYIGCDVHKRYSVFVTMDESGQASRAVRVAHGNGELEGYLSSLPDGTPVAVETTGHWYWILDAMEKAGLEPHLAHALAAKRMMVSPNKTDKLDAKGLATLLRNGTLPEVWVPSGSLRDLRGLMRSRLALRRMGTGLKNRISSALARYGLPEQFRGDLFGKGEVATKCRQQSVAALPEYSRFATEQELDLLEAVETCVTAVTEEISNSVGKLGWVRRLRTMPGVGEILGPTIYLEIGLVSRFPSPAHLAAYAGLVPRVSSSGGHTRLGRTRRECNRFLKWAFVEAAEVVVAHQESMSAKHVVRLYRRVKNNKPDRHGQAVVAVARHLAESAWHILEHNQDYREPQPTPGMIQRFHTTGRPL

SEQ ID NO: 487446 - protein, 365 aa, unidentified
MQKISTTRTNGRKIFKGQLTIGLDLGDRSSSYCVLDEAGKILLEQRLPTTPETMKEIFGRMARCRIAMETGTHSPWVSRLLLALGHEVIVAHAQNVRLIVKSRRKDDRIDARTLARLARIDPELLSPVRHRSAQAQLHLTEIRARAGLVSARTALINAARGLVKSYGERLRKCGSFQVSREIGSGLSTELREALQPLLREVESLNERIQEYDRRIEKMAKERYPEVALLKQVKGVGDVIATTYVLRIEDPHRFRKSRDAGCFVGLQPGRRNSGESEPQMHISKQGDEYLRTLLVQGAHYILGPFGEDSDLRRWGQKLAERGGKNAKKRAVVAVARKLAVLLHRLWVSGEVYEPLRNSHKAMSAAA

SEQ ID NO: 487447 - protein, 404 aa, unidentified
MACIASTDNKGVTSYEKKRFSTYTGNLREFGNWLLERNCRDVCMESTGKYWFPVYNILAPLGLNVVVSHPKFVKAIKGKKTDKKDAMWIADLFKHDLVRGSFIPPEDIRQLRDLCRYWAKLTYITTGEKNRAQNCLTASNFKLDDVFRDVFGKSATAIIDQLLINMGEPFDVTPFVNWRCKTPIDVIQTAVDGAFSPEQAAKLKLIRQHIDDVSELKAKLEELIFKLAEPYQAQIELLLSVPGIASPMTAIRIIAEIGVDMSVFDSAKHLSSWAGLAPQNNESAGKKKTTRIGKAGAYIKPLLVQVALAASRMKKSNPEIADKYQALKKRRGGKKARIAIARRIIVAIFHMLSRNEAYNGTLYQKSESVPEKREVTPEQAFAILTKQGFHIKGFDSAPKVELPT

SEQ ID NO: 487448 - protein, 434 aa, unidentified
MEPEFAALIAIDWADKKHAWMLQVPGIPDRQSGNIDHTPESVDVWASELRLRFAGQPVAVALEQSRGPLVFMLAKYDHLVIFPIHPTMLANYRKSFRPSGAKDDPSDAGLLLDVLTLHRNKLRRLNPDTAETRTLQFLVEERRKFIHEKTRYSNRLTSHLKMYFPQVLDWFDEIGSNIAAEFLERWPSLDKLQRARPATIERFFVDHNSRNAERIAERLEQIRKAVPATTDEAVIASCSAAAVAWASLLKQLVIAITAYDEKIDSLAREHPDYPVMNSFPGAGPALTPRLIAALGSQRDRFQTACEVQCYSGIAPVVASSGKQHWVHWRWACPKFLRQTFHEWALHSVAFSQWARDYYDGQRAKGKRRNTVIRSLAFKWIRILFRCWKDRKPYDEAAYRSALMARTLKDQPAGQTVKLQWKTVAGFSKLTASGA

SEQ ID NO: 487449 - protein, 336 aa, unidentified
MTIIRIGLDTSKHVFQIHGVDENEKPVLRRQLRRSEVEKFFAQLPPTRIGIEACGASHHWARLLRGLGHAVLLMPPQYIKGYVKRGKNDAIDAEAICEAMSRPTMRFVPVKTAEQQAALTMLGVRDLLVKQRTMLMNALRGHAAEFGVVAAKGPNKIVELLQRLATGEGVPALAREMLGMLASQLEAVNGKLKAIEARLMAWHRQDQTSQCLATIPGVGPIAGVSFALKIPDARAFRSARHFAAWIGITPRENSTAGKHRPGKISHEGDESLRRLLVLGATAVIQRAKRGRVSPWLLGLLARKPKKLAAVALANKMARVIWAMMISGEVYRRPQEA

SEQ ID NO: 487450 - protein, 400 aa, unidentified
MTESLIVGIDPGRYGHGVVVLRPDGEEALRERVANEAAAIEALVDRVVELAGGPGRALWVIEADGGDGAVLIGELLARDELVATLTPTEVAVRRKGRRQIHKSDLIDAELCARIGREEQATLRRLVAVPEAVAEVRVLARYQEGLIRDRTRLINRLRFLLSQYWPEFLAARAFAALDGDAVTALLVELPTPSAVRSKTPLELARFLAAQRYRRRPLERAEQILAAAQVGTRPQEAVYGRLVLEVAHELRALKQRIEALDVEIRDRFLLQPEAPIILSLPGMTHRTGPRFLAEVGALARFGSPDALAAYAGLTPTLWQSGRSSGTHFLSRRCNIHLRQACWSAALGSLKTPASRRFYDRKRSEGKSHHQAVIALARTQLRVLWTMLRAGTLFSAERALEAA

SEQ ID NO: 487451 - protein, 323 aa, unidentified
MKENRYPFSQFIGVDVSKAKLDFTFVDSTETVKIDNTAEQIVDHLIGRINDSRATIIVMEATGGYENLLVKVAGENNVAVAVVNPLRIRKFATGIGRDAKTDPIDAQAIAFYGQVVKPKPMLAKSDEETKLVALVARRRQLLDLINQEGNRLLQTTDPEIRDDIKESLETLKKQVKTIDGRLAKSVEASTVDRRKIEILQSVKGIGPVSISTFLAELPELGKLNRGQIAKLVGVAPMNNDSGQSSRRRRTFGGRSYVRRVLYMATLVATRSNPRIERFYQQLLARGKEKKVALIASMRKLLTIINTMVRNDELWRTEPKKTSV

SEQ ID NO: 487452 - protein, 385 aa, unidentified
MACVLTPEGKQIRKFGAMTKDLLMLSDWLTTFQVTHVAMESTGVFWQPIYNLLEEEFTVWVVNARHIKNVPGRKTAVKDAEWIANLLSHGLLSPSFIPGRDQRELRELVRYRRRLIQNRAQVVNRIQKVLEAANIKLDCVASDVMGASGRAMLRAMAAGETNADVLADLAKGKLRDKIPFLKEALRGQIGPHQRFMISSHLRVLDAITLELEELDREVATRMRPNEETIERLDSIPGVGRRSAEEILAEIGTDMSQFPTAAHLASWAKVSPGNNESAGKRQSGRTGRGNPWIKAALTEAAQAAAKTKDKYFAAQYRRLAPRRGRKRAIAAVAHSILVSIYYMLRDNVAYQELGGDYFDARDRVAIVRRAARRIEGLGYKVVLEPI

SEQ ID NO: 487453 - protein, 398 aa, unidentified
MNQAKFYLGIDIGKYIHVVCMTDSEGKVLFKLKVSSRADGWQKLTAAVKQHVSDSQWTDIHAGLEATGPYWLTFYEQLKKQGALVTVLNPIQTRAYRNEGIRGAKTDRVDAELIAKIIRFGDYTETQLPSEDIIALKQLTRLRTDLTHVNSGFKRKILSLLDQIFPEYHQVFKETFKKSSRELLKTYTTPEEIAKLSAKKLTKFLETVSCRQLNKERAKAIHQAAKTSIGAKLGQDATALSIKVLLAQVEHLEQQIENLEKEIAQRFRQQNTKLTTIPGISEINGATILAEIGNFDRFIGKDGAEKLTALAGVDPKVIQSGTLQGKAKMSKRGSPYFRYAIRMAAFVATQHDPMFKAILEKQKARGKHFEVALSHVERKLVHVIYSVLKNNKDYQPIM

SEQ ID NO: 487454 - protein, 420 aa, unidentified
MVYLERGYNLKELPWSKIVSNSFLFKEACMILVGVDVAKDKHDCYIMTSEGEVLFKSFTIANNMEGFNQLYEKILSVIDNFDNVKIGLEATGHYSYNILGYLLDKGLTPYVINPLHSNLYRKSLSLRKTKTDKVDSRIIASMLMSDVSLKPYSNTLYHNEELKSLTRYRFTKVQERAKLKISISRLVTILFPELEKLVPTLQMNSIYALLYEFPSAHAISKAHLTRLTNLLNTTSKGHYTKDKAVLIREAAKNSIGSNMPAKSLELKHTIKLIKELTSEINEIEEEIKIIMNKINSPILTIPGIGLSTGAQILAEIGDFKNFSSPDKLLAFAGLSPSTYQSGNMYSSNAKMEKRGSKYLRFALFNAAIYVSYWEPTFSQYLKKKRVEGKHYYVAISHVVKKLVRVIFHLEKTNERYSTVV

SEQ ID NO: 487455 - protein, 449 aa, unidentified
MAQRKRVSKLDYDVLEQINLDAAGADVGDEEIWVSVPRGRDREPTQEFGTYTADLRRIADWLAACGVTTVAMESTGVYWIPLYELLESRGMDVCLVNARHVKNVTGRKDDISDSQWLQQLHTYGLLHASFRPAEHICALRALVRHRDMLITHRSAHIQHMQKALQQMNIKLTTVLSDITGVTGMKIIRAIVSGVRDPYVLAGYRHGQCHKSVEQIALALEGNYRLEHLFTLQQALELYDFYGQQLQACDEQLEAMYLAYEARPTDQPQLKPRTQKRRKNQPYFDLRMQMYRITGVDLVAVDGLDALTVQKVIAEVGTDMSCWPTHKHFGSWMGVAPRHQITGGKIKSRGTAKNANRAATPLRVAAQSLWRSDSALGAFYRRQKARHGPAKATTATAYKLARIICHMLKEQQPYRDPGATAYQQQHRERAVRNLRHKAAQLGYRLEEAPS

SEQ ID NO: 487456 - protein, 468 aa, unidentified
MAMLQQINPRAAAADVGSESIYVSIAGAPPVRFGTVTKELHRLRDHLLAHHVDTIAMEFTGVYWVPLYELLENSPIRACLFNGAQVKALPGRKTDVADSQWAATLHSHGLIRSGFVPAAPFRVLRDYLRLRESHLGDASSSVLRMQKAMELMNIKVHDVISDITGASGRRVVQAILDGERDPERLLDLCETVIIKKKGQRMRDALEGTWAKQHLFALQQAWDAFQFCQAQAAACDAKVGEVLREMAEAIRAERKEEAKLGHGGTPPEGGEGVPGQEESKPKGRSGGKKMGKNAPKILDLESVLSTVLGGRRPQQIPGLTPYTTLTLVSEIGTDLSAFRSAKSFTSWLGLAPGQRQSGKRRRNQSRKGARAGQIFRMIAQSVGNGTKMGLGDFYRRLRAAKGGLVACKALGRKLAVLYYNVMTKGVEFVEEGLQKAQEKYKEQAIARLERLAKKVNMAVVPIAATEGST

SEQ ID NO: 487457 - protein, 444 aa, unidentified
MHFNKILQMLDSSPYLSVGLDVGADFTWMSIALPNGSFWGKPFKIIHDDPYSREMAVAKIKEAQELYSLKSRCFLESTGIYHVPLLCFLRDKGLDCSVINPIITKNSTNINIRKLHNDKFDSKKAALVGLNASLKTSIIPDEDIADLRNLVRDYYYFKDLQSAVVLKLNAELKVSFPAYLKVFSKITTQSSLKLLAAYPLAKDMLAAPKEELVGIIRSTARFGKAYALSRYEAILEAAKDAAVFGRALPSNAVRIRLYIESYQTYQKHLDSLLLALHEAVDKLQGTPVYDRICLLQSLRGVGFLSAVVLMAEMGDFDLFPSPKKLYAYFGLDPAVKQSGKLNGDKVHMSKRGSSLARRVLHMAALNNLKVDKGTKAPVNPVIYNYYTGKCASKKKNVAVGAVMHKICNIIFAMLRDNKPFEIIPPQMHCKQYALNHPASVTNAA

SEQ ID NO: 487458 - protein, 347 aa, unidentified
MRFYNNSHPYYCGIDLHARLLYVCIIDSKGEVVAHNKIGASKDDLLLILEPYIGNVIVGVECMHCWYWVSDWCAELGIDFILGHALYMKAIHGGKTKNDKVDSFKISTLLRGGNFPIAYDYPSEMRAARDLLRRRMKIVRHGAMLKGHVVNTNSQYNLPATELNLKNISARQKLREQYQDIIVQRNIDLDMALLDCYAKELAQVEWFIEKQAKNHNPVYLELLKTVPGIGKILSLTILYEIGDISRFESVQKFASYSRLVKCKAESAGKTYGTNGNKIGNAHLKWAFSEAAVLYLRGNDKARNYLNRLQKRMSKAKALSALAHKLGRCVYFMLKNKTVFDEQRFLKG

SEQ ID NO: 487459 - protein, 427 aa, unidentified
MNSKQNRKINQVTEDTLVVGIDIGSEWHYARAFDWRGRELGGIFKFSNTCGGFRNFSGWILKLKEKWSKKDTVAGIEPTGHYWFNFGVYAKNEGILLVIVNPYAVKQTKELDDNSPSKNDRKDPKVIAKLVVDGRYSTPYVPAGVYADLRILATNRIRIERELVAIKNRFARWFSIYFPEYRDVFADYGNKSSLLLLKQVCTPAAIVEMGPEKINRIWRDAKLRSVGMKRAKTLCEAAKSSIGMKEGRNGAEAEMKLLVGDYEYKQAQYEAIMEKIHVLCQQIPESEQMLAIKGIGLITVAGFLAEVGDLRRFESPRQIQKLAGLSLRENSSGQHKGQTTISKRGRSRLRAILFNAVIPLLATNAEFRSLHEYYTKRAVHPLKKKQSVIAISCKLIRVFYAIAVNGTVYDAEKMLSDIHRNNPPTAA

SEQ ID NO: 487460 - protein, 331 aa, unidentified
MNYSHFVGLDVGKKTFDASLMSADEKELSHKSFDNTPTGIQSLLDWIAGYHLSLSKLLFCAENMGSYVTELSVSSVSMGFSLALVCPLTIKKSIGLQRGKNDRIDAKRIANYAVLHYRKLELYKLPDKDLVRLRGWIIIRDNLVKQKVSSIKLLETFSWMAKLADVTESISFLEEQLKSIKERILEVEEDMEQLIAASTSLYTNYLLLRSIKGIGIINAIVLLCVTDNFQRFDNPRKFACYCGVAPFEHTSGISIRGKTQTSSLANKEVKVYLTRAAITAISWDPQMKAYYKRKIAEGKHKAAVINAVRAKIIARSFAVIRRQTPFVTLAV

SEQ ID NO: 487461 - protein, 343 aa, unidentified
MTRTPVFVGIDVSKAQLDIALRPEGQFSAPNDEAGCAQVLARLRAVSPTLVVLEATGGLEIPLTGILAAAGVPVVVVNPRQVRDFAKATGRLAKTDALDAQTLAHFAEVIRPELRSLPDEQTQALAAILARRRQLVEMLTAEKNRLGSALKPVRTSLRTHITWLERELLHTNTHLADAIHQSPVWREKDDLLQSVPGIGPVVTSTLLANLPELGTLTGKQIAALVGVAPLNRDSGTWRGKRTVWGGRAQVRAILYMSALVAARFNPVIRAFYQRLCAAGKAKKVALTACMRKLLIILNAMLKHRTRWEHTTSQAGAVRDGRLSPSGGYQATDELAIVNPRPML

SEQ ID NO: 487462 - protein, 436 aa, unidentified
MNIYDNHPKMKHIYVGVDTHKLIHHAVIINCFNEKLDTLTFNNNKDGFTSLIEMVEKYSVNGLSAIYGLEDTKHLGHALALFLMAKNCAVRVVNSTLTFNERKKYPIISKTDDIDATCIAKVTLDNLNDLPVASNDEIYWTLKQITKMKRAVVFDNIKAKNKLHAQLLHHYPYYKEFFSVFAGKTALDFWEQYPCPEHMTLNIEELTEFLETRSNKVLGVERATKIYNLIHNEQYENIGYQHERNILIIMLVKQIKHNNKQIEELSNSIISLYDELGFKLHTINSLSKVTSAEIIAQIGNINRFANKDKLARYAGIAPVNFSSGGKDKSIRNEYGNRVLNSHIYNLAIRSISPGNSKQQPHNAIFLEYYHRKIHQGKNKQQATTCVMRRLISIIYVMLKNNTEYQVKEEIKAKCLNIYEEKIKVKAKNDNKINGKR

SEQ ID NO: 487463 - protein, 320 aa, unidentified
MSASSVVVGIDVAKAHVDVAVLGAQFDAQRFDNEAEAHSALAVALKPLGVALVVMEATGGYETALACALQAAGLPVAVINPKQARDFAKSMGRLAKTDAIDARMLAEMAAVLARRDDLARFLRPVADEQQRWLAALVTRRRQLLTMLNAERQRLQITPPGLHPSLQAIIAAIQAQLDDIEGQMVGHVRQHFAELDRLLQSASGIGPVASATLIAELPELGRLNRREIAALVGVAPMANDSGSSRGRRRVQGGRFEIRRVLYMAALTASRRNPAIKAFYERLLAAGKLPKVALVACMRKLLTILNAMVRTRSPWNKSLHGA

SEQ ID NO: 487464 - protein, 324 aa, unidentified
MYLGLDVSKNTLDCCLNKDGFFYACKISNNQKGFEKLKVWLDGHGCDETLHCCCEATGNYYEAAAEYLAAHYKMSVENPRKIKAYAVSELKRSKNDKQDAKTIAEFCEEKSRKLKVWKPKNQTEKELQSITRYIARLKQQKASEIVKRQTASDNIKDLIDETIDYLGSKIKEAEGRLKTYINQNPELKQKANNLTTIPGIGIQTAAIIMAALSGNNDFKTAKQFTAYLGLDPAEYKSGTSVKGKDRISKVGDCMTRAALFSPALVAYRIGTFPRLVANMRQNGKHIMQILTAIMRKLAVVAYTLHKTNTTFEKQRHTRIQQKAA

SEQ ID NO: 487465 - protein, 368 aa, unidentified
MLYIGIDIDKKMCHGCIKDRDGNIKKELKFPNKSYGTDKLLEAIEGREAKAVIESTGNMWLRLYLGLEEAGVEVVLANPKKTKAIAEAKLKNDKVDARTLADLLRANLIAPCYVPPEQTRELRSMVRHRINLARDMTRVKNRIQAILDKYELEFNGTDMFGKAGMKWLKCIVSDLSEVDQFIFDAELRHIETLKGLVKEAEARIAKESEESEDVKLLMGIPGVDYYIALLFTSEVGDYSRFSSANKLISWLGLAPRVHQSGETSYNGRITKEGSPRVRWALVQAARSAVQWDNHFRDKYQRIRERRGDGKAIVAIAREIAVTMYHMLNRREAYRFSSDAFKTRKLKKLERESNKWAKMRKVPVGGVTA

SEQ ID NO: 487466 - protein, 412 aa, unidentified
MPYPAQVASAAAEGVFIGLDWGNSHHQLCILDPAGQLAERGRFAHDADGLQRLDQSLSAYPAITGIAIERSERLLVERLQQQGHRLFCISPKMSARARERYRAAPVKSDAFDAFVLADSLRHEHQHWRPLAVPSPLLAELRALTRDRERLVSNQRDVENQLRAIIETYHPAVLHLFSSLDRDITLAFLRDYPDPQHAARVGAARMAAFCARHGYSGRTPADVLTGRLRDHLLAASAGTSSGKAFTALMFADQLELLNTQIRTITRRISQLLAAHPDAGIFLSFPGMGDVTAAIMLAEMGEDRSRFPDPGVLLAETGTAPVTRASGRSRTVRFRYAANKRMRHAIDWWAFVSVRENDWAHQAYEQARARGQLHNRALRGIGARWTRILWRCWTDHTPYDPARHLKEQAPTASS

SEQ ID NO: 487467 - protein, 403 aa, unidentified
MVQLWAGVDAGKTHHHCVVIDADGARLYSQRIANDESALLDLIADVASLAGGLGDEVTWATDLNHGGAALLIALLAAHDQRLLYIPGRTVHHASKTYRGDGKTDAKDALVIADQARMRRDLQPLRAGDEVSVDLRILTSRRADKAIDRVRAINRLRAQLLEYFPALEQAFDYSRSKAALMLLTRYRTPEALRRAGESRVHAWLKKQGARSSARVAEKAIAAAKSQYTVVPAQRVGEMMAATLAQDVLDLEHELADLDALISTRVFDHRHTSILLSMPGFGPVLSAEFLGATGGDMTAFDGADRLASVAGLAPVPRDSGRISGNNHRPRRYDRRLLRVFYLAAMSSLKSNPPSRTYYDRKRAEGKSHTQAIICLARRRLNVLWAMLRDETPYVSAAVSALPRAA

SEQ ID NO: 487468 - protein, 345 aa, unidentified
MQISVLGIDLGKNSCSVVGLDAGGHVVLRRRMVRDGVLKLASKLPSCVMAMEACCGAHHLGRSLAAMGHQVKLMSPEYVRAYVKAQKNDDRDAEAIAEAATRPTMRFVELKTADQLDMQSLHRVRDRLVGERTALINQLRAVLLERGITAPKGRHKLEQTLIELLDGPDGTDPGLSPRMCMLVAGMRAEWIELDRRITAYDEEFAAVAKTDAAARRLASIPGIGVLNATALIAAIGDGAAFARGRDLAAWLGLVPRQATTGGRAKLLGITKRGNKYLRKLLIHGARAAMRSLLTSTTPLGRWLRGLAERKHKNAVTVALANKLARIAWAVLRRGEAFDVTKLARA

SEQ ID NO: 487469 - protein, 415 aa, unidentified
MISVGIDVSKGKSTVCILKPYGEIVSKPFNITHTHKDLSELSSMLFRLNDEVKIVMEATGIYHLPVLTYLQEKGFFVSVINPYLMKSYRNESLRKAKTDKIDSRIIANYGIDHWFKMKEFQISGVIYEELKLLGQQYRHYMKLHLLSLAELTHLLDLTMPGIKNLLASWNETNRKDKRSDFVERFWHYDVITSMSEQEFTEKYILWAKEKKYVPSQEKAKVIYTLAQESIPTLPSETSSVKMLVTEAVRVLKEVDATLGLILSRMQEIAKTLPEYSVVREMGGVGNTLAPKLIAEIGDVRRFRNGKALVAFAGIDPPPYESGQFVGCNRKISKRGSASLRKVGYETMRSLKMRSRPEDPVYRYVVKKESEGKSKKSAKIAGLNKFLRIYYARVTELYKNISVSYTHLTLPTILRV

SEQ ID NO: 487470 - protein, 403 aa, unidentified
MQYLGIDLHRKQMTVSLRNHNGDVFLRRQVSTRWPKLEQFRNQLHQALAAAEKYVAVVEVCGFHDWLVQWLRQDERCHQVLVVQPLGRSASKTDRRDAHGLSELLWVNRERLLRGERVQGVRTVQVPSEEEQADRCLTQARERLVRRRTQTLNQIHKILRRQNLEWERPTETFQTVKVRRWLKTLQLAPIDRLAMDHLLVQWALWDEQLVAADGWIRERFLANRNAQLLATMPGVSRFIGLAIACRIAPMERFPQGRSLANFLGLTPGCRSSGDTERVGSITKIGSRMVRYLLAQAIQHVLRRDGSIRAWYQRLKRRRGSKVARVAVMRRTATIMWRMLSTGEPWRCGRARSEMPEADEPRQTRVPQDGPAEQLAPSADPELAGFNTGSSSLLAGEEVAPCPA

SEQ ID NO: 487471 - protein, 352 aa, unidentified
MFYVGLDIHDKRIAICVLNETGQIVRRAQVRTIDEMMRILEALPDRFGVCYEASCGYGHYHDLLKPIAARVTVAHPGRLRLIFRSKDKNDRKDAERLAKLLYLGEAPAVHVPSADVRTWRELITCRGRVIAKRTRAKNSVRTLLRGAGVVPPRRPALWTKKGLEWLRRLELPTTSQQLRRDLLLEEIESLTNQVRRIEHELNHQAGRSPGVARLRSIPGVGARTAEAVVAFIDNPDRFANAKAVGRYFGVVPSQDQSGDRNRLGHITREGPAVVRQLLAEATWQALRRSPRVRAYFERVRRDDPQRKKIALVATAHYLVRVMLAMLKRGTDWEEGFAPADEPKGVAKAVVRI

SEQ ID NO: 487472 - protein, 395 aa, unidentified
MVRLFVGIDVSKDSSSVRGIDDNGESCFAIEFAMDSDGFAKLYKSITQHCTDASAVMVAMESTACYHINLFSFLTTKGINTVIVNPLLIANFSKLSLRKTKTDRKDALTIAQFLMAHKDSITQLAVSPDIQDLRDIARERESLIQMISLQTVEMKRLLQTTFPELEKLCNITTKVMMDFIEEFPSARLVRAAKPKVIEKALNRKGVSTRLAFSANDIITAAKKSIATVSPAKELILKGKVSTFQHLVKRRDEITKVLTDYCRQTMIEDLKIVTSVTGINSGTATTFLAEIGNIDKYTSYKKLIAYAGIDPSVYQSGKYEGTGKISKRGNRHLRRVIWIMTKNVIHHNPLFKTFFLKKRKEGQAFKKAMFATSHKLIRVLFALLSKKIYFDQTVHS

SEQ ID NO: 487473 - protein, 319 aa, unidentified
MAQNEVVVVGIDVAKDKVDACIRSLSQRQTFPSTAEGQRALIRWLRKHKVGKAVMEASGGYEREWAKALRNAKIEVRIVDPKRVRSFAQSAGRLAKNDAIDAEMIAWFAETFDEARGQAYDAAREELVQIVNARQALLEQQTQMQNRCEHTVPIPVRKMHERLLKAIALEVTKLEAVIAALTKASPHFAETAEIIESVPGLGKITSAGLIAAMPELGQVSNEAISALLGVAPYDDDSGKRQGERQIKGGRRKVRNLFYMACMGAATQHNPVLKTFYRRLIAKGKKPKVALVACMRKLIVILNIMIARREKWDASRYAVS

SEQ ID NO: 487474 - protein, 319 aa, unidentified
MTDPATFVGIDVSKDTLDVHVRPRGDAFAVGNDPQGIADLVARLAVARPALVALEATGGLGHACAAALAAAGHPVAVVNPRQARDFAKATGRLAKTDAIDAEGLALFAERVRPEPRPLPGEQAREFEALLQRRRQLLEMRAAEQNRLGAAAAAPVRASLQAHIDWLSKQLEKVDKELGAAVEASPVWRAKDELLRGIPGIGPAVSRTLLAALPELGALTRQQIAALAGLAPVSRDSGRRKGQRSIGGGRAEVRSLLYMAALSAARYNPALRGFSERLRRAGKAAKVRLVAVARKLLTIANAVLRDGRRWDAALCGTERG

SEQ ID NO: 487475 - protein, 424 aa, unidentified
MKNTAARKRKQVPERYLVVGVDPHKKRHAAVAITQDFTAQAKFKVDNTREGLETMLDRARAEMVKSCCRGVIFAIETGGHYWRNIAYYLDERGIPFRFINQYTLKRRREGKDLNRRKNDYRDSEVAAQLLCTGEFVESVIPQGVYAELRSSHNAYARLVKERTRITNLVKGLLDGLFPEFTRVFKDPGALTALTVLFTCPIPGVIAGMTEDEFMTTIEARHKGRRLMRRKLRTLHYSARISIGIQAGAYSMSSEIAFLVDKLELIKRHIHIMKTTLTKLVDETEEGKYLLSIRGLNYTAVAGLLAELGSFKLYRSPKQMIKMAGSNPTESESAGKKRSKTPMSKRGRPLLRHCAWTAVIPMLRFNADFRAWAKQRRERPAHANPLNGREIVGAALNKLLRLAFALVKNQTYYQDARPALIPVAV

SEQ ID NO: 487476 - protein, 310 aa, unidentified
MEMTYVGIDVSKDRLDVHASPQEVGFAVSRDDAGLTELVARLAALKPRIVALEATGGFETVVAAALATAGLPVAVVNPAQVRHFAQALGKRAKTDPIDAAVIARFAEATNAPSRPLPDAATQMLSAFMARRRQLVEMLVAEKARQRQAADKRLKKSIQRIIAALDGELQMLDQDIDNGVRGSPLWRVRENLMTSIPGVGPTTARTLLAELPELGSLGAKQIASLAGLAPWTRQSGQWKGKSMIGGGRGKVRSVLFAAALVASRHNPILKAFRDKLVASGKPKIVAIIAVARKLLTILNAVVRDQKPWQTA

SEQ ID NO: 487477 - protein, 356 aa, unidentified
MAEGTWVGLDVHARKVVAGVLDAGTGELRSWRAPTLPAETVEWLQQFAAPVRVAYEAGPTGYGLARACVAAGIACTVAAPSKIPRAPGDRVKTDRRDAERLARLLRLGELVAVRVPEPDEEAARDLVRAREDARGELMRARHRLSKLLLRHGLVYDASAWTLAHDAWLRRQRFESRPLALTFDESYAAMLQAKTRRDALDQAIVELAGEPPFADTVGRLCCLRGVSTLTALALTVELGDWTRFRPQSLGPFLGLTPSEDSTGERRRQGAIAKTGNTHARRLLVEAAWHQRRPLRASVTLERRRQGQPAAVRTRADQSARRLHQRWHALERRGKRRTIVAVAVARELAGHCWALATM

SEQ ID NO: 487478 - protein, 352 aa, unidentified
MRKYYVGLDVHKVSIAIAVLDAHGKLITRTVIETSTEAVRDFFRNLGGEIHLTFEEGNHAAWLYDMVEPLVRRVVACNPKHNRIEGSRSDRVDAVKLAELLRLNALKPVYHGEHGTRTLKHLMRCYECLVKDITRVKNRLKALYNSQAIKQRGRELYHASKRQSWLEKLPNQGQRTRAELFFQQLDELKVIKRAAQKAMVAESKRHPAYRVLSQVAELGPVRIAQIIPTVETPWRFRTKRPFWHYSGLAVVTRSTADHEIEDGRVRKRKKPIIQTRGLNEDYNRRLKSIFKSAATHACHCGAYREYYEGLLKTGMREEMARLAVARKLSATVLAVWKSGESFDAGRILRKAV

SEQ ID NO: 487479 - protein, 415 aa, unidentified
MKKDNNSGKKSEPTSKRTKSPGPVRRDTKEVLAELVVKLKEKLDSKKVAATSGEEDERGELRPNLDRLTVGVDLGDQWSHYCILGLEGETLAEGQLRTTEEDFATFFKGLNAARVVVEVGTHSAWVQEVICGCEHEVLVANPRLMDGSKRRKRKNDRIDANKLARLGRVDPESLYPIQHRSREVRQDLVMLRARDALVAARTEIINTTRGLVKSMGTRLPQCSSRSFAQKGEETVPVEMREALLPLVRLAATLSADIKEYDKKIEELGREKYGHTALLRQVKGVGPITALAYVLTLENPKRFAKSRDVGPYLGLVPKQEDSGESQPQLGISKAGDTMVRKLLVGSAQYILGPFGPDTDLRRYGLRLCERGGKNAKKRAAVAVARKLAVLLHRLWASGEVYEPLHHAKSVPIAAAA

SEQ ID NO: 487480 - protein, 344 aa, unidentified
MHPYFVGLDVHKQVIAYCVKNATGEILVEGTIAATRGALNEWVKTVPGPWSGGMEATPFSHWIYEHLKSHAAQLEMGHAARMKAISAGKKKSDKLDARTIADLLRANLFPACFVISPELGALRQQLRFRRLVVEEMVLFKNKTAGLLMSAGVEYERRRLHGKRYFQKLVKDHPHIGAELQPLLAFTREQIDTLQRMDHQIVRTLQRHPRLQARVAALETIAGVGPVTALSWALEIATVERFASIRAALSYCGLTSPLRESAGQQKRGPISKQRNRHLQTVLIECAKLAHLCNEKLREVYQKAKLKGGHPNRVTLAVARKLVAYLMAADRAFLAEPGAHPGAASA

SEQ ID NO: 487481 - protein, 409 aa, unidentified
MRLFVGLDVSSFDMKVCILNGEGEKLNAFTVTNDLPGATLLKERLLDCIGDQEVDVLKIGLESTSVYSFHPSMFLHHDEDLKVFGAKVFVMNPKQIANFKKSYSDMNKTDEIDAFIIADYLRFGRNQMSVVKESQYVALQQLTRSRYQLIRMMTKEKQHFLQHLSYKCNTFSQEVDSSVFGSAMMELFLEKYSLEELAHLPLEELAAFLQEKGKNRFGDPKCVATSIQKAVRSSYRLDKVVEDSMDVILGTSIEVIRTFQKQIKEIDKAIKKLMAGLTHTLESIPGIGPVFAAGIIAEIGQIDRFDDEAKVAKYAGLYWRKHQSGRFTAEDTSLSRNGNHYLRYYLVEAANSVRRQVPDYRDYYVKKYSEVPKHQHKRALVLTARKLVRLVDALLRSHQLFTPERGVKI

SEQ ID NO: 487482 - protein, 406 aa, unidentified
MERVPIHQRVIGLDVHQAQITACAIIEESGGETRIEQQQFGGFQRDRRELAAWAAALDPDEVVMESTGIDWKSPYAALEAVGIRATVVNARHVKQVPGRKADVGDAQWLATLARAGLLRGSFVPPAKWRELRLIARQRQKRVGLLSSEKNRLHKVLPDAGIRLGVGVSDIHGQSARAMIKAVLNGQPPHEVLKLASRRLKASREELHDALQGELTASHVFVLDERLRPIEELEARIIRVDARLLGELASERNTRALLQTVPGVDLIGAAMRLVDIGSDMSVFGTPERLASWVGICPGNNESAGTRQSGRVRKGNPYIRRLLCEFAHAASRTKSTFQARFRSLIVRRGHKRTIVALAHKMLRTLFFMLKRGEYYRDSVINYEQLSVQRNASRWIKALTRFGFIPAAA

SEQ ID NO: 487483 - protein, 415 aa, unidentified
MDVVYERCCGLDVHKQTVVACVLLSGPGGPPQPQIRTFGTYTNDLLALSDWLAERSVTHVVLESTGVYWKPIWNLLEDRFTLLLVNARHVKAVPGRKTDVQDAEWLAELLRYGLLRASFVPDRAQRELRELTRYRTSLTQERSAAVNRLQKTLEGANIKLASVASDVVGLSGRQMLAALVEGIIDPSVLADLAHGKLRNKLPDLEQALLGRVGPHQRLLVAEQLAHVDFLDAAIERLSTEVAERLRPFDESIARLDAIPGVGRGVAEVLLAEIGADLTRFPTAAHLASWAGMCPGHDESAGKRRSGKTRKGSPWLRAALIQAAHAVGRSKQNYLVAQYRRLTARRGKKKAAVAVGHSILVIFFHLMTHDCPYVDLGVTYFDERDRHHVRRRLVNRLQALGYHVELTPLAPAADAA

SEQ ID NO: 487484 - protein, 450 aa, unidentified
MKLHVLGIDLGKAVFHLVGLDSTGKVVIRKKCSRTQLLAFTANLQVQLIGMESCSGSHFLGRALCEQGHEVRLMPAQYVKPYVQTNKSDFLDAEAIAEAVQRPRMRFVPIKTEEQLDLQALHRVRERWVMRRTAVVNQIRSLLLERGLTLPKGRSYVDRQLPRILEDGELRLSGSFRVLLAQLKLELEQLSARIEEMDRVIQKTAKENEDCQRLTEIPGVGPVTATALIAAVGNASAFQKGRNLAAWMGIVPGEYSTGGKQKLLGISKRGNKYLRTLFIQGPRSGVQQRHKQSPGLSHWLAQLLGRTHQNVVIVALANKLVRMAWAVLCKNERYRAPVLAVTTQKSLFREKEFLLGLLAENRDGNGPLPRSRNLISEKVSLRPSTLYGRGRADIHHGPESLTPPEAEYIGADQLPSFVFRLQLCGGPYIPISRLHLTWCEVVATPRALGR

SEQ ID NO: 487485 - protein, 431 aa, unidentified
MQVIYPIVCGVDVHKTFIVAVICDSTSIEPKYIRKRFSTFKNSLIDFRDWLLQHDCQNVCMESTGKYYIPVYNALEGHISNVVVANPKWVRAVKGEKDDNKDAKWIADLFKLGMARSSFIPGKDIRILRELTRYLYKVVGIASSEKNRFQNALVVGNLRADMVFSDVFGKSASSVVDLILSNDDVTDKEILSKVHPICKASNEEILEATTHVELTSIQKSRIKLIRDHYDYLQTLKENLSELIQVMIEPYESFVTLLCTIPGVSRKSAITILSEIGPDMSQFSNHYRLSKWAGLAPGQNASAGKKKSTRISRAGVYLKPCLVEVAHAAVKDKKEPYFSIKFNKISKRRGKKRAYIAIARKILVCAYHMLMSGEAFKPSDLADVETPKEQRAKYIANNLWQSIKELNAIGVSLEEIITMMKQTKGLKEQIAS

SEQ ID NO: 487486 - protein, 295 aa, unidentified
MGLSRWVGRAIGLDVHREFCEVAICEEGVTRSAGRVPATPDGIKTLAGSLLPSDRVALEVTGSCWEVARILEPHVNRVVVVSPDDTGITSARAKTDKLDTRTLATLLWKGELEAVWMPDERCRILRRRLARREQLVRSRTRAKNEIHAALQRRLQARPPCSDLFGVKGRQWLASLELPLEERESVNAAMRHVEFLDAEIAAAEKLIAQQALSWPEIRRLMTVPGVNLICAASFIAAVGNPNRFLTSRKLVAYLGLDPRVKQSGEGPARSGRISKRGSPAAGVSEEPCKAGRKDWS

SEQ ID NO: 487487 - protein, 396 aa, unidentified
MNPQELHVSIDVGCYQHSVAIGLSDGRYLGSFDINHNKQGFAKFFKKVEEYKQQSNGEVSIAMEGYNGHARPLDSMILRRYKLLNVNNLKLARFKEIFPSPAKTDAIDARKGLELFQLQKTLPMAKNVLQEIHEIPKENRQLKFLSRRRKRLVFERVRLVNAVQSDLRAVSPGLIDITKDVQNQWFLNFLSSVKDLRKLATKTEKTILKIKQVGNKYCGIIKQWQKEAVFSEEIEFISPLIQQDITRIKFIENEIKTLESSIRELIKSSRIAQRLYSINGFGQACCSEIAGEIGTIKRFKKESSLAIYLGMSPLDNSSGIKKGAKNPKQMNKHAKAAMMSAVDHHRKYSHESSKYYDKKRVEGKAHNQAIRSLGRHLVRVIYKMLIENRDYILREE

SEQ ID NO: 487488 - protein, 357 aa, unidentified
MPAHSKAAKPSTQIAVIGIDIGKNIFHLIGLDRCGVIILKAKLSRGQLENRLANLSPCLIGMEACVGSHHLSRRLMALGHDARLMPAQYVKPFLKGHKNDYRDAEAAAEAVQRPTMRFAAAKTEEQLDLQALHRVRARLVAERTATVNEIRAFLLERGIAVAQGIHRLRKALPDILAKAADALSPRMIRIIENLAADWRRLDERVEEVSTEIEMLARKEAPCQRLMTVPGIGPIISSATVATIGAGDLFSKGRDFSAWLGIVPKQLSTGGRTILGKISKRGNKYLRMLFVQAARVVLLKRVSWERYGLKSWIEAAAKRLHHNKLAIALANKLARIAWAVLHHGRNFEVSHEYAPQPA

SEQ ID NO: 487489 - protein, 368 aa, unidentified
MNTVKFIGMDVHKKTITVAIIDEGRQKQPRIYGTIVNQPEALDKFCRKMVSTAARLHFVYEAGPCGYGIYRHLTEKGFDCMVAAPSLIPKKSGDRIKNDRRDATMLARLHRAGELTAVYVPDAQDEAMRDLTRAREDAVMATRKSKQRLNAFLLRNGLTFAGRTKWSKAFFNWLSDIAMPYPAQQVALQEYIDTVHENLNRVNRLTDQIRQLVAGWRLAPMALALQAARGVSLIVAVTVLAELGDLSRFDKPSQLMAHLGLVPSEHSSGESIKRGAITKTGNGHVRKVLIEAAWAYRMQARVSRLLLKRQQGVPERVCQIAWKAQLRLCARFRRLTARGKTKQKVVTAIARELSAFLWAMAKQLQPVV

SEQ ID NO: 487490 - protein, 425 aa, unidentified
MKISQTAQKIKLNQVVDVSVDVHKDSLNFFFETGGKEYSDECSNRTTVISKRLEAYHRIAAEHGMKSLRIICEPTGQYHNKLFRTARRMGFFTSFVNAESVAKFRVIETNDTGKTDTKDPRVIRTLGQLDKVIKHRMISEEYMILRKLNKIYDEVDEMIVSLRCRLDRLLVELFCDYSFKKDFLYTASGLALIEAYECNPYRIIEAGYVGFCARMRKGAPRIQKQTLRRLWEDAQSSVLNEQPEGYVRTLEMHLRQLINDWLEQIRRKEEMVRKMVEVLNRLRGKDPKIPPSTPGVINDKNLARLLGETGPLSDFANGRMLMRYGGLNIRMRQSGKYQGQNKITKRGRPLMRKVLQHIVLPLVREGCLYGQYYYRKKEIEKMPGNKAMTCVARHFLKKFYGWYKSGEAFNQQRFFSCETQYRRAA

SEQ ID NO: 487491 - protein, 358 aa, unidentified
MDGSSEQPQMTAGLDLGDKYSYLCLIDTQSSEIMEEGRLRTNPEALRRRFSSEVQPLRVAIEAGTHSPWVSRVLEECGHEVLVANPRKVRLIYTNKRKTDEIDAENLARLARVDPKLLYPLKHRGEDSQAHLAIIRSREALVGCRTQLVNHVRGAVKSFGHRLPKCPARSFHKKVVEHIPAALWVALGPILEQIGSLTERIRDYDRKLEVISKEHYPETDLLRQVGGVGTLTALTFVLTLEDPYRFERSRSVGAYLGLVPARDHSGDRDPQKRISKEGDEMLRRLLVGSAHYILGPFGSDSDLRRHGQKIASRGGKNAKKRAVVAVARKLAVLLHSLWLSAELYEPLRNTQRSRGQAA

SEQ ID NO: 487492 - protein, 343 aa, unidentified
MTQSNLIAIDLAKNIFQVAQLKGNKLKFNKPMKREPMLELLAKTEGSKVVMEACGSAQHIARKALSLGHDVMLLPPKFVKAFRQGQKTDANDVLAIASASQAYNVKPCKIMTVEEQTLQSLSQARALIDKQKTQLSNQIRGLLLEFGIVINQGDAALTQVVPDILEDAENALPIALKQALAVSYDLYKTQCDAKAQLHKQVEAITKQNDSCQRLMALEGVGPIIAIELLSFLGNTSQFSDARGAAACAGVTPTQHSSGGKAKIGHIPKRRGNTLRKNLFLGARTVVSRLKHKEATTEKERWIKNLLAKKSVKCVAIALTNKTVRTAYALLKNGSTYEPKILAA

SEQ ID NO: 487493 - protein, 453 aa, unidentified
MTINKLWQNRKERKELARRLRSEDPGLEVVHPNAAGVDVGNSAHYVAVRPDRDSQPVRRFECFTADLNRLADWLESCGVKTVALQSTGVYWIPLYDILEERGFEVYLVNARHTKNLPGRKSDVQESQWLLKLHTYGLLKNSLQPTSEIRVLRTYWRQRAEHLREIGTCILRMQKALTQMNLQLANVISDVSGVTGQNIVRAILKGERDPRIHASKEEIAKSLEGNWRQELLFVLQQEVDMYDVYQKRIAECDQQLQKHLARFADTVPAQTREEAKKKKGKQKNHPQFHLADELQRITGVDLTRIDGIDVMVAQTLVSEVGLDMSRWKTEAHFASWLGLCPDNRTSGDKVLSRGTRHVVNRAATSLRLAATTLLRSQTYLGAQYRRLRSKLGAPKAITAMAHRLARLVYRMLKYGQQYVDKGAEYYEQRNRQQQIEFLRKKAAKLGLQVIAAHT

SEQ ID NO: 487494 - protein, 339 aa, unidentified
MKTITIGLDIAKNVFHAVFVTSHGKVTKKKQMKRAAVLKFFANTEPAIVVMEACGSSNYWAREIQKLGHEVKLIAPQYVVAYRRKNKNDYNDAEAIAECSQRDDMSFVPIKDIEQQDAQMLLRIRERLVKQRTKLSNQIRGMLLEYGLCINKGTAALRRALPEFLEDADNSLTWTARSLFSELYEEYLLLSDKIEKVDKKIKAFTKENELCQLAQTVTGIGPITALALYAAIGNGKHFANGRHFAAWCGLVPRQHSTGGKSVLYGISKKGNIVLRALLVHGARSVLNVVDKKEDKLSVWATNLKMKKSYNVACVALANKLARVVWSVIANNRPYELKMV

SEQ ID NO: 487495 - protein, 383 aa, unidentified
MSQPIRCVGLDVSKERISVAVAEPDGTVVEYGAIPNDPSSVRRLVEKLSRDAQLRTAYEAGPTGYPLHRQLTGLGIENLVVAPSLIPRRPGDRVKTDQRDAVQLARLLRNGDLTPVWVPDEAHEALRDLVRARDDARAEGLRAKHHLSKFLLRQGVIAPARVGRAWSARHQAWLNTLTFRDRAAQVTFDDYLAWVRAATERLRRLDAALLECGASSPQVELLRALQAVRGIGFLTAVTIVAEAGDLRRFRSAPAFMAYVGLVPSEHSSGGSRRRGHITKTGNRLLRHVLGEAAHHARLQPALSKELSHRQQGVAPGVVEISWRCQQRLHHKYRHLGDGSAASGPSAPSPESLPASSGRSARRSRQLRWRPRDQQGPGGEHRRG

SEQ ID NO: 487496 - protein, 424 aa, unidentified
MSETVQSVFSQLTHFGGFDWAQCEHQLVVVDPQGNIVLSLRFANDAAGWALFREKIAAFGRLGIAIETNCGPAVERVLDAGLTVFPMNPKAAERYRDRKAPSGAKDDERDAWSMGDGLRTDGHGWRPLLAQDPLTTELRLLCRDEISLIEQRTALVNHLKATLHEYYPAALEAFDDWTSVGAWQFVITFPDPHRLASAGKRKWERFLHAHKLYRPQTIEKRLATFGGAAKFANPNPAVTKAKTLLAVSLAKQLCLLESQLDEYRSRIIALFNDHPDNGCFGSLPGAGEKIAPRLLSELGSNREVFASAEALQSYAGTAPVTKKSGKSRIVSIRRGCNKTLRATIHLWADLSRKSCVWAQAYYEKKKADGMTHAAALRCLGQRWMKILWKMWQTKTSYNESLHMKNQVKHGSWVIKLMPSTAAPA

SEQ ID NO: 487497 - protein, 322 aa, unidentified
MTTPTLSFVGIDVSKAHLDMALRPSGVGWQVDNGEAGIASLVQELVELQPTLIVLEATGGYETAAAAALASAGLAVAVINPRQARDFAKSLGRLAKTDKIDALMLARFAEAVRPEPRRLPDEQALQLQAWLVRRRQLLEMLVAEKNRLSMTHPQLRPGVQEHIDWLEKSLKDIDQAIQSHLHSSPVWREKEDLLRSVPGVGRVLAITLIAELPELGTLNRKQIAALVGVAPFNCDSGQLRGKRAIWGGRATVRTSLYMATLSAIRFNPILHTFYQRLKEAGKPAKVALTACMRKLLTILNAMMHSRQPWQPRLAANKTRLLA

SEQ ID NO: 487498 - protein, 393 aa, unidentified
MRLAIGVDVAKDMHWVTALTEHGDVVLDRRVANTPDEVTALAAELGALGGEHTVGIDVVGGIASLVTAVLLDAGERVVHVPGLAVNRARQGTTGGEAKSDPRDARVIAEQVRTRRDLRPIDAESEPLIELRLLVGRRRDLVVEQTRRLARLHDLLVTIHPGLERRLDLTTKGALYLLTRYVTPAELRRAGRARLVSFLRTCPHLQRLEALAAAALEAAHEQRLALPGEAVAATLCRELASDALRTRERLGTLDQQLTELLARHPDGTLILSLPGMGVTLACEFFVEAGSLARFASPDALAAAAGLAPVLRQSGKVRFLRRPLGGNKNLKRVLYQSAFCSLQHPVSRAFYDRKRREGKRHHQALIALARRRVNVLWAMLRDRHPYQARPAGQAA

SEQ ID NO: 487499 - protein, 347 aa, unidentified
MEQEYIGIDLHKSFFQVCSIRTTGERIWEGRFPTTASGIGDFLRRCHAESSQVVVEASGPAWSFIDGITGGVHSAVVVDPRKTKLKAGYAAKTDRLDARRLADALRRDSVVTVYIPPKPIRDVRELCRYRCALVRMRVSLKQRIHALLVRQGVPLPNVSDLFGVRGQQWLAQAPVGGWASNSLAGLCGLAEQIDAQLAPLHAIVEGTAREDPIARALDQIPGMGPVLALMIRAEIGAIERFTRPAQLACYAGLVPHVHKSGLFRHYGPITKQGSPWLRWALVEAAMHGVKRRDALGRWARRLAMQKGGLKARVAVARMLYYEIFRIWHSAERLSAPVVDKYLATAHQ

SEQ ID NO: 487500 - protein, 345 aa, unidentified
MPIVGGLDIHRKQITFDYLDTETGQVCRGKVSPADRAHLRAWLARFAGREDAAFAVEGCTGWRYVAEELAAAGVAVHLAEPADTAFARGCKRHAKTDKTDCRHLRMLLAEGRLPECWIPPGRILECRALVETYHDLRREHTAWAQRVHAVLFHQGAPALGEGTLRSEQGLAALRDISAACLSPAGQLQVATALDMTDALDARLHELRHQLLDAARHLTGAKVLAARLYGVGPVTALALTCWLAGEGRFSSSRKAVRFAGLDVTVSSSDRKGPPGRLSRQGPPVLRWAVYEAGKTHARSSAPDHRYYAQVKERQNGKRAALSEARKILRQACHILAELGDDALSAA

SEQ ID NO: 487501 - protein, 312 aa, unidentified
MVCAGIDTGKRKLDVALGGAAERRQLDNTEDGHAALSAWLRQRRTKRVGIEASGGYEQAVVARLRRDGFVVIVFQPAQVRAYAKFHLQRAKNDRIDAALIADCTAAATKIHAPPDPRLAPLAQHLTMIEQITDDIVCLKTRRESCRDQRIRQIWRAEIARLKGRLKTELEGLVAAVRQHRDLAWRLDLIASIDGIGLRTALAILLRMPEIGRVSREQATALAGLAPYDDDSADRIGQRHIDGGRQRLRKALYSAALAAAFHWNPQLIAVYRRLIAAGKPHKVALIACARKLLIFVNTVVARDTPWTPIATKS

SEQ ID NO: 487502 - protein, 379 aa, unidentified
MLASDILYLTKKHREEANNEERLSWQEDLATGTDVNIGIDVHKESWHVTVMSEGEEIFHGRMPSSYQAFKRFLARFKNCRIRVAYEAGPCGFWLYDKLMADGVKTIVTPPSLIPMESGNKVKTDKKDSRKLANLLGKGMLKEVHVLSAKERSEREIVRTRRQLVGHCSDVARQIKSKLLFNGIQYSASGRERWTKGYIKWLRELSCKEESLKISLMSLLDLYEYLSQQIKKISKELVALSQMERYRARVALVRSVPGIGLLNAMELLVELQEIGRFKSARELASYTGLTPSEYSTGQHIRQGGITRCGNKRVRAALVESSWILVGKDPYMRCKYTKLKNRKGGKRAIVAIARNLVVRLRKMLITNEPYRIGMQVKVVNP

SEQ ID NO: 487503 - protein, 350 aa, unidentified
MKIIGCDFHTRYQQIAMVDEATGEMIERRLDHESGEVQAFYRDLQGPVRVGIEATGPIRWFERLLSELGHELWIGDSAKIRASEVRKQKTDERDARLILDLLLAKRFPRIWVPTPAERDLRQLLWHRHKLVCMRTMLGNQLHALAMSEGLCRKGKLFTKKGRVELLHLGLAPWASRRREELLKLLAQLEPAIAELDGAVMEQAHRREDAVLLMTHPGIGPVTSLAFVLAIGPIARFARSKKIASYLGLNPSEESSGGRRRLGAISKQGNTMVRWLLIEAVYPAVRKDPALRQDYQRLKFRRGHAVAKVAIARKLAVRMYWMLRSGAEYAQLVRRQGSPGATLMGASSSLG

SEQ ID NO: 487504 - protein, 364 aa, unidentified
MSPQADGVVIGMDPHKRSVTIEVMAADEAVRDGGRFGTDRAGYRAMLTCAQRWPNRVWAIEGCQGIGRHVALRLLRDGEDVVDVPPKLSARARVFAIGHGRKTDATDAHSVALVGTRMAGLRPLVNNEQLAVLRVLADRRRSLGEDHTRMVSQLHQLLLELIPGGAKKDLSAAQAKALLATVRPRDVAGKARRRVAAELISDLERIYQRKKAANKELKELVAATGSTLMDLHGIGPSGAARLLVEVGDITRFPTRAHFASWNGTAPIDASSGDQVRHRLSRAGNRQINRTLHIMATVQLRNRTEGRAYYDRKKAAGKTSMEAMRCLKRRLSDIVYRHLVDDAIVHAMTGPGGHRGGSAPRSGGV

SEQ ID NO: 487505 - protein, 391 aa, unidentified
MICVGIDVAKDKHDCCILDSEGTTLADCFTIPNNLDGFKRLLQTIKDCTQKSDKIKVGLEATGHYSYNILGFLLDNDLPVYVMNPLHTNLYRKSLSLRKTKTDRVDAKTIATMLLSDVDLKSYTDTAYHNEELKSLTRYRFDKVQERAKLKQSVSRLVTILFPELEQLVSSIHGTSIYALLSEYPGAKQISEAHLTRLANILVKTSRGHYRKDKATHIRDAARTSIGSVMPAKSLELKHTIKLIQELTSEINEIEDAIRKIMDELKPPILSIPGMGFHSAAMILAEVGDFSNFNSPDKVLAYAGCSPSTYQSGKLTNCYAHMEKRGSRYLRYALYTATKYVCYWNPVFTEYLTKKQAEGKHYNVALSHATKKLVRLIYALQKSGKAYLAIT

SEQ ID NO: 487506 - protein, 367 aa, unidentified
MSKAETGRLCVGVDLHKTQFTICALNEDGEYLLEKQYPTKEEGYSEFAREMHRFEEQGCSIELAVETTGNARFFKNRMESEFFAVKVVNTNRFKVITMSTKKTDANDAATLAYYLMKDMLPEAHLCSQTSEEIRRLLKTRSVLVQSMVKIKNQIHGMMLGYGIETKAAQLQSKRKRQELINDLEDHNFSAYTAPSLKVMLKILDDLSAEIKGIEKLLEEMVASNEDVALLMTVPGIGINTATVIAAYTAELERFEGNYKKFASYVGIIPSVHNSNETTHYGRITKHGPQELRTAFVQAALGMIRLTNVSSEWRIIKEYQRRKGDKGSGRAIIALARKITRIVFVMLSKREGFNPTLMRYEQEIQQTA

SEQ ID NO: 487507 - protein, 320 aa, unidentified
MNFILGIDVSKAKLDIALRRPDGKVRSKVVANTPQGFTELSTWLRRQAATDLHACLEATGTYWEAVAEYLTDAGHTVSVVNPAQIKAYGAARQVRTKTDAVDARLIAAFCASQLPAPWVPPPPALRELRALVARREALVGMRTQEHNRLLIAHASVRQDIAAHLEHLDRAIGEIEAEIRRRIDDDPGLKGQRDLLDSVPGLGDKTVPVLLSFYGGPPRFDNARQAAAFAGLDPRQRESGSSVRGKPRLSKVGHAALRKALYMPAMVALARTAWGRAFRDRLAAAGKPPMVILGAMMRKLVHVAFGVLKSGQPFNPTLHGA

SEQ ID NO: 487508 - protein, 357 aa, unidentified
MVESKTEAKSSEVGVTNPYRQTEHCDKIHGYRCDKGVGVIGIDISKDHLITSRGRVRKYKNNKEGYEEILEMKPCTIVLEPTGVYAIRPSQYFKERGIKVLQVSPNILSREKEFRGKKTDFYDAEKLENMVDKAKEYEYNSLRELVTLYLFLKDIEVKYKNRLKRALFLVSDNDKLNKERLERLAKGDFTQEELYQLEYTPIVLEEIKVLAKTLLETQEKLKEVRRMIEEQVPDNHVLLTIPGIGRLAAGVIIGVVGDVKRFPKPESFVAYCGLDPLVERSGKAVISKGISKRGNKYLRRLFYFLADMNYSRNHTLLKFYEAHKDSLQGKKLYTALARKLARVVWSVWYNNRPYEPK

SEQ ID NO: 487509 - protein, 403 aa, unidentified
MKHVIAFDVSMGKSYMVIYNAQKQCIFEKEIQHLKHDFKELQEKIDALTKKTGEFPEIVFEATGVYSRQLERFMKDNQYTYFLLNPLEAKLQCDSLRIHKTDRSDAHRLALTHFTATRRVSHGTNHIFHQLKSLSRFYIELDGELSVIRSRMHKVIQLTFPELEKMFTSKSELFLNFVQLFPHPDSVLSLSKTIIKNRIRANTNKKISNIMAEKKAIQVLEIAKNSYPAVSQNDVLCDQLKVYAKRYQELLQQKECCINKMVLIAEQRAEYSIILSLPGIGPNTAVRLMAEIGDINRFANNKQLNAYAGIDIRRFQSGKTFYKDKINKRGNKHLRKLLFLIIQNMIKIRRYGRNHIIEYYDKLKTQPYNKCHKVASIACVNKLLKLLLHLITHNIHYDYRLTA

SEQ ID NO: 487510 - protein, 451 aa, unidentified
MVQFLEPGRGVPLLKKALSISNNNDGQEKLLSLLSKTCKKHKLNYKDSTFVMEDPASYSRNLINQLQKKGFQVNYVNAKKCTDYRTNTRASSDELDLEGIAGAAMRGHMIDVQNNSQHYKQLTRSVRERAHLVKDQSAHKNIIHTYIDELFPGFLDHKLSGVEAFTEHCLALMLRSDFSVYSYAKKPLERLTTILHKIGFNTPAARAQQLKDLAKNALKPSLDYIDDMQDRLQLAVKLFQLRQECIIKEEQRMAKLLSQTGGFYLTSIPGVSIVLAAYIMAEYGNPLFWRSSDQMASYAGVVPRQKQSGGSDKAPVVLTLPIKQACNSPLRSSLFSAVLGIQKYEHPSIAVSGYKHDLKEHAENVENRGGKSRIACIKKFIRIMKVMVTNEDLYMPRKHEIAPQQLIAWIEIETQRMFKKWEAYNVYPSDDNKLGEWRRKKDKIIKVLTNT

SEQ ID NO: 487511 - protein, 374 aa, unidentified
MTEHSVAYVALDTSKLHNAVAIAESGREGEIRYLGEIDTSREATAKLVRKLAAKYARLSFCYEAGPTGYGLYRQIKSLGHDCIVVAPSLIPQKPGNRVKTNRRDALSLVRQLRAGDLTAVWVPDAHHEAVRDLSRARGAAKRDQQAKRQQVSSLLLRLGRHYPGKKTWGKAHMSWLASQKLEHLEQRIALEEALLAVRQAGERISRLEQAIGAAVADWSLAALVTALMALRGFDFVAATTLLAEIGDLSRFRTPRELMAWLGLVPSERSTGEQVWRGSITKTGNRRARRLLVECAWSYRHPPRVGAGKLARLAAAPAAVREIAWKAQTRLTARYRALCRAGKLEVVAITAVARELAAFVWAVARAVAPGTATTG

SEQ ID NO: 487512 - protein, 318 aa, unidentified
MKTEQSQPFVGIDVSKATLDLCVLPSGEQWSCQNSASGINSLVKRLAALKPALIVLEATGGLQMPVTAALAECQLPVAVVNPRQVRDFAKALGILAKTDAIDARVLARFAEAVRPEARPLRDAQALELEALMARRRQLVEMCTAEKNRLQTAPKPVQKDLKAHITWLEKRLADFNGDIGRLIKSSPLWREKDALLRSVPGVGPVLSTTLIGDLPELGALNRHEIAALVGLAPLNRDSGHFRGKRMIWGGRAEVRSVLFMATLSAVRCNPVIRPFYRHLKAAGKPFKVRMTACMRKLLVILNSMAKTNTHWRLQEDASG

SEQ ID NO: 487513 - protein, 362 aa, unidentified
MAQPKSVVGLDVHATQTQACVLDPRSGELRSRRLSGRPREALEFLAGLPAPLLAVYEAGPTGYGLARGARERGLDVRVCAPGLIPRAPGDRVKTDRIDAERLARLLLAGQLSFVRVPSVEEECFRDLTRCREAIRVDLMRARHRVTKFLLRRELYWEGPGSAWTQAHWDWLEGIEFADAPSSTVMGDYLCAVRGLEQRRGVLERSIEQAWASSPWAQTVARLRCLRGIDTLTALGLCAEAGDLRRFEHPSSLVAYFGIVPSEHSSGERVRRGPITKAGSPHARRLLVEAAQHYRHQPRVGAKLKRRQQGADPRAAQIGWRAQRRLHQRWTRLRITRGKPGNVVRIALARELGCFVWEVGQLR

SEQ ID NO: 487514 - protein, 355 aa, unidentified
MEYVGIDWATRRAAWCALNARGEVVGEVVGEGVVSADLDGVLRLVTSAGREVRAAIEMMSGAAWVAETLQAAGWQVQVADSRKARALAPLAAKTDKIDARVLAELVRRDLVPSVWVPPFADRALLEQLLRRMHLVRLRTSGKNRIFGILTQWGVRVPVARLRKSDGLALLERRGVPEVWRDSVQEMLATIDYLDERVAQLDAVLRPLAAEDERARLLTTIPGVGPVIALTIATTVGDVARFPSAARLVGYSGLVPRVHQSGESSRTGRLSKAGSPLLRWAAVEAAQHAWRPQNPWHRLYVDVRRRHGHGNAAKAAVARKILIASWHVLARHEPFKPAASVAAPIVPASSSQPLAA

SEQ ID NO: 487515 - protein, 343 aa, unidentified
MEYYVGLDVSLKQTSICVVDQAGAVVREGVVDSDPEAISVYMRSKAPDAVRIGLETGPTSTWLWTELKRLGLPVICIDARHAKAVLKMQINKSDRNDAIGIARIMQTGWFKEVHVKDIDSHSVRALLASRALLVKIKRDLENHVRGLLKNLGLVIGRAKFNVFAVRAEELIEDRPELVAAVRPLLEARTAIERQVSELDRKVMKLARHDAQVRRFMTVPGVGPITALAFKATIDDPARFARSRSVGAYVGLTSRRHASGEVDWSGRISKCGDAMLRSYLFEAAGVLLTRIPTWSAVKAWGMKLAKRNGLRKAKVAVARKLAVILHRMWIDGTEFNWSKKEIAA

SEQ ID NO: 487516 - protein, 387 aa, unidentified
MSSNDHILGDPTAIRTDLAAIFVSLELSRRTWLVTSLLPGSEKMSRHAVPAGAVGDLLTLLGRRRAAAAARGEGEYRIVAIQEAGLDGFWLHRVLEAEGIESHVVDAASIAAPRRRRRAKSDRIDGESLLRVLAYKRGEPRVCSMVRPPSPAAEDRRRVSRERRTLVAQRIEEVNRIKGLLFSQGVFDDEPRSRHRHERLDTLRTGDGRPLPEHLKRQVGRELERLELVEAQIKQVEAERDALLAAPQDAAPEGAKSRLTQLVSIGPEFASVLEAEAFWRRFDNRRQLAAYAGLAPTPWQSGSIAREQGVSKAGNPRLRTTMIQLAWLWLRHQPQSDLSRWFQHRVRQGGGRIRKTGIVALARKLLIALWRFERCGELPAGAQVKPA

SEQ ID NO: 487517 - protein, 353 aa, unidentified
MPRSTNLSVATMGIDIGKNSFHVVGLDQRGAIVVRQRWTRSQIRARLANMSPCLIGMEACVGAHHLSRRLHSLGHDARLMPAKYVKPYRKGQKNDFRDAEAIAEAVQRPTMKFVATKTADQLDLQALHRVRARLVSQRTGIINQIRAFLLERGIAVRQGLRFLRAQLPEVLGKRTDVLSDRMVHVIEDLAADWRRLDERIQGLSGEIEIVASQDPGCKRLMTVPGIGPIISSAMVAAIGSGAVFSNGRDFGAWLGLVPRQMSTGDRTILGKVSKQGNRYLRVLFVQAAWVVLIKPQIWERYGLKQWITAAKRRLHPNVLAIALANKLARIAWAVLSKDCDFKCEKTDETPRCA

SEQ ID NO: 487518 - protein, 397 aa, unidentified
MLEETHDTEEIIARVAALDIGKAELVCCVRVPSAQGSGKRAQEVRTYPTMTRSLLVLADRLRQLGVTRVVMEATSDYWRSPFYLLEAHGFEVWLVNARDVKHLPGRPKTDKLDAVWLCKVAERQMLRPSFVPPPPIRMLRDLTRYRADLVAARTADKNRVEKLLEDAQIKLSVVASDIFGVSGRAKLSLLEEAFHGRFSDHHAFLLQTMLSRIDQASADIAALDAKIDQEIAPFAPAVDQLDEIIGVGRTAAQVIIAEIGVEMGRFPTPGHLVSWARFAPGVKESAGKKKGKATTGHGNPYLARVLGEAAAAAGRTNTFLGERYRRIARRRGAKRAIVAVGRSILIIIWHLLSDPTARFHDLGPGFYDTRSNADRRKRNHVRQLEALGYKVTLQPAA

SEQ ID NO: 487519 - protein, 317 aa, unidentified
MTAVGIDVAKQTLAVDLILPTGKRRQKHCANSPAGHAELIRWVGRHAVTPMVIGLEATGGYQEAVAIALHEAGYAVSVLNPMVIAAFGQSHLRRAKTDPTDAALIAEYMRTQTPPVWTPPPPEARQLQALVRRLDALLEMRTQELNRLELAAAIIRPSITATVQHLDTQIRLVKRQIADHIDQHPTLRRQRDLVQSIPGIGETTAAIVLGELLDITRFTSARQLAAFTGLVPRVRQSGTSLRGRGALSKLGSSRLRKALYFPAVTALRCHPTLVRFGARLRAAGKRPLVIIAAVMRKLIHQIYGVLRSGRVFDPARA

SEQ ID NO: 487520 - protein, 317 aa, unidentified
MALLRIFVGIDVSKDRLDLWLEPLKRFERASNDGAGWASVISLLNSLGVEPAGLVVAFEATGGYEAGLRQALLEAGFEVRRVNPLRVRLYARSLGRNAKNDRIDARLITRYAEVADTKPEILDPARERLAELVCHRRRLVDERVAVGNQSGMLRCSLLQAQNGKRLALIERQIEETDTLILETIGLIPNVVAKLKLLKTLKGVKDITAIALIALLPELGRLTRRAIAALVGLAPFDRDSGTLKGTRSIAGGRAAVRTALYMAARAAAISKSPLGDFYKRLIAAGKPKKVATVALMRKMLVTLNAILRDGTPWKHANV

SEQ ID NO: 487521 - protein, 402 aa, unidentified
MNAVGIDVSKGKSMVAIMRPFGEIVSAPFEIKHTASDIHSLVELINSVEGESRIVMEHTGRYYEVLAHQLSKANLFVSAINPKLIKDFDNDSLRKVKSDKADAVKIARYALDKWQNLKQYNVMDELRNQLKTMNRQFGFYMKHKTAMKNNLIGILDQTYPGVNTYFDSPARSDGSQKWVDFASTYWHVDCVRKMSLNAFIDHYQNWCKRKKYNFSKSKSEEIYGKAKELVPVLPKDDITKLIIKQAVDQLNSASITVESLRTLMNETASKLPEYPVVMAMKGVGTSLGPQLMAEIGDVSRFTHKGAITAFAGVDPGVNESGSYEQKSVPTSKRGSSDLRKTLFQVMDVLIKTHPQDDPVYQFLDKKRAQKKPYYVYMTAGANKFLRIYYGRVKEYLASLPES

SEQ ID NO: 487522 - protein, 338 aa, unidentified
MRVYAGIDLHSSNNYIGIMDQDYKRLFGRRQPNDLNNVLKVLEPFKADLEGVIVESTYNWYWLVDGLQEHGYTVHLANPSAIKQYEGIKHTDDKWDSFWLAQMKHLDILPEGYIYPKERRSVRDLLRRRLFFVKHRTANILSLQSTITRNLGIKISNNDIKKLNMDDAYKLFDSSNLVFMAQNNISAIKHLGKIIKGIEKEVKSQVQLRKEFVMLLTIPGIGTILGLTIMLEVEDIGRFSKVGNYSSYCRCVSSKRLSNGKKKGENNKKNGNKYLAWAYVEAAHFATRYIPRAQRFYQQKMAKANGAVATKALANKLARASYFIMRDQVPFDEDMVFK

SEQ ID NO: 487523 - protein, 381 aa, unidentified
MIENAIWVGMDVHKKSISVAIVATGEDAVERLTVPNNASSVHRLVKRLKAYQKPLKSCYEAGPCGFVLQRKLRQADIKCAVIAPTLIPVQKGNRVKTDKRDALKLAKLLRAGLLTEVHVPTEAEESVRDLYRCREDAKEDQTRARHCLLKFMLRRGVVYSAGKRCWTGCHYQWLRQLRFDDRNAQRVFDDYMAVLEQQDARLTALDDELEKVASSQPYQEPAGWLRCFRGIDTTSAIGLLSELGDIARFGSARGLMGYVGQVPSENSSGEKIHRGGITKTGNRRLRRLLIESSQHCRLRPAVKGEVLKRRRGQPPWAIAIADRAMRRLHQRYWHLVMKGKPHNVAITAVSREFVGFIWEVLVEGRQRAALRDGQPPTETFC

SEQ ID NO: 487524 - protein, 344 aa, unidentified
MPIVGGLDIHRKQLTFDYLDTVTGEVRRGQIAPADRVHLRAWLARFAGRDDVAFAVEGCTGWRYVAEELAAAGIAAHAGEPADTAAARGRKRHAKTDKTDSRHLRVLLAEGRLPECWVPPAQILECRALLETYHDLRREHTAWVQRIHAVFFHQGAPALGEGALRTEQGLAGLRAAAAGLSPAGQLQVATALDMLAALEARMQVLRTQLRDAARHLTGAKVLAARLYGAGPVTALALTCWLAGEGRFSSSRKAVRFTGLDITVWSSDRKGPPGRLSRQGPPVLRWAVYEAGKTHARAAAPDHAYYAAVKDRKNSKRAALSEARKIVRQACHILTELGDDALTAA

SEQ ID NO: 487525 - protein, 412 aa, unidentified
MEMMVERCAGLDVAKDEVVACVRVPDGKGGRRQEIRTFLTFTADLEALADWMASEGVTQIVMEATGQYWKSPWYVLEERGFDLMLVNARHVKIVPGRKTDVKDAEWLAELLEHGLLRGSFVPPAAIRELRDLTRYRKRLIQAHTAECQRIQKALEDAGIKLDSVASDVLGVSGRAMLKALVAGERDPKVLAELARGRLRSKLPELRRALRGRFSDHHALLVRLALDHVEHLEAAVATLDEEVDRVMAPFAEARDRLDTITGVGKRAAECIVAEIGVDMSVFPTAAHLASWAGRCPGNNVTGGKRRSGKTNKGNRWLGEILTECAWAAARSRDTYLSAQFWRLGRRIGKKKAAVAVGHSILVVAWNLLTNNCDYNDLGGDYFVQRDADRQRQRAVAQLQALGYYVTLEPVAAA

SEQ ID NO: 487526 - protein, 368 aa, unidentified
MYGLHLPNKLVGFLFNQKQKRVHTMNNRNLIALDIAKNVFQVCRVSKSGKTQSNKPVSRNQLKELLVSSKPSVFAFEACGSSHYWGRFAKSHGHTIRMLPPKAVKAFRQGHKTDETDAQAIAIAAQHEAIKSCAYMNIEQHTLQSFESSRRYIGKQCRGLANHIRALTYEYGLTIPKGNSALLKAIPEILEDAENGFPHRLRVILHSLYEQLKVQQRLLKEIEKEKAHQIKTIEPCQRLVALEGVGAVGSAMLYSCIGKGEMFKNGRQASTYLGVTPKQHSSGGKTIIVGIDKKGGNKELRAVLYQGALSVISRLPEEPTTAKQRWLIQLVQRVGVKRACIALANKNVRTAWAMLSSGEAYNPQPLTV

SEQ ID NO: 487527 - protein, 374 aa, unidentified
MNVIYIGVDFHARQQTICYLKTETGELVTCELKHQDKEQVRAFYQQFQGHVIIGLEASGYSPWFEAMLEQLGCEVWLGHATEIRRRARWRQKNDRRDAELILDLMLHDEFPRLHRPAVQSREVLRMLRYRQKLMKIRTMSKNSLQALALQAGLARGSRLFTKAGQQELSTAEMSPVMQWQREHWLQLLEPLNQQLLETMMWCKAQSRDDVCITRLRTHPGIGLLTSLCLVHTLQPVGRFRNTRKVAAYGGFDPVERSSAERKCFLGISKAGSRLLRYLLVEAAQTAVRKDEELKRFYKRLAERRGRPKAKVAVARKLLIRAYIMLRDEIDYAEFRRRAVAARLARRGQRPEVPEVLIGQPASAERQELVHGSEK

SEQ ID NO: 487528 - protein, 424 aa, unidentified
MKVTYQTCCGVDVHKSFLVATIVKTTGGIEPSYQKKRFSTFNNSILEFKQWLLDNDCRDVCMESTGKYWVPVFNLLEDEINVVIANPKWVKAVKGNKDDTKDSKWIGDLFRLGLVKGSYIPCKIVRILREYTRYRCKLVSCRSSEKNRYQNALTVCNVALDSVVSDIFGKSSTSIIDYLLEQSGTSINHEEIASKLLRSLKSKEDAVIESVEGYQMTDAQKYRMRLVRAHMDYITAEIKDVDKMIENMISSNPDFENAVQFLCTIPGVKCDSAITIISEIGTDMSQFSSSKRLCCWAGLTPGSNESAGKKKSVRITRAGVYLKPALVQCAHAAVKSDQSPYYKKKYESLVKRRGKKRAIIAIARMILTAIYQMLSTGEQWNPSDLYKIDVPEALIEKQKAKAIKQAKKLLQREGLLPPDEPVAS

SEQ ID NO: 487529 - protein, 329 aa, unidentified
MKKSFIIGVDVSKLKLDLHCYGQCQSFVLSNNLKGFKGFLKWIKKEISKDKEQILVVMEYSGVYSYNLERFLFEQGISYVKRPALDIKRSMGMKRGKTDKADARMISQYGWYRREELKSMKPVSQAQQELQQLMTFRDKMVADKASYKTRLKELREQLKNTLPAGIIKSTEQIVEILKMEINKTEKAIRELLADNPDLENNYQLITSVRGISFVTGIHLLITTENFTRFTDPRKFACYSGVAPFEHTSGSSIRGKTKTSQLANKKIKSLLTMAAICAIKYDPDLKAKYEQKLKEGKAKMSVINMIRFKLIERIFAVIKRQKPYILSPAA

SEQ ID NO: 487530 - protein, 387 aa, unidentified
MTARTVSNPPATSHDEAVRCLFAIELSKDSWIVAYSTPLSDKISRYTLKPCDWKGLLELIERVRSRVVHELQRPVEVISCYEAGYDGFWLHRLLQAHGVHSHVIDPASLQVNRRARRAKTDRIDAEQLLRSLMAYLRGEPKVWSVVRVPSVAEEDARRLHRERDRLITERVSHVNRIKGLCAIHGIYDYNPLRSDRLQQLDHLRTVQGQPLPQALKAELWRELLRLELLLKMIAGVEKERDAIVTDNGSAHHNASKIKELCRLRAIGPEFASVLVGEVFYRSFNNRRQVGSYIGMPPSPFSSGNTVREQGISKAGNPKARKTMIELAWLWLRYQPDSALSIWFCQRVGTTKGRIKRIMIVAMARKLAVALWRYLETGMIPQGAVLKG

SEQ ID NO: 487531 - protein, 370 aa, unidentified
MGSPLLCGIRCARLEMGSLPITRRGSDMKVTRVGLDIAKEVFEVHGVNEHGKAELRRQLRRARVLEFFANLEPCLIGMETGSGAHYWARELQKLGHTVRLMAPRFVKPYRKNDKSDRNDAEAICEAVGRSNMRFVAVKSEEQQVVLSLHRLHAGLKSERDAMANRLRGLLAEFGIVLPKGAARLRGGLPAVISQRRLPVLMNQVLADGLKRLRELDDQVNQQERQIRALALQSESARRLMEARGIGPMTATAAVATIGDAKLFKNGRAVTAWLGMVPRHSGTGGKIWMGPITGRGDTYLRTLFVQGARSVMNTTRGKKDPLSLWVERLRARRGDNIAAVALAAKNVRMVWAMLARGEAYRPPQAAQGAAA

SEQ ID NO: 487532 - protein, 366 aa, unidentified
MKKIVKYIGLDVHKKTITISVINQERNEEVRRYGQIDNNMMQLDKVLRKFISQGATLNCVYEAGSCGYHIYRHLNGNGIKCSVIAPSKVPRKSGDRIKNDRRDADSLARLNRAGELTPIYVPNPEDEALRDLVRAREDSKKALRKAKQQCGAFLLRHNLIYSGKTQWSNAHFNWLADISMPHPALHVTFQEYIDTIRSCQQRVDRFTAHIRELSEQSHLSPLIKALQSMRGISLIISATIAAEIVDFKRFNHPEKLMAYLGLIPSEYSSGDTVKKGPITKTGNTHVRKALIEAAQAYRLPARISRALLKRQEGVPDEIRQISWKAQCRLCSRYKRLTGRGKKANVAKTAIARELAGFSWAIAKALP

SEQ ID NO: 487533 - protein, 356 aa, unidentified
MGEGITTNQGITIGLDVCDRFTEAYVIDGEGKWIESLRVPTTREGLAKGLSRYAGVRVVVEVGAHSPWMSRQLKEQGFEVIVANPRRVRLIAESDSKNDRFDAEHLARLGRLDPALLSPIVHRGEGAQRDRVRLLARDGLVRARTQLINQVRGFAKSLGSRLPSSSAEAFHKQMRAGTSADLFPGFETMLRVIEQLTLEIRKMDGEIEELCKERYEETAVLRQISGVGPLTSLAFVLTLEDPQRFAKSRAVGAYLGLRPRQRDSGGRGPQLRSTKAGDALLRQLLVSAAHYILGPFGPDTDLRRFGLRLAERGGKAAKKRAAVAVARKLSVLLHRLWITGETYKPVGYAKRGQRAA

SEQ ID NO: 487534 - protein, 426 aa, unidentified
MGMGKFTKTLCISERKEYSIMEGPIITVDVSKGSCHYQPFIENGHPMRKPKQLSATIDGFQKLGQTIKDLEAKTEREDIPVIFEATGVYHRPLQKYLEDHKIRYYIISPLLSATYRKTDLHSNKTDALDCAHIAKAYYCEKELRQYQAQPQEYKRLYQLSRLYESELVHLRKRKVSLRSMLDIIYPRIDKTFKGNQNLYDPIPMEILKRYPHPSLLLSHREDTIVKTVGHRTGHLKGYTERIVHKIYEKAKECYSGCEINDIEVVKLPSLIENVQEQKKKCDSLLKEMIEIARTCPYFASVVSIVGIGENLAARIIAELGDVNRFDNRAAIVAYAGLNPKIQQSGDIDGLHLKISKKGNKHLRCLLYLGAQCNYRLRKEDPLYEFTKKKRQQTQCPLSSKAAYTASAHKLLVIIYSLCKNGTLYHS

SEQ ID NO: 487535 - protein, 394 aa, unidentified
MYIVGIDIGKNHHEASIVSPEGKQIGRSLRFATTHKGADSLMRFIFKNIGNSPCVFGMEATGHYWYPIYSFLKAKGYTIYVINPIQSDSLRKMYIRQTKNDSIDSFLIAEVIRFGQFGTTSMADENILAMRQLCRYRDSVISSRTEIKLRIGTIMEQIFRVRKQFSSLWVSTSMGILEKYLTPENIENTPIDELFEIIKDKSHNRLTKAKAISIKEAAADTFGIKIAQDAFSFQLKQLIDRMNFLDKQIEALDIEIMKYYEQFDCYLHTIPGIGIIGAATILAEIGDISRFKNSSALVAFAGIDPTVRQSGEFNSTHNHMSKRGSPYLRHAIFLAATTCSFHNSPLNAYYKKKRDQGKHHLTATGAVARKLTTIIYAVLRDSNLMNLRSSVNVW

SEQ ID NO: 487536 - protein, 347 aa, unidentified
MDHVGMDLGKRESQIAILTDDGELINMRIRTERHRLVEVFGRRPKAKIIVEASTESEWVARCLEDLGHEVIVADPNYAPMYAQRTRRVKTDRRDAHALAHAGKAGTYRPAHRTSTERRDLRARLAVREAVVRTRAAWITRIQSLVRREGSRLRTGAPETFLTRVKELALPPTLTTVIAPLLELLGPLNKQIAALDEELERIVAADEVTRPLTTVPGVGPVTATAFVATVDDVTRFRDAHQVEAYLGLIPCEWSSSEAQRRGRITKAGNGRMRWLLVQAAWCILRRRKRPETAALRDWADRIAGRRGRSIAAVALARRLAGILFAIWRDGTVYDATKVRGPMTARRAA

SEQ ID NO: 487537 - protein, 370 aa, unidentified
MKKDTLFVGLDTDKKHIDVAVAEPLPRGEVRYWGRTANTPASVDRLVKRLGQGGSELVVCYEAGPCGYGLYRQLTGKRGVRCLVVAPSMTPQRPGDRVKTNRRDALKLARLLRAEELTEVWVPDAAHEAMRDLVRARASVVSALTRCRQHISSFLLRQGIAYAGKPWTNKHRAWLGTLKLEHAAHRLLLTELLLALDQAQARRDRLTDHIRELVPSWSLAWLVGALQALRGYDLINAAVMVAELGDPRRFAKPRQLMGFVGLNVSEASSGETVRRGRLTKTGNKRARKALIEAAWTYSRPAATTSKPAAARLPAAVQQIADKARHRLSRRYRHLVRRGKLKQVAIAAVARESLGFIWAIAHAAAPLPAQS

SEQ ID NO: 487538 - protein, 310 aa, unidentified
MQNYCGVDVSKDWLDCFISPAHFERFENSPEGIGKLAGFVQTQRPCLVVMEASGGFERVPFYLLWEQHIPCAIVNARSVRDFARAMGHLEKTDRIDAQVIARFAATKAIQPTPPPSQNQQRLSALSARMRQVVSDLTVQKQRLHTAHHDVAREGLIEIIAVLKRQSKSLSIEIAALIKDDPLWAALDTTLRSVKGVADRTVATLMADLPELGVLSNKAIAKLAGLAPLADDSGKRQGMRRTRGGRASVRTILFLVADIARKYDQSLAAFRQRLIDQGKKKMVIRIALAHKLLVRLNAKARETRLAFENTP

SEQ ID NO: 487539 - protein, 371 aa, unidentified
MTKEQPTIHVGIDVSKDKLAVAIAGGGVRDEVLSLGTFENAPASVDRLFKKLSGRGSRVSVCYEAGPTGYGRYRQVRAFDFECCVVAPSLIPVRAGERVKTDRLDAIRLARLLRAGELTPIWVPDETHEAMRDLVRARESAAEDQRHKRQLVSAFMIRHGRVYHRTKPWTMRYRRWLQSQSFDHPAHQIALQEMMQAERNATERLDRLTRHIEALVPEWDLAPAVNALQALRGVALISAVTFMAEIGDMRRFETPVKVMAYLGLVPSEYSTGKTTRRGGITRAGNSRVRHKLIEGAWTYRLQARPGARKLYILQEQPAEVQDIVWKAQSRLTARYRKLSQRGKKSTVVTTAIAREMAAFMWDIARRTVPAS

SEQ ID NO: 487540 - protein, 355 aa, unidentified
MDEYIALDSHVHYSLAEREEVRTGRTRQERIEHRPGAIREYLAECPAGTAVAVEATGNWYWIIEEIEAAGMRPRLVHPRKAKLMMGMINKTDKLDVHGLNRLQRNGTLPTVWIPPAPLRDLRELTRGRLVLVQQRTRLKNRVTSTLRKYGRGVVDASDPWGRKGRQEMERNVATLPPETAWVTRLLVEQLDLLDRHIRAQETRLKALVEVTPSMERLMTLPGVGVILAATIALEVGRIDRFAMAERLASYAGTTPRVHSSGDKTRYGRLRPDVNRYLKWAFVEAANSVAVNHRRCPERHVSRLYRRLRQRKGHAKAVGAVARHLAEATFHVWRRETAYQDPALGRYAEGVSAALS

SEQ ID NO: 487541 - protein, 349 aa, unidentified
MLADDLDYVVGVDTHRDEHVLAVVVAPAGAVVARRAVAANARGYAQALRFADKCANGTRVWAVEGAGHYGVGLARFLSGRSETVLEAGRSPRGERRLHGKDDGLDAIRAARAALGNDELGSPRAGQRREALRLLLVARRSAVDVRREALVQLRSVIVTSPNRLREELRGLPVQRLLDRCRGLRRSATAAPDELAVRLVLRTLARRIEAATVEADELEREILAHVHALAPRLLDEPGVGPIVAAQLLVAWSHHGRVRSEAAFARLAGVAPVPASSGQTTRHRLSRGGDRQLNRALHTVILHRRQHDPATMEYIARRIAEGKSRRDATRLLKRYLARHLYRVLDQRTPLIA

SEQ ID NO: 487542 - protein, 349 aa, unidentified
MTDQRIPYCGRIVYVGIDVHKETYTVTCVCNKQIVKTVTMQADPAALAASLPRWFPGATLYSVYEAGFSAFVLHRVLTKAGITNIIVNPASVAVAANDKVKTDRRDSKKLAIDLADGRLRGIYVPTEAEELARLLPRTRAQIVKHRATIARQIKAKLHQFGLIAPASRRLISSRYLREIAAWSLPQELSVSLTLLAEQWRFATRQLIEMRRLLRDQAQAQEEIEKVYRSVPGIGEVVARTLATELGDMTRFANERALFSYTGLTPSEYSSGASVRRGHISRQGSSRVRHLLVETAWRALPRDGVLKERFDRIAATRGKKRAIVAIARRLTGRIRACFRQGTTYAVGTYA

SEQ ID NO: 487543 - protein, 346 aa, unidentified
MTIVGCDFHPSWQQIAALDVETGEITERRLMNGNGEAERFYQALPAPSLIGIEACGNSQWLIELWQRLGHEVWVGDAAQIRASYVRKQKTDRRDAAHILKLLVENRFPRLWTPNAEQRDLRQLLIHRHKLVSLRTRVKGGLQHLALNRGLQKKNKLWSAAGQKVLCELQLDPWAACRREDLLGLLASMNQLIGKLDTAVERAAQENSQARLLMTQPGVGPITSLAFVLTLGDVSRFKRGKQVASYLGLIPRERSSGGKQRLGAINKQGNMFMRTLLVESAQTVTRLDEGFRKQYVQRCHRMARGVAKVAAARRLAVRLFWMLRTNTKYPEIVRIESSSTLAVVSES

SEQ ID NO: 487544 - protein, 392 aa, unidentified
MDSPPPRHHSATVAFEEANGSEGETMKKHSSKHDSLSSTDVELCTTICVDLAKQVFQLAGEDATGRVIYEDRIKSRQAFHDFLTRLPTTVAVLMECGPGAQAWARLLQTKGNPVRILPAQRVAEHRSGAKNDRNDAHAILRAGRDTSIASVPIKSTTALAIQALHRIRRGNIKRHTALGNQIRGLLLEHGVSIPQGDAAISQQVPRALEDASLPLPDLLRELLDELLTDWLSLGERIAALSGRLEVTAQQDKVAQRLITIRGVGPIIATAIVAKQTEPSRFASGRMYSAFFGIVPDQHSSGNKIRLGRMSKRGDGYIRSLMIQGAHAVLSQLRPDSDQPDDRRLLRWLSRLGRKEAAIRLANRNLRIIWALLQSNQVYQRKPNNNPEAAMSL

SEQ ID NO: 487545 - protein, 376 aa, unidentified
MDHDSTLYVGLDVHKESITVAYALGEGEVELLGKIGTTKAEVERLCKRLQSKARRVRVVYEAGPCGYGLYRQLAGKGFDCMVCAPSLIPKKPGERVKTDRRDAVKLVRALRAGDLSRVYVPTVEDEAFRDLSRTWVSAKDDLKRARQRLKAFLLSHGVRYAGRADWGSAHRRWLSTYAFDSAWQQLAFEEHRRTIEDRLAQCARLEAALREAVVNWHFYPAVLGLQTMRGVQFTTAVGMLAELGDLSRFEHPRQLMAWLGVTPSEHSSGDRRRQGSITKTGNSYARKLLVEAAWSYRHPARVSPDIQRRHEGIPKAIIDRAWDAQVRLCRRYRKLAARGKNANIAVVATARELAGFIWDISQLSMSLAVSEEAPAV

SEQ ID NO: 487546 - protein, 298 aa, unidentified
MKYVGVDLHKKVISVCVVVQKAGRRVVVKRETLRCDDPERIQSWFRRLGTFQVTVEATSSYEWFIQLVEPFADRVVLAHPKKLRVIAESTRKTDKLDAQVLAEFLSLDMIPAAHRPSLRLREHRSLVRQRQYVQRRITSAKNRLRHLLSHYNADVKYLFSQKGQAYLNELPLSAADRFVVRQLQATLEHLREQLAEIHGELRKFARKAPEAERESRQVLESMPCVGPVTVEVVLSELGDVRRFRSQKQVAAYAGLAPGIRESASRTKQLGITKEGSGLLRWVMIQTAWRLVGTILPGQ

SEQ ID NO: 487547 - protein, 326 aa, unidentified
MQSYLGVDVSKAKLDVALLLPSGKFKCKVFANDGPGHQALVQWLNVQLPDGLHNVHICMESTGSYHEALACAVHDQGLKVSVVNPLLVKRFAQSNGQRNKTDEADAKCLAQFCKEKHPERWEAPTAGVRTLQALVARLETLKDMRLAESNRLEVAHASVHGSIAGVMAELEAAIAQVKAQIAQTIDDDPDLKRRAQLLDTIPGLGEKSIAQLLAYIGRPERFKNVKAVIAYASLTPMIQKSGTSLDKRQGTHPMGHQDLKRALYFPAMVAGRHNPLVAAFWNRLKAQGKPGKVIVVACMHKLLAIAYGVLRSGQPFNAEHSKPQAA

SEQ ID NO: 487548 - protein, 347 aa, unidentified
MQFTATLPVIGMDIAKHVFQLHVVDAQTGEVTRHKLRRDRVTAFFANRQKSLVAMEACGGAHHWARTLQTLGHEVKLLPAKHVRAFVLRDKTDARDAQAIWVAAQQPHIKAVPVKNEQQQACLTLHRMRAQLMKVRIMQTNALRGLLYEFGIVLPEGHRALLKLVQDALAKAQEQRLPEVVVVSIQDQLRRIDSLQCDIDQLDKRLASMVKQNQHMLALQAIPGIGPLTATALVSTATDLSSFESGRQFAAWLGLTPRQTGTGGKTRQLGISKRGDPYVRTMLMHGARAVIARSQRSGWIERLLLRRPYSVVVAALANKLARTVWAVLVKGKAFDQVRWNPVDLAAA

SEQ ID NO: 487549 - protein, 413 aa, unidentified
MSQKIYLGIDLAKGTSKVVTIDEDGNEIFSPFSITNSKEGVEKLMSRLHSYKKDQIVAGMEVSSNYWENMYSYLRQRDISCILLNPYQVKKYKQALGFKIKTDSIDSASIAQLLRAKIYDDLFVSDEAVLELRELVRIAHSFGRRVKDLKRSVLALLYLTFPEYTKIISYPFSRVSMQILSKYPTSCHMAKEASVGRLVKIFRRYQGCNFGADKAKELIAAAKDSFYSGKASRSRGISICMQIEEIASLSAKVKEIELEIKSILDPDDPKDGNRLNFDILNSIKGVGIGTIAAFIAAVGDVSRFSNSDKLVSFIGFYPKIFESGKYKKKNPSIVKAGPKDLRYMLYMSSVAAVKHNIHLKKYYYDMVSAGMPAKKALIKVAVKIARMMYSMLKHKQYYDPCRVFLQQAPAVAA

SEQ ID NO: 487550 - protein, 342 aa, unidentified
MSEVSTIGLDIAKSVFQIHGVDAAGAVVIRKRITRAKLLEFFAALSPCLVGIEACPTAHYWSRRLQALGHTVRLLPPSYVKAYLKRSKNDANDAAAICEAVTRPSMRFVATKSEQQQSGLMLHRSRQLLVCQRTMLSNAVRGHMAELGIISAKGRNGTAELLKIVADEQDDRIPAAARFSLDVLARQYAAVRAEIVAIEKRIHVWHRSSEESRRLEEIPGVGPIVATALVAEVGDWKEFTSGRNLAAWIGLVPRQHSTGGKERLGRISKQGNRHLRWLLVAGAMAVIRYARQHGTKRPWLARLMGRRPIKVAAVALANKIARMAWAMMVHGERFKEPKLLPA

SEQ ID NO: 487551 - protein, 339 aa, unidentified
MKLYAGVDLHSNNSWIGIMDRNNKRILRKRVPNDLSEILDVLRPYHKNVAGIAVESTFNWYWLVDGLMDNGYNVHLANPSAIKQYEGLKHSDDEREAFHLAHLLKLGILPEGYIYPKEERPVRDLLRKRLQLVRQKTSHILSFKNLVSRNLGIKITSNEIKKLTEADVEAMFKDKYLVMAGKANIATMRFLKERITEIEKAVLKKAKLRKEYHKLLTVPGIGKILALTIMLETGDIARFPEVGNYASYCRCVNSVRISNGKSKGEGNRKNGNKYLSWAYVEAANFAIRGYPYVRSYYQRKAAKTNNIVAIKAVSHKLARASYYVIKNQEEFNPKKIFNL

SEQ ID NO: 487552 - protein, 342 aa, unidentified
MTIVTVGIDLAKNVFAVHGVDAAGKPVLVRPSVARDKLLELIAALPPCLIGMEACSGAHHWAREFDKLGHTVRLMAPKFVAPYRLSGKRGKNDAADAAAICEAVTRPQMRFVPLKTIEQQGQLMVHRARQGFVEQRTATLNRIQGLLSELGIVLPLKAATVRREALACLEDLPGWANTVIGDLLGEVTRLDERIAEYDRHIAFMARHSTQAQQLMQLSGIGQTTAMALISTVGNGHDFVCGRSFSAWLGLVPGQYSSGGKQRLGRITKAGDAYLRSLLVMGARSVLAAAMNTRAPKQDPISRWARSLAERRGYWRAVVAIAAKNARMCWAVLQRGESFKMPA

SEQ ID NO: 487553 - protein, 436 aa, unidentified
MGQVIIGVDPHKLSATIEVVDHQEKLLGAGRFSTDQAGYAAMRLYAKSWSERLWAVEGANGAGRPLAQRLLEAGEHVLDVPAKLAARVRLFDTGHNRKTDALDAHSIAIVAVRTQGLRVLKVDGELEALRMLADRREALTRRRVQSVNRLQALLAELLPGQAKKDITTGQAKVMLASVRPRDIAGKTCRRIAAEELSELVAVEVKIKKATAELKAKVLARDSHLMDLPGVGPVVAARVLADVGDIARFADRNRFASWTGTAPLDASSGQQNRHRLSRAGNRRMNHMIHIAAVTQLRLDTDGRAYYRRKRTEHNKPMEALRCLKRRISDAIYRQLVADAQRVADEHLEAGPGGHRGASLLSSAAGSHPHTGTSDQPLPGPALTTLPLSATPAQPRPGPAPQHPRRRAGAVKVERPTGRTTLTATSAGAHSKEPIPTP

SEQ ID NO: 487554 - protein, 373 aa, unidentified
MNYSTVYVGMDVHKESFSLCCYTNEKEKGEYPQKVEAHYSKIINYIEAMRFHYGDDATFICGYEAGCLGFTLYHQLTDHGIKCIILAPTTMPQPQGKKKVKTDKRDAERIARCLAHHDYSAVHVPTEKDEQTKEYIRMRCDHKLALKKVKQQILAFCLRHNYRYEDGSNHWTEKHLKWLRSLKPDGLYGEILQEYLLTYDTLSDKLERLDKRIEELASDAMYKENVHKLTCFLGIKTQTALSVITETGDFKRFATAQHYASYLGLVPGEDSSGDDQNRLGITKAGNRHLRMLLTEASQSYSRGQVGYKSKVLKQRQAGNDTAVITYADKANERLRRRYYKLVLGKCKKNNVAKTAIARELACYIWGMMTGNIA

SEQ ID NO: 487555 - protein, 339 aa, unidentified
MTIVGCDFHPAWQQVAVFDSETGEVRELKLTNGNGEAERFYRQLSSAAVVGLEACGNTQWFEDLLDRLGHEVWMGDAAAIRASYVRKQKTDRRDAAHILKLLLENRFPRLWRPSAEERDLRQLLIHRHKLVGIRARVKNGLQHLMLNRGVQMKRKLWSEAGQKALRALSLEGWAAQRRQDLLNLLSSLDPQIRQLEVAIQRAAQKNPRARLLMTQPGVGAITALAYVLTMGDVSRFPRGKQVASYLGLIPSESSSSNRRRLGSISKQGNSFLRMLLVESVQTVNRLDEGFRKQYQHRCHRMAKGVAKVAAARRLAVRLFWMLRTNTGYPEIAHIESSPR

SEQ ID NO: 487556 - protein, 322 aa, unidentified
MSLTVLGIDIAKQKFDVALLADGKIKNKTCRNSTEGFEVLKMWLEKQGIQKVHACLEATGNYGEDLAVYLHEVGHTVSIVNPARIKGFAQSELVRTKTDKLDAGVIARFCLAMKPEPWIPPAPEIRSLRALIRRVDSLIDMRSQEKNRISTAHESVTVLIKEHIDYLDQEIEKIRKQIADLIGKNPHLKQRKELLDSIPGLGKATIPHLLAELDNFDKFTHVREMVAFIGLAPKETLSGSSIKGKPRLCKIGNARLRKALYMPALVSIQCNPVMIAFYNRLKEKGKNGKVIVCAIMRKLVHVIFGVLKSGKMYDPNYKPALA

SEQ ID NO: 487557 - protein, 333 aa, unidentified
MQFESVIGIDVSKLTLDIALISQDAVLESFKIQNKPLVIEKFFQKLFQSVDFESTLICAEHTGHYGYPLLKVCMENDYSLWVEGGAEIKQRSGVTRYKNDKVDAIRIADYAKRYQDKAKIQKTELYTIESVRSLSSERELFIKERAKYRTQVRDFKGFMDEALYKAKMKRFTKQIESLTKLIKELDKQIITLLKSNETLAAQRKIITSISGIGDQTAIQTIVATRGFTRFDSGRKFSCHVGVAPFSYESGTSQKSRKKVSSKANKDLKKLFHMCALSAIKMEGEFKVYFLRKVADGKNKMTVINAVRSKLINRIFALIRDHRNYEKNYTTTLA

SEQ ID NO: 487558 - protein, 344 aa, unidentified
MDINTIGLDLAKSIFQVHGVDASGAVVVRKTLRRSQVLPFFTKLPPCVVGIEACGTSHHWARELIKLGHEVRLMPPAYVKPYVKRGKTDANDAEAICEAVTRPTMRFVAVKSPEQQAALALHRARDLLVKERTQLVNMVRGLLAEFGIDIPRGLERALTMARQINEGEILDVPDEAATAITILCEQALAAHERLRSIDRAMLAWQRASDLATRLATIPGIGPVGASALAASVADPHQFKSGREFAAWLGLTPLQKSSGGKERQGRISKMGDKYLRKLLIVGMTSLVRRARYKPESVDPYVADLLARKPVRVATVAMANKTARIAWAIMARGGTYREPAPRLLAA

SEQ ID NO: 487559 - protein, 385 aa, unidentified
MKKNSIAKLQANKSQIRKMAAKQKLTVGLDLGDRTSRYCILDGAGNKVGEDQLPTTKVGLDSLFGKMAPSRIALEVGMHSPWVSRQLAALGHEVIVANPRKVRLITQSVKKNDRMDAEHLARLARVDPQLLAPIRHRGVEAQADLAVIRARAELVEARTKLINAARGLAKPMGERLKSCDADYVKESLADGLGEATQNVIRPLLKSVEDISQQIGVYDKKIREVEKRYAETELLKQVHGVGTLIALTYVLTLEDAERFEHSREVGPYLGLTRKQRDSGDSQPELGISKAGDELLRRLLVQAAHCILRDGAPDSDLKVWGMTKVQTGAKTGNGKKGSKRRKKKAAVAVARKLAVLLHKLWVTGEVYDPQYNRKAVEAAKGKGKAAA

SEQ ID NO: 487560 - protein, 443 aa, unidentified
MSRKRRTHLRGKRGQAFADQIRGIPLDRILCVSIDVHKYFHVVMIHNALGEIVTPTFEIDIFQTGFDQLCQAIDEASVRIKAQVVLTGLEPTSHYFENLARHLRQRPQPVTLINSYAVKKNRDQQMMHREKDDEIDTASIGDLLRRGEGTPFKPASGVYLQLQHLDRVRLSKVKIRTMLQNQVLGHLDRIFPGLVIIAKEAKARYTPLFTTDFWSCQTMQHLIRVCPDPRQLAAMSPQDLIDAFHLHHYAMGPVTAAKTIAYAQKVLLPDAELIAIRGELLAHDLALLEEVEDHIAQLEDRLRTLLAETPYQIWINLKGLSDIQVASLAAAIGDPANYSYAAQVFRRSGLVSGRNDSGIRQRKGKGKRIVKVGDVYLRRALMNALATLILHQPVLQQYFNKLRKSKPAGVARVATARRATGILWATLRDQQAKTLILKKGATM

SEQ ID NO: 487561 - protein, 386 aa, unidentified
MHALADRSAAPAAIRTDLGAIFASLELSKSTWLITSLSPSSGEKMSKHAVRGGDITGLLARFAQLQDKAQARTGRHFALVVIQEAGLDGFWIHRVLEAEGIESHVVDAASIATSRRRRRAKTDKIDGEALVRALLAYKRGEPRVCAMVRVPSVSDEDHRRIGRERKVLVGERTCHVNRIKGLLFAQGITGYEPLRRDRHRLEELRTGDGRALPEHLKGQIRRELDRLELVIAQIKEVVQAERDALLAIEVAETPAATLLNLKGIGPECAAILYAEGLFRHFDNRRQVAAYAGLAPTPWQSGSVQHEQGVSKAGNPRLRTTMIELAWLWLRNQPDSALTRWFHERVIRNQGRLKKTTVVALARKLLVALWKYVTAGVVIEGAVMQAV

SEQ ID NO: 487562 - protein, 338 aa, unidentified
MSIVFVGIDLAKNVFAVHGVGEAGKPALVRPAVPRARLHELIASLPPCTVAMEACTGAHHWARLFAAHGHTVRLIAPKFVARYRMSGTRGKTDAADAAAICEAVQRPNMRFVPIKSEQQQSQLMVHRARQGYVQARTACINRIRGLLAEFGHVLALKADTVRRQAGGLLEDLPGWANTVIGDLLSELHRLDERIAQYDRHIAQIARKDQRAQRLMALPGIGSTTATAVVAMIGNGHEFNCGRQFAAWLGLTPGQYSSGGKTRLGRITKAGDGYLRSLLILGARAVLARAKASSDGISSWALALQQRRGYWKAVVAVAAKNARLAWAVLRSGEAFKMPA

SEQ ID NO: 487563 - protein, 309 aa, unidentified
MENIGIDVSKATLSCAWRGSSRDFDNTSKGHQDLWDWAAGATACCLEATGRFHQAVAEAAVARGLRCLVVNPGRARKYLQFVNPRAKTDKLDAQALELLGEKEGAALRAYVVPPAAVAEARDLLVRRRALVEAKVKIRQVAREAGDPGGHLAGALEAMARAEKALDKELEKALSGFPGYENLLSVPGVGPKTAAAVTCAMERGEFLTADSLVAFFGLDPRPCDSGKHRGKRRLSHQGDAQARTFLFMAGRAGARLPAWKAYYQSQTSKGLSSTEATVVMARKLARVCWKVYRQDTPFRDTKTQEVDKPT

SEQ ID NO: 487564 - protein, 338 aa, unidentified
MKVTSVGLDLAKSVFTLHGVDERGNMVLRKTVRRAKLLELFAQLPACVVGMEACSGAQHWARELRKLGHDPRIMAAEFVEPYRQGGKNDTNDAAAICEAVSRPKMRFVAVKSVEQQAVLAVHRLRQGLVEERTALANRLRGLLTEYGLIVGVGLDRLRHALPAIVEDGENGIPGIAREVFADAARLLTELDVRIGDYDRRIAGLARASEPAQRLMQLEGIGAVTATAIIATVGDATAFGNGRQFAAWLGLTPLQHSTGGKQRLGAMTKHGDVYLRTLLIHGTRAVLRITPQRSDAKSRWVERLRRRRPDNVVAVALAAKHARIIWALLARGQNYRPAV

SEQ ID NO: 487565 - protein, 365 aa, unidentified
MRIDIGVDLHKTQFTVYARREEKPGESGQYPTSDEGYREFLGTLGQWRRSGHDIRIGVESTGNTRYFKHRLEAKGYPVVVINTLKFKVINESVKKTDKHDAATIAEFLSKDMLPESKLCSEASEQLRRLLKVRSTLVRARVTVKNQIHGLLVSLGMEDTRASLQSKRGRQRILDTLAGAVNGLVVQPLFETIDRLTENVKAIESEIEKLVSDDKVVELLQTIPGCGPITAWTIRAYTDDIGRFSSHKKYASYAGLAPWVQCSNETEHYGRITKRGPEELRTAFVQLVVGIRRSRQSASWRLMERYEAMKRAKGSGKSIIATARKMSKIVWFMLTREEEFNVGLMTDNSLEKKIDSMRTALNMMSA

SEQ ID NO: 487566 - protein, 344 aa, unidentified
MMTHFVGLDVSQKMTAICVVDNVGRRLWRGQCPTAPERIAATVRQHAGGGSLIGIETGAMTPWLVHELRAFGLEVICLDARHARAALKMQLNKTDQNDAEGLAQIVRTGWFRSVHVKSFDSHRTRSLLGARAQLVGMTTRLSNHIRGVLKTFGLLPGAMRGTPFDRKVELLLQDRSDVAPIVRPMLVAWRQLREQISAFDKAIRQLIRSNPTCRLLMTVPGIGVLSALAFVSAVEDPERFPRSRSVGAHLGLTPRQYQSGEVDRSGRISKCGDTLARTLLYEAAVVIMTRVKKGSDLKDWALVIAKRSGMGKARVALARKLSVILHSVWRSGKPFRWSEQAIHA

SEQ ID NO: 487567 - protein, 367 aa, unidentified
MADVTTYVGLDVHQASIAVARLTGRDRTPEIWEIPNDRSAVRRLARKLRREAAGPIQSCYEAGPCGYAVQRQLMAEEVPCQVIAPALMPRKPGDRVKTDRRDARKLAELLRAGLLTEVHPPTPAEEAARDLVRARDDAREDRQRCRHRLGKLLLRRGLRPPGRAWTQAHTRWVDSLTWEHEAERHVVDDYRLALAQIEARLQALDTALTALADTPPYREAVGGLRCFRGIDTLTAITILAELHDVRRFPTARALMAYLGLVPGEHSSGETTRRGRITKTGNTLVRRLLTEAAWHYQHRPGIGKGLAQRRIGQPARVIAIADKAQQRLCGRFRRMALTRMPPPKIAVATARELAGFIWAALQPPPATT

SEQ ID NO: 487568 - protein, 475 aa, unidentified
MMQAGFRRAWSDSEGDGPSALQHDLSTTLVLESHTNRSDGRDLIGALPSTVCVLSAVPAGGAIPSTTKVGRYSMAHEPTVVLGGVDTHLNVHVAAVVDDRGRLLESQEFPSSADGYRELLTWMRSFGTLERVGVEGTGAYGAGLARYLADEGVEVVEVNRPNRQMRRQRGKSDAVDAEAAARAVLNGEAAVVPKSKDGLVESIRVIRVAFTSARNSRTRVTLQIRDLILTAPDQLRAVLSPLPAELRVERCAKLRSGELTDPGEATKYTLRILARRYQRLTTEMTELSADLDDLTARANPALRGAKGVGPDVAAILLVAAGDNPERLHTEAGFAALCGASPVQASSGKVTRHRLNRAGNRQANHALWTIATVRLTNDPATQAYMDRRTAEGKSRREVLRCLKRYIAREIFQLLTAPELVPVGTDLRVTRTNARVTLETAASALGISATHLSRLERGLQHNVTLAKRYEKWLADAA

SEQ ID NO: 487569 - protein, 483 aa, unidentified
MAKRKMSTFERLNSGEMNRRQRRELARKVAADDPELLIVNPNAAGIDVGNESHFVSVAPDRDPNPVREFGCWTAALRQMAEWLKSCGIDTVSMQATGVYWIALYDMLEQYGIRVVVSNAQHTKNVPGRKSDVQECQWLRKLHTYGLVRDSFRLAEQMQSVRTIWRVRDRLVKDAGRAIQHMQKALTKMNIQLANVLSDINGVTGQAIIGAILKGERDPYKLADLKNYRAKASREEVARSLEGNWREDVLFELQQAVDSYHFLHQQMQECDRKLEGYMASLPTRTLNAPAQPESAPAGTPPKKKKAKKPRGNEPAWDLSAELARIYGVDLTTIDGINVMTAQTVLSEIGTDMSRFENEHHFASWLGLTPSKDKSGKTVRKGKKKVKNRVAEALRMAATTLLKSDSYLGARYRHLRRQLPTAAAAVKAMAHYLALLVYRMLTRGEAWVDRGRQHFERKRNQRELASLKSKARVHGFQLIPISQAS

SEQ ID NO: 487570 - protein, 356 aa, unidentified
MKYYTSTTEFNCGIDLHARQMYVCVMDRQGKKLVHCNVKDNDFEYFLKLIKPYRHDITICSECMFGWYWLADACQEEGLTFVLAHALYLHLIHGGKNKNDRIDSEKIAHLLRSNLIPPSYVYPSAKRPLRALLRQRIFYVWRRSELLARIHSHQLAYNRTPAKQTRRVRDSWEEQLLKAENHPLRQLALKNDMAMIRHFDEQIFQLEEELQRQTKRVASREFTLLKTIPGIGEVLGLTILYEIGDIARFPTVKDFLSYCRLVKGTVASAGKIKGLRGAKLGNPYLRWAFGEAAVIAKRDHYQLKPLAERLEARMNGNKFKANTVLAIKLARAAYFMLKNKTVFDPERLTAVLAKAA

SEQ ID NO: 487571 - protein, 427 aa, unidentified
MNFTQNEKINQVKESTIIIGIDIASEVHYARAFNWRGIELGKVISFDNNLEGFIKLQEWIAILQERHGLSEVLLGAEPTGHYWFGLADYAKAHEMGLVLVNPYHVKQSKELDDNSPTKNDRKDPKTIANLVISGRYMMPYIPEGLYADLRTAVYTSDRVQKDLISLKNRMERWLKIYFPEYKTVFNSSFGKASLLLLKQAPLPEDLLVLGVQGINDLWRIDKLRAVGIKKAQEIFDAAQTSIGRKDGLSLARLDLTLLIEEYELKMKHLELLEETIETLCLQIPGVEKMLAIKGVGMATIAGFFAEVGDIRRFDSPKQIQKLAGLAIRETSSGKHQGTSSISRRGRKRLRTLLFQVILPLVGRNEAFKTLHTYYTTRKNNPLKKKQSLIALCCKLIRILFGISKKGFEFDEKTLLGDIKRPEMPIAA

SEQ ID NO: 487572 - protein, 335 aa, unidentified
MDFCYFIGIDIAKDTLDWAVYTQQGVRLSTHTPNTLAGIKTAFAQFKALPGWNPKQAVFCMEHTGIYNAHLLDLLDQQKLAIWLESSLQIKQAGGMQRGKTDKIDAQRIAQYAYRFRDQMCLWQPPREIIQKLAFLSATRQRLNQAYNLLAVPVAEQETFIGKSLQKTLKGNVKKSLTALQEEQKVVEQQIKDLIQTDARLKELFDLIVSVPGIGPVIATELLVATNEMQTISDPKKLACHAGVAPFEYRSGTSVRGKTRVSHQARKRLKSLIHMGTMSAIQVKGDLQDYYLRKIGEGKHTMLVLNAVRNKLIHRVCAVVRRGEKYDKNYTIALA

SEQ ID NO: 487573 - protein, 328 aa, unidentified
MCKSTYYVGVDVGKDELCVAVEGHKPRSFKHTPSGIKALYNWAGKLAGEAPLHFCMESTGVYSRSLAVRVGSFAGVEISIVNPAQIAAYAKAQLRRTKTDGVDAAVILSFAQSQKPLPWRAEPEALRTLYHLVVQADALRATLRRCANRGHSHQYIPDLPETVAQTQKALCRSLKAQIAKLEKAIQSLCAQEPDVRETVKIMTSTVGIAAHSASRLLAYGGERLTALSAKALTAHAGLAPHHYQSGTSLNGKSRIAKQGDRRLRCALYMPTLVAIVYNPIIKHHYQRLLAKGKPKMLAVVACMRKLLLIIRAMLKNKKTFNPELIPLT

SEQ ID NO: 487574 - protein, 421 aa, unidentified
MQPYQWLVGVDWGSKLHRVCVLDGDGKQVATRQVEHHGMGQREFVQWLSELVGGRTSEVAVGIEIPRGAIVEGLQERGFAVFAINPKQLDRFRDRYGMGGAKDDGRDAFVLADSLRTDLHCFRRVVIEDALILQIREMSRTRDDLQTEFGRLANQLREQLLRYFPPLLELCPAADEPWLWDLLQMAPLPAQAAKLTGQRVSKLLAKRRIRRLDPDQVRKILKSPALVLAPGAEIAASKHALLLLPSLRTAHAQHQQAVKEIAALVQLLPKPTGPEGQPLEHRDADLLLSLPGLGMGIAATMLGEATRALVERDYHALRCYSGLAAVTHQSGKRRTVVMRYACNCRLRNAFYHWARCSMQRDPRSKQHYAQLRQRGHSHGRALRGVADRLLAVLMAVLRSRTPYDPKLRGLHAKHKPSEQQP

SEQ ID NO: 487575 - protein, 366 aa, unidentified
MRKASTAALGRRRKLQEGQLTIGLDLGDRSSFYCVLNGAGEVVLEAKVATHPEAMKKAFEKMPASRIALETGTHSPWVSRLLTELGHEAIVAHSRNVRLIGESRRKDDRLDAQALARLARIDPKLLSPIQHRSVQAQADLSVIRARYALVRTRTALVCAARGLTKSFGERIRGRNPKGFGSATAEALSPQLQVALAPLLSALETITARIREYDAQIEQLAEESYPEVALLKQVKGVGTLIALTFVLTLEDPRRFRKSRDAGCYVGLQPGRRNSGQSEPQLHITREGDSYLRMVLVQGAQHILGPFGEDSDLRRWGLKLAERGGKRGKRRAIIAVARKLAVLLHHLWISCEAYEPLHNTRKRRPAVA

SEQ ID NO: 487576 - protein, 337 aa, unidentified
MKITTIGLDIAKSTFHFYAVNKMGRFIKKKQLKRKQVLMYTVNLEPCLIAMEACGGAHYWARELIAQGHQVKLIAPQYVKPFVKGNKNDYNDAEAIAEAAQRPNMRFVPIKPVERQDIQNVHCQRERLKKERGAIVNQTRGLLAEYGIVINKGVAAVRKNLPEILEDGENGLTVLARELFAELLEELRALDQRFKQCEQRIKQINQDNAVCLRLEEALGIGPITATATYAAAGDGKDFSNGRHFSAWIGLVPGQHSSGGKTVLLGISKRGNAYLRTLFIHGARSVLLHSANKTDRFSLWAQAVLARRGHNKACVAVANKMARIAWVIMAKGETYRAA

SEQ ID NO: 487577 - protein, 366 aa, unidentified
MKVVVGVDAHKLSHTLVAVDPAGLKLAQKTVATTSAAHAEAVRWAAAQFGSGILWAVEDCRTMTARLEDDLLATGQTVVRVPPHLMSRTRSSARERGKSDPIDALAVARTVLREPNLPVAVHDPTSMELRLLVDRRDDLVGECTATINRLMGRIHLLDPGHPTPRNWKVQKAHRELRDWLITQDGLVAELARDELDDIIRISAVILDLRRRIERTVRPVAPTLIALQGCGELTAARIIAEVANIDRFRSEAAFARYAGLAPTPHTSGAATVKVRSTRHGNRRLNAALHRIALTQTIHDGPGRTYYQRRLAEGDSRHRALRSLKRRLARVVFNRLKACPPAVDDLSSNGHTLPNVFLLPLVDYRAVR

SEQ ID NO: 487578 - protein, 370 aa, unidentified
MGKKVRHSGRGRKALAVLAHEEAFVGVDVHKATYSVSVWTEERGEVARWVQPAAPMALARRLAGIRPQVAQVVYEAGPTGFALARTLRAQGLPAEVIASSKMPVARGPSNKSDRLDAQHLAELAAKGLLKTVYVPTEQEEADRQVVRRRHQVVRERRRVKHRIKSFLLQHHLPSPAGLERWSLAAVAALAELPMGPELRWSLDGLLADLAHFEHQLAAATSALGELGSAERHASAVALLRGVPGVGPVTALTFRTELPRPERFATGAELASYVGLAPLVRRSGTTTRRGPIVKAGNGTLRSVLVEAAWSWVRYDPSARAVYGRLLANTALSQKAVVGVARRLAMVLWRVVTTGEVYRRGDAAARDDEPAL

SEQ ID NO: 487579 - protein, 357 aa, unidentified
MPEWWLNSHLSPTGGPEMNATTYGLDVAKRVFQIYWVDAETGEIVNRRFGRDDLIQYLSRRPPGRVALEACGSAHWWARKIKALGHDVVLLHAKFIRPFVQTNKTDAADARAIWTAVQQPGMRTVAVKTQQQQAMLSLHRIRSLLVKFRTMQVNQLRGLLYEFGASFRAGRVAGLSEIRARMAELEESLPGTMMCCLQDQLKRIDELQKEIDQLEKRIGAWQKQDAACSAISAVPGIGKLTATALVATMGDARSFKSGREFAAFLGLVPRQSGTGGRVRLGSISKRGDPYLRTLLIHGARSVLCHTKVPTAWQSAIQARRPANVAAVAVASKMARTAWAILAHGQAYQRDYVSARPA

SEQ ID NO: 487580 - protein, 519 aa, unidentified
MHQTKYRGIITEAGSLTTPPWEPAFRLVKPPIKSVSPFGGDLCFGWLGSLRLYLYKPLGCVSAFWKWMPAGKDKTMQYQKVLKMLESIPYLSVGLDVGADFTWMSIMLPNGTLIGKPFKIVHSDSQSRELAVAKIKEAQEAYSLKSRCFLESTGIYHIPLLCFLRDKGFDCSVINPIITKNSTNMNVRKLHNDKFDSKKAAKVGLDASLKTSIVPDDAVIDLRNLVRDYYYFKDLQSAVVLKLNAELKVSFPAYLNVFSKITTQTSLKLLEAYPLAADILAAPKDELVETIRTTARFGEKYAISKYDAICAAAKDAAVFGRALPSNALRIRLYIKTYREYQAHLDDILEELHKAVDKLQGDPVYDRICLLQSLRGVGFLSAVVLIAEMGSFDLFSSPKKLYAYFGMDPGVNDSGKFHGDRMHMSKRGSSLARRILHMVAINNLKVDKATKMPVNPVIYYYYIRKCDSRKKMVAVGAVMHKICNIIFAMLRDNKPFEIITPEEHCERYAAGHPKSVNTAA

SEQ ID NO: 487581 - protein, 337 aa, unidentified
MTQVHILAIDLAKRSFQVCGTDRGGAVLFNRLLSRARLQQLLNEQSPCIVAMEACATSHFWGRFAQGCDHNVRLIPPIYVKPFVKRQKNDAADAAAIAEAAQRPNMHFVEVKSAEHQARAVAFRTHQCFVRQRTQLINALRGHLGEFGIVVAQGPANLTAVVGILSDETNDLPYGVREIGQLYLDQIRLLTEKIDGLMLKLREATKANEDMRRLCTVPGVGPVTAGAILAFSPDLRAFKSGRNFAAWLGLVPRQHSTGGKTRLGGVSKMGQTDIRKLLIVGAMSLIRWIVRKGVLPDNWLGSILGRKPRMVAAVALANKMARIIWAMMTREQNYRMA

SEQ ID NO: 487582 - protein, 346 aa, unidentified
MSVYCGVDFHARVQTISYLTTEDGEVQQVELHHGQDDVRAFYAQFQGEVIVGFETSGYAYWFEELLEELGHQVWVGDPAEIRRLARRRQKNDRRDADLILALMVSGDFPRLHRQSAESRQVLQQLRYRQRLVKLRTIVMNSLQFMALSRGVSLRSKLMTRRGQERLQALRLSIVMTQQREELLSLLQELTSRIKTVQAWLEQQAQSDVRVVRVMTHPGIGPLTGLCLVHTLWPVSRFRDGRKVTGYVGLDPTEHSSGERQRFGSISKQGSRMLRYLLIEAGQAAARHDQDLKQLYWRVQLRRNRPKAKVAVARRLLVRAFIMLRDEIDYAEFVRRGVAARSSRVAP

SEQ ID NO: 487583 - protein, 336 aa, unidentified
MSKKATLKQCLGIDVSMKKIDCCLSFYTEDLKIKVVATSGFENGPEGFVKLREWLNRKQDNGLALYVNMEATGTYHEEAAYFLAGVGYRLSVIQPTKGKQYAKSLDEKNKTDKIDAGMLARMGLERELMPWSRPNEQLRLLKRMSRERIGLIRDRNALTNQLHALNHSFDAFRDSVDRLKERIALATKQLSEIEAQMRDLTESDPELAKRTKHAITIPGINFLTAITVIAETDGFANVSNRRQLVSYVGLDVVMKESGTLTWRPHISKRGNAYIRAGLYMAAVSSIIHNKTLKTYFNRLKEKGKPGKTGIVALERKLLVLIYTLYKNGQDYIPDYN

SEQ ID NO: 487584 - protein, 334 aa, unidentified
MDKVTTVGIDLAKSVFSLHGVDGAGRVLLRRTVRRDQLIQTVAALSPCVIGMEACSGAHEWGRRFQGLGHTVKLMAPKFVAPYRKSGKNDGNDAEAICEAVTRPSMRFVPVKSVEQQALLAMHRVRQGFVVERTATINRLRGLLCEFGVVLPLRSVTVRRQAAAAAEKLPELARRAIGDLLEQLRVLDERIGGYDREIEAQARLCEPAQRLMKIRGIGPTTALAIVATVGNAREFKNGRQFAAWIGLTPSQYSTGGKPRLGHISKRGDAYLRNLLVQGARSVLNSASAHQDRMSRWILELQPRRGYYRTLVAIANKNARIAWALLARNESLRSA

SEQ ID NO: 487585 - protein, 378 aa, unidentified
MDAKSGTMTAMERAPLVKPWVLNGTNHQEAHEMLYAGLDLSRQKLDVHILDETGRTVELLAVRPDADALRTLAERIGRYGQPVEAAIESMNGARFVHDTLERLGWDVQIADAAKARGLAPLAAKTDKIDARVLAELARRELVPAIWLPDPSVRAERERARFRLYLVRYRTSLKNRIHATLIAFGQSVPVSDLFGMRGRELLASLPIPEPWATTLTTSLRLVDELETQIDELEAELRATGAHHRYVPLLMTVPGISWVLAYTIAAEIGDIGRFAGPKRLTGYTGLCPRVYQSGLADRRGPLAKTGPKYLRWALIEAATTAARNPHYHDRYQRTKRRLGKQRGSKVARVELARELAGAIWYMLTRQEPFRAGGPTSGLVA

SEQ ID NO: 487586 - protein, 335 aa, unidentified
MHYLYYVGLDVSKETFDASLVAFEDANEMAHRKFANSRKGICSCLHWVEKRHGIRLDDVIFCAEDMGSYISEMAVCASDRTLNFNFSLISPLVIKYSMGIARGKTDRVDARRIAEYAITHYRKIALYLPAEKELCQLRTWLILRAHLAKQRVAKLVLLEKLDYKEKFADVSIQRSMLQEEIAYAETHMKTIEREMKELIAADSNICRNYKLLTSIKGVGPITAIEMLCSTLNFTKITDHRKFACYCGLAPFEHSSGTSVRGGCHTSSMANRDIKVQLNRSALIAIRCDPQLKAYYERKAAEGKHKFSVLNAVRAKIAARCFAVVRRGTPYVALQI

SEQ ID NO: 487587 - protein, 459 aa, unidentified
MGRARARKIPAQLVEDEEYQLRHERVAGIDVAKAKADVCTRLPPARDGGRRASRAEEVPARAADICALAGQLLADGVELVVMESTSDYWRIWFYLLEAAGLRVQLVNSRQSRQLAGRPKTDRLDAQWIARLAEMGLLRPSFVPPPEIRALRDLTRTRLQLVRDRTREWQRLEKLLEGALVKLSSAVWSLAKAKTARRILEAIAGGENDPAVLAALASGRVTGGRAAIEQALAGMQVRGHHRLLIRAHLDYITFLDRQVTAIEDEIGAALDAIPAAWGADATGETGPDAGRGPDAAALPAADRLAEIPGISPALARAIIAETGLDMTRFPTAAHLVSWAGLAPVARQSGPRSRKPGKGHGDVYLKGYCTQAATGAAGTATFLGERHSRLARRIGGSRASCAVARSILIIVWHLLSDPSARFTDLGPGWHDRKTDRNRKIRTHVRQLQALGLNVELTPATA

SEQ ID NO: 487588 - protein, 406 aa, unidentified
MAEGVCAGVDWAKDTHDAVVADGDGERLWAATVSHDEAGIARLCATLVTLGVERVAIERPDGLLVERLLDAGLTVIAMHPNQVAAARPRFRPAGGKSDRFDAFVLCELARTDSHRFRALTPDSDQTKALRALTRGREVLVEQRVALCNQLRAELERFWPGAVGVFADLDSPISLAFLSRYPSPADARGLGEKRIAQFLARHHYCGRRTPAELLDRLRAAPSGRAGELESEVRRGIVLALVAALTSIVEQIRLLTSEITHAVRAHPDGEIFLSLFRDPKSVVCAATLLAEMGDCRARYPTAEHLAADAGMSPVAVESGRKKVACFRRGCDHRLRDATSTLADATRHWHPWAQDRYTSARARGHDHPRAIPTLGRAWTRVLWRCWQDGIPYDPDRHNALQQHLLIVRG

SEQ ID NO: 487589 - protein, 385 aa, unidentified
MQKPNDLNQSRIVLKQDSTLIAVIEMSLSSWLVAGIVPGVERQPLKKLAVDESALLKLLNRWREEAEKAGRRIERIAVAFEAGRDGFWLARWLRARGIEAHVIHASSVAVSREHRRAKTDRLDTELLKRAFLGWLRGERDHCKMVAIPTTKDEDAKRPNRERQSLVGEQTRIVNRMKAALIRLGIRGFNPKLKKAAGRLEDLRTPEGEPIPPNTLAELHRDMERRWLVSDQIRQIEEARLERMEQAPGDGPHAMVRLIARVIGVGIETADMLVHEVLSRRLRDRRAVARYAGLTGAPDESGSKRREKGLAKAGNARVRRGMIQLAWRFLLFQKDSALAQWYRTRTESSGKKRKTMIVALARKLLIALWRLVTTGEVPAGVVLRAA

SEQ ID NO: 487590 - protein, 484 aa, unidentified
MAPVDKSAPEVIPDAEHELVIERVAAVDVAKAAGKVCVRLPAKTGRRFSRVWDVPARTGAITELGEQLVELGVEKITVESTSDYWRIWYYLLEAAGLSVQLVNARDVKNVPGRPKTDKLDAVWLAKLTEKGLLRPSFVPPAEIRRLRDYTRLREDLTHERTRYWQRLEKLLEDALIKVSVVASRLDTMSTRDMIEALIAGERDPRRLAELARGRMKAKRSELITALDGRFDDHHAELARMLLAQIDALSAQINTLTGRIEDLIAELPEAAAVDHGGGDDTDTTAPDAGDGPDAGPPPARGAAGLTGGTPRRVDPAIEAECARLSAIERLDEITGVGEHNAQVIIAETGLDMTRFPTPAHLVAWAKLCPRTIQSGPVTRSGRAGKGNPYLKGALGQAAAAAAKTDTFLGQRYRRIVKRGGKLKALVAVARSILVIVWHLLADPLARFHDLGPDYHARRIDIERRMRNHIAKLTALGYRVTVEPAA

SEQ ID NO: 487591 - protein, 381 aa, unidentified
MSKARLPEGVAGIERLHAMIGAERGEDSEAEVVIGIETDRGPWVQALIAAGYTVYAVNPLQTSRYRERLAVSGAKSDAADAHMLADMVRTDSHQLRPISGDSADAEAVKVVTRAHKTLIWERTRTTQRLRHALLDYFPAALEAFDDLDAPDTLELLAKAADPAAAAKLTTTQIGAALKRARRRNIPERSAKIQAVLRAEHLGQPAAVTAAYAVSVRALVALLVTLNEQVKFLHGQVEAYFGRHPDAEIIRSQPGLGAMLSARVLAEFGDDPHRYASAKARKNYAGTSPITRASGRKKVVTARYVRNDRLIDALIAQAFSALRVSAGARAYYEKQRARGIEFNAALRQLANRLVGILHGCLKTGTLYDEATAWSDRAHVLAA

SEQ ID NO: 487592 - protein, 451 aa, unidentified
MTKSKRRHPERDFTPTHPNAAAIDIGSRMHVAAVPPDRDPEPVRAFGTCTGDLQQLADWFERCGVRTVAMESTGVYWIPAYEQLEQRGFEVVLVNARDAKHVPGRKTDVSDAQWLRRLHEYGLLRASFRPKGELAALRAYLRQRERLLDYSASHIQHMQKAMMQMNVQLHHVVTDMTGETGMRIIRAVVAGERDPAVLAAHRDRRCHASEEEITAALAGNWREEHVFALGQALELYDAYHTKVVECDLRIEIVLRRLRDAAAKPAGRLPPARHRDKTANAPAFDARAALHAVLGVDLTQIHGLGPSLALKLIGECGTDLSAWPNAKHFTSWLCLAPANKISGGKVLSTRTRRSGSRAAALLRLAAVTVGRTQTALGAFYRRLSARVGKAKAVTATARKIATLFYNTLRHGLDYADPGASYYEDRYRARVLTNLRRRAKSLGYMLHETPASL

SEQ ID NO: 487593 - protein, 355 aa, unidentified
MENNKLDFSSQNFYLGIDVHKKSWSIGIISNNNLLKRFSMNPDPKILSEYMHRNYPGGNYFSVYEAGFSGYWIDRALKEKGINNIIVNPADIPTKNKERINKTDKIDARKLARELSNQQLEGIYIPGQLQEELRSLSRLRNQLVRDQTRVKNQIKSMLLYYGKKIPEDFEKKGWSKRFIKYIEGFDFTTIAGADCLKINIERFHRDHDLLKEVLRKIKNNLKDYGFEGLVEKLKSIPGISLLTAIALVTEIIDINRFKRLDELCAYVGIAPKMRESGENIKTLGLSKRHSKYLRNLLIESSWAAMKSDPALTMSFSNLIKRMPKQKAIIKIAKKLLNRIRYVWKNDQIYQKAVVA

SEQ ID NO: 487594 - protein, 353 aa, unidentified
MAIAEGGRGGEVRYLGEFPATEAAMRKLVAKLAAKFAKLTFCYEAGPTGYGLYRLITSLGHECIVVAPSLIPKKPGDRVKTNRRDAISLAKLSRAGELTAVWVPDERHEAMRDLSRARLAAKKDLQGKRQQISSFMLRLGRVYPGKTTWGPAHMNWLMAQKLEHREQRTALEELLQGVRQENERVERLDQAIREAAPEWSLAEVVTALQAMRGIDLIAAVGVLAETGDLSRFQNPRELMGYLGLVPSEDTTGDRVKRGHITKAGNGRARRILVEAAWAYRYPARVSREKQPKVAAAPRRVREIAWKAQTRLCRRFRSLERKGKLRTVIATAIARELAAFVWAINREVMGNRQA

SEQ ID NO: 487595 - protein, 322 aa, unidentified
MRYIGIDVSKATFVVAYSSDKGGGIRTFNNTTAGIRQFIGTLPKDGSIHCVMEATGNYSALLLYMLNVAGITVSMENPLKVKNFAKAMLSTVKTDKSDARLITLYGEKMNPRPFKVQGEAILRLRQKRTVIRQLTKQITAMSNLRGSLACLPVPDKGATHTVDETIKFLEKKRDRLQSELTDLVEVEFSRQLALLTTIKGIGITLATALIITTGGFTYFQNAKQVSRYLGICPTYEQSGTSVNIRGHINRNGDAYTRGLIYVAAWNASRFNAKCGETYTRLRQNGKPGKLAMIAVANKLVRQAFAVVAHDKEYVDGFVSNRH

SEQ ID NO: 487596 - protein, 417 aa, unidentified
MTHEINQFTAFVGIDWADQKHDISVSDHGCGPPVHRVIDHTPEVLIEWLGELHQQYPEGKIAVCLEQSKGALIYHLLGYDFLTIFPINPKSFARFREAFTTSGAKGDPSDADLLREFVAVHNDRLRPWQPDDEQTRTISFLAEGRRKTVAERTRLTNQLRSTLKMYFPQAIKLVSEKLHSTMTLDFLRKWPQLHNVQQAREKTVQMFYTTHNSRSSKQIKERLALIRTAAPLTKDQAVIKNCLITIKMLVAQITLLNSTIDEFDRELKALYDTHPDKDIFDSFPGSGDALGPRLLSAWGTDRDRYESAESMQKYSGTAPITKASGKSKIIIRRVACPKFLLQTFHEFANSSRKFSVWAQAYYEMKREQGKSHHMAVRSLAFKWIRIMYRCWQNRIEYDEVKYLQALKQSNSPLLGFI

SEQ ID NO: 487597 - protein, 382 aa, unidentified
MEPKLIVAGIDVHKKMLAVVVVDEDHPQQAREQRKFATNGSDLKHLAAWLDSHGVSLVVMESTALYWRPVWLALEGQYALHLAQAQSNAAPRGRKSDYVDALRLARRFLAAELRLSFVPDAEQRTWRCVSRNKHQKRQRRVQIQNQIEALLEECQIKLSSVITDLLGLTGYRILKGLPRGETDPAKLVQMAAVNLKASKEQLAEAVSVPMQSQYRSVLALQLEELDLLDKHIAELSRQLGKALQSHQEAVLRLCEIPGVREDAAWQIMAELGPAATTFETAEQMASWIGVCPGREESAGKSNRNRSPKGNRTMRRVLNQVAWSAVRTKDSFFRELYHRLIPRLGVHKAIWAIAHRIAKVVWKVLHEKCATSNGGLWRWTQRQ

SEQ ID NO: 487598 - protein, 353 aa, unidentified
MHTHQKSSDPVATIGLDIGKNTFHLVGLDKRGAIALRIKVSRSQLAHRLANLPCCLVGLEAGSGSHHIARQIQALGHEARLIPAQYVKPFLKGHKNDYRDAEAIAEAVQRPTMHFVAIKTPEQSDLLSLHRVRSRLVRQRTAIINQIRGFLIERGITVRQGPGPLRKVLPEVLSSPPEALSPRLLRLIAELDRDWRHLDERLEALSAEIENLSENDGACQRLMTVPGIGPVISSAVVVAIGTGSGFKQGRDFAAWLGLVPKQDSTGGRTKLGRISKRGNKYLRTLFVQAAHVVLERRPAAAMRALWPWIAQAAKRLPHRNLLAIALANKLARIAWAVLARGREYEPRVAANAA

SEQ ID NO: 487599 - protein, 379 aa, unidentified
MSIYVGMDVHRKRSQVAIVDDLGVQQRNRNLSNDPAKLVPILGTLPPGTPVAFEAASGWGWLVELLEELELEPHLVHPSRCKAIAAARLKNDKVDAATLAQLLRADLLPEAWIAPQGTRDLRALLRHRASLVRLSTSLKNRIHAVLADRGIGEDRILWTGPGRAWLASLELPAIPRAIVEDCCGLLDALAPPIARLERQIAALAKPDPRVQALMALPGVGRLTAMTLVAEIGDIDRFPTARKLCAWAGLTPAVRNSDRKVRHGHITKQGSVWVRWILQEAAQTAKKSPMFAGAYAQLARRRGTQIATVAIARRLLARCFHILKEVQTATTTGEGQTGRARNTACACNTAVDLTEQPGPDAIVMRTPPRGPNGCVRDQLR

SEQ ID NO: 487600 - protein, 357 aa, unidentified
MGKSIRNLAAVTRVGLDLAKRVFQVHAVDAKGEIIVARKLTRSQLIPFFATLPPCVVAMEACSSAHHWGRALIELGHEVRLLPPAHVKPYVRRNKSDQVDAAAICEAAGRPGQRFVPVRSIDNQAELMRHRARELLAGQRTAALNALRGHLAEIGVVAPQGAQHAYDLKRMAADGFDDNGEIVVPDCVRVALRPLVGQIDALDEAIGAIDREIAASVKADETARRLMTIPGVGPVTASAIVATIQDAGVFASGREFAAFLGLTPRQNSTGGKTRLGRITKMGDRYLRKLLVVGACATLRHRKGHNDALRLWASGMLERKTVKYKFKLTAVALANKVARIVFVLMTRGGQYDDRPAAA

SEQ ID NO: 487601 - protein, 365 aa, unidentified
MQTHTRSRTLFVGVDVHKDTHTAVGLTPFGEKIFEMTIGNEAEDFISLVEKTKVEANKVGLTPSFGLEDIHSWGERLSSFLAEEGLPVRAVAPILVDHRRSKMTHPEKSDSLDASGVAEVMIQRIDSLPLYKLTDEAQKAKQIRELSLEREWLVKERARLKNQLHILLHRIHNTGYRAKFKDPFSKKALRYWRRSAPKGTDAILAARTKRAVRRLLDLREEIQEIEEELDALMKDSGQTLSTASGCGTVIAAEIIGEIGDIARFHSPGALAKYAGCAPREHSSGKTIRWRKTRSGNRRLNRAFHRMALSQISRSGNEAARRYFKRKISEGKTKAQALVCLRRQLVNVVWMMLKHKIEYRYPQESV

SEQ ID NO: 487602 - protein, 338 aa, unidentified
MKHYGGIDLHSNSNYLGIMDEDDRKVLQKKLPNELCEVLKVLKPYKKKLEGIVVESTFNWYWLVDGLMENGYKVHLANPSAIKQYEGLKHSDDSRDAFHLAHLLRLDILPEGYIYPKEGRPVRDLLRKRSQLVRQRTMNILSFKNLVSRNLGKQISSNEIKRLKEKDVENLFQEEYLIIAGKANIATIRFLTERIKEIEKAVLKKAKLKDEYKNLLTAPGIGTILAITIMLETGDIKRFSEVGNYVSYCRCVRSSRISNGKIKGEGNRKNGNKYLSWAYVEAANKAVSDYAYVRRYYQRKSAKTNKVVAIKAVAHKIARACYYMIRNQEVFNPKKAFG

SEQ ID NO: 487603 - protein, 315 aa, unidentified
MNGKLFIGIDVSKDWLDIAVHETDRAIRIDNTPESLRAWIATLDPGIVGLVAFEPTGGYERAVRQGLATAGLPFARVHPNELAAFRTRTGVKAKTDRRDAKLLAAFAAIELSRRGLRPLVEGDPILQEMVARRRQLVDLLQAERCRAAMAQAEIVRTSLAAVTDHLETALDAMEAAIAERIALNEALAHRAVTLQTLKGVGPVTVSTLMADLPELGLLTGKEIAALVGLAPRTRESGKHRARATTGYGRPGVRRVLFNAARAAIRWNPVMRDFYQRLVQHNKRLGKVALTAVMRKMLVTLNAIARDNQPWRHASP

SEQ ID NO: 487604 - protein, 356 aa, unidentified
MQNNFQSPESVILGVDTHLDIHVGAVISQAGKLLGTRIIQTNQIGYQELFDWVKSFGVLEQAGIEGTGTYGAALTRFLIKNGIYVVEVNRPDRSKRRLEGKSDPLDAENAARTVLSGSSKAIPKMQSGACEALRIISVARRSAVKARTQAINQLRSLLVSAPQDVRDKLWKSKPHECVAACINCEVSEYSPLRIALYSTLRSLAKRWGALTEELNELDESLDKLTRKYASNLRSQFGVGPQTAATLLAVAGDNPERLKNEAALASLCGVNPLPASSGKTVRHRLNRGDSREANNALWTIALVRMRSDPRTRIYVDRRTGEGLSTKEILRCLKRYIVRELYPLILSDLTYANRPLLT

SEQ ID NO: 487605 - protein, 370 aa, unidentified
MMNVTTFVGLDVHARSIKAVALDAVTGEVRCAAFGYDAAAVADWVKAIDPKAKCAYESGVTGFDLQKKLAALGVDCVVGAVSKMIKPAADRKRKNDRNDAEFLARLLSVGNVTEVWVPDDGCEAARDLARALEDAREEVARSKQMLSKFLLRHGLVFDETNPSGARKKNWTAAHWAWIKSVSFAEKADNEVLAYYIDRVNPETEDKARLERLVAAEASKPRWKRRVDSVRCLKGIDVITAADLVLEAGEFSRFESARSFAAWIGLTPSEHSSGEGVHRGGITKAGNRHLRKDLVESAWHYLSCSPHSKDLARGQVPDPRARRHATKGVRRLVARREDMLARGLNKNKANVATARELACWVWAVGRMAESA

SEQ ID NO: 487606 - protein, 357 aa, unidentified
MEKLYLGVDLHKRSCWVTVLDADGHLVESRKLGTEKWELEEFFGKVAKPAALAVEATFNWYYFLNVIEPLGLELHLVHPWKTRAIASARIKHDKLDSRVLAELLRTGFLAEAWIAPRAVREQRQLLRYRVHTVQWATRAKNSIHGVLNRNGIRLPLGSPFGPRGREFLSEVELPETDRWEVSGQLVRLDLLRHQLGELDREIRKRSKASPVAQALEQIPGIGPFIASLLIAEIGDIWRFPTAKHLASYTGLVPSLYASGEHRWGGAITKQGSTVLRWALVQAAHRAALSPRFQDFYQRQRARHGAGKATVALARKLAVIAYYRWRQALHAAGPPKVEKVRECSWGSAWSDDRPLNSD

SEQ ID NO: 487607 - protein, 342 aa, unidentified
MKIMTVGIDLAKNVFQVHGVNEHGKTVLRKQLKRDQVATFFAIMPQCLIGMEACGSAHHWARKLRSFGHDVRLMAPQFVKPYVKTNKNDVADAEAICEAVGRPNMRFVPIKDIEQQAVLSLHRVRQGFVKARTAQANQIRGLLAEFGLVIPQGIAHIAKRVPELIEDEHNELPGLFRLLVQRLLEQLKGFDHQVREIESQIVAWHRVNENSRKLAKIPGIGPITASAMEASLGDAKSFKNGRQVSAWLGLVPKQNSTGGKTVLLGMSKRGDSYLRTLLIQGSRSMIYAAQRKDISDSWLGRLLKRRNANVAAVALPNKNARIIWALLAGDREFHSDYTTVVA

SEQ ID NO: 487608 - protein, 337 aa, unidentified
MEQVIRVGLDTSKQVFQVHGVDAGERMVLRRQLRRSELGRFFGTLAPTLIGLEACGGSHHWARVLRGLGHEVRLLPPSYVKTYRKRANKNDARDAEAICEALGRPSMRFVPVKTEAQQAALMLHSARELLIKQRTMLVNAIRGHAAEFGIVGAQGLGKLSELLERVRSSDIPELARRMIELLASQIDPLDMKLREIDARLRDWFSTSPESQRLATIPGIGLIAATALALKVPDPGAFRSGRHLAAWLGLTPSQRSTAGRHRLGKISRQGDETLRSLLIVGATAVVRWARPGRASPWLLELLARKPRKLVAVALANKTARIAWAIMMRCETYRRQMPA

SEQ ID NO: 487609 - protein, 343 aa, unidentified
MKRNTIGLDLAKNIFHVVGFNHHGKQIFRKQLRRKQVANWFVQQPPSLVGIEACSSSHYWARQLIGQGHEVKLIAPQHVKAFLRGQKNDYNDATAIAEAVARPQMRFVPIKNADQLNMQAVQRIRTKLISERTGLSNQLRGLLSEHGIVMPKSLKVLREHIPELLEDAGNGLSALFRRLLNHGWQRLLRMDDEIQELDRELNHVVKEDTDCQLLMSIPGYGPVVSSSFSVALGDTSCFKRGRDVAASLGLVPRQHSTGGKAKLLGISKRGNKELRTLLVQGAKSVLIRAKGKDDPLCQWALKVSARHGHNKAVIALANKLARIGWAVLNTQTPYKPGYALQNI

SEQ ID NO: 487610 - protein, 337 aa, unidentified
MENVALIGIDLGKHSFHIHCQDRFGKVLLRKKFNRTKLIEFLATFPACTIVMEACAGAHHMARRLAELGHESKLISPQFVRPFVKSNKNDFIDAEAICEAACRPSMRFVTPKTESQQMLGALHRVRESFVRDRVKASNQIHGFLLEFGISLPIGHAAIKRLPSVIAEHELPARLIAVLERLHAHFKYLEQQIAEIDKELASQLDEDDLGHRLMTIPGVGPITASLLATELGDGKHYRCSRDFAASVGLVPRQYSTGGRANLKGISKRGDKNLRRLLVQCARAYMQHLEQKTGRLADWVRDLLTRRHTNVVACALANKLARTAWALATRHTEFRAMPA

SEQ ID NO: 487611 - protein, 457 aa, unidentified
MQGKQKQARGRSAGQLLTLNEHAAGLDVGSTFHVVAVRSDQDEEPVRTFRSFSGDLHRMADWLGSVGIKTVAMESTGVYWIPVFEILEARGFEVLLVNARDVKNVPGRKTDVNDAQWLQQLHQHGLLRGSFRPRDEVVRLRAYLRHRERIVEYAASHVQHMQKALMQMNVQLHHVVSDITGVTGMRIIRAIVAGTRAPEELAQHRDVRCAASEETIRQALTGNYRPEHVFALKQALELWDVHQAKIAECDIEIETVLKSLNEKRAAPAAPLPPVRHAKARNEPKFDVRPALYTLLGTDLSQIHGFGPYTVLKLVAECGDDMTKWPTAKHFTSWLSLAPGNKISGGRVLSSHTRRSSNRAAVLLRIAAVNIGKTQTALGAFYRRLAARTGKAKAVTATARKLAVLFYRALRFGMTYADPGAEYYEERYKRRVIDSLQRRAHGLGFTLVANVAATEGVS

SEQ ID NO: 487612 - protein, 382 aa, unidentified
MADFAIEHSAAGWQRWRERVAALGGAVATCVETSQGMVIEQLLASGVSLYPIAPRSAKAYRERKAPSGNKSDHLDAWSLADALRVDGHGWRALGQEDPLVGELRLLCRDEVALIEERTALVNQLQSALQEYYPAALEAFEDWTQPAAWAFLEAFPTPEVLRAAGKRKWEKFLHSHKLARPQTFAKRLEIFARASELVSSEVLTRTKSRLALTRTRMLGVLEQQLELYRLEIEKLFERHPDHHLFGSLPGAGPKIAPRLLGEIGSDRARFDLKALQCLAGTAPISYQSGQIHIVALRRHCNKPLRAAVHLWANLSRQSSAWAAVYYQALRARGKSHACALRCLGQRWLKILWKMWLTRQCYNPDFHARNQLKHGSWVLKLQNA

SEQ ID NO: 487613 - protein, 349 aa, unidentified
MTIVEDRPVITGGVDTHADLHVAAALDPIGGLLGVQEFPATAAGYASLLGWLGGFGDIALVGVEGTGSYGAGLARHLAAAGVRVVEVDRADRQDRHRQGKSDPLDAVSAARAAQSGRASGAPKGRDGAVEAIRALMVAKRSARAERTQAINQARALIVTGPDELRARFAGHRPAQLVEAIAALRPRPGDVPGYATRVALRELGRRAQFLDAQLDRLDELIGPLVTARAPGLLSLHGVGPDTAALLLIAAGDHPGRLRSESSWAHLCGVAPIPASSGKVSRNRLNRGGDRQANHALWRIVITRLGSRPGHPATRAYVERRTKEGLSKKEIIRCLKRYVAREVYHQLRGSA

SEQ ID NO: 487614 - protein, 403 aa, unidentified
MNAVGIDVSKGKSTVAIMRPYGEIVASPFEINHTEDDFKKLVSQIQKLHGESRIIMEYTGRYYEPLANYLYNAGLHVSVVNAILIHDYSNSSIRRVKTDKKDSVKLANYDLDRWLTLPRYVPEEDTRLLLKNCYRQYRQYSKVQTVLKNNLISLLDTVFPNANRLFSSPIRGDGSEKWVDFVAEFWHCRCVSEKSQKAFTSKYQRWCRKHGYNFSEEKAHTIHAEASGYIGVMPKSETTKLLVEQAVAQLRATSAALTALKHEMLALAAQLPEYPVVMGMFGVGPTLGPQLIAEIGDVRRFYSKKALVAYAGLDAPPNDSGDVTGKHKSMSKIGASSLRRTLFLVMSVYLQNAPLDEPVYQFMDRKRAEGKPYRIYMMASANKFLRIYYATVKAYLESLEHTA

SEQ ID NO: 487615 - protein, 337 aa, unidentified
MNVTLIGIDLAKSVFQVCAVNQAGKPVFNRQVKRQRLLALLLEYPKAIVAMEACSGSNYWGRTLQRHGMDVRLIPPQHVKPFVKGNKNDRNDAFAITEAAQRPHLRCVPPRTLAQTDLIQAHRVRERQVNQRTALTNQIRGLLNEYGIVLPQGRRRLQSALPGLLENADNELTPEARVLLEELLIEWQQRDAAINRLDRRIDRQAKGSDAAQRLMTVKGIAEKTATALVAHAGDGRAYRNGRELAANLGLVPREHSSGGKQNLGGLTRRGNTYLRRMLIQGAWSVLRNAHRNHDRLSCWARQVAERRGKHKAVGAIANKMARISWALMYYKQSYRSA

SEQ ID NO: 487616 - protein, 418 aa, unidentified
MADEIMAEETIRWFAGIDWGSATHQACLLDEAGTVVGERAFAHGGAGLAALCDWLVSLAGDPGSVAVAIEVPHGPVVDALLDRGFAVYAINPKQLDRLRDRISVAGAKDDRRDARVAAAGLRTDPHLFRRVLAGDPSVIELREWSRLAEELQQERVRLGHRIRQQLWRYYPQLLELSDDMTAEWVLALWSMAPTPAQAARLREATLARLLRQHRIRKLDAPAVLAILRQPAIPVAPGVTEAAVLHLRSLVARLRLANQEFRQAERKLEELCTALSETQPTAQDSGPGDATILRSLPGVGPVTLATLLTEATGPLARRDYPALRTLSGVAPVTKRSGKSCIVVMRYAAQVRLRNAVFHWARVAVLNDRRCRGRYEALRARGHSYGRALRGVGDRLLGVACVLLRRGMLFDPDYGSSASA

SEQ ID NO: 487617 - protein, 343 aa, unidentified
MQAVTTIGLDIAKSVFQIHGVDAAGNVIVRRQLKRRYVLPFFQRLPPCLVGIEACASSHHWSRELKALGHTVRLMPPAYVKPYVKRQKNDAADAEAICEAVTRANMRFVATKTLEQQSCLMLHRTRHLFIRQQTAVINAIRAHLAEYGIVAAVGRNGVEELLGVVADPSDKRVPEIARACLAALGAQLRMLKAQILEFDRMITAWHRSNETSKRLDAIPGVGPALATALVASVPDPKAFRSGRNFSAWIGLVPKQHSSGGKDKLGSISKQGDRYLRSLFTAGALAVIRYAKIHGTKHRPWLTALLARRPAKVAAIALANKIARMAWAMMAKGERYKEPVALAV

SEQ ID NO: 487618 - protein, 371 aa, unidentified
MKKINTLHVGLDVHKDTIDVAIATADRDGEVRHLGTIGGDLAAVDKVLRKLISAGNKLHVVYEAGPCGFVLYRHLAKQGIEVEVYSPSSIPKAPGERIKNDRRDAIMLARLARSGDLTGITVPDAADEAVRDLLRARTDIVYAQRTARQQLKAILLRNDIRYVGKSSWTAAHLRWISRLIMPYPEQQIAFQEYVLAVTEATERIVRLDRAIEAAVATWRWQPVVEALCALRGIALLSAATLVAEIGSIERFQNPRQLMAYLGLIPGEHSSGPKRRQGSITKAGNSHARRMLIECAWLYHYPAKVAPILQSRLEKVTPQVREIAWNAQVRLCGRFRKLAARKLQHNKIVVAIARELVGFIWAIARVQAPRAS

SEQ ID NO: 487619 - protein, 371 aa, unidentified
MGRDSTTKFIGLDVHSKTISVAIADEGRKGEVRHYGTIENTFEAIDKVIKSLTITGAELKFIYEAGPCGYSLYRYLSGNGFTCIVTSPAMIPKRKSVRIKNDRRDALTLARLYRAGELTGIYVPDPEDEAIRDLTRAREDARLAERRAKQRVISFLLRHNFIYPGKKPWTKTYFVWLGKVRLQHPAQKIALQEYIEAVHECSERLARLSEQISLAVEEWRMAPTVKAIQALRGVSLITAAVTVAELGDLTRFDKPKELMAYLGLVPSEHSSGESVRRGHITKTGNSHVRRVLVESAWTYKHHARITGHLIKRQRKLPRNICQISWKAQLRLCARYRRMMARKKPMQVVAVAIAREIAAFIWAIAQETKAAG

SEQ ID NO: 487620 - protein, 414 aa, unidentified
MTEENFAWFAGVDWGSEQHQACVVDAQGRIIGEREFPHGGKGLADLCDWLLSIGGAADTVAVGIEVPHGPVADTLIDRGFVVHAINPKQLDRLRDRISVAGAKDDRRDAYVLGDGVRTDRRLFRRVHVSDPRLVELRAWSRLAEELTEERVRLSNRVHHELWRYYPQMLKIADDDVAAPWVLDLWDLAPTPDKARRLRAAPVEKLLKQHRIRRIDADTALGILREPAIKVGKGVAEAASVHLRSLFTRLRVVNRELRQAEAQLDKLCAAIGETDAESGEGLQRQDVMILRSMPGIGRINLATLLCEGSGPLSRRDYQALRTLCGAAPVTKRSGKSNIVIMRYAAHTRLRNVVYHWARVATQHDPKSRIRYAALRRRGKSHGRALRGVADRLLGLACVLLQRQTPFDPDFAKLVT

SEQ ID NO: 487621 - protein, 353 aa, unidentified
MRKQYNTVSFKNQTVFVGIDVHKKQWTVTIRHCGLTQKTFSMDPEPEKLAEYLKRNYPDAEYRSVYEAGFSGFEAHRTLCRLGVRNIVINPADVPTSGKEREKKNDSCDSRKLARELENGSLEPIYIPTPENLMLRNLKRREDQLVQNLTRIKNRIKGHLYFNGIKFISWAGGSLKIMEEEARKRNDWTLLSDLRELRFLRMERLQVIRDERACLKLLNREKIQENIQSVSGIGFRTGVALQAELWDMNRFKTNDHLNSYVGLAPHTFGSGEDVIAKCGNRKKKQLHYLMIEAAWRAVRYNLEYKARYGALLGRGMSSQKAIVVIAKKLMQAIRAVWLQDRKYKNYLETSKVK

SEQ ID NO: 487622 - protein, 368 aa, unidentified
MLPAIAEFQSFVGVDLHKCTVTLKAVDAAGAETKHLTISTKSVEKIEAWLRALPRPIWLAVEACPFVEWFIERYCPVADRIDIADATELSHRRGKRRKNDPNDALDIARRLARGECPLGFIADPQLMQLRKLGRHWRQLSRLLSRTKHAMKSMLNAANLRGPKFDAAGAHRWLLGFGHLLHPAQRQAFCNYLDVLMLVERQREMLRRQILMAPRSEKFARTESILQTVPGIGDIWGLMIAAEIGPFDRFPNSNTLEFWAGMTADLKESAGRTQSGNITKAGSAPLRWAICQAAVTLCMCDGRREAIRQRLIRRIGKAKANVAMGRRLLGTLYAMVRDEQPYRCEKPIDRTTRMNQAKAARQARSQKVA

SEQ ID NO: 487623 - protein, 387 aa, unidentified
MPEDAPRPAQAAIRTDLGAIFVSLELSRRAWLVTSLSPGGGEKMSKHSVQAGDIAGLLRRFAQLKEKARARTGRDFPVITIQEAGLDGFWIHRVLQSEGIESHVVDAASILTSRRRRRAKTDKIDGETLVRTLLAYKRGEPRVCSMVKSPTREEEDRRRICRERRALVAERVQHTNRIKGLLFAQGAFDYEPLKRNRRAQLEDLKTGDGRPLPVNLKAQISRELDRLEVVLQQLQTVDAERDALLEPASEASPAPAAMLSQLKGIGPEFATILYTEGLFRGFDNRRQVAAYAGLAPTPWQSGSVDHEQGVSKAGNPRLRTTMIQLAWLWLRHQPDSALSRWFQDRVQRNGGRMRKTTIVALARKLLVALWKYATSGVVIEGAVLKAA

SEQ ID NO: 487624 - protein, 357 aa, unidentified
MQRYIGLDAHGTSCTFAVIGPSGRKLRQDVVETNGAALVRYLRSIPGTKHLCLEEGTQSAWLYEILSPHVEDLVVAGIRESRGQKSDVLDAFRRADELRTGTVKTPVFKAPRLYARLRELARVHSMLVRDVVRVQARLKVMYRARGIPTPGSAVYSSRQRERWLRRLPVSSRWATERLHEEYDQLLALKQQAEQELVAESAKHRISRILATAPGLGPIRVAQLLPIVVTPHRFRTRSQFWAYCGLGIVLRSSSDWVQTRSGGWVRAPVQQTRGLNRNHNSTLKRIFKGAATTIVAHLATDPLYEHYLRLTAAGTKPNLAKLTVARRVAAIVLRMWKDEKEYDPGKLKLEASRASAGS

SEQ ID NO: 487625 - protein, 411 aa, unidentified
MEKVYDKCCGIDVHKKLIVACFKKGSKQEIRDFGATTRELLEMADWLKEGGCEMVAMESTASYWKPLYNILETCELKAMVVNARHMKAVPGRKTDVKDAEWIADLLQHGLLTASYIPDKDQRELRELVRYRKSLVGERNRELNRLQKMLEGANIKISGTITDINGKSARNILEHILTGRQIDSAEYDILYEKKIIAHNLKATKEQIIDDLNGVMSELQRKMMRILLDHLDELNAHIKELDDDIDSFMKPEEKKAASVIQDIPGIGNTSAQAIISVIGTDMERFPTDAHISSWAGLCPGNNESAHKRKSGKTTKGNALLRDTLVVCAHSAVKNKNSYFSAQFARISAHRGKKRAYVAVAHSMLVAIYHILKDGVIFKDLGADYYNQFNRERKINAYLKKLKALGWEAPVVAA

SEQ ID NO: 487626 - protein, 415 aa, unidentified
MALKIVYKICCGIDVHKTFVVACIASTNDKGVTSYESHRFSTYTSGLKTLLQWLLDRNCKDVCMESTGKYWIPVYNILEKDCSIVLAHPKYVKAIRGKKTDKKDAKWIADLFKHDLVAGSFMPPAGIRQLRDLMRYRFKLTCFKSSEKNRLQNCLTVSNIQLGNVVSDTFGKSAQAILDKILENPADTSFDLEPLVFKSLKKKLPELRDAIDGYITPEQAGKLKVIKAHYENLESRKAELEELILALAAPYQQELAILQTAPGISSDFTAIGIISEIGTNMEAFPSAKHLCSWAGLTPTNNESAGKKKSVRVSKAGCYIKPLLVQCANAVVTSKKHPEIRNRYLRLKKRRGHKKAIIAIARMLLTALYHMLKNGENYNAELYQKSDLLPVDREITVEQALMIARNQGYKIKSATA

SEQ ID NO: 487627 - protein, 350 aa, unidentified
MTKNRIDYQGKEVYVGIDVHKKTFSVYCLCDGQLAKKATIPAVSAALLGMLGKYFPGAEIYSAYEAGFAGFVLHRFLVANGVRNIVVNPGSIEVAAKDKVKTDKRDCRKIAVQLAAGRLKGIFIPTIEQEQERLLTRTREQLVNERTRLSQQFKSRLYQFGLIPIDNERELSQRFMENFLRMELPERLKQSLSTINRVWKFVNEEIKATEKEMQKQAKADQNEAVYRSVPGIGPVTSRILSNELGDMSQFRNERAVFSHTGLTPSEFSSGQYRRQGHITRQGSARIRWILTEVAWRAISEDKKLAEDFARISLKAGKKKAIVAIARKLIGRIRACFRKGQEYELGFGLAA

SEQ ID NO: 487628 - protein, 313 aa, unidentified
MNQVCVGIDVSKARLDVAVEGGEQFSVTNDLAGHVQLSERLAAVKLRLIVMEATGGLERSVAAHLTAQTLPIRVVNPRQVRQFAQAAGILAKTDQLDAAVLVRFARAMQLEPRALPSEQVQALQALIARRNELTEMLTMERNRLRLAHKSVRPHLMKSIRWLESQIGSTDHDVDGMLRECGIWRDKVELLESVPGIARLTSLRLVTTLPELGTLNRRQISALAGVAPFNQDSGQWRGKRRIYGGRAEARTALYMAALVGSRHNPVLRVFYQRLRAAGKPAKVALTACMRKLLTILNVMLREGRAWSPRLASAA

SEQ ID NO: 487629 - protein, 412 aa, unidentified
MSLPECDFYVGIDWAAEVHAVCVQDAAGKITAEFTIDHTADGFATLLSRLGRLAGDPMQVTVALERPDGRLVDALLEAGHPVVPVSPNAIKTWRDGEVLSGAKSDAGDAAVIAEYLRLRSHRLRPATPFSPQTKALRTVVRTRDDIVAMRTAATNQLTALLDAHWPGATKVFADIESPIALEFLTRYPTAKHAAGLGEKRLQAFCVKHGYSGRRPAAELLTRLRAAPAGTTDPDLIEAVRDAVLALVAVLRTLGEVRKTLDRSVTAHLGEHPDAAIFTSLPRSGQVNAAQMLAEWGDSREAYDSPDAVAALAGLTPVTKASGKYRAVHFRWACNKRFRKAMTMFADNSRHESPWAADIYRRAIQRGHDHPHAIRVLARAWVRVIYRCWIDRTPYDPGRHGNAIKINNSALAA

SEQ ID NO: 487630 - protein, 387 aa, unidentified
MEHVVIGMDPHKRSVTIEVMTGTEQVLAKHRFDTNAAGFRQLLSYAKQWPDRLWAVEGCNGIGRHVASRLVIAGETVVDVPPKLSARLRMFDTRQGRKTDPDDAHAIAMVAVRMNGLRPVVNDEQQALLRILADRRRALGQDHTRMISQLHQLLLELIPGGAKKDLSAAQARVLLAGVRPRDLVGKARKRVALELVGDLEKIYQRSKALDKEIKQLVVDTGSTLMDLHGIGPSSAARLMIEVGDINRFPDRNHFASWNGTAPIDASSGENTRHRLSRAGNRQINRALHVMAIVQLRNQTEGRAYYDRRKAAGKTSMEAMRSLKRRLSDIVYRTMIADVIAAAAGPGGQRGNDSDSSAAGPTPHTGTSEKPQPGPARPSLRPALPAAS

SEQ ID NO: 487631 - protein, 401 aa, unidentified
MNAVGIDVSKGKSMVCVMRPFGEVVLEPFEVLHTAQNLRDLAEKLKALDGETRVVLESTGNYHKPVAFVLHDAGLFVSVVNPVLIHDYDNNSLRRVKTDKKDAVKIANYTLDKWTRLRQYLPEDDTRLALKNCYRQYQQAVAIRTMLKNNLISSLDLTFPDANKLFASPPKSNGCEKWVDFIGDFWHSECVSSLSEEVFAKKYLKWCQKHGYIFTRSKSDEIYACALNSASLPKSPTSKLLIQQQVAQLKAVSQSVAAFRQEMLRLSQQLPEFDTVMEMYGVGPSLGPQLMAEIGDVRRFSSKKSLIAFAGIEPQPNDSGKVVGNDKGISKVGSAVLRRTLFLIMTVILQTQPQDEPVFQFMNKKRSEGKPYKVYMMASANKFLRIYYARVKAVMDSERSQ

SEQ ID NO: 487632 - protein, 343 aa, unidentified
MQNDTRIGVDIAKAVFEVAVSDRPGRVVRTARLRRGQFLEFFAQQPAARVLMEACGSAHHWARRIEQLGHRVILLPPHQVRPYVKRNKTDSTDAKGILEASRNEDIHPVPIKSVSQQVLTSLHRMRQGWMAERTARLNALRGLLRELGVFIPVGAENVVPTVWALIEDADSEVPDALRFVFAEACQEIREIEARVKQVERQIQALAEQLPAVAHLLSIPGIGLLTATALVAFIGDVQRFPSGRHLASYLGLTPREFSSGLRRYLGRISKRGDGYLRTLLIHGARSVLHHARTQQQDRFRSWAIKLSKTHVHNKAAVAVANKLARIVWAVWSRQQPYRQLPPAA

SEQ ID NO: 487633 - protein, 387 aa, unidentified
MPQPNDLSRSLVALDQNSTIIAVVELSQSSWLVGGLVPGIERQPRKKLEPNPERLLALLHRWRDEAVRAGHTITRIAVAFEAGRDGFWLARWLAARGVEAHVIHASSVAVSREHRRAKTDRLDTELLKRGFLGWLRGERGHCSMARVPTIAEEDAKRPNRERDCLVGERTRIVNRIKSTLARLGIRSFKPTLRKAAERLATVHTPEGVPLPPNTLAELQRDMARLGLVVSQIRQIEDARQKRLEQQHEAGPHAMVRLLARIVGVGVETADMLVHEVLSRPMRDRRAVARYAGLTGSPDESGARRREQGLARAGNARVRRGMIQLAWRFLMFQKESALTLWYRGRTADSRRGTRKTMIVALARKLIIALWRFVTTGEPLEGVVLRPAT

SEQ ID NO: 487634 - protein, 370 aa, unidentified
MKKRITFVGLDTHKNSIEVALADEGANSEVRLYGSIGGDLDSLDKMIRKLRIPGAELRFVYEAGPCGYEIYRHLRAQGLHCDVVAPSMVPRRSGDRIKNDRRDACNLARLYRAGELTAVYVPHEDDEAMRDLVRGRQDAINAQRKARQQLGGFLLRHGVRYPGKCLWSLAHGRWLAGVKMPHPAQQIMMQEYIHTVEECTQRVIRLNEQIQQLLPDWRMHPLVTALQALRGVAPVVATTVVVEIGPMGRFKNPRQLMAYLGLVPSERSSGGSVRRGAITKTGNGHARRALIEAAHSYRHPARISRTILKRQETLSEPVRQIAWKAQLRLCARFRRLIARGKSRNRVVAAVARELSGFMWAIAKQVPVPQG

SEQ ID NO: 487635 - protein, 354 aa, unidentified
MIIIGADYHPGFQQIAFVDTDSGEFQERRLEHREEAEKFYRDLKARGTSVRVGMEASGHARWFERLLSELQFELWIGDAAEIRTKRVRKQKTDRQDAQLILRLLMEDRFPRIWVPSWENRDLRQLLWHRHRMVQARTRIMNQLQAVALNEGLRCKKRLWRDKGREQLESFRLAPWASRRRRDLLELLDRLTSTIAELTQAVEREAEQCLEARRLQTHPGVGSLTALAFVLIIGRAERFQCGKQIASYLGLVPLEESSGQRRRLGHITKQGNSLLRFLLVEAAQVTVRSDPEWRSKYFHLAMRRGRKIAKVAMARRLAVRMYWMWRKGWDYEQLNKFGSHAGQPGNRDGVKLNTE

SEQ ID NO: 487636 - protein, 339 aa, unidentified
MMYVGIDLHRKRSHVVALDEEGQLVLSRRVQSQPAELLRIFGELGCQPIEVAFEATFGWGWLADLLADAGVPAHMAHPLATKAIAAGRVKNDAVDARTLANLLRGNLLPEAWMAPPEGREARRLARMRAGLMRITSRLKCQVHAVLAEHGVTTSVSDVFGKRGRQQLDQVALPQISRHRVEANLRLIDSIATEVKLAERELTDHFAGDPRVKRLLPIPGIGFLTAAMVTAEIWDISRFRTPDQLSSWAGLTPRERSSADHTRRGHISKQGSRWLRWILVESAAQHALRDEKLRSFFLKVRRGSPDRNKIAHVAVAHRLLTLCFYALRDEGGCRAYPVAG

SEQ ID NO: 487637 - protein, 338 aa, unidentified
MKIIYLGIDLAKNVFAVHGIDEFGKGVLVRPNVRRDQLLELIATLPPCVIGMEACSGAHHWARAFAEFGHTPKLIAPKFVAPYRMSGRRGKNDAADAAAICEAVQRPQMRFVPVKSVDQQGMLCLHRVRQGFVEERTATINRIRGLLSEFGIVLPQKAEVVRRQAARALEALPGWANRSIGDLLSHLHALDTRIDEYDAHVKEIAQADARSRRLMQMPGMGPVTASALVATIGNGGDFKCGRQLAAWLGLVPGQYSSGGKTRLGYITKAGDPYLRTLLILGARSVLAAAPKRTDRLSRWARSVKERRGHGKAQVAVAAKNARMAWAVLAKGEAFAPLQ

SEQ ID NO: 487638 - protein, 341 aa, unidentified
MSITNTFDHINTFIGIDVSKQWLDCIIRPSGDWLQCENQPNGFDQLDRWLRERDVDPQTSVICMENTGVYDDRLLQALTEKGWICCLEKTTILEKVTPDHHRKDDRFDAARLAEYAERYLDKLNAWEPVDEEIELLRQLFSERRRLVTQRAAVKSKCTESLHHTQTSSVVAQSWQQQLTFYTEHIDQIESRIRTIIKGHQGMTTYDDLLKSIPGIGEVTSWLWLILFYGQTDLDYKKIASRFGYAPHSKRSGTSVKGKTRSSGHGASEVRQCLCMAVRSASTHCEKFKKYKQKKLDEDKIWPIVRNNLANKLIKTICAIWNSEQPYDPNHTSRFDRQKKAA

SEQ ID NO: 487639 - protein, 412 aa, unidentified
MRIIRKRCLGLDLHKKQITAHLRVHGSIDDEPDRTDTRFGTLPADLKRLRDWVVEKQIEDVVMESTSVYWMHLYELLEPVTRPAVVNASHVKKVPGRKTDVSDAQWLADLHAHGLLRLSFVPPKPIRQLRTLTRYRTKLVAMRTATRNRTVKMLERAGIKLSSVVSDCFGATGRGILDVLAEKGELGYTEINTLARGTLRNKVRELTAAVAIPLNDVERDLLGMHLRSYDALDAQIAESEGKLGDLAKPYASSVDKLDAVPGINPLAAITLIAETGVDMSAYQSEHHLTALAGLAPGNSISDEKRRAIAVRKGNRYLKRICVQIAWAVTRKKDSFLRARFGRLSRRIGRNKAIVATARHILVIVYHLLRTDRPYQDLGANYHDRRNSERLIRQHVRRLENLGFVVELKRTGT

SEQ ID NO: 487640 - protein, 344 aa, unidentified
MNNTTVIGIDLAKNVIQACLIDKHGSIVYNKAVTRNKLKQLLANLPPAIVAMEGCGSCHYWGQLAEQLGHQARIISPKKVKAFLQGHKTDANDALAIAIAATQPGMVFSRIKTKEQQSLQTLEKSRKFLDKELTALGNHIRAYLYEFGITSSRGRKSLRLTVARVLDEQDQRLPTCLKSTLIQLWSRYTLTIEQLKSTKKAIEALVKQFDPCRRLLDLESVGPVSASLLYASMGDGGDFKNGRQAAAYTGVTPQQHSSGGKTYIRGINKQGGNKELRAALYQGAFSVISRLPLEPKTVKQKWLIDLVNRVGVKRACIALANKTVRTAWALLATGKTYQPVLLNP

SEQ ID NO: 487641 - protein, 339 aa, unidentified
MNNSVIGLDIAKNIFHLFTLLVDGKTLKKKLKRSELLTFFATYPASIIGIEACGSSHHWARELTKLGHEVILLNARFVKNYVVGNKTDFNDAEAIYEAVLRPNKRVVAIKTVAQQDIQLIHNIRKDLVDQRTALVNQTRGLLSERGIVINQGIEQFREQLPLILEDAENGLTDLTRELFAEQYEKIRALDAEIKAQDQRINRLCNANDLSKRFLEVPGVGPLTATIVAADIGDSGKGYKSSRDYAASLGVVPKQHSSADKQHYLGISKRGNRYIRTLLIHGARAVLKNCTKKTDKLSLWLQALVARRGFNKAAVALANKNARILWAMASNGKDYEALAA

SEQ ID NO: 487642 - protein, 393 aa, unidentified
MICVGIDVAKDKHDCFILSSEGEVLADVFTIQNNAEGFDTLLQTIRRCVCPGDKIKVGLEATGHYSYNILGFLLDKGLDTYVINPLHTNLYRKSLSLRKTKTDRVDARTIAAMLMSDVDLKSYTDTAYHNEELKSLTRYRFDKVRERAKLKQSVSRLVTILFPELEKLVPTLHMTSVYALLSEFPGAKQVAGAHLTHLKAVLHDSSKGRYGRDMATTLRDAARCPVGSVMPAKSLELQHTIRLIRELDAEIEDIEAAIQSMMEEIHSPITTIPGIGVRMGAMILAEIGDFSRFDSPDKILAYAGMSPSTYQSGQLSLSGAYSHMEKRGSRYLRYALYNATKYVCLWDPTFAAYLAKKRTEGKHYNVALSYAAKKLVRLIYVMEKSKQSYRNAA

SEQ ID NO: 487643 - protein, 317 aa, unidentified
MAMPARELDFGVDVAKASVQIDGEGLSLELSNTTRDLRTWLKRLPSQACFALEATSTFHLTFANLAHELGHAVYLIDGFRLSRYREGIGGRAKTDVLDAQLLRRYLSHEKQSLRLWTPPPAGYSEMLKLLNLRERCVSARVMIEQSMAGVGVCKRELSETVRKMRALEALLGQRIEACARRYWAEQVTRCRQIEGVGPITSAALAAIYQRGSFRSSDAFVAFIGLDVQARDSGTQRGRRKLSKRGNAELRRLLYTAAMTACRSGTWKPYYQKLLARGLKKIQALVALSRKLARVAFTLMKNECDYQPEMRSGGCLAT

SEQ ID NO: 487644 - protein, 366 aa, unidentified
MKKTSTVRINGNMIFKGHKLTIGLDLGDQWSCYCVLDEAGKIILEQKVATTPEAMKQAFAKIPQSLIAMETGTHSPWVSRLLTELGHKVIVAHAQKVQLITKSNRKDDRHDARTLARLARIDAELLGPVRHRSAQAQIHLTVIRARAELVRARTSLVNAARGLVKSYGQRLPKCGTQQVSRELGVGLNAELREVLEPLLKEVESLNERIKEYEVRMEKIAKESYPQVELLKQVKGVGTQIALTYVLTLDDPHRFPKSREVGGFLGLCPGRRDSGESQPQMRISKEGDRYLRTMLVQGAHYILGPFGADSDLRRWGLKLAARGGKNAKKRAVVAVARKLAVLLHRLWVSGEVYEPLRNSQKAMRVAA

SEQ ID NO: 487645 - protein, 505 aa, unidentified
MKRGCFRFGFCICYTILGASAYYRARGGEWWGRIAATPHVYMVSVVRKGINEWRKKQPVNLSLTNRLDFAGRSVPADSPNTFWRYAMFKIFRKNCCGLDVHKTWIYACIGITDADGRTEYKQKRFSSFAKGLRELSDWLASYNCKDVCMESAGRYWIPVFNILEKTCWVTLAHPKYTKPQKGNKTDRKDAKWICDLFMCDMIKPSFIPPPDIRHLRDLVRYRFKLTNCLTGEKNRAQNCLTVSNLKLDDVFSDVFGKSARSITNYILEHPGEQFDVTPFVHGRCKTPIEEIQAAVDGSISHEQSVKLREILTHIDELNAHKQNLETEILRITNPYQAQLELIRTVPGFSANPMTAIALISEIGVDMSVFPTAKHLSSWAGCCPRNDQSGGKRKSTRISRAGAYLKPLLVQVANAVVKSDKYPECKERYRRLKARRGHKKAIIAICRMLLTAIWNILSKLEPYSAYGYLADRKSDTAKIVTKAQALNILRLRGYVIKDDDSTPAPA

SEQ ID NO: 487646 - protein, 347 aa, unidentified
MTIVEAPPGITGGVDTHLDKHVAAALDPLGRLVGTESFDADAAGYKALLVWLKDFGEVTKVGVEGTGSYGVGLARFLRRKGIEVVEVNRPNRQSRRNQGKSDPLDAVEAARAAISGRASGVGKTKDGPVEAIRVLVVAKRSARQARVKAIVQMRHLGFTAPDQLHSRLKGLSVTALVAEGAKLRATKSADTVTAATKASLSSLAHRIQGLDLEIVELDEKIKSLLLATAPDLMARFGVGPDTAASLLVAAGDNPERLHSEAAWAHLCGVSPVPADSGKNAGHLRRHTGGDRQANSALWRIAMVRIAHDPETTQYFERRVKEGRTKRDVIRILQRYIAREVYRYLPRG

SEQ ID NO: 487647 - protein, 355 aa, unidentified
MGTISLGVDLAKCVFAVCEMDAAGLVVRRREFKRDAFALHLAQLPAGTVVAMEACSGAHHWARRCLAYGLIPRLMAAQFVRPFRKNPLAKNDPNDAEAIATAARQGNMRFVPVKDIDQQARLAWHRVREGYKAEHLAIGNRLRGLLAEFGIVVPNRDAALHRVLGDLDAHPELPGEFKELLRSLSEHWVQVHAAMAACDARIERHARQDSRCARLRAIVGVGPLTADAMVASIGNAREFKNGRQLAAWLGLVPTQHSSGGHARLGAISCRGDGYLRTLLIQGARSSLERAKRVGLDKATPEQVWIQSLACRMPFGKVIVAIANKHARQLWAMLAHDLDYDPTASLNRTMQQRTAA

SEQ ID NO: 487648 - protein, 451 aa, unidentified
MSRPQVIDDEEHEQVHDRVAAVDVAKDSGVVCTRTPHPSRPGARRSTVWTVKARMGAIRQLGRQLKRDGIEIVTLESTSDYWRIWFFVLEACGLAVQLVNAAQAKNLPGRPKTDKLDAQWLARLTEMGLLRASFVPPKAIRVLRDYTRARTRLVQERTRCSQRLEKLLESALVKLSSVASKLTTESAKDMIKAMIAGERDPRVLAGLARTRMRAKHDDLVEALDGMSGDHHGELARLLLDQIAFLDERITRLTARITGAVAAMPEAWGIDADGTTGPDAGTGPDAAVLPAAARLAEIPGISEDLARSIIAETGLDMSRFPDAAHLVSWAGLCPSARQSGPRTRSGKKGQGNGYLRGALGQAAIGAARTNTFPGERYWRIARRRGKAKAQVAVARSILVIIWHLLADPEARYTDLGYGYYQARTDKDRRVRNHIRQIEALLGHPITITPKAA

SEQ ID NO: 487649 - protein, 388 aa, unidentified
MTNGYYVGMDVHQRTTSLCLMDGEGTVVREWKVRTAPKELDELHRELRRLCGDTPVTLGLEASTAGKATFQHLRKLGRNVAMAHPRALRAVTTSETKTDSNDARTLAHLLRLSFFPRSYVPEEPIERLRTLVRLREEQVDKLRRAKIQVRTLLVKHQLQHESLKYDDIFGVQALHWLKGVDLPDPYAQRQLVLLLEEGALYARQVDELTRELAKFGADEKTVAILQSVPGIDYVLALTILAEVGDVYRFPNRRKFAAYCGLVPKNRDSGEVVGRHSKLRHGSSRLKWALMVAVQAIRKSGKGRFAILLRRLEKRIGTPKALAAVAHRLAFTVYGLWKTETLYDEISAQQYAWKRRRLRRHAAEAPAAPRPVEAVERMLKQIGAMGVGS

SEQ ID NO: 487650 - protein, 343 aa, unidentified
MPHYVGLDVSQKTTAICVVDAQGKRLWRGVCATDPGPISARISQHAGVDAKVGIETGSMTPWLVHGLRAAGLDVACLDARRVKAALQMQLNKTDENDAEGLAQIMRTGWYRAVHVKSLDAHRARALLGARAQLVGMTTRLSNMIRGVLKTFGLLPGAGRGLRFDRKVEALLEGAPEIALVVRPLLATWRQLRQQIAVFDKAVLQQVRADPICRLLMTVPGIGALSSLMYVSTVENPSRFSRSRAVGAHLGLTPRRYQSGETDRSGHISRCGDALARPLMYEAAIVILHRVKRPLHLKDWAEAIERRSGSGKARVALARKLSVILHSVWRSGEPFRWAAPAMAA

SEQ ID NO: 487651 - protein, 350 aa, unidentified
MPRNFDTAVVTIGIDPGKNTLHLVGLDARGEIVLREKVARTKIVSRLANMRPCLIGIEAGMGTHYVTRDLLALDHDVRQVPPVYAKPFRQTHKNDFRDAYAVAEAVQRPTTRCVPPKTDEQLDLQALHRVRYRLVGQRTAIINQIRCFLLEHGITVRQRLHWLRHALPDILAQRTDVLSPRMVRILEDLAQDWRRLDDRIEAVSGEIDALSKNTELCRHLMTIPGIGPIISSAVVAAIGDGAAFTRGRDFAAWLGLVPKQISTGDRTILGRITKRGNRYLRMLFLQAARVVLLRPRNWMQHSFGPWLAAAAQRLHHNVLATALANKLARIAWSVLVQYRDYEARLSVAAT

SEQ ID NO: 487652 - protein, 432 aa, unidentified
MLKINFMSTLFVGIDVSSKSNVVYAMDFYKNKYIQSSFSNNQPGADELSVLIKDCMVAHPDLNTIVIAMESTSVYSIHIANHLSTCEILLPFKPYVFCLNPKMTANYRKAFIAMAKTDLLDAFIIADFARAGLIETQPWRGSQFLALKRLTRHRLHLAECITREKTYMVSNLYLKFSELQLLGGENQPFSNIYGATSSAILTEFLSPQEIIDASEEELLTFIAEKSRNRITDISKTTELLKKAARDSYRLDKCLYEPLSISLASSFNCIDTFKKEIKAIDDAIEKTIKGMNPNALTILKSIKGIGPVFAAGIIAEIGDINVFHSSDALAKYAGLTWSKNQSGDFDGEDTHMQKAGNTYLRYYLGEAANSVRRHIPEYRDYYAKKYGEVPKHQHKRALALTSRKFVRLVFGLLVKNQLYTGEKLDTEFHIESN

SEQ ID NO: 487653 - protein, 316 aa, unidentified
MTEEAVCIGVDVAKGTLDLAVSNSTETRQFENNHEGITSAATYIAGLKPTIIILEATGHFEMPLAAVLQTNHLPVVIVNPRQVRDFARATGVLAKTDKIDSRILALFGLQIKPQVRLLPEQKVRDMECLLSRRRQLIEMLTAEHNRVLQADGSIRKGIKIHIRWLEKAISAINDDLDSQIKNSPSWREKDDLLKSVPGVGKVVSTTLLIELPELGQLNRRKIAALVGVAPLNRDSGTMRGKRTVWGGRAKLRAVLYMAALVGVRHNPVITSFYERLLKVGKAKKVALVACMRKLLTILNAMIRSNTVWQEAAMETK

SEQ ID NO: 487654 - protein, 349 aa, unidentified
MYHYAGIDVSLELLSVCIVDAKGKIVKEAKVGSDPDTLVAFLRGLDLAIDRIGLEAGPLSQWLHAGLTSAGFEAVLLETRHVKAALSAMTVKTDRKDARGIAQLIRMGWFRAVHCKSAGSQEVRALLVARKLLLSKLLDVEFSIRGILRGFGLKMGMVTRKRFEARVRELYAGHAMLEQICSAMLTARSALQTEYAKLHKALLVIVRKDEVCRRLMTTPGVGPLVAITFKTGVDDPSRIHKSKAVGALFGLTPKKYQSGETDVTGGITRAGDEMVRTALYEAASVLLSRVTRFSALKRWGMDVAKRRGTKRAKVALARKIGVILHRMWVDMTSFRWTKGAPTTMRLARV

SEQ ID NO: 487655 - protein, 421 aa, unidentified
MKEVVCLPFNFSRVTPVREQSRMNGRDMVFRSVPVKQHEQANTPMKKELYLGLDVHSEWILSATAEPGRGGEVRDSGAIRCDLQAVEKWIGRLRKAHGKEVILRACYEAGPCGFGIARRLKQLGVECEVVAPSMTPTRAGDRVKTDKRDARKLARLLRAGELTAIYIPEPTDEAMRDLCRARTDAVDDRRRSRHRLKGFLLRHGYRYQGKSAWSEAHMRYLRELVLPHPAMKAILEEYLMAISAASEGIARCEVAMRDLLPQWRLEPAVKALMALKGFQTVAAMIVVSELGEVHRFAHPRRVMAYLGLIPSEKTSSDKRRQGAITKCGNAHARWLLVECAQHYAAPPKVSKELSRRQEGQPREVRALSWKAQNRLHSRYTRLAARRLPRNKAIVAIARELCGFIWELLRRQGCYQVQPTLV

SEQ ID NO: 487656 - protein, 381 aa, unidentified
MLDQTAHYPVPTVYAAIELSKKSWIVAIVQPAKGQPSIYRIKGGAFSELVMRLRTATPSGERLLVCYEAGYDGFWLARSLQTEKIDCRVLDPASLQVNRRARRVKTDRIDVLMLLRALIAVDRGDRHVCSIVRVPTIEEEDARRSHRERQRLIRERTAHINRIKGLLFGQGIRGVEPRLRRSRIDFSDLRTGEGLPLPARLRAELEREYARLDLVETQLRVTEAERETADAQDPSIEHKRNMLIQLRGVGPASAAILTREIFARRFANRRQLGSYLGLTPSAYDSGSTTRCQGISKAGNSFARRVMIEVAWLWRKYQPNSALAKWYEERAAGQSPRIRRIMLVALARKLIVALWRYVEIGLVPAGAVCCANNGAALEAAAA

SEQ ID NO: 487657 - protein, 488 aa, unidentified
MSKPTQHSKKPGEKKTAAGQGKRSRKRKGMCLEDRPILEPNAAGIDIGAREIFVAVPPDRDADPVRVFSTFTEDLEEMAKWLVSCGVTTAAMESTGVYWIPAYDVLEQHGVKPCLVDAHGMKNVPGRRTDWHECQWIQFLHSVGLLRAAFRPDGEVCTVRSLMRHRSDLVQMTNQHIQHIHKALTQMNVQIHHVIDDITGVTGLAIVDAIVDGQRNPLQLAKLRDPRIKAGLAIVDASEETIVKSLQGTWRPEHLFTLKQSRQMYRHYQDQIAACDEEIEKLLVAFQPRVDPAEKPLPPDRKKRKRGRQKKNAKTKQGFDLRTESYKIFGVDLTQIPGLMAMVLTLFSEVGRDMSRWKTAGQFVSWLALCPDNDITGGRVAWRGMRRVHNRAGELFRMAAYSLHHDKSPLGDYLRRMKSKLGPTGATTATAHKIAIIFYTMVKKQVEYDATLWAERDTQREKRFEAKLKRQAQQLGYKLVPIEEKPAA

SEQ ID NO: 487658 - protein, 307 aa, unidentified
MTTAVGIDVGKAALDLAVDGVSGVVRFANNAAGIRKLVARLGRLDDPRIVVEATGGYEETLLEACCDAGLWICRANPRQARDFARATGELAKTDAIDAALLALMARLLHERLRRHEAPHPWQRELRDWLRRRGQVVVTLQAQKQQTALTSPAVRQLMARTIAALKRELAAIDAAMQALLKTHASPALRSAKGMGPIFQATSLALLPELGRLSRQQIAKLVGVAPMNRDSGQTTGKRRIRGGRAPVRVALYMATLSAVRWDPVMRAHYQQLRARGKLGKVALVACMRKLLTIMNAILKNKLPWTLKSA

SEQ ID NO: 487659 - protein, 327 aa, unidentified
MSVYSVGIDISKAKFDAALYREGEYDDATFSNNRDGYRRLAKWLKKRRAKQVHVCIEATGRYGEEVAEYLHERGYIVSVVNPARIKAYGESQLKRNKNDQQDARLIAHFCATQEPAAWAPPSPAEKELRELNRHLARLKADRTREKNRQKSGVSSAYILQTIHEHIAFLDTQIAQIEKQIQDSIDQDPQLRQQRELLTSIPGIGDTTAASFMAEVPDVTRFNSAAQLAAHAGLTPRGHHSGSSVHKPGRLAKTGHSRLRTMFYLPALAAIRWNPIISAFAERLTKRGKKRMTIVGAAMRKLLHLVYGVLKHGQPFDANYLDNVQVTA

SEQ ID NO: 487660 - protein, 403 aa, unidentified
MQYLGIDLHRKQMTVSLRNHNGDVLLRRQVSTRWPKLEEFRNQLHQTLADGEKYVAVVEVCGFHDWLVQWLHQDERCHQVLVVQPLGRSASKTDRRDAHGLSELLWVNRERLLRGERVHGVRTVQVPTESEQADRCLTQTRERLVRRRTQTLNQIHKILRRRNLEWERPTKTFQTVKVRRWLKTLPLDPIDRLAMDHLLVQWSLWDEQLVAADGWIGERFLANRNAQLLATMPGVSRFIGLAIACRIAPMERFPQGRSLANFLGLTPGCRSSGDTERVGSITKIGSRMVRYLLAQAIQHVLRRDGSIRAWYQRLKRRRGSKVARVAVMRRTATIMWRMLSTGEPWRCGRARSEMPEADEPRQTRVPQDGPAEQLAPSADPELAGFNTGSSSLLAGEEVAPCPA

SEQ ID NO: 487661 - protein, 327 aa, unidentified
MYICILNQDGDIMLHRNMNASPEPLLKAIAPYRDDLVIAVECIFTWYWLADLCAEEGIPFVLGHALSMKAIHGGKAKHDTIDAHKIAALLRGGMLPQADVYPAAMRATRDLLRRRTHLMRQRAELLAHVQQPNSQYNLPEIGKKIADKANRDGVAERFADPAVQKNIEVDLALVTYYDQRLTDLELSIVKAAQHHDAHTLYLLQTVPGIGKILSLVLLYEIHDIKRFPRVQEFVSYCRLVKWAKESAGKRLGTAGKKIGNAHLKWAFSEAAALFLRNNPAGQKSLARVENKHDKGKALTILAHKLARAVYDMLKRQTAFDMEKFLQG

SEQ ID NO: 487662 - protein, 361 aa, unidentified
MIVIGTDTHKATHTGGAVDAATGRALAELTARARTGGFEELLMWARTLAPERVWAIEDCRQVSGAFERFLVKRGERTVRIAPKHMAGARKSARERGKSDSIDAFAIARAALREGIETLPTAHLDERALEIRLLCDHREDLVSDRSDDQQRLRWHLHDLWPELEIPAGALDRDKWLAKVSARLARAEQGARVRIARELVRQIKERTRKVRALERELGQLVCAYAPQLLAERGCGPLTAAKLVGEIAGAERFGSDAKLARAGGVAPIPASSGATNRHRLDRGGNRQLNAALHRLAVNKGNHCPESAAYLARKQAEGKSRKEALRCFKRFLARRAWKLLRAPSPTDPDPLSTKVEQPISVVALT

SEQ ID NO: 487663 - protein, 338 aa, unidentified
MVVIGIDPHKGSHTAVAIDEDEHKLDEVRVRADRRQLERLTSWALAFPERSWAIESANGLGALLSQQLVGVGEEVFDVPPTLSARVRVLASGKSQKNDPNDAFSVAVAALRSPRLRSVVTEDHVAVLRLLWNRHKNLTSLHTQAVCRLHALLAGIVPGGTRRRLSADKAAAVLSGFRAKTAVEKARRDQAQILVGDVRRLDAQLKASNRTIAEAVAHVPTTLEELSGVGPVSTCIILAHTGDIRRFANEDNYASYNGTAPIEASSGPKKRHRLNPRGNRQLNHAIHIIAFSQLSHAGPGRDYYERKLAEGKTQKEAVRSLKRRISDVVYRQLVRDAQR

SEQ ID NO: 487664 - protein, 427 aa, unidentified
MSGIETGGQEPQFAAFVGIDWADQKHVWCLQSWDSTKREIGELKHTPEAVEAWVAQLCQRFGNRPIAVALEQSRGSLVFMLAKYEPLHLFPVPSTMSASMRKALYPSGSKDDPRDADVLLDLLLQHRNKLRRLSPDTEPTRRIQNLVEERRKLVDEKTEHTNRLTSHLKIYFPQMLNWFEHLDTELVCALLERWPTLEELQKVPPAKLRTFFGKHHCRDQELIEWRILAIRQSIPAIQDRAVIEAKSAAVKVIVQLIRILLEGIADLDERIEEAAAAHPDFFIFKSLPGAGPALAPRLLAAFGSQRERYRNAGEVQTYSGVAPVIEKSGKKQWIHFRWACPKFLRQSFHEWAGHSIGYSVWARAYYRQQRGKGVDHHGAVRALAFKWIRIVFRCWKERVAYDESKYLAALTRRGSTLVALVATAKAL

SEQ ID NO: 487665 - protein, 345 aa, unidentified
MEQVIRIGMDTSKQIFQLHGVNAAEVPVLRRKLRRKEMVAFFEKLAPTVIAIEACGASHHWSRLLQSLGHTVKLIAPQLVKPYVKRGKNDAADAEALCEAMSRPTMRFVPAKSAEQQAALMLVSVRDRLIRNRTQLANAIRGHAAEFGLTAAKGRAHVVALLDRIQADASLPAVARELFAIQAAEYAQLATQIDEVDAKLTAWHRADEGSQRLAKIPGVGPIGASLLTMKTPAPELFRSGRQFAAWIGLTPRDHSTAGKLKTGVITRAGDEGLRSVLVLGATAVIQQARRSGKGSPWLLDLIKRKPPKLAAVALANKMARIAWKMMFTGEAYHANPAGAAVAAAA

SEQ ID NO: 487666 - protein, 319 aa, unidentified
MNHTPVTSVGIDVSKRDLTVALVSEHDAPCIKTVSNSERGVVALLALLNKHRTAVTVPCVIESTGDYHLRSALMLAEAGRTVNVINPIITKQYQRTSIRNSKDDSVDAVRLANIGLREPNLSRFEATKEHLAAKKLVSSIGKLEQCKQKLTAHLKQLETTTNFLGVPADTATLRQGIIALDSQIATFEKATRVNASPDAKRIAASVRGVSQTSVAKLLTLLDGHMFSDRDKLVAFCGLDVAPRRSGSWRGNEHLSKRGNPHLRKILFQMAWGLKQHNSTYRTYYDRLRLNHKHYFTCLIAIARKFLRFLYADLYKNPIA

SEQ ID NO: 487667 - protein, 478 aa, unidentified
MASKQKQRPDLVPAPMLLHESLYVGIDVGKARHVAGFVSTTLLERHQRFEACPALVVENSREGFRSLIDRMCSYVPLEQVFVLLEHTGHYHRALVEYLQEHDISVYVMPVQKRPAGMLKTDKRDALSLANHLFNQLEKGIQLSDKTHLVRRMLPPTEAARQLKGWMRHRYELIRESTQRKNKLISICDELFPEMTQVLKDPTLPTALAIREKFPTPAAIATATLSALAELRIKHSYPSNAQLMQLQQLAAQSIGTKDLVRQRGLVLEQAQLIRELRLLQEHIQQLDREISQLVERSREGQILTSIPGIGIIQAAAIMAAIGTILNFERASELKSYCGWAPVSEISGTTLDRVQLTHGGTRTMKQMLFLCVAHAIQLDCEWAKLYERLVPKKCTYDERKRAYRGKLKVIGRIAGQLIEMVYALLKQDAEILSQIPQGQEPPPPIRYDPEIHKRHRNGEYRPIKHVPRHRKVIRLPERLS

SEQ ID NO: 487668 - protein, 431 aa, unidentified
MSKFYSTPVIGVDVAADFSVAAILAPNGDIYKKPFRFNHDADGFNYFLDIIKKVEEEFSTKIALFMEATGIYHLTLFYFLTNNNIDTFVINPLVTNCNKNKNIRKVKNDNSDAISIAKTGKFENIKTSNALNTNIYHLRSLCREYFDLIDLRANVKKKLSSYIRLFFPGYQNVFSNITGNTSIAILQKYSSPSKLFNASKEDVIQLIKVTSRKGSEWSTKIYSKLLEVSSSAQSIAIPTFGYASKLSRLLNLYETYSLQIKELLFQIEEFLNSTNVTNELRGCVNLISSLPGVGFITAVTLISEIGDINKFNKAKYLVAFFGIDPSVNQSGKFNSTKNKMSKRGTRIGRRALYAVALASVRSNRNGNAINPVLQNYYHQNLKGKSKKVGLVAIMNKLLKYIFSVLKNKKPYEIRDPRVHERMYLNNTYKVA

SEQ ID NO: 487669 - protein, 444 aa, unidentified
MLPVIYERVAGLDVHKKMIVATRMRVIEGQVEWETNTFGSMTPDLLLLHDWLDEWSCIRVAMESTADYWKPVYNILEEVFEIVVVNSSHVKHVPGRKTDVKDSEWLAELMMHGLLTASFVPPKPQRALRTLTRYRTTLVQERARVVNRVQKLLEEANIKLASVATNIQGVSARAILAELAAGQTDAKHLANLARGKMRSKIPALEKALTGLVQPHHRFLLTRQLAHIDFLDEQVEELNTEIARQVETMSDSSTSTDPSAGAETDRDSSGTEQPRNPLTWSEAVALLDTIPGVDRCTAEVMLAEMGLDMSHFPTDKHLATWAGLAPGNHQSAGKRYSGRTPHGNRPLSSIMVQAAWAAIRTQDSFLKARYHRLAARRGKKRAIVAVAHSMLVSAWHMLTNRQAYHELGGDYFDQRQKDTKVNYLIRRLEKLTGGAVSVEIQPAAA

SEQ ID NO: 487670 - protein, 417 aa, unidentified
MNTMTMQSFAAFVGIDWADTKHDVCIQSANSSRREFAVIPHKVEEIDEWAKSLHRRFSGPIAIAVELSKGPIVYALQKYDYFVIFPINPSTLAKYREAFQPSRAKDDPTDAELALDLILRHPERFEPLQPQSVEIRELTELVEQRRRLVSDRVRLTNRLRSTLKLYYPQTLDWFNRIDTKLFCGFIERWPTLMQVKRARTTTLTTFFRAGNTRNPALLETRLASIRSSQHLTLDEAVIAPNRLRVLMLVGMLRVILDAIKSYDQTIAELAPEHDDYCLFSSLPGAGPSLAPRLLVAFGEQRSRFKNAAELQKYSGIAPVTERSGTKHWVHWRWRCPNFVRQTFVEWAAQTINKSYWAGEYYRQQREKGSAHQSALRALAFKWIRILYRCWQTRTPYDEATYLKALQRRGSPLVAKAV

SEQ ID NO: 487671 - protein, 343 aa, unidentified
MEVYVGLDVSLKETAICVVDGSGEIVSEGTVLSEPSALAGFLRAKAGGAKRIGLETGPTTTWLWHELRALGLPVICIDARHAKAALSLQINKSDRNDAVGLARIMQCGWYKEVRVKSLPCHEVRAILNSRAQLVKTKCNLENQIRGLLKNHGLVIAKAGGNIFRRRAEELIGEYRLLQVAVRSLLVVHEVVRREIAGLTRKLLALARNSDESRRLMTVPGIGAINALAFCAAIDEPSRFPRSRSVGAYFGLTPRRHASGEVDWTGRISKCGDAMVRTYLFEAAGVLLTRVPQWCKLKAWGHRLWKRIGFKKAKLAVARKLAVILHRMWRDGTDFIWSTKEAVA

SEQ ID NO: 487672 - protein, 369 aa, unidentified
MADRITYVGLDVHKETIVVAVAAGGLRGEVREYGRIANTPAALDRLLRKLGGDGMTLRFCYEAGPCGYDIYRRLSARGHECVVVAPSLIPKRAGDRVKTDRRDAASLAKLHRAGELTGVWVPDVGHEAMRDLVRARLDAVHGLRRARQQLSGFLLRQGCHYGRPAWTKLHRRWLAGLNFGQAVHHIVLEDYIAAVEVAEARRDRLTAQIEAMLPDWALAPVVAALQTMRGMALVNAATLTAELGDLSRFANPRQLMAYLGLVPSEHSSGASVKRGGITKAGNAAARRLLIEAAWSYRFPARLNRALLLRQESQPKLIRDIAWKGQLRLCARYRRLARTGKPANIVTTAIARELSGFVWAIARQVTVTTR

SEQ ID NO: 487673 - protein, 391 aa, unidentified
MIFVGIDVAKDKHDCFILNSEGTVLADVFTIANNRIGFETLLSRIQSCSQGESKIKVGLEATGHYSYNILGFLLNEGLDTYVINPLHTNLYRKSLSLRKTKTDRVDARTIAAMLMSDVDLKSYSNTAYHNEELKSLTRYRFDKVKERAKLKSSVARLVNILFPELEKLVSSLHIAVVYALLSNYPGASYIANANTEELAETLCTASKGRYTKSKTAEIQVAAGVSIGSKMPAKSMELKHTIALIRELDKEISEVESAIDKITSQMDSPIFTIPGIGRHMGAMILAEVGDFSNFASADKLLAYAGLSPSTYQSGQLQNCYAHMEKRGSRYLRYALFNAAKYVCLWCPTFSAYLEKKRSEGKHYNVAISHAAKKLVRLIFAMQRSGKAFLADY

SEQ ID NO: 487674 - protein, 364 aa, unidentified
MLIIGCDYHPSVQQIAFVDTDTGELSERRLGHREQAEQFYRELKQRNLVVRVGMESSGHSRWFERLLRELQFELWIGDAAEIRTKRVRKQKTDRQDAQLLLQLMLENRFPRIWVPDAENRDLRQLLWHRHRLVQMRTRVMNQLQVVALNEGMRRKKALWRPAGRAELESIALAPWATRRRQDLLDVLDQLTPKIEELTRALEKEVEKRPVTRRLMTHPGVGPLTALAYELVIGTPERFHCGKQIASYLGLVPEERSSGERRRLGHISKQGNVLLRFLLVEAAQVTVRTHPQWRNKFFHLAMRRGRKIAKVAMARKLAVHLYWMWRQGCDYGSWQKLGSYVGEPGHPDGVQSITAVMIGHPAPGK

SEQ ID NO: 487675 - protein, 345 aa, unidentified
MPALTNRPAYQLFVGIDIAASTFAAVWTTDGSPRDRARSFPQTPAGFAALQEQLQATGFAAAHTLVVLEATGSYWIALAVALHQASYVVSVVNPAQVHNYAKSLPRRGKTDLLDAHVLAQFAAERKPAPWTPPPQVYHELRQRLVMRDGLLEMRQQARRERHALLQWPLVIPAVQEHLDTVIAELDKHLAELEAEIAQVLAEGAWAESASLLLSITGIGVVTSAWLLVGTLNFQGCASAASASAYVGLVPLEQESGSSVHGRAQIGHGGQKRLRTALYLATLNAARFNPGIKAQYQRLRAAGKPMKVARCAAARKLLHLAWAVVTKRQPFDPTYGMGIAEERQAA

SEQ ID NO: 487676 - protein, 333 aa, unidentified
MQITNILGIDISKKTIDVALSQNKVNSEMHNNQFTNNLKGFRDLLSWLKQQKINLKELLVCMENTGIYHRCLVVYLQAKNIFTWVETPVEIKWSMGLQRGKNDSVDAQRIALYAFRNQDKAKNYSALDKSLQKIADLMATRKRLIKARKMLLVPVKEMLQSGLKEESKVLEKACNGSVKALEKEIKAIEIQLEKIIESEEELSENYKIVRSVRCVGFVCSLHLMVYTHNFTKFDNAKQIASYCGIAPFEYSSGTSIRGKTRVHNMANKTLKTSIHMCAVSSVRHNPEMKQYMERKVVEGKNKMLILNAIRNKIVQRVFACVREKRMYENKKVA

SEQ ID NO: 487677 - protein, 347 aa, unidentified
MLHAGLDLSRRKLDVCLLSDRGEHLDQLAVPPDVDSLRRLARRIEEVHGQPVCAVIESMTGARIVHDTLEQQGWSVEIADAQKVKGLAPLACKTDKIDSKVLAVLSHRDLVPAIWLPDPSVREERELARFRLHLVKHKSALKCRIHSTLINFGKPCPVTDLFGVEGRRLLKRLQVPEPWWGNITASIELIDDLEEQIAEINRRLKEGHAEHPYVPLLLTVPGIGWVLAFTIAAEIGEIERFPSPEKLAGYTGLCPRVNQSGEKDRRGPLTKHGPTYLRWALLEATMHALRHPAYAERYQRTKRRLGKQRGAKVAQVDIARRLAHAIWHMLSRKEKFAPRGAAFRLAA

SEQ ID NO: 487678 - protein, 316 aa, unidentified
MKNYIGIDVSKATIDVYDGKKSYKFDNNEVGFKSVLSLAKNIKNTIFIFEPTGVYSYGLTEFCSKKSISVVMVGPKESRDFARSLRVRSKTDKIDAKVLYKYQCQVEPSKVKIPTTNHSSIKIQEMLNIYEGIQSAKQKFKNQVESVSKSNKDLLRTLSRMISNLDIEAQKLFNKIELLLLKDNKIKKKYDAISTIPAISQKSALYLSAFFLKYPGANAKEITALMGLDPVMRDSGMLRGKQRISKHGGQQIRNLLYLPTLCAIQHNDRIKSFYEGLTSRAKTKKLAVIAAMRKLVLMAFSIFKSEENYQPLLGRI

SEQ ID NO: 487679 - protein, 357 aa, unidentified
MPAHTKSAKSNAQIAVIGIDIGKNVFHLIGLDRGGAIVLKCKLARGQLGKFFANLSPCLIGMEACTGSHHLSRRLMALGHDARLMPAKYVKPFLKGHKNDYRDAEAIAEAVQRPTMRFVATKTVEQLDLQALHRVRARLVSERTATVNEIRAFLLDRGIAVAQGIQRLRKALPEILAQHTDLLLPRIIRIIEALIADWRRLDDRIEEIAREIGELAEKDAPCKRLMTIPGIGPLISSATVATIGGGDMFSKGRDFGAWLGMVPKQLSTGGRTILGKISKRGNTYLRMLFVQAARVVLIKRQSWERYGLKPWIEAAARRMHSNKLAIALANKLARIAWAVLRHGRDFEVRHADAPQHA

SEQ ID NO: 487680 - protein, 478 aa, unidentified
MNVKRGKAKKQVKSETPINVLSRKELQKRIEAVEAGLKARTWRNLETKGKFSKNDKISFIKDDMLVLGCDIGSETHYLRAIDTRGRELSRKAFEFSNNIEGFQSARAWALQIAAENEKNQIVLGLEPTGHYWFCLATWMVANGISVVQVNPFAVKQTKEVEDNSQKKDDRKDPKLIANLVKDGNYGMPYLPEKVYAEMRSLSMFKDQLTEDRIRNINRLHREMMIYFPEYKDAFGKAEGKFALEVLKVAPFPDDILKIGADGLREIWRGAKLKGRGYSRADRIVSYAAESVGLKQGRDGARESVRWITKQIIELESELAEVQQKLFLKWREVPHAENILEISGIGDNILSGILAQMGDIRRFDEAKEIQKLSGMALVACSSGKHKGETKISYRGRKRLRYWLFEAALSAVAHAEEFQKLHVYYTTRAENPLKKMQSLVVIACKILRIIFMILKTGAKYDPAKMLDDIRHPVPKAEQTA

SEQ ID NO: 487681 - protein, 343 aa, unidentified
MRTITTIGLDIAKSVFQFHGVDAGGQVIIRRQLKRRYVLALFQKLPSCLIGMEACASAHHWSRELQALGHTVRLMPPAYVKPYVKRHKNDATDAEAICEAVTRPNMRFVATKTPEQQSCLTLHRTRHLFIRQQTSVINAIRAHLAEFGIVAPVGRNGVAQLLGIAADANDKRLPEVARACVTALGAQLRMLKTQILEFDRMINAWHRSNEASRRLDDIPGVGPALATALIASVADPKAFRSGRDFSAWIGLVPKQNSSGGKDRLGNISKRGDRYLRSLFTTGALAVIRYAKIHGTRHRPWLTALLARRPTKVAAIALANKIARMAWAMMARGERYKEPAALAA

SEQ ID NO: 487682 - protein, 344 aa, unidentified
MVFHTALDVSLRSVSICIIDGDGNICFEDKVVSEVAEIAAALKRFSPEVCSVGFEAGTLTQYLSYGLQAAGFEVICMEARQVSAALSAMRNKTDRNDARGIAQILRSGWYSRVYVKSMESHLTRALLSGRKAVLKKCVDLENEIRGLIRLLGIKLPGTLKHGPFDDLVRPIIEEHGLMVDSLIPLLDARLMLYQTYLKLDAQVTAMARKDEVCQRLMTVPGVGAITALTFKAGVDNPNRFKRSRTVAAHFGLTPRRFQSGELDNPGHISRAGDADVRSALYIAAHSLVIRSDKWTYLKAWGVRLSKTKGHRRAVIAVARKLAVILHRMWIDNTDFRYNSTEVKL

SEQ ID NO: 487683 - protein, 415 aa, unidentified
MALKIVYKICCGIDVHKTFVVACIASTDSKGVTTYEHHRFSTYTKGLKDLLQWLLTHNCKDVCMESTGKYWIPVYNVLENDCTIVLAHPKYVKAIRGKKTDKKDAKWIADLFKHDLVAGSFMPPADIRQLRDLMRYRFKLTCFMSSEKNRLQNCLTVSNIQLGNVVSDTFGKSAQAILDKLLENPADISFDLEPLVYKSLKKKLPELRDAIDGYITPEQAGKLKVIKAHYENLESRKAELEELILALAAPYQQELAILQTAPGIRSDFTAIGIISEIGTNMEAFPSAKHLCSWAGLTPTNNESAGKKKSVRVSKAGCYIKPLLVQCANAVVTSKKHPEIRNRYLRIKKRRGHKKAIIAIARMLLTALYHMLKNGENYNAELYQKSDLPPVNREITVEQAILIARHQGYKIKSATI

SEQ ID NO: 487684 - protein, 473 aa, unidentified
MSKGSGGSGMTRGDRRRNARRERLRVLLPRDGAVIGIDLAEDKQALAVIDHDVRVLARKTVRVKAFRLDEALDWAAGQARAKGFARVTVACEPTGPRWMQVQRLCAERGLPLVCIQPLVSHIAREQQDYTTHKTDEADCVMIARLAVELHCYVPEELDETWAHLRHLGRRRAQLITAATASVQRIGGFLSVAWPVVTETCARPFESGTWLAAMQLVTSRCGGQPARLAVMGQDAFAAAVGAAVKDWGLQKAHGPISRRVFAALTDTEGVVISSRRGLLRRVADELGDLQRTRAQLHAAEADMVAVLDELGLSRLADMPGLTAVGAAAILAETGDPRRYDNSSSLVKHAGMSPSDNASGAFSGQARISRRGRPGLRLVIWRAVWPMLRYNPVMAAKYQAMTQAADTAAAGARPQQETAAAAAARARRAKARVACAASLLRWIYCIVVHDTSWDPAVASGAASRHGTPRTQAEAA

SEQ ID NO: 487685 - protein, 349 aa, unidentified
MKKVVAGMDLHSNNVVIGIMEMEGKRVASRKVPCELKEVVKFLAPYKQRLERIAVESTYNWYWLVDGLRWRGYPVVLANPAGMEQYNGIKHADDTNDAFFLAELLRLKILPTGYIYDEELRPVRDLLRRRLMLVHQRTALMLSFKSLYVRTTGQEMTLSELKELAIKQAQDLYDHPANQLIAGMQIEHIEGLTESIEKIQKVVLASARELPSYPKLLTLPGVGKILAMTITLEVGDIKRFAEAGHFASYCRTVEAKRTSNSKQKGQNNSKCGNKYLAWAFVEAANFARRYDEQCRKWYDRKAAKTSKVIATKALACKLAKAAWHVMSKATDYDPQRIFGQPATPKMKPT

SEQ ID NO: 487686 - protein, 349 aa, unidentified
MIIGCDVHSRYQVIAMLEPGTGEVVNRRLEHENGEAKGFYASLPKPSLIGIEATGYTQWFERRVAELGHELWVGDPAEIWARSVRRQVTDRRAAEHLLDLLLTQRFPRVWVPTPEERDLRQLLKHRDKLVGMRTSVRNQLHFLAMSQGVCRRKKLWSAVGRRELEALQLGEWSSRRRQELLELLDRLNPRIEELDEAVRAEAEHRPEAARLMQQKGVGPVTALAFVLTLGPVERFANSRKVVSYLGLNPSEHSSGGRQRLGHISKQGNEMLRWLLVEAGQSAAQFDPELRRKYQRLKFRRGAKVAKVAIARHLAVRLYWTLRQRKVAPSPVRTPESPAQAVVDASPSTL

SEQ ID NO: 487687 - protein, 410 aa, unidentified
MRIIGLDVHRSFAQVAILESGKLRDAGKIDLDRNRLLQFAKKLKPDDEIVIEATGNTNAIVRLLSPFVSRVVISNPILVRAIAWAKVKTDKIDAATLAKLHASGFLPEVWMPDDETETRRRVTAERTQLVSQMTRLKNRIHSVLHANLIPCYKGVLFSKRGRAWLEAQPLSEDQRRVILRHAGELDRLGAELAEVDKSLAQKALDEPLVKRLMTIAGVNAIIAMSVLAAIGDIQRFSSPQKLVSYFGLTPRVRQSGDRPAYHGSITKQGRAHARSMLVEAAWIASGVPGPLRAFFIRIKDKRGKQVAAVATARKLAVIVWHMLSKNEDFTWNRPALLQWKLRKLELAAGYPSRRGGKQRGPAADYSRKSVRDSEREMIGNAEEAYRCFVATWKTHSPKGRSGATNEVRRS

SEQ ID NO: 487688 - protein, 350 aa, unidentified
MTMVGGLDVHRQQITFDYVDDDGLVHWGQIRPATRKTLRGWLAEHFRDGDADFALEGCTGWRYVSEELAAAGLGVHLGDPAETAALRGRKKRAKTDRADARLLRTLLVEGRFPESWIPPAHVVEVRTLGRLYCTLMDERRAWQQRIHAQVFHQGCPPIRALLTRAGREALAGAELSAAGRQYVDTALRRIDELSAEIDPLRTQLISFARRQPGCRALQRHYGVGWLCAVIIWAEIGDARRFSSSDQLVRFAGLDVTVYSSDAKRAPGHLSRQGSPELRWAAFEAAKSAARRGSPDHGYYHQLAAKHDGRNGKNPTLAVERKILRRCYHTLRELGDAALALPDIRPQEVAA

SEQ ID NO: 487689 - protein, 341 aa, unidentified
MSFKIYVGVDVSKLTLDVFIREAKVHKQFKNNSSGFELLVKWLEKQTKEPLDGVLVCFEHTGLYSLPLAIFLEEKQIPFSMIPALEIKRSLGITRGKSDFIDSKRIAEFAYRFKDKITKTKLPAEDIRKIQSLLALRERLVISMSGYSVSKSETLGTMKKGDFPELFETYQTMIDALKVEVKKLEKLISAIIQENEQLRTNFELLTSIKGIGFIVAVSMIVYTHNFTRFDNWRKFACYCGIAPFECQSGTSVRGTTRVSSIANKQVKKTLHMAAVSAIHYDNELREYYSNGKSKMAIINIVRNKLVSRAFAVVKRGTPFVDIKKYAVRKTNNTRSYSAATG

SEQ ID NO: 487690 - protein, 350 aa, unidentified
MRYTQINSKYVCGIDLHAREMYACVMNEKGEILFHRNMRTDFDQFKKKMQPFLPYLSVGVESTFMYYWLADACKDEGIPFYLGHAYYMKTIHGGKTKTDRLDSRKIADLMRTNYYPLAYAYPKEMRGTRDLLRRRHRHSRLRAECYRHIQSLFHQQGLSVNPKDIKNVKTRRDLVKSNLDQDIYPNAQTDLDMIDFLDPVIKHLEQQIRAKAKYHDRASLNILLSVPGIGDIFSLIILYEVHNINRFESHQLFCSYARLVKCERSSAGKYSKGGNQKIGNPYLKWAIADIIIHASHKSQLIGDYYQKLQSRFGKRKAKSVISHKFGIAIYYMLKNKQVFDEKRFVQSNMK

SEQ ID NO: 487691 - protein, 430 aa, unidentified
MDEGNRNRLEEFRQLRREIRQSEEHLIVGIDIAKDRHHAFFGTATGKTLLRRIVFSNDHEGFRKLLDQTEALRVQHGLKRVVYGMEPTANYHKPLGEYLIKLGKTVVLVSGVTVARNRESLDGRWDKHDGKDSANVADLISQGKCLYYEHPLAELRGLRGLLSLKRRLKKQEHGYRVRIRNHLIAQYYPEMDRDYERLGAEGLSIVRWCLAASEIAQLDVDPFIERVTSRRITMEKRRRLEEIWEKAAGSIGCDGVPGVDHEAKIMVEGLRQIREMIKETEQKIEELCKAFPEYQYLLTIPGFGPDVSAKVLGAIGDPDRFQNGKQVLKMGGLDLSADRSGKDSDRAIPEISKRGKADLRYALYQAALIASFKNRDVMIYYTNKIRGREREKGIHVKMRVKLAAKLLVIAWTLMKKKEPFNPVYLKAELN

SEQ ID NO: 487692 - protein, 407 aa, unidentified
MKSYVGIDWSEAHHNVRVHNVAGACVARFTVPHTLEGFQLLDEKLQAINPGPVDCLVAIETHDNLLVDFLCDRDYTLYVLAPSSVASNRSRHRASGAKDDDHDALVMADLLRTDHHRLIPWRPDGSLVRQMRIHLSWVDDLSASIVRQHNRLRATLLRYYPQALAAFDLKTYIALAFLQAFPSPQALETLSYEQFVIFFKGHSYNHCQTLPGKYAQLTAAGPQAEPAITAASQARTIHLAGQLATLLQQKAEMIGLVNDLFVQHEDAFIFDSLPGAGKLLAPKLLVMFGDHRSRYPDRTILPAIAGTCPVTKQSGKSRWVNFRLACNRSYRQAAQQFAICSVTNSVWAAGYFQRAKRRGLSDSHAYRCLANRWLHIIWTLWQKREPYDEAYHLKQVHRHRRPQRLVA

SEQ ID NO: 487693 - protein, 364 aa, unidentified
MSSLSQRSLTHLGMDVHKDSISIGILRPDDSMDVERIFHDEDSVRRFIARMGKPRQLVACYEAGPTGYELHRLLQRLQVPCHVVAPSLIPKAPGDRVKTDRRDCRRLARLHRAGELIAIRVPSPEEEAVRDLCRARGDVVIDLDRARRRLGAFLLRHGQIWRGGSNWTLKHEQWLLGLRFEDAALASTFAHYRSIVEERRLRLQALESDLVPYCEQDPYAEGVHQLCCYRGVDTIGALTLVSEVCDWRRFAKASSFMGFVGLVASESSSGGHTHRGHITRAGNVHLRTQLVESAWAYQRGPYVGERIRRAQERCSPATRERAWAAQVRLCGRFRRLATRKNVKSVVAAAVARELAGFLWGEMTA

SEQ ID NO: 487694 - protein, 428 aa, unidentified
MNCNTQNAKIASITEKTLIVGIDVGSETHFARAFDWRNYEYTKKPLEFSNTEAGFLTFKAWVEDIAEKQGKTAVIPGMEPTGHYWFALGKFLQDNGMKPVHVNPHHVKKSKELDDNNPNKNDRKDPKTIAALVNEGRFSYPYIPTGIYAEIRSLSNLRFQTQEELTRIKNRIARWFAIYFPEYKDVYGDLKTVSGRMVLKVAPLPEDIGKLGVEGVNQIWRSAKLRGAGIKREKTLVSAAEHSVGSKEAPEAARMELKNLLDDMDVYVSRLDELLVNIEEKLKEIPYVDKLMEIKGIGLVTVSGFIAEVGDIGHFDNPKQLQKLAGYAIVANDSGKHNGESRISYRGRKRLRYVLYEAAISLVGKNAEFKEIHEYYRTRKENPLKKMQSVVAVACKIIRVFYTILTKGVDYDPMKLMSDIRRPQLQAA

SEQ ID NO: 487695 - protein, 341 aa, unidentified
MTKKLYFIGLDIASADFAASIYQSPEQPVTTKDGFANTFDGFIMFSSWLESQKVNPANSVICMEATGVYSEGVAHFLVTQGFKVSVEPPLKVKRAFDPIGHKTDPVDSKQIAEYAYRFIDELRFWQPRDEIIEKIRHLLTARELYTKQSVAIQNALRAYKRHLVQVSLINDAHGQILKELKKHIAEIDKELDQLIRKNPTISQINNQLKSLPGFGLLLSSSLIALTGAFNEITTYKTLAAFLGICPYQHQSGSSVYRQPHIRHFGPAYARKLLTLAARSVVTHNEVFRKYYLRKLAEGKAKELVLNNVANKLIKIACAVIKNNSRYASTYRSVNPMCLISA

SEQ ID NO: 487696 - protein, 347 aa, unidentified
MAIVDSTRVVVGGVDTHLDEHVAAVVDGVGGVLGVARFPVTPAGYRRMLTWMRGFGELERVGVEGTGSYGAGLARHLLQTGVVVLEVTRPNRQERHRNGKDDDLDAIEAARAVIAGRALATAKTSTGNTEALRVLLGAKRSAKQARIAAMVQLRHLMFTAPDDLRERYAKLSRKELTAQCARLRPRLDGDSVRYSTKTAALTLARRAQALAAEIDELDVLICGLVKQIAPDLLNVYGVGTDVAAAILVAVGDNPERIRTEAAFAKLCGVAPLPANSGKRTGRHKLNPGGNRHANSALWHIVLTRISQREPRTAAYVDRRREQGLTTREIFRCLKRYVAREIFTALPR

SEQ ID NO: 487697 - protein, 317 aa, unidentified
MATTVGYVGIDVAKKHLDVAIHATGQPWQVANDAAGVKQVVKHLRTVAPTLIVLEATGGLETRVVSALAAAQLPVVVVNPRQVRAFAQATGTLAKTDRLDAQVLAHFAAAMQPTPRPLPDAATQQLSAVLTRRQQLVDMVTAESNRLGAQPHSALRQRVRVHLTWLTKELGRTEKELTQLIQQSPVWRVQDDLLQSAQGVGPVLSQTLLAEVPELGHLHHKQMAALVGVAPFNQDSGGKRGKRRIWGGRARVRAALYMGALVATRHNPVIKAFYERLLAAGKEKKVALTACMHKLLRILNAMMKHQTKWQDVSMNTP

SEQ ID NO: 487698 - protein, 345 aa, unidentified
MQLHFVGMDVHKQTISHCMKTPEGRTVGEGIIQATRGALDEWVQKVPKPWIGGMESTMFSHWIYRHLEGHAERLLMGHSARMKAICSGKKKSDKIDASTIADLLRSNLFPACYVISPELGALRQQLRFRRLVVEEMVKFKNKTAGLLMSAGVQYERRKLHGKRYYGELVKTNAWINLEMKPLLEFSRAQIETLQSMDSRLLQMLERHPLLQARVKALQSIQGVGPVTALTWALETGTPARFASIDDACSYCGLTSALWESAGKQKHGPISKQRNPHLQSMLIDIAKIAPMTNEKLQEVHRKSKEKGGHKNIATLEVARKLVAYLLAVDRAFSASQSQAERPRMTA

SEQ ID NO: 487699 - protein, 413 aa, unidentified
MDVLHPCCAGLDVHKKTVVACVLRSDAAGVPARSVRTFGTMLDDLGQLRDWLAAADCTHVVMEATGVYWKPVYNVLEDAFTLLVANAEHVKRVPGRKTDVSDAEWLATLLRHGLVQASFIPERPQREVRELIRFRTSLIQDRARAVNRLQKTLEGANLKLASVLTDITGVSGQRILDALLRGETDPEQLAELAHWRVLQSKRGTLERALVGRLSDTLSFVVAQQLQQIRALDDQIVACDGRVGEELRPFDAEIELLDGIPGVGRRTAEVLIAEWGADLSRFPSAGHLAAWSGMCPGNKASGGKRQPVRTRKGNPWVRRSLTEAAWAAGRVKGSYLGVQFRRFAARKGRKHAVVVVGHSILTVAYYLLTHRVSYRDLGVEYLETRDRDATARQAVKRLQALGWDVRLTPCPVAA

SEQ ID NO: 487700 - protein, 370 aa, unidentified
MSESSTIFVGLDQHKESITVSYVGADRSLEQICLGPIGPRTSDVDAMVRKLQSKGKKLVFAYEAGPCGYGLYRHLTRKGYTCLVVAPAKIPRKPGDRVKNDKRDATNLCRLLRSNDLKSVYVPQIADEAVRDLCRAREDAVSDLKAAKHRIKSFLLRHDIRFNGKADWKTPHLRWLGEVKCESSAQQVVFQEYVRAMAQGFERVERLEIELTQHVKSWRLSPVVEALQALRGVRFTVAVTAIAELGDLTRFEKPRQLMAFLGLHPSEHTSGERRRLGGITKTGNTHARRALVEGAWAYRFPARVSKQIQARQEKLPEAVRDIAWRAQVRLCMRFQKMIARGKNANIVVTAIARELAAFMWAIAKQVPVAA

SEQ ID NO: 487701 - protein, 359 aa, unidentified
MRTQNYKLDFNGQNIYVGFDVHLKSWRVTIMTEHLTHKTFSQSPKPELLYQYLVKNFPGGTYYSAYEAGFSGYWIHNKLQSLGVNSIVVNPADIPTTDKERDQKDDTRDSRKIARSLRNNELIPIYVPTLKTLEDRTLVRTRSMLVKDITRYKNRIKSFLYFHGIEIPDTFVKNSSHWSKRFTDWLENIKMTETSGQNALKLHVETVKTLRASLLKTTKQIQELSKTEHYQEKIILLRSVPGIGLITAMIIITELENIDRFSNIDQLCGFIGLVPSRHSSGDNDQIGDITHRGHSTLRPAIIESAWMAVRLDTALLKCYTSYCMRMEPNKAIIRIARKLLSRISFVLKNKQQYVCAIVK

SEQ ID NO: 487702 - protein, 430 aa, unidentified
MKSNTQNAKIEAITEKTLVLGIDVGSETHYARAFDYRGIEYSKKPFKFSNTEAGFVTFKEWILDLKERHEKDKVVPGMEPTGHYWFNLGKFLQDNEMKPVLVNPHHVKKSKELDDNNPTKNDRKDPKVIAGLVREGRYMIPYLPDGVYADLRTASNIRFQLQAELTRIQNRISRWFNIYFPEYKTVYGKPDAKSGMLILKAAPLPEDILTLGIDGVNQIWRDAKLRAVGKARAKTLIEAAGHSVGSKEGAVSARMEIRMLLEDYESRNTRLQEVMVLIEELVRKIPMAEKLLEIKGVGIRTVSGFLAEVGDISRFNNPKELQKLAGLALVENSSGKHKGETTISRRGRKRLRYLLFEAAMSLVAKNPEFRELHNYYTTRRLNPLKKMQSLMVIATKLIRVFYAMLTKGADYDPKKMVSDIKRPAVYLQAV

SEQ ID NO: 487703 - protein, 418 aa, unidentified
MNEEGNTRGTRRYVALDIHKHYCVIAAVDREGRIVLPAVRVEHADLEGWLKKNLRATDHVVFESTTNAWHVYDLLVALVERVVVANPARVKQIAQARVKTDVRDTFILARLLAANLVPDVWVPPAHVREMRQLLSQRRQLVETHTQIVNRMHSVAHRHHLQHERGKRFNEKNTLWQKDKRLSRVEQFQLELEMENRAYMEKQISRIGKEVAKMSHQKPWANSMTYLMQLPGFGVITGMTVLAAIGEIQRFESARHLASYSGLTGGLDQSGTHLIQKGITKEGRKELRWAMVEVAQRAVKSDPLWKHRFQEMQKRMHRNQAIVAVARRLLELVWHVLTRRQPYRHFSQERIAYKYLTWAWQMDEIARDGLTRQQFTRYYLMRLGIGHDLTRIALDPKHPRKIASEAELLALRPELNHIE

SEQ ID NO: 487704 - protein, 341 aa, unidentified
MVDKRTHTLVAVDDNGQQVGAKTVSAVPAGHLEALDWARQWPERRWALENCRHLSRGLETDLLLAGELVLQVSPKLMAGARRSARESGKSDPIDALAVARGALRESGLPVARLEGASREVKLLLDHRDDLVGERTRIQNRLRWHLHEVEPGFDVPERSLDRKVVLKRVAKVLAVHRGIAAGIAVELLESVRQLTERINELEAQIRVLVSHLAPKLLELDGCAALSAAKLIGETADITRFKTPARFAMYNGSAPIPVWSGNAERHRLNRGGNRQLNAVLHRIALTQMRLGGRGHDYIQHRKACGDTKREAIRALRRRISDEVYRRMWQDATRVTRDHMPAAA

SEQ ID NO: 487705 - protein, 264 aa, unidentified
MSDFSYFCGIDLAKNHFSLHAVDQNGKVILHKSVTRSKLLTTIANMPLMRIGVEACGGAHYWARTLNKLGHDARIMAVKYVIPYRTKGKNDLNDAVAICEAVQRPSTRFVPVKSPEQQAILSVHRMREHWVRERTALMNRMRALLSEFGLIIPVGRSSLMKHVPLMLEDAENELPHLARTVIADAYHHLGELNQRIADTEQVFESFAKVSANVQRVMKVRGIGPQTATAILASIGNGSQFDKSRDFSAWLGLVPKQYSTGGKPH

SEQ ID NO: 487706 - protein, 357 aa, unidentified
MQEKLYVGVDLHKTQFTICVINEEGDSFEAGTKFPMDKEGYIAFADKMKKLSRRHDGATVSIAIESTANARFFRDIMEAKGFEVTVVNTLRFKVVNLSTKKTDKNDAKTLAEFLARDILPKSHLCRPESESLRRVLKSRTLMVQDAVALKNQAHAVMLAYGYITQPAQFQSKSSRTKLLARLPAKVKEVIEIIFETLDLVESQTHVLERRLRRITIDNEYVNLLMTIPGIGIVNACTIYAYTDDIDRFESYKNFSAYCGLVPWVQTSNESVYYGKITKRGPQELRTALVQCVVAMVRMPGKTADLGIMKQYHQLKDDKSSGKAIIATARKLSRIIYVMLKTMTPFDSAKLIKDDPKE

SEQ ID NO: 487707 - protein, 367 aa, unidentified
MFHVGLDIHTQRIAICALDERGQVVHRSQVRGIQDMVRVLASLPDRFEVCYEASCGYGHFHDLLRPLATRVVVAHPGQLRLIFRSKHKNDRNDAERLAKLLYLGEVPAVHVPALEVRTWRELINCRSQVIAKRTRAKNTVRALLRGAGITPPQHPGLWTKKGLAWLRQLELPTASQQLRRDLLQEEIEGLLRQVRRLEQQLNRQAQQTPAVARLRSIPGVGIRTAEAVTAFLDDPQRFGNAKAVGSYFGLVPCQDQSGDKNRLGHITREGAPVVRQLVAEAAWQALRRSPAVRAYFERVRREDPQRTKIALVATAHYLVRVMWALLKRATVWQENPALAPALASGTGPVAGPGDDSSTKAGGVANEV

SEQ ID NO: 487708 - protein, 356 aa, unidentified
MSRISQLEPIRVTVGVDTHRDLRVAVALDQLGRRLDQIELATTRAGYERLLAWAERLGVVEAFGVEATGCYGAALARHLRAREMLVVEVMRPNRQTRRRKGKSDPTDAEAAARAVLSAEAAGSPKAGDDLVEMIRLLRVARGTAIKARTQAINALCSLLVTAPPELREQLRALSTSRLVGKAAQLRPGALGSPLAASKLALRHLARRCQTLEVEIRSLDGQLARLTTTGSPQLIEAFGVGADTAGALLVAAGDNPDRLRSEAAFSMLCGSSPIKACSGKTNRHRLNRGGNRQANAALHRIVLVRLRYHQATKDYVERRTSEGKSKREIIRCLKRYLAREVYAALTQNNEGKLARAA

SEQ ID NO: 487709 - protein, 426 aa, unidentified
MPLLKIVHKVCCGIDVHKKFVVATIGSTNNTGVTDYQTKEFSTFSDQLVKLRDWLIENNCREVCMESTGKYWIPIFNVLETHCRVFVANPKYVRGIRGNKTDKRDSLWLCDLHKHGLVRNSFIPPKLIREIRDLMRYHYKLTNMSSSEKNRAQNSLTVSNIMLSSVVSDTFGKSARRIIDKLLENPGDTDFDVAPLMDYRLKATPEEVSRSIQGCLTAPQATKLRVCLNHLESIAAHKAVVEAAAKALAKPYQRQIDLILTLPGVLDPLTAIKIIGEIGADMSVFLSARHFCSWAGVVPANNESAGKKKSVRCARAGVYIKPLMVQCAHAAVKSKKCPYFSKRYEQICRRRGKKKAIIAIAHMLLTCIYHMLSRDVAFNPELYTLDKVPGYIRKSKVSTQQAIELLEKLGATVIFPEIPVPLKASG

SEQ ID NO: 487710 - protein, 392 aa, unidentified
MYIVGIDIGKNHHEASIVSPEGKQIGRSLRFATTHKGADSLMRFIFKNIGTSPCVFGMEATGHYWYPIYSFLKAKGYTIYVINPIQSDSLRKMYIRQTKNDSFDSFLIAEVIRFGQFGTTSMADENILAMRQLCRYRDSVISSRTEIKLRIGTIMEQIFPEYEKQFSSLWVSTSMGILEKYLTPENIENAPIDELFEIIKDKSHNRLTKAKAISIKEAAADTFGIKIAQDAFSFQLKQLIDRMNFLDKQIEALDIEIMKYYEQFDCYLHTIPGIGIIGAATILAEIGDISRFKNSSALVAFAGIDPTVRQSGEFNSTHNHMSKRGSPYLRHAIFLAATTCSFHNSPLNAYYKKKRDQGKHHLTATGAVARKLTTVIYAVLRDSKPYEPKKFC

SEQ ID NO: 487711 - protein, 344 aa, unidentified
MTYYAALDVSLRSVNLCVIDDQGEIKAETKLASEVEDIACYLHGLDYIVSSVGLEAGTLTQYLTYGLQSAGFEVICMESRQVKAALSAMRNKTDKHDARGIAQILRSGWYSRVHVKSLESHHIRLLLSSRKAVLSKCVDLENEIRGLFKVFGIKLPPKLGHGAFDAAVRDTIEADAALAHALLPLLEARLYLYHTFRELDNRTRKMANRDVVCQRLMSAPGVGFITSLTYKAGVDDPSRFKRSRTVAAHFGLTPRRCQSGEIDNPGHISRAGDPDVRCALYTAANAMLTRSSRWSSLKAWGMQLAKTRGHRRAVIAVARKLAVILHRMWLDDTQFRWGTEEVRS

SEQ ID NO: 487712 - protein, 477 aa, unidentified
MKNKRNTKHRHKASQPSAQRRQGKRAATSVRLELRQLKLDAAGIDIGSEEHYVAVPADRDPQPVRTFGSFTPDLHEMAAWLKHCNIKTVAMESTGVYWIPVFQILESHGFEAILVNPRFAKNVSGRPTDVGDAQWLQQLHTYGLLPASFRPDDPTCVLRSYWRQRADLVQCASRHVLHMQKALTQMNVSLHLAITDITGVTGMRILNKILQGERDPKTLAQLRDPRVKCSEETLVKALTGDFRAEHLFALRQAFDLYLIYQEKIAECDQQIAGHMATLESKLAPDAPPMPPSTKGKSKPRRNEPKFDLRGELHRITGVDLTQIDGLDVSTIQTVISEIGTDMSRFPTEKHLGSWLGLSPHPQITGGKVVSSKTRKVLNPAADSLRMAAQALNKCDTALGAFYRRLRSRIGPAKANTATAYKLARLIYRGIKYGQTYIDEGSRYYDERYRKHILANLLRRAKQMGCILLETETGEILA

SEQ ID NO: 487713 - protein, 445 aa, unidentified
MAFKSLQQKRQFVNGKYIIGIDPSKIKHQAAVLDTNGIQRGKAFTFKTTHQGYHHDLWKRLDQIIPSDVDNDHIVFAVETACNLWQTLAFYLKAKGYTVLLVSPLSTKHTRPVMNHDFSKTDPKDALIIANNARDGYFDYYQEFTPLVNAMHRLSITYCKLNKNLTQNKQRLRSLVEQIFPEFITVLPPDTKTAIYLFKTYMTPQDFLNIDICKEAEQIKRISRHNHGIKTLLRLKEQAEHSIGIQLKNEEIIAERLSLTAWITMIETIEGQMESIIEQLITLAQQTPYWDVLISFKGKGVSEKLAALFIAETRDLDQYNHHKKIEKFAGYNLRQAQSGNYVGPRRMSHIGNKRLSWIIYKMTEETAKYLPEVRMKYLRRQMNTKSKYRKNIIACSSPLLNLIVALVKQRRPYELREEKVKELQQLEQKYQAYKQSKKSKRKKAA

SEQ ID NO: 487714 - protein, 371 aa, unidentified
MTEAVKYVGLDVHKETIAVAVADGQRGGEVRFIGTVANEDDAVRRLVKRLTGPGVTLNVCYEAGPCGYGLHRLLTKLGQDCIVIAPSMMPRRPGDHVKTDRRDAMTLARLLRAGELTAIWVPDEAHEAVRDLIRARRNAQDDAIGAKQTVRSFLLRHDRRFGGKAAWTKMYWRWLSEQRFDFPHQQLAFEEMQKRVLEAQARVGRLEAALAEAVDAWCFAPLVRNLQVLRGIRLVSAATLVAEVGDLTRFDNPKQLMAYVGLVPSEHSSGARTKRGRITRAGNAQARTMLIEAGWSYRLPAREERRYRERVIDLPEDIQAIGWKAQVRLCQRYRRLAATGKPQPKVTTAIARELVGYAWDIARRVSPAIAG

SEQ ID NO: 487715 - protein, 404 aa, unidentified
MNNLAGIDVSKGKSMVSVLRPFGEVVALPFTVQHTPSELRELANYLKSLEGETRVVMEHTGRYYEPIAQALHDAGIYVCAVNPKLIKDYGNNSLRKVKTDKADSRKIARYGLDNWADLRPYSSMDTIRYQLKTMNRQYGLFSKNRTTLKNNLISLLDQTYPGANALFDSPVRDDGSQKWVDFVASFWHVDCVCSISLIAFTEKYQKWCKRHGYNFSNKTATAIYEGAKKILVTVPKNPTSKFLIQQAVEQLNACSKSVEMLRIEMNHLASQLPEYPVVMSMYGVGERLGPQLIAEIGDVTRFAHKGSLSAFAGVDPGANQSGNMELKSVRSSKCGSPALRKALFNVMDCLIKKQPMDDPVYLFMDKKRAEGKPYFVYMTAGANKFLRVYYGRVTEYLKSLDTTQ

SEQ ID NO: 487716 - protein, 371 aa, unidentified
MDESSKILYVGLDVHKDSIAVAYAPDDRGAEVVSLGAIGTRQCDIDKLIRRLESKGAALVFVYEAGPCGYGLYRYLTGKGFACHVVAPSLIPRKAGDRVKTDRRDAMTLARLMRSGDLRAIYVPGVEDEALRDLSRGRDDAMQDLKRSKRRLKSFLLRQDIRYEGRATWNAAHLRWLSEVVCATPPQQIVFQEYLRAVSEQHERRQRMEHELHEAVQGWRLYPMVQAIQALRGVELTSAVIVMTELGDLTRFENPRQLMSYLGLTPSEYSSGARRHQGGITKAGNSHARRALVEGAWAYRYPAKVSRHLQLRLETLPAEIQAISWKAQVRLCKRYRQLTARGKHVNQVVVAIAREMAAFAWAIARLVPLAS

SEQ ID NO: 487717 - protein, 343 aa, unidentified
MEAKRFIGIDLHRDCFTACVRLENGREYLKRWKLEDMPRFADKLRPTDEVAVEMTGNTRLFHDQVAPLVDRVVAVNPTQFKVITHSVKKTDPNDARLLALYLAKDLLPEVRMKDKTQAQIASLTQTRDTMVKLRTALKNKVNNICSAYGVNLNRESLASEKGLRAVGKMPFDPLVLVELKIIVDQIRSLNQSIAELEETIGKESQKLEGHKNLTSIKGIGGLSGGILLSIIGDIGDFADEGKLASYFGIVPRVSNSNETEHSGRITKRGTKLGRTTLIQCALIAQRYSPYLKTYYEKMKARRGAGKAIVALARKFLGIIYRTLKNKWVFEDFPNFVLAEDPTA

SEQ ID NO: 487718 - protein, 362 aa, unidentified
MATKRIAQAEAVRVTVGVDTHKDTHVARAKDQLGRRLGERTVPTTPAGYRDVLAWARGLGQVETFGLEGTGSYGAALARHLRGEGEAVVEVIRPNRQARRRNGKSDPADADAAASAVLAGDAAGPPKAGDSTVEMVRALRVARSTAIKARTQAINAMDALVVTAPEGLREALRGLSKTKLVRTCARLRPGGDLRCPTTATKTALRSLAVRHEALEAEVKALDGQIVPLIAKAAPRLVALFGVGPDTAGALLVAAGDNPERLRSEAAFSMLCGSSPVEASSGKVTRHRLNRGGVRQANAALYRIVVVRLRFDQATKDYMERRTAEGKSRKDVIRCLKRYVAREVYAVLTAVPSPAGDAVDAVA

SEQ ID NO: 487719 - protein, 426 aa, unidentified
MRVLYDRVAAIDVHKDMVKVAIRVPGAKRGTRKTDVLEFRTFYGVLQEMARELRRRGVTHVVMEASGVYTDPVYYALRELDFEEVMVINPAHAKALKGHKTDAKDAIRLLDLYECGLLSGSYMPSEDLREVRDLARYRMKTVQARTSEIQRLQKTLETAGIKLSSVVSDVTGGSATAMIEALISGERRGSVMADLAQTRMRTAGKMTDLSMALTGRFTDHHALMCRLHRDRIKIFDDAVQDLDAKIAPLVARYAREAELLKTLPGFGDVIVAGWLGAIGPAPHQHFATASRLASWATLCPGNYMSAKKSKGGRTGDGGAYIKPLLIQAAWGAVRVPGRLQARFHRLVRKFGGPRNKGAQKRAITAIAHTLLKIAYSVLKTGKPYADLGADFYTRRESPDARQGYLMRQLQKLNPGCVITIIPAEAA

SEQ ID NO: 487720 - protein, 411 aa, unidentified
MEQIYERVAGCDVHRDQVTVCVRTPGPRGGVHKDKARFKTTTAGLIEMADWCGERAVELVAMEATGVYWKPVYYALEDRFRVWLCNAYHVKNVPGRKTDMSDADWLADVAAHGMVRPSFVPPVPIRELRELTRYRKKQIDTRTSELARLEKVLQDAGIKLTSVASKVLTQSGRAMIQALIEGEGDPGALAELAKGKLRPKIPELTAALSGHFGAHHALVADRVLAHLDFLDDTIAQLSRQIAERVAEGYQPVLDLLLPIPGLQHTSVEVIIAETGADMSCFPTPGQLASWAGLCPGNHESAGKRRKVGTTAGNQWLRRTLIESARAAARTKGSYFGAQYHQIARRRGPNKAAVAVAHSLLDVIWHALSTGEVFTDPGADYFTTRQDPEHRTRRLVNQLERLGYTVELTQTA

SEQ ID NO: 487721 - protein, 427 aa, unidentified
MKTEDIRLEEFRNLKKEVRGSVGHLLVGIDIAKEKHNGFFGSATGKTFLKRFVFDNNREGFEKLLAETDALKQKYGLSQTVFGLEPTANYHKPLGEYLIYRDHEVVLVAGSAVRKNRELLDGRWDKHDVKDAANVADLMAQGKFLYYENPGIEVRELRGLLSLKRKLKKQAQGLHLRIRNNLLAQYFPEMDQYYGTCEKDNLAMVSSCLSPAVIGGMEYNEFFKTVVSRKNGLRQHKHLYRIWQLAKGSIGCEAEEGAACEAGVLVALLKQTRQAIEQVEQEILKLCYTFSEYEFVISIPGFGPDVTAKVLAYIGDQYRFETARQVLKMAGFDLCAARSGKPSEKAVPVISKKGKADLRYALYQAAHVASIRSAHFKQYFAQKIRGREREKGIKTKMKVKLAAKMLVIAWTLMKNKEPFNPEHVKID

SEQ ID NO: 487722 - protein, 403 aa, unidentified
MNSVGIDISKGRSTVAVMRPFGEVVISPFEVRHTDSELSELARQLKSLNGETRVVMEATGNYHAPVAKLLHDAGLYVSVVNAKLVHGYGNNDLRRVKTDKKDAVKLANYGLDRWLTLPRYVPEEDTRLLLKNCYRQYRQYSKVQTVLKNNLISLLDTVFPNVNRLFSSPARADGSEKWVDFVAEFWHCGCICERSEKAFVSKYQKWCKKHGYNFGEEKACAIYAEASGHIGVTPKSETTKLLVEQAVAQLRATSTALAALKHEMQSLASMLPEYPVVMDMFGVGPTLGPQLIAEIGDVRRFYSKKALVAYAGLDAPPNDSGDVTGRHKSMSKIGASSLRRTLFLVMSVYLQTAPLDEPVYQFMDRKRAEGKPYRVYMMASANKFLRIYYATVKAYLESLEHTA

SEQ ID NO: 487723 - protein, 346 aa, unidentified
MEHYAGIGVSLELSSVCVVDAQGKIVKEAKVASEPEAVVAFFEALGFAVKRIGLEAGPLSQWLHAGLKEAGFETVLLETRHVKAALSAMTVKTDRKDARGLAQLLRMGWFQQVHAKSMASQEVRALLVGRKQLLGRLIDVELSIRGILRGFGLKVGAVTRKGFEARIRELVTGQATLERIAEAMLSARAALKAEYEKLHQAVLAIVREDAVCRRLMTVPSVGPLVAITYKSALDDPSRIAKSKAAGALFGLTPKKYQSGEKDVTGGITRTGDEMVRTALYEAANVLLSRITRFSKLKRWGMDVAKRRGSKRAKVALARKIAVILHRMWIDGTTYRWAEAKPIAAQA

SEQ ID NO: 487724 - protein, 369 aa, unidentified
MNKIVKYIGLDVHKNSISIAIAEEGRQREVNFYGVINNDMNQLHKFLRKQISQGTEPRCVYEAGPCGYNIYRSLSEKGIDCVVVAPSLIPRKSGDRIKTDRRDSESLAKLHRAGELTSVYVPSLEDEALRDLVRAREDSVNALKRAKQQLGAFLLRHHIDSPVKSKWCKSYFNWLADIAMPHPAQQITLQEYIETVYDCKQRIERISEQMRQLSKQTRLYGLNKSLQALRGVSEIVSAVVVSELGDLTRFDSPVKLMAYLGLVPSQHNSGDKKRTGSITKTGNGHVRRILVEAAQAYRLPARKSRCIVKRNEGLPQEIRNIAWQAQVRLCSRYKRLVYRGKNSNLVKTAIARELAGFMWAIAHKVPKVA

SEQ ID NO: 487725 - protein, 359 aa, unidentified
MSDAITKETTLTVGLDLGDRYIQVCVLDETGEVVEESRLPNRRAALERRFGVCEPLRIVLEAGTHSPWVSRLLVDLGHEVLVANPRKLRLIYKNESKSDRVDAEYLARLGRLDPSLLAPLRHRSAETQKDLAVLRSRMCLVRARTRLISHARGAVKSFGERLPSCGAEVFAKKAENHIPPELEPALAPVFSAIRELTDKIKALDLLIEKTARESYPKTSLLTQVPGVGTLTAQCFLLTIEDPARFPKPRAVGSYLGLRPRQAESGSLRPQLRITKAGDDHLRRLLVTAAHYILGPFGPDSDLRRWGLALCEKGAKSGKKRAVVAVARKLAVLLLRLWQTGEIYEPLRNTNRREAARACA

SEQ ID NO: 487726 - protein, 425 aa, unidentified
MKKLDYLSTLFVGIDIGARQNVVSAINFDQEFLIKMEPVPNTQFGAEQLESMLVKVLEKNTFKTVIIGLESTSFYGVHIANFLSSSERLMPYKPYVYCLNPKEVANYKDSFNSLDKNDSIDSFVIADFARVGRIHTEPWRGSQYLALQRLTRHRLHIVECLTREKTYMLSNVFLKFSGFALLQGDDHPFSDKYGATASSILTDFLSSEDIANTSIEDLVDFVNKKSRKRISNPQMTAEILQQAARNSYRLDKCLYEPLTTSIACSFNCIQAFEKELKAINKAIEKAVMGMNPVEYQILMSIPGFGPVYSSGILSELGSVHAFPNNNAIAKYAGIVWKENQSGGFKAENTPMNKAGNRYLRYYLIEAAGSIVRYIPEYQEFYQKKFAEVTTHQHKRALALTSRKLIRLIFGLLAKNQLYSSNRVDK

SEQ ID NO: 487727 - protein, 364 aa, unidentified
MISVPSNSTVLALDVHKFSITAAVLEPGSDSPVLDRLGTDEESVRRLVSRLGAGRSISACYEAGPTGYELARHLEGLGVHCDVVAPSLIPKASGDMVKTDRRDARRLAHLLRAGQLTAVNVPSPAEEAVRDLCRARTDMVIDRVRAQHRLDKFLLRHGRVYLEGSNWTARHEQWLAAQRFDEPALRATFGHYRGALSAREAELRAIEVELGDYYAREAFASGVARLSAYRGITELGALTIASEVCDWRRFPTAGAFMSFCGLVPSEHSSGQQTWRGGITHAGNWHLRTHLVESAWVYKGQPCIGVTLQRRQRGADPELIARSWRAQLHLSKKFRRLDEKKSNRKVVVTAIARELAGFCWAEMAA

SEQ ID NO: 487728 - protein, 321 aa, unidentified
MFVGIDVSKDVLDVALRGPQTSSFQVGRDEKGLEELVQRLSLLDNKVELIVLEATGGLERDVVAVLAAAKLPVAVINPRCARDFARSLGRLAKTDGIDAAVLAHYADAVGPMAQAVPDATAREVEALLTRRRQVVQTLVSERNRRSGLLLQRLTGPGKRVMESLERSIAWLEKELASLEEDLDDTIKRSDIWREKDDLLKREKGVGNVVSRTLLGYLPELGTLNRKQIAALVGLAPFNNDSGKRWGQRSIWGGRGHVRAVLYMAAVTAVRWNPVLRSFYERLLTAGKPKKKALTAVMRKLLIRLNAMMRNHLQALSPAKIA

SEQ ID NO: 487729 - protein, 353 aa, unidentified
MPSKADTAIARTIGIDTGKNTLHMIGLDEKGAIVLREKVSRTRIAARFVNVPPCLIGIEAGMASHHIARELVALGHEVKQVPPGYSKPFRQGHKNDFRDAHAVAEAVERPSTRCVPIKTDEQLDLQALHRVRSRLISNRTAVTNQIRGFLLEHGIPVRQGHHFLRRQLPQLLGTRTDVLSPRMIRVIGDLMSDWNYLDERIERVTDEIESLARADEGCQQLITVPGIGPIISSAMVAAIGTGAAFCKGRDFAAWLGLVPKQMSTGDRTILGRITRRGNRYLRTLFIQGARAILLRPTGWAKHSFGSWLAAAARRMHRNVLAVALANKLARIAWTVLAQARCYEARVEPRVEPA

SEQ ID NO: 487730 - protein, 345 aa, unidentified
MQVTTIGLDIAKRVFQAHGVDGVGKAVLRRKLQRAEVLTFFQSLSPCVVGIEACGTAHHWAREIRALGHTVRLMPASYVKAYVKRGKTDAADAEAICEAVTRPTMRFVPVKTPEQQAVLMLHRTRDLLVRQRTMLVNALRGHMAELGIIAPQGISRVADLVAVLLGKDETTMPALARQALRGLAEELEALGERIKAIEAAILAWHKENEASRRLASIPGVGPITASAIVASIIDPTQFRSGRHLAAWIGLVPRQNSSGGKERQGGISKQGDRTLRRLLVLGATAVIRHARTRSDAEAGWLKRLLERRPAKLAAVAQANKTARIVWALLVRGGTYRAPAAAQAATA

SEQ ID NO: 487731 - protein, 322 aa, unidentified
MSEETVCVGVDVAKSALDVAVTDSGEVKQFANDDEGVGEAVGYIAGLKPAAIILEATGSLEMPLAAALQASRLPVVVINPRQVRDFARATGALAKTDSIDARILALFGARVKPEIRPLPDAKAREMKSLLARRRQLVEMLTAEHNRLGRAGEDVRVGIEGHIRWLEEALSQINDNLDHRIRHSPSWCEKSDLLKSVPGVGKVVSSTILIELPELGSLNRRKIAALVGVAPLNRDSGTMRGRRTVWGGRAKLRASLYMAALVASRCNPIIAAFYQRLVDAGKAKKVALTACMRKLLTIVNAMMRTMTRWQPGTTLQYAPTEAK

SEQ ID NO: 487732 - protein, 441 aa, unidentified
MRQRGAHRVCELDIGVRSEGDKRVAAAQETAWVGVDIGKTHHWVCVLDADGKRLLSVKVANDEAEILALIATVQGLAEQPIWAVDIIGAPAALILALLAQAGQSLRYASGRVVAAMSSAFAGEGKTDAKDAYVIAETARLRRDLAVVDQDTDLVRNLAMLTGHRADLVADRVRMINRLRDLMTSVFPGLERAFDYASRKGALVLLTGYASPQRIRRIGHTRLAAWLRQRKVRDSAGVAARAITAARAQMTVLPGQDLATSIIAELATNILALDQRLRSLDAQIAETFDQHPQAAVIQSMPGFGPLLGACLLVGAGDLRAFPSAGHLAAAAGLVPVPNDSGRRTANLHRPKRYSRPLRHVFYLSAQTSMLRAGPNRDYYLKKRQQGRTHSQAIIALARRRVDVLCALLRENRTWTTSPPVVAQAAPSVSTSAEADRAVDSLS

SEQ ID NO: 487733 - protein, 317 aa, unidentified
MAMQVDRLIVGVDVAKAELVIHHDDRDEIIKIKNAKPEIKKWLKQQAAHTAIAVEATNVYHLDLVELAHGMGFQVYVVDGFQLSNYRKGVGGRVKTDPSDARLLSRFLRNEGNELRPWSPPPAVYGKLQSLLRRRAALVTARTAMTQSWANENLLRAAFETFVKSIDRLDQLIQKKLKEVLREAGLQEQVARCQAVEGIGFLTATALVMAFVRGEFKSSDSYIAFLGMDLRVSDSGQKNGRRRLTKRGCSEIRRLLHNAAMAASRSAAWKELYEKQRTAGKATTQALVILARKLARVAFALMKNQDEYVTRKGKLAC

SEQ ID NO: 487734 - protein, 434 aa, unidentified
MHVLCANGSRGGRMKTVHSEFAAYIGLDWADRKHDLCLQVGLDGARERSVLEHKPKAIHAWAEQLRKRFGGAKVAVCLELAKGPIVSALLEHDFFVVFLVQPAMLAKYRNAFTPSRAKDDPTDAEFALELMLRYPDRVQRLKPESANMRILRQLVETRRGLVDDRVRVTNRIVANLKAYFPQVLDLFREKDTGVFADFLERWPTLEAAKKARRNVLEGFFRDHNVRYQTTIDRRIDTLKQDEALTTDETVIRPARLLVELSLPQLRALCSAIERLEQEIADCCSKLADYKLFAGLPGAGANLAPRLLVAFGEHRERFPNAAAFQEYAGVAPVTERSGNKCWVHWRYSCSTFLRQTFIEWVGQTIPRSFWAKAFYDAYRARGGAHQAALRALAFKWIRILYRCWIERLPYDESKYLMALQKRQAPLLKHAASAST

SEQ ID NO: 487735 - protein, 338 aa, unidentified
MKLYGGIDLHSNNSVVALLDENDQVVYRQRLANDATVILAALAPFGEQIAGLVVESTYNWYWLVDALMDAGYRVHLANTAAIVQYSGLKYSDDDSDAVWLAKLLRLGLLPEGYIYPKEKRAVRDLLRRRSRLVQQHTANVLAVQNLLARNRGQSLSAGKIRQLTPDAVHKLLPDANLALAVQSTLLAMRGQEAAIDLLERQACAQMKGTPAYRHLLTASGIGKVLGLTILLETGPVQRFARVGNYASYSRLVGSERLSNGKRKGRGNTKSGNKYLAWAYLEAANFAVRYNPTIKRYYQRKKARTNALVAIKTVAHKLARACFYMLREGTDFDVDRAFA

SEQ ID NO: 487736 - protein, 404 aa, unidentified
MLSETKEGKRQHFRMANSASDHDRLLSYLRTLPSPCIIGFEATGNYHRALGHRLVAAGFEVCFISSVASARYREVMFNSWDKNDPKDAAVLLELLKQGITQRYVDPLIAGHHDLQELSKTYYQVTLSRTRLQHSLLTHYLPLYFPEMGKWWNSTRTDWWINYLLRFPIPSAVTKHSQEEFCEIASPVVGRKVNKAAKLIELYKTAQHSIGLPVEAESLACKTFQIQLRRYQEINACRKQLEETAQMVLADNPDSAILQSVPGIGPINALTILAEGGDLRRFDHHRQFLKYCGFDLAKNQSGNYRGQEQISKRGNARLRLALWMSVNRAIQQPENSFQQKYLRYIKSAPQDKDLQRKARTAVAAKMARVVYGLVKSKQMYQGYYEKALPSGSIPLCRAVEAARTS

SEQ ID NO: 487737 - protein, 349 aa, unidentified
MTNIVKQVAGIDVAQNELVVSLGRMGHDTGIDIFAYKTFANNTKGFNELMIWVKKLAAGEIKVRYVMEATGVYHERLAYYLSDQQQEISIVLPNKISNYFRTLDVKTITDKTASQAICRFGLERKLENWQKPKKIFKDLKQLTRERDQLIDDRTALKNQLHAENAEAFPNDSSIKRITKRMQLINRQEQEIRAEIAELVKKDAELVRKINTITTIPGVGKLTAVVVLAETNGFELIRSKKQLVSYSGLDVKLKDSGTSVKGKPKISKKGNRHLRKAMHMPALSAMRFNEHHKAVFVRLVSKHGIKMKAAVAVQRKILELIYTIFKTDIAFDKDYVEKGRQKELPLPKNG

SEQ ID NO: 487738 - protein, 387 aa, unidentified
MIYLGIDVAKASHVAAAITSDSEVVLKPFPFANSCSGFAKLKSRLDEFPCDSLLIGLESTAHYGENLIAYLVQNAYQVALLNPLQTAALRKSAIRKTKTDKADSFLIAKSMMVDGYRLLEPDDIHLLKLRGLCKTRQNLILLRTRCKIQLGAFVDQLFPELHDFFRAGLHINVSYTLLKLHPRPSEVQSLHLTYLSNLLQKASRGKYTKADAAHLRELARQSIGTDHPSLALQINQTIAQIELFSEQLNQVEHEIVGIMDNLNSPIMTVPGIGHINGAMILSVIGDVTRFSSPAKLLAFAGLDPAVIQSGNFTARSTRMSKRGNSMLRYALINAAHNVVRNNHTFAQYYASKVAQGKSHYCALGHTAHKLVRVLFTLLTKNIRFDLP

SEQ ID NO: 487739 - protein, 343 aa, unidentified
MQIRSVGIDLGKTTFHLVALGDSGKVLLKKKFSQRQLIAFTANMQTSLIGMEACSGSHFLGRALREQGHDVKLIPAQFVKPFVKSNKNDFIDAEAIAEAVDRQNMRFVPIKTDDQLDLQALHRVRDRLMARRTSLINQIRAFLLERGIVFAKTPIRLKEALPEVLENANENLTPRMRNLVAMLWSEWKDLELQIVEMNDEVERIASSDAACRRLRQIPGIGPLVATAIVASIGNGAAFRKGREFSAWLGLLPKQHSTGGKARLYGISKRGNSYLRKILIHGARAVVLRSKRDRIAMGAWMTSLETRAPRNVLIVATANKLARIAWAVLSTGQDYRAVPEAVTV

SEQ ID NO: 487740 - protein, 375 aa, unidentified
MLPPYQQRMLAGGTEDKEHAMSQNLDVSPAAIGIDIGKNSFHIVGQNQRGAIVLRQKWSRGQVEARLANLPPCRIGMEACVGAHHLSRTLKALGHDARLMPAKYVRPYSKGQKNDYRDAEAITEAVQRPTMKFVATKTADQLDLQALHRVRERFVGQRTGIINQIRAFMLERGIAVRQGLRFLRAELPNILATRTDALSPRMLRILEDLSADWRRLDARIEDLSSEIEALARQDKGCERLMTVPGIGPIISSAMVAAIGTGDAFSKGRDFGAWLGLVPKQLSTGDRTILGSISRRGNRYLRTLFVQAAWVVLVKVGPKHWDRYGLKSWIEAAKKRLHHNVLAIALANKLARIAWAVLHRGRAFECVKTNEAYRPA

SEQ ID NO: 487741 - protein, 487 aa, unidentified
MACGRLSTPSNTVVPCEAVYRAGRRMSLYGPLTVAALTSTRIRFVVPVAISAGDHSHVVRVKEESMLAESHDEEQIIARVAALDIAKAELVCCVRVPSPAGGKRRLQEVTTHSTMTQALTELANRLVEMGVQRVVMEATSSYWKPVFYLLEAHGLDPWLVNARDVKHLPGRPKTDVLDAVWLCKVAERQMLRPSFVPPWPIRRLRDLTRYRTDLVAAHTAEKNRVEKLLEDACIKLSVVASDIFGVSGRAMLAALVAGERDPKVLAQLARARMRGKIDRLEQAFDGHFADHHRFLLSRMLSRIEGLDADIAAIDAQIEAQLAPFAEAAAHLDEIPGIGSVAAAAIIAEIGVDMSRFPTAGHLCSWAKFAPGINSSAGKTKRSASSGHGNPYLARVLGEAAVGTTKTNTFLAARYRRIARRRGQPRAVVAVGRSILVIIWHLLHDPDARYQDLGADHYNRHVDPSAKKRSHIRQLEALGYTVTLTPAA

SEQ ID NO: 487742 - protein, 351 aa, unidentified
MKYYQTTTEYNCGIDLHTRQMYICVMNRAGDVLVHRNIRNNDFDFFLKLVEPYRKDLTVTCESCFVCFWLADACEDADIKFVLAHAYYVKSIAANKHKNDKEDARELAECLRTNRIPPAYVCPRDLRPIRKLLRRRNKYVKNRAELSGHSTCEVMAAGNQPLTISTNSKERWQEGIRSSFDNPVDSFTAEAELEIIGSYDRVIMRMEQRIEKHARDFKQQDYRLLRTAPGIGKILALTILYETIDIKRFPTVKDFVSYCRLVAGTNESGGKDFGGKGRKMGNPYLKWAFMQAAILGKRADPKLNAYYARLERKKGKHTANAIIAAKIARAVYFMLDRKTGFSVDQLIKGRR

SEQ ID NO: 487743 - protein, 428 aa, unidentified
MTQLMSQEKDTVLVAIDIAKSRNDVLVELPDGRRRRFVVPNNREGYGAFVGYLKELGAPCRVGFEATGDYHRPLAYCLYRHGFELRLISSLAAARTREALYNSWDKNDPKDAQVILHMLKTGMTQTYCDPLVHNFNDLQELSKTHYQVSLHKVRVQHSIMNHHLPLYFPEAREYFHSSRAEWFSSLLYEFPCPAMVLKYRREEFIQAAWDVAGRKVNKTGWLHDFYHTAGEGIGLPVSEDSQTVQMFRLVLSEHLHLCRVRRLIEEQAHGYLKDHPDYRRLRTVPGIGPIIALTVLAEGGDLRRFSHHRKFLKYCGFNLSTQQSGQFRGTSKLSKQGNGRLRYAFWIAATVAIRMKENTFRRKYQSYVKADPDNADLRRKAYTAVAVKMARVVYALIKTDADYRCYYDCSIPSGKIPSDGAVEAVLTS

SEQ ID NO: 487744 - protein, 362 aa, unidentified
MNRITGMKAGQIIGTMAGLQVIGLDIAKHVFQLHSVDMATGEIINIQIKRAKVLEYFVNRQPCLIAIEACGGAHHWARELGMLGHTVRLLHAKIVRPFVSGNKTDATDARAIWLAVQQPGIKLVGIKTAAQQATLTLHRQRELLMKMRTMQTNALRGLLYEFGATFAKGRKALFKDVEQALEELAWQLPQMVRDSLQSQVTRIKAMGEEMLAIEKRLSLQLKADPQMQRIAQIPGVGLLTATAAIATMGEARAFKSGREFCAWLGLVPKQTGTGGKVRLGAISKRGDTYLRTLLIHGARSVLTHAKEPGAWLEQIKQRRPANVVIVAQAAKMARTIWAVTAKEQSYQRGFQSVRPHAVMQVA

SEQ ID NO: 487745 - protein, 412 aa, unidentified
MQVMIERCAGLDVHQETVVACRLLGSPDVRPTKEVRTFATMTRDLVALRAWLAEAGVTHVGMESTGVYWCPVYAVLEGHFDLIVGNARHIRNVPGRKTDVKDAEWIADLVRHGLVAKSFVPPQPQRDLRELLRYRRKLVESQAAERNRLLKLLETANIKLASVASDVFGVSGRAMLKALIAGDASAEEMADLARGQLRRKRSALILALDGRLQEHHRFLLTLQLRRLEAAEQDIAALDERLAVKLQPYGEQHTLLMQIPGVDWLVAAVLIAEIGTNMSVFNSASHLAAWAGVCPGNHESAGKQKSGRARKGNVHLRTILVGAAISASRTKSSYLKDKFHRLKARRGAMRAALAIAHKILVAAYHMVATGTPYRELGDAYLDHIGRTRTVANLKRRLERLGYRVSLEPNAAVA

SEQ ID NO: 487746 - protein, 320 aa, unidentified
MEKNENTFVGIDVAKDELVLHILPNNEQLTVPNSTEGIKTLVKRFKKIEPQQIVLEATGKLERELVAALAANGFAVVVVNPRQARDLAKGLGELTKTDAVDAKILARIAQLQCLTVRPITSQETRDMNDLVTRRQQLITMRTQEKNRLHNEKQKTIRKSIEKMIAYLDKQITVIDAGIKKMIDANPDWSEKDKIIQSVPGVGEKSSQALIAGLSELGTLNRREAAALVGTAPRCQDSGKKLGARRIRGGRTYVRAALYMAALNAIKYCSPLKAFYEKLRVKGKSFKVAIVAVMRKLITILNVMVKTNTPWQEQKTNCERN

SEQ ID NO: 487747 - protein, 339 aa, unidentified
MNYIGVDLHKQIITVCVMNDQLQVVTRKTLYCNQPDTIVAFFEQSQPFQVVVEATASYHWFVQLVEPLAAKVVLANPKKLRVIAESTKKTDRLDAQVLSEFLARDMIPQAYLPTPRQRQHRALVRQRQYIRGQMTAVRNKIRRILSDYNADCRNLFSSERGLTYIRQVKLNEADRFLIRLLWADHGHFAKQLDKLWEHLKKFAKKAPQREQGARTVLKTVPGVGPVGVEVLLSELGDIERFRNAKAVCAYAGLVPVVRQSGGKRSKDLAISKQGSKLLRWILVEASWHLVQKSPKWERVFTRISKRRGGKRAIVAVARKLLCVIYAMLRTMTPYRILAA

SEQ ID NO: 487748 - protein, 481 aa, unidentified
MKPKPPEKIQKATNPSTRGHWNEMNRKQRREMMRQIQSEDLSLEVVHPHAAGIDIGNESHYVAVPPTRDSQPVRHFGCTTVELKAMAEWLKQCGIRTVAMQSTGVYWIAVYDILEATGLDVYLVNARDTKNLPGRKSDVQESQWLMKLHTYGLLRNSFRPSQEIRTMRTYWRQRNDLIRAAVSHIQRIQKALTQMNIQLANVLSDVSGVTGQAILKAILAGERDPHKLAALRDPRVKASEEQIARYLEGNWQEDLLFVLKQEQEGYEFCQQQMAECDRQLEQYLQQREDRSQGASLPQEMRKGRLLRKKGNKPAFALRAELFRITGTDLTQVDGMDVVTAATILSEAGWDMSKWEDEDHFVSWLRLCPDNRISGNKVLGKGRLPTNNRASIALRMAASTLRLSNTYLGAQFRRFRTKLGAPIAIKAMAAKLARLVYRMLRYGMKYVDQGAKIYEAQHRQRQIGQLKWNAAKLGFRVVEAAA

SEQ ID NO: 487749 - protein, 342 aa, unidentified
MRYLGEFPATEAAIRKLVAKLATKCDHLTFCYEAGPTGYGLYRLLKSLGHDCLVVAPSLVPKKAGDRVKTNRRDAISLAKLLRAGELTAVWVPDERHEAMRDLSRARQAVKKDLQGKRQQISSLMLRLGRIYPGKTTWGPAHMRWLMEQKLEYREQRIAFEELLEGIRQESERMERLEDAIREVVPEWSLAEVVAALQAMRGIDLIAAVGVLAEIGDLSRFQNPRELMGYLGLVPSEDSTGDRVKRGGITKAGNGRARRILVEAAWSYRYPPRVSRDKQPKVEAAPRRAREIAWKAQTRLCGRFRSLERKGKRRTVIVTAIARELSAFIWAINRELMPPRQA

SEQ ID NO: 487750 - protein, 326 aa, unidentified
MEHELHYIGIDTAKEKLDVDVLRPDGRHRTKKFANTTKGHDELVSWLKGHKIDHAHICIEATGTYMEPVAECLYDAGYIVSVINPALGKAFAQSEGLRNKTDTVDARMLAEFCRQKRPAAWEAPHPLERALRALVVRHQALTDMHTQELNRTETAREVQRPSIDAHLLWLEAELKRLEKQIKDLTDDDPDMKHRRKLLESIPGIGEKTSAVLLAYIGLKDRFAHARQFAAFAGLTPRRYESGSSVRGASRMSKAGHVSLRRALYMPAMVATSRTEWGRAFRDRLAANGKKGKVILGAMMRKLAQVAYGVLKSGVPFDASRHNPVAA

SEQ ID NO: 487751 - protein, 348 aa, unidentified
MVADSLDVVIGVDTHRDAHALALAAAPSGALLLEAVVEASTVGYRDALALAQAHAPGRRAWAIEGSGCYGAGLACFLLARGERVLEVDRPRREQRPGRGKSDALDALRAARSLLASEPLASPRRAGRREALRVLLATRESAVGARRCALNQLRALLVTCPEPLRAELRPLTRARLLGRLRGTRPRRHADSQLRGSLLAMRLLAVRIEALTLEERTLKREIRALVRELAPRLLAEPGVGPITAAHVLLAWSHKGRLRSEAAFARLAGAPPIPASSGKVVRHRLDRGGDRKLNRALHAIILTRRRTDPETIAYIQRRVSEGKSDREAVRCLKRYLARSLFRQLEAMPQAA

SEQ ID NO: 487752 - protein, 423 aa, unidentified
MIYAGVDIAKVDHVIGAVDERGSEVCGPMGFKNGAAGFERCEAWLEGVAASPADVLVGMEATGHYWMALYAFLTSKGYAVAVIDPLQVRAVRRFKGLGGVKNDRVDAGLIAEAMRIGQYDPTRLATDDVQSLRTLTRYHQSLKSELAEVKVQCTCLLDAYFPEFSGVFSDMFGAAGRAVLSRSPLPSEVRRRRVDSLQRDISSAARGSRRVDGKAAEIKALAGRSVGIALGERAASLQVRSLVRQMDFLDAECAKIEAEVRGLLDRVEPLVLTIPGVSYTTGAQIVAEIGDVSRFRNASALVSYAGLNSSVCQSGMFDSGGGPITKHGSPYLRRALWLAASWARLHDPSLREFYERKRAEGKCHRVAVTAVARKLCHIVFAVMRDQVPYDPSRPGRDPSKHSVSGSQGAAKSKTKTNTETEAE

SEQ ID NO: 487753 - protein, 392 aa, unidentified
MYIVGIDIGKNHHEASIVSPEGKQIGRSLRFATTHKGADSLMSFIFKNIGNSPCVFGMEATGHYWYPIYSFLKAKGYTICVINPIQSDSLRKMYIRQTKNDSIDSFLIAEVIRFGQFGTTSMADENILAMRQLCRYRDSVISSRTEIKLRIGAIMEQIFPEYEKQFSSLWVSTSMGILEKYLTPENIENAPIDELFEIIKDKSHNRLTKAKAISIKEAAADTFGIKIAQDAFSFQLKQLFDRMNFLDKQIEALDCQILEYYEKFDCYLHTIPGIGMIAAAAILAEIGDINRFKSSSALVAFAGIDPTVRQSGEFSSTHNHMSKRGSPYLRHAIFLAATTCSFHNSPLNAYYKKKREQGKHHLTATGAVARKLTTVIYAVLRDGKPYEPKKFC

SEQ ID NO: 487754 - protein, 460 aa, unidentified
MRTTAKTRSKKSPAIVEMHPQVAGIDIGSRDHWVAGPPGASGEPNVRSFGTTTADLVELVRWLKAQRITSAAMESTSVYWIPLYELLESHGIEPVLVDTKHVHNVPGRAKTDCLDCQWLQLLHSRGLLRAAFRPGKDIARIRTLQRQLSNFVEERTRCVQWMQKALDQMNVQVHHAVTDLTGKTGMTIVRAIVAGERDPLRLATHRDPRCRKSVVEIANHLTGTWRDEHLFNLAASLRLYDSLEHMIADYEAHITRELEALHPPERRDREPSPNPNRAKERSLKAQGTLELRTNLWRFAGADLTRIDAIGADAAQRILTEVGTDLSMFPTEHHFVSWVRLAPRTAFSGGRRLRSRRNGLGATRIANVLRMAAASLHHSKTALGAAYRRIARKKGAGVAVFAMARRLAELVYRMLRYGQDYVDLGEQAYERRFETMRVASLTATARELGYTLVKQDPTVAA

SEQ ID NO: 487755 - protein, 371 aa, unidentified
MKKGSSCRQSPERVAKAFRLQGSITIGMDLGDKHSYCVLDGQGEVIQEGSVGTSKKAMAKVFGSMGRCRIAIEVSTHSPWVSRLLQAFGHDVVVANPRQVKLISASSRKDDRLDAQTLARLARVDPQLLRPIQHRSAKAQGDLMVIRVRAALVEARTSLVNTARGLTKSLGERLPICGTDQMGVEQTELLPAKLQQVLEPLLQQVVSLTEKIKESDRRVEQIAREDYPETRLLQQVSGVGPLIALTFVLTPEDKARFQKSRDVGCYVGLRPRRSDSGESQPQLRITKEGDAYLRKMLVQGAHYILGYRGPDTDLRRWGLKIAARGGKRAKKAAVIAVARKLGILLHRLWVTSEVYEPLRNVTVQRARIAAA

SEQ ID NO: 487756 - protein, 353 aa, unidentified
MRTNQTKTPAAISTIGIDIGKTTFHLVGLDKRGAIVLRQKVSRSQLERRLANVPRCLIGMEACSGAHHIGRQLEALGHDVRLIPAQYVKPFLKGHKNDYRDAEAIAEAVQRPTMHFVRIKTPEQMDLLALHKVRSRLVRQRTGTINQIRGFLIERGITVRQRPVPLRKALNDILASGTADLSPRILRLLEDLAVDWRRLDERIEAVSAEIEALAEQDQSCQRLMTVPGIGPIISSAVVAAIGNGAGFRQGRDFGAWLGLVPRQESTGDRTILGKISKRGNRYVRTLFVQAAHVILVKRPHAARQGLMPWIEKALKRMHRNLVAIALANKLARIAWAVLARGRAYQPRIAPRAV

SEQ ID NO: 487757 - protein, 435 aa, unidentified
MPFAGLDLHRKEIQAVVIDDHGNTQLEKRFPATRAAILDFSRRHLSPLHHAACEATTSTWAVVELLRPYCASVTPSNPMKTRAIASAKIKTDKVDALVLAQLLRLGYLPEVWVPDPQTQALRRDTTERAYLVADRTRIKNRIHSILHQRLIPAPSGDLFTPANLQWLASLDIDEGGRQALRRQLQLLAFTEELIGEVTDHLAGQAYADPRVKLLMTLPGVDFTVALTLLAALGDIERFPSADKAAAYLGLVPSTYQSGEHCYHGHITKQGRSHARWMLVQAAQHIDKHPGPLGVFFRRIARKKNRNVAVVATARKLVIIAWHMLRNNEPYRYAQPATVQAKFDRLRIRTTGRKKKTGSRKGMGRPAAYGTGRSTRAVPSVDQVYAGEGLPAIATPKSGEQRMLEAAGAAEFAAEIRKPKRVPRRSEKKKAEISVA

SEQ ID NO: 487758 - protein, 399 aa, unidentified
MNAVGIDVSKGKSMVAIMRPFGEIVSSPFEIKHTTSDINSLVELINSIEGESRIVMEHTGRYYEVLAHQLSEANLFVSAINPKLIKDFDNNSLRKVKSDKADAVKIARYALDKWQNLKQYSVMDELRNQLKTMNRQFGFYMKHKTAMKNNFIGILDQTYPGVNTYFDSPARSDGSQKWVDFASTYWHVDCVRKMSLNAFIDHYQNWCKRKKYNFSQSKAEEIYGKAKELVPVLPKDDITKLIIKQAVDQLNSASATVESLRTLMNETASKLPEYPIVMAMKGVGASLGPQLMAEIGDVSRFTHKGAITAFAGVDPGVNESRKYEQKSVPTSKRGSSDLRKTLFQIMDVLIKTHPKDDPVYQFLDKKRAQGKPYYVYMTAGANKFLRIYYGRVKEYLSSL

SEQ ID NO: 487759 - protein, 334 aa, unidentified
MALELLAIDLGKRSFHLYGIDTDGMILSRKVSRAKLAEVVNNLAPTVIAMEACASAHYWARCWLAVGCEVRLINPRFVKPFVKGSKNDAVDAEAIFEAAMRPTMRFVPVKSTDQQDLQSLHRARDRLICQRTALINHTRGLLAEYGIVLPQGPSRFTARAPAAIAGADLSDLARTIFGELLDQLDDLDRRVKKLDATIAGLCRTNETCRRLAKLPGVGPVVATAIVAAVNDGRQFRSGREMAAWIGLVPRQYTTGGKPRLGGIGRRANHYLRRQLIHGARAVVSRSAKHDDRQSTWLKALVARRGFNRTIVALANKTARIAWVLLSRKEEYAAP

SEQ ID NO: 487760 - protein, 451 aa, unidentified
MAKSPKSTQPSKSLPVIDPNCAGVDVGSTRQFACVPADRDVQNVRDFDSFTDAIHSMADWFDRCRITTVVMESTGVYWIPIYDILEARGFKVHLVNARHVKYVPGRKSDVLDCQWLQQLMSFGLLRGAFRPTEQICALRTVWRHRDSLLADQGRHVQRMQKTLTQMNVQLHNVISDIMGHTGQAILRAIVAGERDGATLAKLRDKRIKADHATIQRSLQGNWRAEHLLCLEQFLALIDAIAEQVRKCDQQLMSMLIDMHAHELPVQGIPKHKRSSLPKNAPAFDMRASLYQTCGVDLTTIPGFEVSTVAKIISEIGLDMSRFPTVKHFTSWLGLCPGTKISGGKVLSAATKPSANRAAQALRLAAGNLRQSQSSLGAYFRRLCARMDKPKAVTAAAHKLARLVYMMLTKGQEYTDAGQQYYEERYRQRVVANLARRAKDLGLQLVPVSCPV

SEQ ID NO: 487761 - protein, 346 aa, unidentified
MMIIGCDFHPSWQQVSWLDTETGETGEQKLVQASGDAERFYRQVAAPALIGMEATGNCHWLVDLLAELGHELWVGDAAQIRASYVRQQKTDKRDAAHLLKLLVEGRFPRIWMPSSEVRDLRQLLLHRYKLVIMRARVKNELQHLCLNKGVQRKHKLWSAAGQQILRELPLKPWAGRRRDDLLKLMAMLDQQIEPLDEAVKAEAQRDKMALLLQTQPGVGPITALAYVLTLGDVSRFPRGKQVASYLGLIPREHSSGGRQKLGAITKQGNRMLRMLLVEAAQIAVRYDPEFRREYLHRCHQKPKAVAKVAAARKLAIRLYWMLRTQRPYPAVVRIESSPRVPLVGAS

SEQ ID NO: 487762 - protein, 337 aa, unidentified
MKYSGIDLHSNKSLVTVTDETDRVVAEKRLPNELSTILAFLSPWRGELSGVVVESTYNWYWLVDGLQAAGYKVHLAHCTAIKKYDGLKHSGDEADARHLAHLLRLGILPTGTILPPAQRAVRDLARKRMQLVRSRTTHILAVENITARELGARISSNQVKRLTAEVIDQMPIAADVALAIKANLAVVTAVSAQIELLEKRLQESVKAGSDYGLVSSIPGIGRVLATTILLETGPIDRFASPGNFASYARCVDSQHTSNGKKKGEGNTKNGNKYLAWAFIEAAHFAMRYCAEAKRFYERKKAKTNNVVAIKALAHKLARACFHMLKERKPFDVTRCFA

SEQ ID NO: 487763 - protein, 423 aa, unidentified
MMKLKYSICCGLDVHKNVIVATIVITNADGISEYKQKSFSTFNSDIRKFHSWLIENNCYHVCMESTGKYWIPIFNYLENDIEVCLTHPKYVKAIKGKKTDKKDSKWIADLYKFDLVRCSFIPPKDFRQLREIARYRFKLVCMKSSEKNRIQNCMTVSNVGIASVLSDPFGKTATEIMSYLLTHTSDSIDEKAVRRLIKKGAKAKSDEIIEAIRGYNIESDQAKKLELARSHLEYLDGMITQSEVELYVRMKPYYKFVELVSTMPGMTELSSTIVLAETGVDMSIFDDAKHLCSWCGLSPTNNESAGKKKSVRISKAGDYLKPMMVQCALAAIKSKKQTYFAIKYGRVKKRRGHKKAIIAIARMMIVCIYHMVSEEKPFNPIDYEELMSPKNQIERVILNENNVFAYLESLGYDSSKLVKRNDN

SEQ ID NO: 487764 - protein, 366 aa, unidentified
MKKTSTVRVNGNMIFKGHKLTIGMDLGDRSSNYCVLDEAGEILLEQKLATTPEAMKQTFEKIPRSLIAMETGTHSPWVSRLLKELGHEVLVAHAQKVNLITKSTRKDDRHDARTLARLARIDPELLGPVRHRSAKAQIHLTVIRARAELVRARTALVNAARGLVKSYGERLPKCGTEQVSRELAAELSAELREVLEPLLKEIESLNERIKEYDARMEKIARESYPQVALLKQVKGVGTQIALTYVLTLDDAHRFAKSREVGCFLGLKPGRRDSGQSQPQMHISKEGDRYLRTMMVQGAHYILGPFGEDSDLRRWGLRLAERGGKNGKKRAVVAVARKLAVLLHRLWVSGEVYEPLRNSHKAMRAAA

SEQ ID NO: 487765 - protein, 363 aa, unidentified
MEAIVERCCGLDVHKDVVVACVLIGSADRRACKEIRTYGTTTGELEELRDWLLQVGCTHVGMESTGVYWVPVYAVLEGHFELIVGNAAHMKNVPGRKTDVKDAQWIAELIRFGLIRKSFVPPKWQRALRDLTRYRRKLVEAQASERNRLQRLLETCNVKLASVASDVFGKSGREILRALIKGEASPQQMAELSRGRLRNKVTGLVQALRGNVEAHHRFMLEIQLDRVEDIEANIAVVDGKIDEAIAPHRAVFERLMTIPGVDRVAAVTIIAELGVDMSVFPTVAHAAAWVGVCPGNNESAGKRMRQQKRRGNVHLCTALVQAAMAASRTKDTYLKARFWTIAGRAGKKRAAVAIAHSILKAVY

SEQ ID NO: 487766 - protein, 410 aa, unidentified
MHADSSPNRPKRYSLFCGIDIAKDNHVACVMDRDGTQLVRSQSFANNAEGYRQILERLGQIGGPRRILVGMEATGHYWFSLHDFLVDHRYEVAVLNPIQTHQQAKKGIRKTQTDKIDARHIATLIKNGEHKPALIPTEFGRTCRQLTRLHHHMVRQETRIKQLLWAFIHPTWPEYEGLFAHAFCGTGRTLLRTAPTPSDVRAMSPETLEPLIRKASHGRCAGRKAQEIRQAAENTVGTHRALEAARIGIRCLLDQLDVLEPVRESLEKQIETLTERLPRYLFTLPGAGPVSVVSLFGETDPITAFAAPSKLVAFAGLDVVVSQSGPLPKDPPRRHISKTGSPALRYTLWKMARLACCQEGDLQDYYRRRRAAGLGHLATVTAAAIKLCHIAWRIMIDQRDYQPQRPTTQP

SEQ ID NO: 487767 - protein, 436 aa, unidentified
MDAHNPLSVGIDIGRSKADYCLMLPNGQPVIAHCSLDNSMQGFQEAHQLILNTLKSGKFDGVKFAIEATSYYWLPLFTQLYLDEALLPYQPQLTLLNAGWVSWFKKSFSPDHKTDQRDPFYIADRIRTLSQPISWHYDPHWLKLRLLTRSHFHLVDSMVREKNFYQLHLFLAYSSYTTSHAFSDPFGKLSQYLLSHPELLEEFAELPLRELAQELNDLSYRPLKKPAETAFRLRESLHKSYPVLPDLEETLHTILSSFSTVIKNIKSEISFIDKQISNLVAQDYPEVDLLRSIPGIGPVFSSGIAAEIGDIQRFFDPPKWDKKLNSYRRRNCRDAEDAIAKQAGLWWPKRSSGNFTAEEHPMSKKGNAYLRYYFIEAADRMRQSIPAYRNFYDKKFAEASKHHHKRAVVLSGRKAIGLVVGLLFHHQVYKPEEVHP

SEQ ID NO: 487768 - protein, 466 aa, unidentified
MENNYILYVGMDASKGKADAAILKVSDRRSVKPKFLRKKLSFKFVKSEVSSFLETVRSYSDDNCTSICFALEVTGIYSTNVYNFIKANLNDNESIRFLNTDFVNQWRKAHNIAKSDPLDAQTISTIIGTDADVQYVNDNVFENKNGYQDLKALVHRHYQIKKIYSQEINRLIAQCDCLFPELQYVFEPKSAAFIAVLSSYPTTHDIINASKFEVFSVVYEATKHRCSMDKIDKLFDLCWDTLVPDDISSYGRNIILDLVENIKNIKGQLKAIQRYIEDVVSLNPAYKLLLTMTGCGPITAATVIAETGDISRFKNADCFVSYSGASPRNKRSGTSVETMGKISKKGSRYLRHAIYMIAEFARRHNPVLKHQFERIKNGNKKRHKLANIAIANKIARYIYSIMKNKSSFVILHEHIMRLPEETRDTFFNSISLDFPKNTRKQIYQYSDINGEVHKFVYIKSEDTMIV

SEQ ID NO: 487769 - protein, 369 aa, unidentified
MNAAGIDVSSRKSTVAVLRPFGEVVRLPFDVAHNTEGLASLAEQLKALDGETRVVLEHTGRYYEPVAKALHEAGLYVSAVNPLLIKEYGANSLRRVKTDKADALKIARYALDNWADLRDYTPMDTIRYDLKTLNRQFQLASKQRTASANNLIALLEQSFPGVRKCFDSPVRSDGTQKWVDFAHTFWHVDCVRKQSLNAFSERYRKWCKRHGYLFKQCNAEEVYSLAKNAVVLVPKSEVAKVLVQEAANQLTSISRSVETYRAEMERLASTLPEYPVVMEMFGVGKSFGPQLMAEIGDVRRFERKQSLVAFAGIDPMPNQSGDKNVRSNAPLRSGRTPAPPGQPRRQRRTGCSNAHRSSLSPRRQRLSLH

SEQ ID NO: 487770 - protein, 425 aa, unidentified
MDFKQNQKINQVSEKTLVVGIDIAKRTHFACFTDDRGRVLQKSFPVSQSLEGFERLYQRILAALREHDKTEIIVGVEPTGHYWLNLAYYLEDRGIPLVMTNPMHVKRSKELDDNLPTKHDRKDALVIARLVKDGRFSYPRILKEVEAELRAGSTFRSKLTEELGAVKNRMIRWLDRYFPEFTQVFPSFGKMALAALECTPLPLDLHEKDPDEVLERYRNVDGLKSPQRPKALQLIELAAQSIGVTEGCQMARYEMTTLVRRFHQLEQDIEDITQQLVELVQTSVEYDWLKTVPGLGDTTIVDLLAEIGSFSHYEDPRQLIKLAGLTLRENSSGQHKGQKRISKRGRRKLRALLFRVMMPMIRHNEAFRKLHEHYTNRSINPLRKKQSIVVLCGKLLKVLHGISTKHRAFDAQRMMRDIPSLVEAI

SEQ ID NO: 487771 - protein, 348 aa, unidentified
MNKRKMQHAESKDKAQMLDGYDHYIAIDWSKKVMAIGRATSRRAEPAVIERPADIKELQLYLRHLQGSRVLTVEETTSAHWLYLQLRESVDRIVICDPYRNRLLCDGPKTDKIDAAKLCLLLRAGLLKEVFHRDDELYRLRRLVSAYEDLVKAGVRALNQKAAVTRAEGFPTEFPKETPLHFVVEHLDKSIALYDTAKAEYEKQFRTLCRKNTSLKALDKLHGIGIIGAVKILSYVVDARRFPTAGHYLSYCGLVKLVKESGQRSYGQRSPRYNHALKAVYKTAAMAAISGENPIREYYEYLLKKGVAEHNARHAVARYIAKVSYGMLKHGTEYQPYLWRTTETAQNP

SEQ ID NO: 487772 - protein, 345 aa, unidentified
MSIVGGLDIHRKQLTFDYLDTVTGEVKRGQIAPADREHLRAWLARFAGRDDVAFAVEGCTGWRYVAEELAAAGVAAHVGEPADTAAARGRKRHAKTDKTDSRHLRVLLAEGRLPECWIPPAQVLEYRALLETYHDLRTEHTAWVQRIHAVFFHQGAPRLGEGALRTEAGLAALRAAAAAHLSPAGQLQVATALDMLAALDARMDVVRKRVLDAARHLTGAKVLAARLYGVGPVTALALTCWLAGAGRFSSSRKAVRFAGLDVTVWSSDRKGPPGRLSRQGPPVLRWAVYEAGKTHARASAPDHGYYAAVKDRKNGKRAALSEARKIVRQACHILTELGDDALTAA

SEQ ID NO: 487773 - protein, 318 aa, unidentified
MSTDIFVGLDVAKDTLDVALRPSGEHWSVNNDEPGSTQLVARLRALRPALVVAEATGGFERAAIAALATAGIPVVVANPRQVRDFARATGQLAKTDRLDAAVLALFAERVRPSPRPLPDAAAQLLDALLTRRRQLLEMLVAEKNRLGFAPRPLHASLRQHIHWLERQLDGVTTELARQVERSPLWRAKDDLLQSVPGIGPVVSYTLLGELPELGTLSRQQIAKLVGVAPLARDSGTLRGKRMVWGGRASVRTALYLAALSGRRWNPTLRTFDERLRAAGKPKKVALIACARKLLAILNTMVRNNTRWAVPAPSTQHSC

SEQ ID NO: 487774 - protein, 371 aa, unidentified
MDESSKTLYVGLDVHKDSIAVAYAPEDRGAEVLSLGAIGTRQCDIDKLIRKLQAKGATLVFVYEAGPCGYGLYRYLTGKGLACHVVAPSLIPRKPGDRVKTDRRDAITLARLMRSGDLSSIYVPGIEDEALRDLSRGRDDAMQDLKRSKRRLKSFLLRQDIRYEGRASWNAAHLRWLSEVVCPTPPQQIVFQEYVRAVSEQQERRQRVECELHEAVKGWRLYPVVEAIQALRGVELTGAVILMTELGDLTRFETPRQLMSYLGLTPSEYSSGARRHQGGITKAGNRHARRALVEGAWAYRYPAKVSRHLQLRLEKLPAEVQAISWKAQVRLCRRYRQLTARGKHVNQVVVAIAREMAAFAWAIARIVPLAS

SEQ ID NO: 487775 - protein, 476 aa, unidentified
MSISGKKQSQPKKDRQKKRRKGMCLEDRPILENSAAGVDVGAREMFVAVPPDRDAHPVQVFNTFTEDLHRLADWLVACGVTTVAMESTGVFWIPLYDILEGRGLKPCLVNARHMKNVPGRRTDWHECQWLQYLHSVGLLRGAFRPEADICTVRVLIRHRDELVQIASQHVQHMHKALTQMNLQIHHVISDITGLTGLAIVDAILGGQRDAGELTKLRDPRIKADQETIRKSLVGNWRREHLFTLKQSRELYRTYQQQVVECDHEIDQLLGALEPRVDPSKKPLPPDRKRNRSGKKRRKKYGNVEADFDLRTEAYKLFGVDVTQIPGVETIALPLFSEIGRDLSKWSTAAHFASWLALCPDNDISGGRVLWKGVRKVKNRAGQMFRLAAHSLHRSLTPLGNYLRRMKAKLGPAAATTATAHKIATIFYTLVRNQVEYDESVWAQRDAERDIRLEAKLKRQAKQRGYKLVPIEENPAA

SEQ ID NO: 487776 - protein, 354 aa, unidentified
MAQAKTWAAFDVHVSGVVAATLERDSGELRVQRLPGRSDDVAAFAEGLPGPVRATYEAGPTGFVLARKLEAVGIDCLVCAPGLIPRGASDRVKTDRRDAERLVRLLAAGELHRVAVPSVEEEALRDLVRAREDLRGDLMRARHRLAKLLLRHEVRFEGPQANWTQAHLGWLAGVRLAQPASQRALDDYRGAVSALLIRREQLEAEIARALPASPWAQTARRLMCLRGIDTLTAAGLCAEIGDFQVMSYLGVVPSEHSSGERRRRGPITKSGSQHARRLLIEAAWHYRRPPRVAGNLARRQTHGEPEIVALSWKAQRRLHHVWNRMEQRGKRRTIIAVATARELAGFCWAVATAD

SEQ ID NO: 487777 - protein, 334 aa, unidentified
MLYAAIDIHKRMFQAAVLDVETGETVERRFDATREGLNDWAMPLQGTLTAVAIEATNGWRWVWRELSARGFDVRLVDPAQAKALRGRIKRAKTDRLDARWLCVLLAKEMLPESWLPPAEIQTLRDQTRLRKALAEDRTRWAQRLHALLTHEGWPCRRARLLTVEGRRWVATLSLSPPARSQVERLLRLIEAVEDELRSLETELRRFARSDRRCLALQTIYGVGPILACHLLAELGEAARFRRARQAVRAAGLDPVVDESGDTRRRGRLAKHGAPALRWALVEAAQHAQRVNSPDRVLYTQAATRVGSKRAVLTVARKIGRRAYHVLNELETQAA

SEQ ID NO: 487778 - protein, 332 aa, unidentified
MEHYVGLDVSLKLTAICIVDRTGKIEREGVVASDPEAIAVFIKSHAPHVARIGLETGPTSTWLWTELNKMGLPVICIDARHAKAALKLQINKSDRNDAVGIARIMQCGWYKEVCVKDLDSHAIKALLVSRALLVKIKRDLENQIRGLLKNLGLVIGQAKMNVFSVRAAELAEARPELAAAVEPLLKAREAVGRQIADLDRKVMRLARNDAQVRRFMTAPGVGPITALCFLATIDDPTRFKRSRSVGAYAGLTTRRYASGEIDWTGRISKCGDKMLRSYLYEAANVLLTRVAKWSALKAWGVRLAKRSGLRKAKVAVARKLAVILHRHVDRRH

SEQ ID NO: 487779 - protein, 347 aa, unidentified
MRFDTKSHKFYCGIDLHARTMSVCILNQAGDILLHRDMKASPEPFLQAIAPYREDIVVAVECLFTWYWLADLCAQHGLPFVLGHALYMKAIHGGKAKNDRIDARKIAVLLRGGMIPQAYVYPAEMRATRDLLRRRMHLMRKRAELLTHVQQTNSQYNLPEIGKKLAYKTNRTGVAERFPDPAVQKSIEVDLSLVGHYDHLLRDVELAVLKTAKQHDATTLYLRRTVPGIGEILSLVLLYEIHDIQRFPRVQDFVSYCRLVKCAKESAGECYGTSGAKIGNAYLKWAFSEAAVLFLRTNPAGQKYLARLEKKHGKGKALTVLAHKLARAVYHMLKRETAFDMPRFLQS

SEQ ID NO: 487780 - protein, 489 aa, unidentified
MAKTKRKQSTFERLRRGEMNRKQRRNLARRLAGNDPGLTIIHSNAGGIDVGNESHFVAVPPDRDENPVQEFGCWTADLKRMAEWLKACRIDTVAMQATGVYSIPLYDILTGHGIQVVLVNAQHTKNVPGRKSDVQECQWLMKLHTYGLLRDSFHLEERMEGVRTIWRLRDRHVKDASRAVQHMQKALTKMNIQLANVISDITGVSGQAIIAAILEGERDPWKLAGLKHEMVKASREEVARSLEGNWRDDLLFELRQAVNSYHFVHQQMRACDQRLESFLASLPTKILERPPQPEGAPAATAKKAKKPRKPKKARRNQPTVDLTTALKRICGVDLTSIDGIDVVTAQTIVSEIGTDISQFKTEDHFASWLGLTPAKDITGGKIIGSGRRKVQNRVAGALRMAATTLLESKSYLGARYRHLRQRLPSYAAAIKAMARYLAVLVYRVLTHGEAWVDRGAAKFEQNRSERELRSLTSKALAKGFKLVPIPVTS

SEQ ID NO: 487781 - protein, 350 aa, unidentified
MMIIGCDFHPRYQQIAMMDTETGELTERRLEHENGEAQAFYASLAKPARVGMEATGYGQWFERMLAEQGHELWIGHASEIRAGVVRKQKTDARDAAHLLRLLVEKRFPRIWIPSPAERDARQLLRHRHKLVCFRVSVKNQLHGLAMSQGICRKKKLFTAKGREELEKLSLGPWASRRRQELFGMLDRFNPVIDELDRAVQQQAENHADAARLMTQPGVGPVTALAFVLTLGPVARFPRGQHVVSYLGLNPKERSSGDKQHTYSISKQGNTMMRWLLVEAAQTAVRYDPELLRLYQRLKFRRGASVAKVAVARKLAVKLYWMLRATASVAQRAPMQGSSGGTLIPHVGSKF

SEQ ID NO: 487782 - protein, 313 aa, unidentified
MSAVCIGIDVSKAQLDVAQRPEEQRQVFAQTPVGIESLVAHVRALNPAAIVLEATGGLEVPVASALAVAGLPVAVVNPRQVRDFAKATVRLAKTDAIDAHVLARFAEAVRPAPRQLPDAATHEFSALLSRRRQLIEMRVAEHNRLGTATPRIQQQIRKHLSWLDRQVAALEEELGQRIKSTPIWRERDHLLQSVPGVGPTLSRTLVAELPELGTLTRHQIAALVGVAPLNRDSGTLRGHRTTWGGRAVVRAALYMGTLAAVRWNPVLKAFYQRLRAAGKAPKVAVVACMRKLLTILNAMLKHRTPWRSVVQGT

SEQ ID NO: 487783 - protein, 350 aa, unidentified
MQTIYIGVDFHARQQTICYLTTDSGEILLQQLKHQDKAALRAFYAQFSGHVIVGLEASGYSPWFERLLEELGCEVWLGHATEIRRRARWRHKNDRRDAELILDLMLHDEFPRLYLPPLQSREVLRMLRYRQKLIKLRTIGKNSLQALALQSGLAKGPHLFTKAGLQELRTAAMSPAMQWQREQWLQLLAPLNQRLLETMLWLKQQSQADQRINRLRTHPGVGLLTALCLVHSLEPVSRFANTRKVTAYAGLDPLERSSAERQRFLGISKGGSRVLRFLLVEAAHTAIRKDAALRRFYQRLAARHGRPKAKVAVSRKLLIRAYIMLRDEIDYAEFQRRAVAARPAPPAHGH

SEQ ID NO: 487784 - protein, 357 aa, unidentified
MRRPKAKSNDKLIAGIDLHGNNLVIGVINQDGTRLMHRKLDCRLEQVEEFLRPLKLRLQSMAVESTFNWYWLVDGLRAQGYPIDLANPAKIEQYSGLKHADDKDDAFHLADLQRLNILPKAHVYDPELRPVRDLLRRRTNLVHQHTALLLSLQSLYARTTGQRLDLGEAKKMEPKQAPKLYEHPANQLIAQVQVEHIGALAKSIHRIEKAVLDCAREIPLYEKLLTVPGVGRILGMTITMEVGDISRFKTAGDFASYCRMVDAKRLSNGKCKADNNRKCGNKYLAWAFVEAANFARRYDESCRRWYDRKAAKAGKIVATKALGCKLAKAAWHVMAKQCNYDEKRMFPEWAAKTMNPS

SEQ ID NO: 487785 - protein, 315 aa, unidentified
MDNSTTIPSGFIGCDVGKTEIVVFDSQTGRTTKIPNKSSPLTAFAEAIDPNALVICEATGGYEADLLAALVMAGRAAHRADARKVKAFIRSFGTLGKTDQIDARALARYGAERHSHLPRWQPRDQQRDKLSRLVAARRTFVDQRVACRNRIQAPGHSTVADRDARIIKALNEEIAGLDADIAALIAQCQPLAKTVKVLRTIPGIGPTTAAVLVALMPELGTLRRRQAASLAGLAPHPRQSGANDHYRSTKGGRPDIKPAIFMAALTATKHDPSLRKFYNHLKDSGKKPIVALVAVMRKIIVIANARIRDANAQLS

SEQ ID NO: 487786 - protein, 354 aa, unidentified
MKHQAIQYLALDVHQSTVVATLRDAEGDIVLRATVATNARAILALIRSAGARVHVAFEEGTQAQWLHDLITPHVERVVVCNTRGGEGHGNKSDRIDADRLSEQLRLGSLRSVFHGAKSVLTLKELVRNYSTLVEDSTRVMLRIKAMFRGRGILTPGVSVYRASHREEWLTQLEGGARVRATSLLAQLDVLLELRPKAKTAMIAEARRQPGWKVLRSIPFLGPIRVALILAIVGTPFRFRTKRNLWRYVGLAVVTRSSSDQEFHDGKLRRRQKTALTRGLNRNHNPLLKSVFKGAANAATGRPGPLRDFYEASRARGVRDELAKVTLARKIVSLTLRLWKKGELWDPKKLTMQAT

SEQ ID NO: 487787 - protein, 332 aa, unidentified
MNLVSTLGIDLAKSSFSLHGVNLNGAVVLRRTLSRAKLNELVAQLPPCLIGMEACSGAHEWARRFAVAGHTVKLMAAKFVTPYRKSGKNDGNDAEAICEAVSRPNMRFVPVKSLEQQSDLTLHRVRQGFVEERTATLNRLRGLLAEFGHVLPLRAVEVHRRVPQLLGKLPIRVANCARDLLEHAARLQAKTLEYEHEIRVHVRSNVLAQRAQTRLGIGPITASALVATVGNGHDFKNGRQFAAWLGLVPRQYSTGGKTRLGHITKRGDPYLRTLLVMGARSVLQRAASLTDPLSQWALAVRERRGYHRACIAIAAKNARVAWALLAKDPIAA

SEQ ID NO: 487788 - protein, 345 aa, unidentified
MKFYTRQHSYYCGIDLHARSMYVCIIDQSGKTLVHKNIKTDPDSLLKIIKPYISEIVLAVECIFTWYWISDFCAEYDIPFVLGHALYMKAIHGAKTKNDRIDSLKIASLLRAGMIPMAYVYPAKMRATRDLLRRRMFFKRKRSELLAHIENTRHQYLIPEFKKKIAYKKHRTGISERFPNESTQKSVQTDLDLLTVYDKKIQELEFFITRHAKEHNPNDHYLLQTVPGIGMVMSLVILYEIHDINRFPTVQDFASYARLIKPKKESAGKTYSGGNGKIGNAYLKWAFSEAAILFIRESDQVKDYHRSLKNKHGRAKALAILSHRLGRAVYYMLKNKQAFDMKRFI

SEQ ID NO: 487789 - protein, 422 aa, unidentified
MKKIETKKLKFVNDKTLIATVDIGKGLNMGYARCPDHSEVKPFEFANNRAGFDKFWDCLEKARDAKSLDSIVVGFESTGAYGEPLQHFLKNNPVRLVQVNPMHTKRVKELQGNSPNKTDRKDPKIIADIIELGHSLTVVIPEGAAAELRRLTFARERANKRCTALYNQLQDLIFISFPEFSQVIKDVKTKTARYLLQTYPDPQDIIALGLENLGTVVKRVSRGKMKPAKAKGLFEAARTSAGITEGRFSVALEIQATLAAITSSDDFVSRLEEEMSRHLEDIPYSHLLLSMKGIGRVTVAGLIGEVGDFNSFDTQRELLKHAGFDLFEISSGKLRGSRRISKRGRPLLRKLLFFAALNTVRKGGVMHGHYQRHLKKGMKKIKALVAIARKLLGIIFALVRTKQEYQEDYQKIQAAATMPMAA

SEQ ID NO: 487790 - protein, 345 aa, unidentified
MSEFYEGRQFVGMDLHRRRSVLVRMSETGEHLETVRILNDRDVLAEVMSRAGESPEAVLEATYGWYWAADALAELGATVHLAHPLGVKAFSYRRVKNDQRDAADLADLLRMGRLPHAWIAPPETRELRELVRHRAKLVAMRSQCKAHVHAVLAKGGIWVPMTDLFGVEGNLLLDKVTMPAPYKERIASLRRFIEAFDAEIDLFTGLAQRRLTHDAGYIAIQQIPGIGPVLAAVFVAEIGDVHRFPGPAQLTCWAGLTPSHHESDTTVRRGRITKQGSRLVRWAAIESVKILPDTSRIGAIREQVAHRRGNRNIGAVAAARRQLELVFYGLRDHHIRALHHPPRAA

SEQ ID NO: 487791 - protein, 456 aa, unidentified
MSKQSKSTIPAVHAKPTQRKHAAGIDIGATSIYVAVPVDRDPQPVRSFQTFTEDLHRLADWLQRCRIKTVAMESTGVFWVPLFQILEQRGFEVCLVNAHHVKNVPGRKTDVADCQWLQYLHSVGLLQASFRPAQQVCALRSLLRHRDSLVQTASTYAQRIQKALDQMNLQLHHVISDITGVSGITILDAILDGERDPFKLASLRDYRIKATEETVAKSLVGDYRPEHLFTLRQSLDAWRYHRKLVAECDDEVQRHLVQFASKVDPKQKPLPRPKKVSSSKVYSSHPDYDLRTEHYRILGVDLTEVPGINTLLVHTLLAEVGPDLSKFRSAAAFASWLGLCPDNRISGGKILSVRTRHVQNRAALALRIAAHTLHHNQSVLGHFYRRMRAKLGAPKAITATAHKLARILYHLITTGQPYQESIFEERETQHQQRTLFSLHARARALGYQLIPATPPT

SEQ ID NO: 487792 - protein, 366 aa, unidentified
MGFWLAPAPGIMERRTAMQHYAGIDVSLELLSVCIVDAKGKIVKEAKVGSDPDTLVAFLRGLDLAIERIGLEAGPLSQWLHAGLTSAGFEAVLLETRHVKAALSAMTVKTDRKDARGIAQLIRMGWFRAVHCKSAGSQEVRALLVARKLLLSKLLDVEFSIRGILRGFGLKMGMVTRKRFEARVRELYADHAMLEQICSAMLTARSALQTEYAKLHKALLVIVREDEVCRRLMTTPGVGPLVAITFKTGVDDPSRIHKSKAVGALFGLTPKKYQSGETDVTGGITRAGDEMVRTALYEAASVLLSRVTRFSALKRWGMDVAKRRGTKRAKVALARKIGVILHRMWVDMTSFRWTKGAPTTMRLARV

SEQ ID NO: 487793 - protein, 415 aa, unidentified
MALKIVYKICCGIDVHKTFVVACVASTSDKGITSYESHRFSTYTSGLKTLLQWLIDRNCKDVCMESTSKYWIPVYNILEKGCSIVLAHPKYVKAIRGKKTDKKDAKWIADLFKHDLVAGSFMPPADIRQLRDLMRYRFKLTCFKSSEKNRLQNCLTVSNIQLGNVVSDTFGKSAQAILDKLLENPADTSFDLEPLVYKSLKKKLPELRDAIDGYITPEQAGKLKVIKAHYENLESRKAELEELILALTAPYQQELTILQTAPGISSPFTAIGIISEIGTNMEAFPSAKHLCSWAGLTPTNNESAGKKKSVRVSKAGCYIKPLLVQCANAVVKSTKHPEMRNRYLRLKKRRGHKKAIIAIARMLLTALYHMLKNGENYNAELYQKSDLLPVDREITVEQALMIARNQGYKIKSATA

SEQ ID NO: 487794 - protein, 309 aa, unidentified
MAKEIIAVDVSKKKLDIYYEVDDFFESIDNSEESILVWMQKLKLKTKALVIFEATAGYERLLADLLLEEKIQCVKCSGKRVRDFSKSQGQAKTDKLDAKMIAAYAKSSKLQLYKGLDEDHSKLKELSTRRRQLLDLINQEGNRQGYRYKTMAESSIESVLACLHDELENIEGAIDDLINESKSISEKIDILTSIPGVGRICAMTILSELPELGELGKAEVANLGGLAPQNYDSGQSRGHRFVNRSRSAIKKVLYMSAMSARTNNQKIRQFFERLKKKGKSGKLALVACMRKLLIYMNYMIKNKQSWSPN

SEQ ID NO: 487795 - protein, 360 aa, unidentified
MSTITIGVDLAKQVFSVCLVDAAGRVRERRDLRREAFIRWLPSVPAGTTVAMEACSGAHHWARRCQDYGLIPRLMAAQFVAPFRKSRATKNDRNDAEAIATAARQGNMRFVPVKSVDQQARLSWHRVREGYKTEALTTSNRLRGLLAEFGVVVAQSDAALRRTLADLDALALPCSLVTLLRDADSQWKQLQARIIEADRQIQTHAKADEACTRLRAIIGVGPITADAVVATIGSAQSFANGRQFAAWLGLVPMQHSSGGHTRLGRISCRGDGYLRTLLIQGARSTLQRAKAVSWEKATAEQRWIQDLERRLPFGKVLVAIANKHARQLWAMLARGEHYDAEAWLKHPMVQRPASRREATP

SEQ ID NO: 487796 - protein, 350 aa, unidentified
MNYIGVDCHISTLDFAVVNERGTTTKRAKVNTGVKEFIGFVKRVPKPREIYIEEGELAGWLLETSLKFGEQLIVTDPKINKWIGKAGQKDDTIDAEKLAQLARGKYIKAIYHPVNKRRRFKELVYAYHDTVKSQARIKNKIKANFRKYGIRCSGATVYSDKHRFQWREKLSENNTTRLIVEELWVQLDQLRDSKERLKRNIKIQSRRYPEIKRFIQIPGIGLINAATISAIIETPHRFANKKKLWMYAGVGLMERSSGEKVYSRKLTREYNRPLKNAIKQSVEAAISARDNQFRRQYLRLTMEKGIASHKAKLTVARSMLAAMYGMWKKGDAYDPEIDKRRNGDKKQARA

SEQ ID NO: 487797 - protein, 405 aa, unidentified
MPYILALDVSMGHSYSVLYKDDTCLFEDEIEHTQRGFHALLEEIQHLPERPLIVFEATGIYSRPVEKFFQDHHFSYCLLNPLEAKKQMEESTLRSWKTDKSDAHRLAQTHLKNQRQPKEVQSNFYLEMRDLARFYQEIEKKITRLRMDLHNCLQLTFPELEQFFLNRLTPYALILIRLFPHPDFVLASTRTKIKNKLINETRKKISANRAEQKADQIIHYAQCAYPAVEKDSIHCQKTIYYAELLQDLLEQKEALATQMIKKAEGSPCFLLYQTFPGIGALTAALLLGELGDITRFKTHKQLNAFVGIDIRRYHSGKYTGQDRINKRGNPKARKIIFFTIRNMIRQQRAAPNHIVDYYYKLKKQPIPKKDKVATVACMNKLLKCMHAMVRAHTEYDYAYAVSVDH

SEQ ID NO: 487798 - protein, 349 aa, unidentified
MLAEQVDYVIGVDTHRDQHTLAVVAAPTGAVVAQTAVRTDARGYRRALRFAGRHAPGARVWAVEGAGHYGAAFSRCLAQRSETVLEVSRSLRSERRLRGKNDPLDAVRAARTALAAETLTLPRAGERQEALRVLLLARRSAVDVRRLALVQLRSVIVTAPEALRDELRHLPAGQLLRRCSRFRRSDSRTPDELAIVLVLRSLARRILAATEEANELEREILEHVRASVPELLDEAGVGPIVAAQLIVTWSHPGRIHSEAAFARLAGVAPLPASSGQTIRHRLSRGGDRQLNRALHTVVLHRRQHDPKTRDYIARRIAEGKTTREATRMLKRYLARHLYRVMQNTSPAMT

SEQ ID NO: 487799 - protein, 339 aa, unidentified
MQVTTIGLDLAKNVFQVHGITQDDEVAFNRPLRRAQLLPFFSKIEPCLIGMEACSSAHHWARELTKFGHDVRLIPPIYVKPYVKRGKSDAIDAEAICEAVTRPTMRFVAIKTVEQQSLLSVHRARSLLVRQRTQLINGLRGMVAEFGVYIARGLARVIGFAEDILAGEVLDLPDIANEVIHNLCEHLMALHARVRWYEDRLKQVAKEDARVRLLRTIPGVGAVTASAIIASIGDGHQFRNGREFAAWLGLTPANKSSGGKEKLGRITKMGDQYIRSLLVVGMTSLVRQTKSHPERASKWLTSLLERKPARVATVAMANKTARIVWAVLTRNEPYTPHTA

SEQ ID NO: 487800 - protein, 341 aa, unidentified
MMSNVMTVGLDIAKSVFQVHGVDAVGEVSVRRKLTRGRVLAFFESLPRCLVGIEACSSSHYWARELIARGHDVRLLPAQYVKPYLKRQKNDAADAEAICEAVTRPTMRFVPVKSPDQQSVMMLHRVRLMLNRQRTQISNALRSHLSEFGVVAPIGRNGIEQLLVVINDENDARIPADARLCLRMLEAQLKVVKEQILENDRRVRASARGTELGRRLMEIPGVGPLLASAFVATVADAHAFKSGRSLSAWIGLVPKQNSSGGKERLGSISKAGNRYLRQLLVVGAMAVIRYAERNGTRRPWLVQLMARRTTKVAAVALANKTARMVWALMTNGERYREPLIA

SEQ ID NO: 487801 - protein, 410 aa, unidentified
MEVVHAHCAGLDVHKDTVVACVRHMTDGKVTTTIKTFNTATQELLALSDWLSAENATHIAMEATGVYWKPVWNILSDGEFELVLCNAAHIKNVPGRKTDVKDAAWLADLMAHGLVSGSFVPDQTTQEMRDLLRTRKQLVRERTSHTQRIQKTLECANIKLDSVVSNVVGVSGRRMLEALIAGQTDPKELAAMAHGRLQATPAELEAALRGRVTAHHRFMLRLHLDQIDSFDEAIARIDKEVKDNDKNFRAAVELLKSVPGVGSLAAEVIVSEIGIEMTRFATASNLVSWAGLCPKNDESAGKRRSNRLKAGAPWLKTTLVQCAWAAARSKGTYLHAQYVRIRARRGNQKAICAVAASILTTVYHMLKDGTFYEDPGPDYFDKRNKDQQANKLVNRLQNLGFNVTIQPAAA

SEQ ID NO: 487802 - protein, 334 aa, unidentified
MNNGVLYVGVDVHEKESQLAVLEKEGALISEERIPTKDLRRFISSLPGEKRVAIESVGFIHPIYKKLSSIDDCTVSVANPNKLRLISGSSTKNDRNDARILGDLLRTNYLPLAHMRDEETREKLFVVNDRVAYGLRRGELRGTIRWLLKRRGIEVEKPFSEEGRKKLRELRLQEIETRLGELELVESTVERLDDQIRDIVSKDGRAKLLDTIPGVAPYTALFLACVLDDIDRFPDSKHACAYLGLVPWLDETADTTRLGHITKKGDKWLRRNLVECARVAVRKDPHLNEFYSRLSRKRGERKALIAVARKLVSYAYWILKRNVTYEGLHPWNDP

SEQ ID NO: 487803 - protein, 317 aa, unidentified
MERRQSSTKAAGIDVGKRGLDIAVHGLEDELRVENGPAGFSELIAWLKAREVGRVGLEATGGYERGVRAALEKAGFEVVVHQPLEVRRFAQLKRWRAKNDRLDARLIAAATAQIEAVKAAQDPRLIELAERLTAYEQVTDQIVELKTFLESVTLKDLISLIRAQIRGLAKTKARLSLDLLRRIKAETDLLARFRLLTSLPGVGTIVAASLVIRMPELGQMRRGQAASLIGVAPFDRDSGQWKGQRFISGGRTRPRRMLYLAAVTAKRFDPTLKAFAQGLIARGKPAKLVTVAVMRKLIEAANLILQRGQPWLKQPAT

SEQ ID NO: 487804 - protein, 411 aa, unidentified
MEVVYACCAGLDVHKATVVACVRVPGPRPGERRGETKTFATTTGGLAELGDWLRGHGVTEVAMESTGVYWRPVYAGLETRVRVMLVNARHVKMVPGRKTDVRDCEWLAQLLECGLLRASFVPPRAVRDLRDLTRLRKALIRERGHHVKRIEKTLELAQIKLGCVVTDLMGKTGRAILPALSTGIDDPDQLADYAQGLLRKKRAALREALAGRLTPHYAFLLQQHLALIDTLDAHIATLDARIDEAMRPFADAAALVQTMPGVAIRAAPAILAETGMDMVAFPTSAHFASWAGLCPGNHESAGKRQPVSTGQGATWLRATRQESAWAAIRTKKSYYRALYHRLKGRGGAKKAVVAVQHAMLIALWPMLKHRVPHADLGADYFDRRNTERARRHHVRRLERLGYNVVLVESVA

SEQ ID NO: 487805 - protein, 461 aa, unidentified
MPDGGGENSSTRRKKQIEGLPVVLHNVAGIDLGSERHWVCAPVAGGILREVADFGATTPELIRMAKWLQACGVKSVAMESTGVYWIAPHEVLEAAGLEVLLVDTRQLARVPGRDKKTDPTDCEWIQRLHSCGLLRGSFRPREEVCMLRTLVRDKANLVAECGDWLRRMQKSLDQMNVRVHRAVSDIDGVTGMAILRAIAEGERDARKLAKLRDTRCHKSEEEIAEQLSGHWREDHLFSLRQALKMYDAIQQRLADYDREILQRLAAMQREELRQQPPPPVKNPQKAKNMKKRGEGPMREALFRMSGVDLTGIDAIGVETVQVVLSEYGPDLSRFPTEKQFVSHVTLIPHKPMSGGKPVRKKRRSSASTRVAAALRMAAVTLRNSATALGAYYRKMARRLGGDVAVFATARKLATLIYRLLRWGQPYVDEGVEAFERRYQETRLKNLKAKVKELGYELVASN

SEQ ID NO: 487806 - protein, 322 aa, unidentified
MTQETRFVGLDVGKLEIYAFDAGRDAEIIVTNTGSGHLALADWLGDPNDIVIALESTGGYEWMVWQNLNDAGFDARQVSAAHVRSFSRASGALAKTDPIDARLIARFIAFRPTAGRKPPAYKVREIHRLNVKRRQLVEMRKRLRCQVKQRHSPQLDEMDTDLLDLLTQQIADLEGLIETAISSCQELSNRAKILRTIPGIGPVLMANLIGDLPELGHCSDKQIAALAGLAPINNDSGKMAGKRAIKGGRYAIRGLFYQAALVASNHNPVLRIFAKRLREKGKPHKVVLIAVARKLLIIANVLVAKKCGLGAKLNTVATGCRR

SEQ ID NO: 487807 - protein, 374 aa, unidentified
MRDHSEAFVAIDTSKLRNAVAIAEGGRTGEVRFLGEIDNTPAATAKLVRKLAGQYERVAFCYEAGPTGYGLYRQITGLGHACIVVAPSLIPKRAGDRVKTNRRDALAMVTQFRAGELTAVWVPDPRHEAMRDLTRARGAAVEDLRRKRQQVSAFLLRLGRHYAGDKTWTKAHMSWLASQKLEHAEQRIAFEEMLLAVRQAHERVARLETAIRAAVPDWSLAEAVQALMAMRGIDMVSATAFLAEIGDLSRFQTPRELMAYLGLVPSEHSTGETVKRGPITKAGNRRARRTLVECAWSYRHPPRVGKKKQDKVAAAPRAVREIAWKAQNRLYGRYRALIRRGKLKTVVVTAIARELAGFIWAIHREIAPAQAAAR

SEQ ID NO: 487808 - protein, 344 aa, unidentified
MTQYKRIGIDTSKAVFTLHGIDQQDRPVLRINLRRPQLLAFFRKLPPTEVAMEACGSAHHWARELTALGHDVCLVPPQYVKPYVKRGKNDRNDAEAICEAAGRPGMHFVPVKSVTQQAQGMVLKVRETLVGQRTQMTNTLRGHAAGFGVIAGKGLRQIGPLLTAIEQETTIPAEARDMAALLGQEIEHLDRRIKEIDVKLAAAHKANEVSQRLATIPGVGPVTALTLAIEVDPAAFESGRHLAAWAGLTPKEHSTGGKQRMGGISRAGHERLRVLLVTGATSVIKAAMRPGSALMTDWSRAVLQRKPRKVVAVALANKMARVAWALMTRGDVYRRPAAAGAAAA

SEQ ID NO: 487809 - protein, 353 aa, unidentified
MEYIAFDAHKHYTLASVARPDGQLVREQRLPHERGALQQFLARCERGSPVAVETIGNWYWIVDEIEAAGCVPKLVHARKAKLMMGEINKTDKLDVRGLNHLQRNGTLPTVWIPPGELRDQRDLPRTRMVLVRQRTQLKNRIHATLAKYALHHLDVSDLFGVRGRALHRQRLQLLPPCTAYATQQLLEQVENLDRQVRGFEHQMQTVFRPTPTIQLLLTLPGVGLMLAVVIALEVGSIARFATAEKLAAYAGTTPRVHASGGKTRFGPTRPDVNRYLKWAFVEAANAVCLNRSRTPRRHVSRLYERVARRKGHQKAIGAVARHLAEATYWMLTKQETYREPNVAAVSSTGDKRG

SEQ ID NO: 487810 - protein, 406 aa, unidentified
MKQIVSVGIDVSKGKSTVCAMIHPNTIIKESFEVLHTVEEMSMLADYIGSLDGEIRIVMESTGHYHLPVAQFLYQKGFFICVENAYIIRQFSRIMLHGAKTDPLDAKKLAKYGLAYWSELKPYKFHPSCYTELSLLSKQYQTYIKLLIAAKQNVIHLMDEMLPGFKEALDTASSVQFSKVKYVDFAKEFYHVDMIKSMGKEIFRENYKQWCKEKGYRFQSEKADELFHLAEDGIPTLPTEFPSTRLCMEVATEQVSQLGYALEQILSQMQNLAKTLPEYQTIRQMGGMGEKLCVRFIADIGDVRRFHNGKALVAYAGIDAPPYQSGQYTGTKRRISKRGNSALRKTGYEVMKSLKSHPPKTDTRVYDFIIKKENEGKNRKQAKIAGLNKFLQIYYARVMEIYKNIA

SEQ ID NO: 487811 - protein, 432 aa, unidentified
MKVSEKVIEINANHILNIGIDVASRKLDVYFECPLKLNRQQVYRDLIPNRSKSIAEALINYRTLAEEKGYRNIRIVCEPTGPYSINLLSVAQSLNCLTAYANPESVHKSKVIETNESGKTDPIDAEVINSLALRNKTLIHRTYSKEYASLRVLNSHYEDLDKSYCSARNQVHSTLKHLFPDCSLTSDSLYSKSGQALFECYAFNPWRITDKSFAHFSNKMKSKVKGIRRTTIQKVWDDAVATCEYNSSDVASSLEACLKDHYEDFLCSKDRKDRLKKQMTAILKEIRIEDENIPKSKTNFVSDFHIARLLAETGPLSDFKTQNELLNYVGMNLRERQSGNFRGRTKISKKGRALARKVLSLIILPLIKKEGLYGPAYHGSKERTGKPGTLLMTNFMRKFLKSFLGIYKSESAFDENRLFIDAGGYNKLFKSA

SEQ ID NO: 487812 - protein, 369 aa, unidentified
MVKKSSKLFVGMDVHKDSIDVATGDEGGGEVRHYGAVGGDLAAVSRLIRKLEATGKALVFVYEAGPCGFGIYRLLRRRGHECWVVSPGLTPRSNADRVKTDRRDCLKLCRLARAGELSAIYIPDEADEAMRDLVRAREDAVGMQRQGRQRLGALLLRNDIRYSKKIAWSAAHRRWIAELKLPHHAQHIAFEEYVQAVDEAGKRVERLEAAIREELPQWRWQPVVEALQAFRGIRAIHAVRLVAELGDLSRFASARHLMGYLGLVPSENSTGNRRRQGAITKTGNSSARRALVEAAWAYRYGARVSVGIARRQSDLSKAITDLAWKAQLRLCARYRRLSARGLPRNKIIVAIARELSGFVWALGQQVKPN

SEQ ID NO: 487813 - protein, 370 aa, unidentified
MKNRLLYVGLDVHKNTTDVAIASGRSNGKVRSYGKIVSTLDALNKLIKKLQDGDKELRFVYEAGPCGYQIYRYLNTKGIHCCVVAPSMIPRRSGDRIKTDRRDAINLVRLFRAGELTSIYVPTPEDEAIRDLIRCRDDMKRFERKARQRLLSFLLRHGYQYSGKSNWTKGFYNWLATVRFSHPAQQVTLQEYIDLTNECSERIQRITQQIQVHVEEWSRAPFVKAYQAMRGVSLIVSTTVAAEIGDMRRFQNPKQLMAYLGLIPSEHSSGRTVRRGPITKTGNSHVRRVLIEAAWTYKMQARVSNILLKRQKGLPKSICDISWKAQTRLCARYRRLYARGKSRQTVITAIARELSAFIWAIDKEVQLAVS

SEQ ID NO: 487814 - protein, 405 aa, unidentified
MFDTEDVGVFLGLDVGKSAHHGHGLTPAGKKVFDKQLPNSEPKLRAVFDKLTAKFGTVLVIVDQPASIGALPLTVARDAGCQAAYLPGLAMRRIADLYPGEAKTDAKDAAVIADAARTMPHTLRSLELTDEITAELTVLVGFDQDLAAEATRTSNRIRGLLTQFHPSLERVLGPRLDHPAVTWLLERYGSPAALRKAGRRRLVEVIRPKAPRMATRLIDDVFTALDEQTVVVPGTGTLDIAIPTLAASLATVHTQRRALEAQINALLEAHPLSPVLTSMPGVGVRTAAVLLVTVGDGTSFPSAAHLASYAGLAPTTRSSGTSIHGEHAPRGGNRQLKRAMFLSAFACMNADPASRTYYDKQRARGKTHTQALLRLARQRISVLFAMLRDGTFYESRTPPDVALAA

SEQ ID NO: 487815 - protein, 402 aa, unidentified
MERNPTRFVGLDIHKEYFVAVGVNSERRVIFGPHRVSNYQLDEWILRHLTHEDAIVLEMTTNAYLFYDSLLPHVHSVIVVHPAHVALVTQVDVKTDKKAALALAELHSAGLLTGVWIPPHKVRDLRSLIAQREKMVRLSTIAKNRLHAVLHRKHLIIGENSFSPEERSWWESLPLSETEKLLVGSDLDTLEFAQRQANCIEANLKQESIQDERIPFLIQLPGIAWLTAMTILAAIGDISRFETAKKLVGYAGLGTRVHDSGMTHNSGRITKSGRKDLRQAIVNAANHAVQNHPHWKQVMAKLEPHLGRSKAIVAIARKLLVAVWHVLSEKVADRFADPQKVASSFLHLAYQVGARNLPNRISALAFTREQLDHLGVGEDLQQIDWGSRPLRLPPSQRLIEKE

SEQ ID NO: 487816 - protein, 316 aa, unidentified
MIVIGVDPHKSTHTATALDPATNSDVGSVRIEASLAEYQRLISWAKAWPDRTWAIENADGLGHHLALWLLARGEVVLDIPTTATARVRELSRGGRRKNDRIDAAAAASVAALQGDAREVYAETTADSLALLDERRVNLSHSRTRTVNQLHALLRDLMAGGAPTSLSPASATAALRGFRPRTGPDRTRVALAKELIADVRRFDEQLAANAKTVTVLLDEHGTRLREVDGVGPVLAARLLGRSGSPKRFASAAAYANYTGTAPVQIASADSSQHRLSRYGDRQLNSAIYTVAMIQIRMPASAGRAYYDTKIAEGKSPR

SEQ ID NO: 487817 - protein, 409 aa, unidentified
MKLFVGIDVSSRDLQCCLMDSNGDTLKLFAAENNLNGATHLRDQILTVADKLSCQEVHIGMESTSVYSWHPGIFLNEDEQLRELGAKVYIINPKLIKKFKEAYTDLDKTDNIDAWVIADRLRFGRIPPTIVMEKQYIALQRLTRMRYRLTQNLTREKQHFLQNLFYKCNAFSTEVESSVFGNAIMNLFLEKYSLDEIASMDTAELADYLQRRGKNRFRAPEEVAACIQKAARLSYRLSKCVEDSVDIVLATAIESIRTFTAQIKQLDKAIARIIDGIPNTLSTIPGIGPVFTAGILAEIGDIHRFKDQAAFAKYAGLAWSRYQSGKFEADETNLIRSGNRYLRFYLVEAANSVMRNEPEFRSYYLKKYHEVPKHQHKRALVLTARKLVRLIDALLRKDQIYTPRRKVGN

SEQ ID NO: 487818 - protein, 346 aa, unidentified
MEHYAGIDVSLELSSVCVVDAQGKIVKETKVSSEPEALVSFFKGLGFPMKRIGLEAGPLSQWLHAGLAQAGFETVLLETRHVKAALSAMTVKTDRKDARGIAQLLRMGWFRAVHAKSIGSQEVRALLVARKQLLGRLIDVELSIRGILRGFGLKVGPVTRKEFEARIRELVMGQATLERIADAMLSARAALKAEYEKLHKAVLAIVREDAVCRRLMTVPSVGPLVAITYKSAMDDPNRIVKSKAAGALFGLTPKKYQSGEKDVTGGITRTGDEMVRTALYEAANVLLSRITRFSKLKRWGMDVAKRRGSKRAKVALARKIAVILHRMWVDGTTYRWAAAEPIATQA

SEQ ID NO: 487819 - protein, 343 aa, unidentified
MYDIGLDVHKRTISYCVKDVAGHVHREGKIGSTRRELDAWIKTLPQPRTIAMEATIFTGWIYDHLLPYAERVKVAHPLMLRAIAAAKKKNDRIDASKIADCLRCDFLPECHMATTEIRDRRRTLRYRNLVLRQMVQMKNRVSGLLMESGVSYDKQRLHKMGYFSELFSTNEEISESIRPLLRLGREHIQRAQRLDRALISSLERDPLLSERLRRLRTIPGVGPITALTWALEIGDYTRFQSVKQAVSYCGLCSAEKSSADKVIRMPISKQRNKHIQHVLVEAAKMAPRYSHELALLREKEIQCGNKNRATLAVARKMVAYMLAVERRQQDFVPAEEFAGKAAA

SEQ ID NO: 487820 - protein, 387 aa, unidentified
MPQPNDLSRSLVALDQDSTIIAVVEMSQSSWLVGGVLPGIERQPRKKLEPSAERLLGLLHRWRDEAVRAGKKITRIALAFEAGRDGFWLARWLSARGVEAHVIHPSSVAVSREHRRAKTDRLDTELLKRGFLGWLRGERGHCTMARVPTMAEEDAKRPNRERECLVGERTRIVNRIKSTLARLGIRNFKPTLRKAAERLAAVHTPEGMPLPPNVSAELQRDMGRLHFVISQIKEIENARQKRLEKEPESGPHAMVRLLVRVVGVGIETADMLVHEVLSRPMRDRKAVARYAGLTGAPDESGAKRREQGLAKAGNARVRRGMIQLAWRFLFFQKGSALARWYQARTADSRAGTRKTMIVALARKLLIALWRFVTTGETLEGVIMRPAG

SEQ ID NO: 487821 - protein, 380 aa, unidentified
MNYLVGIDIGKNSHFFSVVDNSSGEILVNPVSFKNNKEGFDYFINSLASYPKDEILIGMEDTGHYHFPILKFLLDLHFHVALINPVTTDLTRKLDGSITKNDMLDTLTICDVLASPRRKKNYRITTVDSFDLYEQKQLTRHHHNLKEELNVYCNRLQKSIDLVFPEFNSLFRSKYGSVYMNVLKTFGSAKKIAETDIRTIRKCFDIKGRGRRISLTPEKLKEAAKNSIGMPYLAEEIQIRHLVCQIELINEQIDEIDKKIEEFSIQNNSPIISIPGIAHFSGTSIIAELGDINKYSRPSQIVKRAGVAPYHYESSQFNAEHTAITKKGSKYLRKTLYQVITPVIKFNKVFKDYYDLKRSQGKSHRCAQGHCVRKLLRVIC

SEQ ID NO: 487822 - protein, 432 aa, unidentified
MEASSIEYVAYIGLDWADREHAWCLQVAGQSNREKGVVAQTPEAIEQWAAVIAQRFAGRPVAVALEQSRGALLFALTKYEHLILFPIHPARLAHYRKSFRPSGAKDDPTDAELLLDYLSRHGDQLRPLQPDLEETRSLPFLVEARRRIVDDKTRLKNRLTAILKQYYPQILSWFTDVDSAVVIDLLDRWPTLQDLQKVRRSCLDRFFQQHRCGTQNLEQRWQEIHSAVLATKDCAVLKCLSLNAKCLVRQLREIKASVDAYEQTIHELAQKHPDCDLFKSFPGVGEALAPRLIAAFGSQRERWADASELQRYSGIAPVLETSGRQHWVHIRWACPKFVRQTFHEWALHSLTKCAWAKAHYEAQRERGKSRHAAIRSVAFKWLRISFRCWKERRKYDDDLYQKQSANRASSTSVLEIQWKSCGSFSKASVIRV

SEQ ID NO: 487823 - protein, 369 aa, unidentified
MRTEQAYTGSGDVLVLAVSLELAAAKWKVALHDGRRDKPAVHTVAEPQAAARLQEVLDLIEAHKEKWSLPADVRIAVSYEAGQEAFWICRALQARHIECYVVDPASIPVERHQRRAKTDRLDVIKLVINLRAWLRGERDRMHVVHAPSPQDEASRQLMRERGQLQKEVLQHLDRMRKLLATLGCWDAVNHRAFAGRLQRDEVCCHDGAPLPRQLRERLLRECERLALVEQQLAALEKTRQTEVPALARQRCDALERLHGIGEVGASRLALELFWREFNNRREVGACVGLVPQPYDSGDSQADQGISKQGNRRVRALLIEIAWNWLRYQPNSALTKWFNQRTQGTGPNRRARRIAIVAVARRLTLRCGAI

SEQ ID NO: 487824 - protein, 411 aa, unidentified
MDVFCGIDWAEDHHDIALVDRDGKLLARQRISDDAAGLTRLLDLLAGHGDSPEDPIPVAIETPRGLLVACLRATGRQVYPVNPMAVARYRDRHTVAGRKSDKGDSAVLAGVLRTDMHAHRPLPADSELAQAIAVLARAQQDAVWTRTTAHNKLRSHLREYFPGFLHAFAGARDGIMRPEARVILAAAPDPASAAKLTLSQLHALLKKAGRVRGIDAEAARLKEAFRKEQMRQLPLVEQAMGRQALALVRQLEAACASAADLEQAATESFNQHPDAGIITSFPGIGALTGARVLAEIGDDRSRFQDARGLKAYAGSAPVTRSSGKSRSVTHRKIKNNRLASAGYIWTFAALTASPGARAHYDRRRDAGDRHTAAQRNLFNRLLGCLHHCLATGQHYDETTAFPDQAATKTAA

SEQ ID NO: 487825 - protein, 364 aa, unidentified
MEGKKKAVTRYVGIDLGKRTYEAAFVEKGAVKKSNGKTYAEGRQALYKKLKSSDKVAVEACAMAFIMAKEMETSVGCRVYVLNPHHLAVIYASMKKTDKEDSLKLAHMLEDFQEERLPVVPVPSDQEMQRRKILAGYRRGQQSRTREINRLHGLFLAQGITTMKRSDLRTEKQRKAAVEALSGLELEEAEYLLACLELHEKRISALEKQMEAESAGDEVIQRLQSVPGVGPMVSFAFVSHVAAERFENSGQLSNYLGLVPRVYMSGDTVRYGQITKRGNSYVRSLLVQAAWAMIRSKSGGKLKERYEYMTVEKSISKKKAIVAIARRIAELLYTMMRDGTRHESRPFIREKKAIEELAQLALSA

SEQ ID NO: 487826 - protein, 432 aa, unidentified
MNESIPAASLEGVAAYIGIDWADQKHDVVLRSAAEPNKVEHRVIEHQPGALMEWIGQLQQRFGGHGQILVCLEQSRGALIHHLMGYEFFELYPVNPLQLARYRETFSPGGAKDDQPDAELLCELLYCHRDRLRAWKADSELTRKLAFFNEGRREGVDQRTRLSNAIKSQLKVYFPLALELLNQDTSTALAADLLLRWPSLETLQKQIPHQLRKFFYAHNCRGESRMLERLELVQQAQALTQDSAVIEPAAFRVQMLARQLKNLLPDIARYDQKIAELFAAHPDRFLFENLPGAGRALAPRLLSALGSDLNRWESAQEIATLYGIAPVRRASGKKSGKKGEKKASVHFRQACPKFLRQSFHEFAGCSIRYCCWARAHYEAQRAQGKGHHAALRAVAFKWIRILFACWKQRIPYDPQRYLQALQQRASPYANAC

SEQ ID NO: 487827 - protein, 361 aa, unidentified
MPGTMTYVGFDVHARSTHAMAIDVMTGELTRMRFGAGIDAPVDWLKTLSGPVRACYEAGPTGYGLYRAAVAAGVGIEVIAPGLTPRGKGDRVKTDRKDAELLARCLIAGSLHPIVVPSMHVEAAREVTRAHDACRRDLMNARHRVSKLLLRHGRVYPEATTWSQKHRRWLAAQQFREPMSEFTWADLIACVDGLTARKKTLAERIGELATDPAWWPTVARLRAFRAVDTLTALAVHLELGGDWARFEKATRVGSWLGLTPSRSQSGEHDYHGSITKTGSQLARRLLVEAAWHYGREPRVGATLANRQEGQPDHILQISNRCQHRLHHLYTSMRARGKHHNVTTVAVARELSCFLWAAATAP

SEQ ID NO: 487828 - protein, 360 aa, unidentified
MQSTPLIAFDQHAATTVAAVLLPGERTPALHTLASDSPTILRFVKRLQRQGPVQCCYEAGPCGFELQRALVGQGIRCDVIAPALIPRRPGDRIKTDRRDAAQLAVLFRAGALTAIHIPTEQEEAARDLLRCREDIRADLLRARHRLSKFLLRHGRRFTATTAWSKRHDAWLRAQAWPLPALEQTHRAYLRTVDEAVARLRAVEEDLRALLTLEPLRPCVERLRCFRGINDLTALTIAAELGDARRFATAPSLMAFVGLIPSEHSSGTKQARGGITKTGNAHLRRVLVEAAWHYRHHPFVGDALRTRQRGAPPTVVAQAWTAQQRLHRRYARLAARGKPKQHVVTAVARELTGFVWAALTQ

SEQ ID NO: 487829 - protein, 315 aa, unidentified
MPKEAFVGIDVAKDRLDVHILPKGVYFSCENDAKGIASLLHRLQAENPNVIIMEATGGYEINVAAELGAAGLPVAIVNPRQVRDFARGIRKLAKTDAIDAFVLARFGETNKPEPQPIPTDQEKLIKQLVTRRRQLIGMRASERNHRHSARSGWVQQSINTVVATLTREIEEVDKEIDDLIRKTPLWREEEKLLKTFKGVGPVVSRIILSKLPELGTLNRQEIACLVGLAPLNRDSGKMRGKRMISGGRKEVRDALYMAALTAIEHNIVIKPLYERLMKAGKLFKVAITACMRKILIILNAMLKTKKPFQAPQVFA

SEQ ID NO: 487830 - protein, 413 aa, unidentified
MTNSYHLFVGIDLGSDCHQVCVVDQEGTILGQRKVEHGGGAIQQMLAWLAELAGGASPETVAVAVEAPRGAIIDALLGHQYAVFSINPKQMDRFRDRYSVAGAKDDPRDAYVGANSLRTDLSHFRRLRPDHVQVVRLRELSRAHDALQEDWRRNANQLWSYLQRYFPAVLKLSSAADELWVFDLLEQSKALSQRAATLSIEELTKLLRRNRIRRFSAEHLHQTLQDRLALAAGVEEALAEQVLLLLPRLRLLHQQRIEVDRRTERLLEEMAEESFPEHRSVEILRSIPGLGRVFLATVLSEATRPLLERDYHALRNLAGAAPVTRRSGKTTIVSMRRACNDRLRDAVLNSANTHVQKDPRAKQIYARLRAHGNTHARALRGVGDRLLELICILLSSDQLYRLERRQPPKTDAV

SEQ ID NO: 487831 - protein, 429 aa, unidentified
MNSTRNKKIEQVKETTMIVGIDIGSEKHYFRAFNWRGIELTRKPVAFSNSMEGFNSFYNTIVELIQKSELEEALVGIEPTGHYWFDLGQFMGEKNIKFVMVNPHHVHKSKELDDNSPSKNDRKDPRVIAGLVRDGRYFYSYMPTGVYAELRNASNRRFVLVEEQTRAKNRLQKWIAVYFPEYKGIYTRIDAKGGLLVLKQAPPPEEIVRLGVEGIIKIWKDAKLRGNGHKKAMLILNAAMKSIGLKAGLTEARMEIQDLIEDYELQTKRLERVNDLIKELCQQIRYADKLLEIKGIGITTIAGFIAEVGDITRFDSAKELQKLAGLELVADSSGKHNGKTKISKRGRKRLRYLLFEAAISVVGKNKEFKEIHRYYTTREKNPLKKMQSLIAVACKLIRVFHVILTKGISYDASKMLKDIQHPGEPLKAA

SEQ ID NO: 487832 - protein, 365 aa, unidentified
MRKLTRPIRKVNAQVIGLDVHKRLIVYCVLDRQGREIAEGRFPASPESVEEFLARQVGRKKSHLAFEASGCSEWLYDLLLERYPADRIHVAHARRIRAIANSRQKTDANDAFWLAYLTHEGRLPESFVATGTLRELRTATRHRVDLVRWRTRAVVALKAEAARLGHDLRGAGLRSERARERAWQLARETRGACGQLLTESLEEIERLDLILEEWEQRIATLVESLPAVSVLRHRIPGLGSVLAATVYAESGPVERFASAKTYAAFTGLAPSCRISAGRAAPHTISREGNPYLRWALTQAVLACTRARHGAARAVGDWVRASERRMGAKGKARCAAARKLAESIWRLFDQPATFDAARPFGGGLTA

SEQ ID NO: 487833 - protein, 482 aa, unidentified
MTLVSCDDDLDWEFVFDSRLGHPTGSSEEPMVKRSKKRCEELPILHPHAAGIDVGASELFVAVGADRDPQPIRSFPTFTRDLNALADWLQQCGVRSVAMESTSVYWIPVYQILESHGLEVCLVNAQHVKNVPGRKTDVSDCQWLQYLHSVGLLRASFRPPGFICAIRSLWRHRSSLIQMAAEHVLHMQKALDQMNLQIHRVLNDITGMSGLRILDAILAGERDPVTLARLCHGGVKNSEDTIAKSLEGDYRPEHLFALRQSLAAFHYYQQLVVEVDQEIQGQLGSLETATTAEPTVPKRTKASAYQRRRYEPKTFDLRGELYRIFGVDLTNVPGISAITAQTVLCEIGTDVSRFRNASAFASWLGLCPENKISGGKVLYTKSRRVRSRVATALRMAANSLHHAKDYLGEFFRRITRKLGKPQAITATAHKLARIVYHLLSTKEAYNETVFHRCDEEAIKRAQYRLRKQAAQLGFQVIPLQNG

SEQ ID NO: 487834 - protein, 394 aa, unidentified
MSFIGIDVAKRSHQAAVTDISGNVIVKPFNFKNSSDGFTKFLSIVESNAIEKNDCTIGLESTGHYWYPLYFFLIENGFDVKVFNPIQTAAFREITIRKVKNDNLDSLLIADFTRFGRYSETYIPDENMLALKNLTRFRLSISDICGSLKKKVIAILDQVFPEYTGVFSDVFGKTSKQLLEQFSTPDEFMDISTTKLTNLLLKVSRGRNGREKAELIKTAAQSSIGISYALDAFSFELKQLLAQIEFMENQLSDVDAEMEKLLSQSEYAVITTISGIGPMLGSVIVSEIGDINRFENSSKLVAYAGLDASVKQSGEFNSSKNKISKRGSPYLRRALWMAAFMSLQCDPALYDYYSKLRARGKTHRCATTAVARKLCIIVWAIMKSKKPYSPVLKN

SEQ ID NO: 487835 - protein, 309 aa, unidentified
MEIVVGIDVSKERLDVAILPQEEVFAVGNDHAGIDELVERLKGIGVDAIALEATGGYETLAVAGLSSAGLTVLVVNPAQVRAYAHAIGRRAKTDPIDAAVIAAFVLATKPEIRPLRDAETQALSELVARRRQIVQMTVAEENRLRMALAKQAQKSIKRLLTALRRELESLDADLDSHIRKSPVWRVREALLTSVPGVGATTARTLLAELPELGSLDRRQIASLAGLAPWTRQSGKWKGKSFIGGGRSKVRAVLFMAALVASRYNPDLKAFRDRLVAAGKPKIVATVATMRKLLTILNAIIRDGRPWQNA

SEQ ID NO: 487836 - protein, 338 aa, unidentified
MFYTGIDQHRCSSVLTTLTGQGERLGQVTLPNDRSLLVQYFAQFPGPHQAVVEATGRWYWLRDLLAPQGIDLHLAHAKFLKAIAYAKVKTDAIDSDTLAQLLRTGLIPEAHMIADTERGPRDVLRARLRLVERRSRCKNSLDRLLEKFNVPDVTALPPLYRLQAELHTAQVTLLTEQIHTLERAVQGDLLETPAIQRLLWIPGIGRIVAFTLALEVGEIQRFPTVRHFWSYCRLVPGAADSGGRHWHRPSKDGNRYLKLAFSHATVRAIQYFPEVRQWYLRWKRKKPIRIARALVAKELAKSVYVVLHDQVDFNQEFKGTPLTRQKQARWPRRVSPSV

SEQ ID NO: 487837 - protein, 409 aa, unidentified
MLEINQAFRPSTAHEAMGSTSPRFDVRDPSMTLIRRRTVHIRGVGSLVLDIRGLDALAGIVPGVERQPLKKLKTDENALLTLLNRWRDEAVRSGHKISRIAVAFEAGRDGFWLARWLRARGIEAHVIHASSVAVSREHRRAKTDRLDTELLKRAFVGWLRGERDHCKTAAIPTLREEDAKRPSRERESLVGEQSRLVNRMKATLIRLGIRGFNPKLRQAEQRLEILRTPEGEPIPANTLAELKRDMQRRRFICDQIRSIEQERLERLKRTPDTEPHAMVRLLARVTGIGIETADLLVHEVLLRNMRDRRAVARYGGLTGSPDRSGGTNREKGMARSGNARVRRGMIQLAWRFLLFQKDSALAQWYRRRTEHSPKARKTMIVALARKLLIALWRLAREGVIPEGVAMRPA

SEQ ID NO: 487838 - protein, 366 aa, unidentified
MKKQLTGTNIEQGSGEGKCNRVLKLGLDMHYRQVTVAMQEEDGPIKAVGRMGHDGFENWVERKREVGWEVYSCYEAGASGYWLHRDLEQMGVKNLVVAPKAMGQDKGQKTDRRDSAELVDQLDRYLRGNRKALSTVAIPTAEQEQKRALLRYHRQIMADRSRYEARGKGLLCAQGIEVQGRWWQPEAWKELKTHGRFQGWMQTQLQGWRRKLLSAEQEQQKLRKQIEALAPALLPKGVGAYSAVALEYELKGLARFKTARALSSYTGLCPGIHSSDGRGKEGSINRCGNAAVRWNLVEMVWRLLKWQPDYQVVRQLAAGLVRSKRARKRLVVKAARQLAIDLWRLETGRVTAQELGLVMQPSPKTK

SEQ ID NO: 487839 - protein, 447 aa, unidentified
MSDRSGLSRGDRNRNARLARLRQLLPPGHAIVGIDLADDKQAAVVADHDSRVLARRRVSARAWELGALLDWAVARAAVAGFGSVTVACEPTGHRWRVLDQLAAARGLALVCVQPLLVYRAREGEDLTRDKSDPKDAVLIARLASELRCYEPERASAVWARLRHLGARRSQLTTGATAAVNQIRDLLECAWPAVLAASGSPFRSVSWCASLAVVLDRCAGDLSRVRCLGLARFTAAVRRELPRWGGIRPCLRIIRAVFAALADPAGVTAHRPGALERAHLALGDWREIRARLAGTEARMGAVLDELGLAELVTTLAGLTVTGAAAILAETGDPARFATPRALVKHAGLCPRDNASGAAQGKTSISGRGRPGLRLAAWRAVWAAMPNNPVMAARFGYLTTRQDNRLARQQARAACAAALLRWIHVVVTRHVTWDPAIAAGAAQLAHRAG

SEQ ID NO: 487840 - protein, 283 aa, unidentified
MRRVIGIDIHRTFGEVVIWENGLTRHEGRVEMTRTALEGFGRQLKKTDEVVIEATGNCMAVSRVLSPHVKRVVIANPLQVKAIAHAHVKTDKVDAATLASLHAAGYLPEIWTPDAATERMRRLVARRYQVVRHRTRIKNEVHAILHAHLIPKCPHADLFNKRGRDWLTRQPVPEDERAAIARHVRELDRLGEDLAVLDRDIAQDAIDDEAIQRLLTITGVNLTVAAGLMAAIGSIDRFNSPQKLVSYFGLNPRVRQSGLGPAHHGRISKAGRSHARAMLVEAA

SEQ ID NO: 487841 - protein, 420 aa, unidentified
MAFKIFRFNCCGLDVHKTWIYACIGITDSNGRTEYKQARFSSFSKGLKELCDWLAKYNCSEVCMESTGKYWIPVFNVLEKADISVILAHPKYTKPQKGNKTDRKDAKWICNLFMCEMIKPSFIPPADIRHLRDLVRYRFKLTCMITGEKNRAQNCLTVSNLKLDDVFSDVFGKSSRSITEYMLAHPGEIFDVAPFVDGRCKTPVEEIQAAVDGAISPEQAVKLRQCLNHIDELEKHLKEIEREILRLSDKYEAALDLIRTVPGFGKRPMTAIQILSEIGGDMSVFPTAKHLVSWAGCCPRNDQSNKKIKSTRISRAGNYIKPILVQIANGLLRSKKHPEITDRYKRIKSHRGHKKAIIAICRMLLTAIWHILSDLKPYTPEGYLEPRPVKESKVLTKSQALHLLKQRGYIIKDDAEPALN

SEQ ID NO: 487842 - protein, 346 aa, unidentified
MKDCKVKSEIKVLGIDLAKQSFQLHGVDGSGQTVLRKKLGRNKLTAFIANLPPCLIGLEACGGAHHWVRTFANFGHTVRMMAPQFVKPYVKSNKNDAVDAEAICEAVQRPSMRFVPAKRIEQQDIQSIHRIRSLLVARRTAQANQIRGLLLEYGIIIPKGIAYIRKRIPEILEDAENTLTALFRELLVELYEEMVHLDERIATLEQKLQAICLQNKDCQRLLTIPGIGLLTATAMVAAVSDITAFKNGRELAAWLGLVPRQHSTGGETTLLGISKRGDSYLRTLLIHGGRTVVRVASKYQDKRNRWINELDQRRGKNISAVGVANKNARIAWVLLSKKENYNAAAA

SEQ ID NO: 487843 - protein, 342 aa, unidentified
MQITTIGLDIAKNVFQVHGIDAAEKVVVRKQLRRSQVLAFFKALPPCLIGMEACATAHYWARELTKLGHQVRLMPPKDVKAYVKRNKNDAADAEAICEAVRRPTMRFVQIKSVEQQGRLMLHRVRDLLMRQRTQVINALRAHLAELGIVAAQGREGIKELLKIIASEEDAGLPVDAHASLVVLAAELQAMQTMIGSIDKRIMAQHRSNEASQRLESIPGIGVTGATAIAATVPDPKVFRSGRDFAAWIGLVPRQDSTGGKQKLGPISKRGDRYLRRILVVGACAVLRFARQQPQKYPWLTQLLARKPFKVVAVALANKMARIAWALLAKGGTYRAPMLVAAA

SEQ ID NO: 487844 - protein, 436 aa, unidentified
MSKKLPILDALAAFVDVGSEHMHVSVGGAAPAVFGAVTLQLHALRDWVLAQGVRCVAMEATGVYWLPLYAVLEAAGLEVRMVNGRQTRHAPGRKTDMADCQWGATLHMHGLLRAGFVPPADIRRLQDYLRLRAEHVGAAAGCVQLMQKALERMNIKLHDVIASLAGMSGLAVARAIVAGERSPQALLALCDVQIRRKKAQAVIESLRGTWCDEHVFALGQALQSWDHYQRLIAECDARIAAVLPAHDPSQPPLQRSAKRAGVNAPEIAKLREILAQMCGGRDLTRLPAHTHYGVLQLIGEVGTDLSVWPTEKHFTAWTGLAPTNHDSGKRKGRTRRGRNRAGQLFCMMAQSLVRSKDIALGGFYRRLAARRGGLVATKALARKLAAWFWRVMVKGDDYVERGLADYDERVRKTKERALRRLAKELGQQLVPVNPTA

SEQ ID NO: 487845 - protein, 409 aa, unidentified
MLFVGDGWAEAHHDVEIQDEAGRRLVRRRLPEGVAGIAALHALVAEHLGDGDPTEVVVGIETDRGPWVQALIAAGYQLYALNPMSVARYRERHVVSGAKSDARDAKVLADLVRTDRHQHRSVAGDSDLAEAVKVLARTHQNLVWLRQRQANALRSALREFYPAALVAFEQTSGRDALAVLSIAATPTQGRALSKAKIAAALRRAGRQRNIDTRVAHIQAALRTDQLQARPAVETAFGHTVTALVGVLVELARQIETIEGELDAHFDQHPDVAIYRSQPGLGPLLGARVLGEFGDDTNRYADAKSRRNYAATSPITRASGTRRVVLARYTANKRLRDALYLQAFTALTASPGARAYYDAHRARGATHHQALRTLANRLVGILHGCLRHQTPYNETTAWPTTNIADQTALT

SEQ ID NO: 487846 - protein, 400 aa, unidentified
MTVTIGVDPHKRSHTAVAIDGDDVELAAIEVRASFHQVDELLGWAARFDARIWAVEGAGGVGYLLAQQLVAAGERVLDVPATLAARVRVLGSGRSNKTDANDGYSIAVAARHAPKLQGVTGADHASVLRLLAKRNKELGSARTRTACRLHALLVELVPGGIPRQLTANRAAALLASVTPAGPVEATRHALALEHLEDLRRLDEQMRASKQRISDAVKASRTSTTDIFGIGPVGAAIAVGQTRDISRFADRDHFAAYNGTAPIEVGSGEHHVHRLSRRGNRQLNHAIHMAAITQIRHAHSPGRAYYDRKLTDGKTKKEAIRALKRRISDALYQRLIADAHAKTGPGGQTGTTAQASVTGLTPQQPALRNSHSRTHTERRTRPATAATTRPTRRTNTTPTRT

SEQ ID NO: 487847 - protein, 351 aa, unidentified
MKKVAYLAIDVHASNCVLGHMDFDGTFLGTRRFPTSERHIIQALKAVKAKEKYLALEESNLAYWAAQVARPYVTEVISSDPRENALIYRSANKRDKVDTHKLCRLLRLGELNRVYHPENDDRAIFKAAVQHYIDLRDQQVVLKNKIKARYRHWGVIEVAGQAVYGIRTRDDYLQRMKHLHIRNQLHRLYCLMDETEAMQKRALRAMKQLGRKYPEIKEFEKMPGIGEILSHIFDAFIQTPYRFANKRKLWRYCRLGITDRTSDGKPLGYKRLDRSGVSELKALSYRAWLCAMAGDNEVRRFYSRSLSHTSDHVHARLNTQRKILAVMYGMWKRGDAYRPQLFLDSPQMSVV

SEQ ID NO: 487848 - protein, 350 aa, unidentified
MCSLPVFVGLDYHDASVRVCVLDTDGRELANADRCNDWKAIAEFADRFGRPVRAAIESCCGAADLAEELVSCAGWSVDLAHPGYVQRMKQNPDKTDYQDAQLVADLERIGYLPRVWLAPQHIRELRQVVRYRLQLTEQRRATKLRVRALLREQRCRAPQGVNAWTKAWDHWLRHSAELSAEGRWVANQHLQELACLVTRIRQVEKRLEHLTANDVEVQRLQQQVGIGPVTAWTIRAEIGHFDRFRTGKQLARFCGLSPRNASSGQRQADAGLIRAANPALRAVLIEAAHRLVNYDRYWQKFAQRLRAAGKPGSVVAAAVANRWIRRLYHEMKTPSGELAVAVRSARSEDS

SEQ ID NO: 487849 - protein, 359 aa, unidentified
MSKHETAVQSIVGGVDTHKEQHVAAVVDGHDRMLDSASFPATRHGHKQMVRWMRAYGRIERIGVESTGSYGAGLLRYLHHAEIQVLEVTTPDKTDRRKRGKNDILDAENAAHAAFTGHRTVSPKTRDGMIESLRVLKASRKTAVAARRIALQMIQVNIVAAPDQLRETVRHMTRMQLIRTLAAWRPDLTAYRDVTMAYRITLKSLARRYIELDDEIAYYDRMVQPLVDELAPDLIARNAIGYGSAAQLLITAGDNPERLRNEASFAALCGVSPIPASSGKTHRHRLNRGGDRAANSALHIIAIGRLRTEERTRAYVDRRIAEGHSKLEAIRCLKRYIAREVFHLLRDCQQRINQRRIAA

SEQ ID NO: 487850 - protein, 386 aa, unidentified
MRGKTFIPRDYDVFAGLDVDKRSISVTFSNHQGFISSLHMPYSAEHLIKHVRKHFGDQKVAFAYEAGPTGYGLYDGIVAQGYRCLIAAPAMIPRAPGQRVKTNRLDGVSLSENLRGGQLKSIHVPTPIYRELRHLVQLRDTVMSEVVATKQRIKSLLLFEGLDFPTAPAGSQWSLKVKRQLQKLTCSKGVRFKLDELLDSLEFLEKKVVKSTREIHRFCNDDPELLQCIQYMMSVSGIGWIVASQLLARIGNWREIQNVRQLAGFLGLVPTEHTTGDRTRRGSITHSGDGRLRSKLIQASWSAIRQDGELRDFYRSVCRTHARHLGPRVAIVAVARKLSARIAVVLMQQRPYVVRKKVDSAPLTQEETVPQGTTRRLGEPGETDNS

SEQ ID NO: 487851 - protein, 329 aa, unidentified
MNCVGIDVGCKELVVVIHAKGKVRKAKTFENTPAGHQLIIRLLSKLKGGVRVCLEATGIYHFDLAVALSRADEIDVMVINPTVAHNFAKALMKRSKTDAVDAEILAIYGEKMSFEVWIRPSDEFITLKAIARRIAALTKQKAQTKNQLHALISTEETPQLVIDQTRELIQFLDEQIKAHRDAGLELIQQHAELNEALTLITSIKGIAAASAIQLLAELMILPQDMSAKQWVAFAGLDPRHYESGTSVAKKPRISKAGNKYIRQALYMPALVASNYEPHIRGYYTHLIEDNGLKPMQALCAIMRKLLHAIHGMFKTNKRFDGERFYTFPV

SEQ ID NO: 487852 - protein, 346 aa, unidentified
MHYIGMDCHITTLDFAVVNEAGRLAKANRVPTSVNGFIEFVKTVPPPRTIYMEEGTMAAWALETCVRFREKLVITDSKKNHWIGSSGQKNDSIDALKLAQLARGGYIKEIHHPVGQRRRFRELMIAYHDTVRSTTRIKNKIKARFRQNGIQCTGATVYSETHREEWKGKLPQEAILLLILDGLWRQLEQSEQTEKELLAAARAQAKHYPEIKLFEDIPGIGFISAATISAMLETPYRFADKRKVWMYAGLGLMKRSSGGKTYSEKLSTDYNRLLKYSIKQAAEAAIQAKDNPFRRKYLDMTLLHGIAPHRAKLTIARDMLATMWAMWRKGEKYSPEIREKAACKQG

SEQ ID NO: 487853 - protein, 346 aa, unidentified
MKITTIGLDLAKNIFQLHGVDERGKPAARRAMKRDDMLPYFANLEPCLIGMEACGSAHHWARKLIALGHTVKLMAPQFVKPYVKSNKNDARDAEAICEAVTRPSMRFVPLKNVEQQAELSIHRARQGFVKARTAQGNQIRGLLSEFGIVIPKGIAHVYKRVPEILEDGENGLPGSMRHLICRLTDNLKVLDEQVVVLEKEIKQWHAGNESSRRLAEVNGIGPLTASAMVSTVGDAKNFDRGSQMAAWIGLVPKQHSSGGKTVLLGISKRGDTYLRTLLIHGARAVIRHAQNKPGYADSWLGKLIARRGKNVAAVALANKNVRIAWALLSQESKFRSDYATVQPTVA

SEQ ID NO: 487854 - protein, 360 aa, unidentified
MSNLTTTTSPIVVGGVDTHKELHVVAVVDAHDRVIGTESFSTTRAGYRALVRWMRTYGDIARVGVECTGSYGAGLMRHLDTAGIDVLEVTAGDKVDRRKRGKDDTIDAEQAAHAAYARVRTVTPRAHDGMVESLRALKIARSSAISARRVALQLIHATIISAPEELRDQLRNMTRMQLIRTLASWRPDLSGYRDPVTATKISLRSLARRYLELHDEIADLQVPMHALVDELAPDLLARVGIGYESAAQLLITAGDNPERLASEASFAMLCGAAPLPASSGMTTRHRLNRGGDRAANSALHMIAISRWRIDPTTQAYVARKKTEQHSNPEILRCLKRYIAREVYYLLRNQQRAIHQIAPAA

SEQ ID NO: 487855 - protein, 353 aa, unidentified
MEQFIGCDAHKKFSVFASIDEKGEYGRTIRVGHERKEFRQYLQELPQGSKIALETSGCYYWIVDEMAQAGHIPQLAHALTAKRRMEGRHKTNERDARGLAMLLRNGTLPVVWIPPSELRDEREMLRWRMRLSGMRSGVKNRIHGVLQRYNVDIAVSDLFGNLGRVELLLRLNELPQYSRQSVVEQLRTVDSIETQIADCEKILEGMLSSRAERDLLDTLPGVGKVLSAVLALEIGEVGRFKGPDHLVSYAGLVPAARESADWKRQDRCPRDCNVYLKWAYVEAANVISMHCKKWADRHVAQLYERVKKRSRMHGKATTAVARHLAEASYWILQKQQIYKEPRLQRQALSSTHG

SEQ ID NO: 487856 - protein, 482 aa, unidentified
MKSNSQEKAKKATNHRTPNHWNEMNRRQRRELTRQMQSEDLRLEVVHPDAAGLDIGNESHYVAVPPTRDSQAVRRFGCTTAELKAMAAWLQQCRIRTVAMQSTGVYWIAVYDMLEAAGLEVYLVNARDTKNLPGRKSDVQESQWLMKLHTYGLLRNSFRPSQEIRTMRTYWRQRNDLVQSAGRYIQRIQKVLTQMNVQLANVLSDVSGVTAQAIIKAILEGERNPHKLAELRDRRVRASKEKIAQYLEGHWQEDLLFVLKQEQQGYEFCQQQMVACDQQLEQYLQQREDRSQGASLPEETRKGRLQKKKKGKPQFDLRAELFRMSGADLTRIDGLDVLTATTVLSEAGPDMSKWEDEHHFVSWLRLCPDNRISGDKVIGKGRLPTNNRASTALKMAASTLRTSNSYLGAQFRRLRTKLGAPIAIKAMAAKLARLVYRMLRYGMPFVDRGAEFYETQHRKLQIDHLKFKAAKLGFRVVEAPAP

SEQ ID NO: 487857 - protein, 426 aa, unidentified
METVEQLDPAAYVGVDWASEEHAICVLGVDGRKKSSFMVAHSRGGLAELVKRLKRLGPAGRVPVGVERPDGRLVDALLAAGHPVVPVSPNAIKAWRESEVVSGAKDDPGDAEVIAEYLRLRSHKLTVLAPFSEQTRALRAVVRARDDLVEQRVGAHNQLEACLDAFWPGAKALFADICSEIALAFLERYPTPGSARGLGEKRMAALLARHAYSGRRPASELLNRLHAAPEGIGDGPEANARRDAVLGYVTVIRALNTSIKSLERSIAARLGEHPDGEVFTSLPRSGRINAAQMLAQWGDCRQAYDHPDAVAALAGVTPVTKQSGKHHAVQFRWACDKRFRQAMVTFADNSRHASPWAADIYQRARARGCDHPHAVRILGRAWIRVIWRCWVDRVAYDPAHHGAAIKLAAQSAPGAAAADAAEQQAA

SEQ ID NO: 487858 - protein, 321 aa, unidentified
MKPVGIDVSKRGFHIAVLVGEKQLNKAFENHPAGHQALQTWLQKKGVEPAESQICMEATSTYYEALALALVDAGWRVSVVNPLQIKAFAESRLIRQKTDKADAYTIALFCAQQQPALWNPPAREVRELQALLARLEAVQGMRVQEQNRLYEARGAARDSVERLLETLDEELRLLKRQINDHIDRHPGLKQQTDLLQSIPGVGDTLSAYMAAWLPVARLEDARSAVAFVGLSPKARESGSSVRRKTVLCKMGHCRLRKMLYMPAMTAMRFNPAAHALAARLREAGKPGKLIIGAIMRKLVHWIYGVLKSGKAFDVNLALART

SEQ ID NO: 487859 - protein, 371 aa, unidentified
MKKSSIFVGLDVHKNSIEIAIAEAGRNGEVRSYGKIDGSLGALDKVIRKLVSKGYELHFVYEAGPCGYEIYRHLAAQGFDCMVVAPAMIPKQSGNRIKNDHRDAQMLARLHRAGELSAVFVPFAEDEAMRDLTRSREDAKLAEKKAKQRILAFLLRHGHHFNGRSHWSQAHLRWIAGIKMPHPAQQIVLQEYVDAFTECTRRVERLTGQIQQLLPQWRMVSVVKAYQSHRGVSLIVAATTVAEIGDMTRFTSPVELMSYLGLVPSEHSSGEKTKRGAITKTGNGHVRRVLVEASWAYRLPARVSRELRKRQEGLSQEICDISWKAQLRLCARYKRMLAKGKPKQVIVTAIARELCAFMWAIAHEVEFPIMA

SEQ ID NO: 487860 - protein, 344 aa, unidentified
MNTIRVVGIDIAKSVFQVCVWMVDGSVAWNRKISRQKLLDTLRQFEPGTLIAMEACSTSHFWGRTLSSMGYSVRLIPAQHVKAFVRSQKNDANDALAICETACRPGIHFVPVKTTEQQDIKALRNTRQLMVEQRTALANQLRSLLAENGLILPVGIQRLQQQLPELIEDASNDLTFTLRRLLSLLREDMQALNERVTYLDKEIAALSSQQTAYRHLLTIPGVGPLIAAAFISEVDALQFSSGRELSAWCGLVPRQHSSGGKQRLSSVTKNGNRSLRTLVIHGARSVMRCVKKRDDNPGLWLKRLEARRGFLKTTVALANKLTRIIWRILTDGVDFNMSKAFAAN

SEQ ID NO: 487861 - protein, 336 aa, unidentified
MRFYAGIDLHANNNVLAVLNESGQLVCQRRLSNVVAVVIGELERFQSALVGVVVESTFNWYWLVDGLQAAGYQVHLANTTAIQPYQGIKYTNDLTDARWLAEMLRQKILPEGRICPAALRAWRDLGRRRMQLVQQRTSQIVFLQMLLARVQGHRPSRARVREVDVKTLGQPRAVGLNVASGLRIIDALDSEIARIEKILLAQVAQEPSFQQLQTVWGIGKILASVMALEIWDIHRFKTPGDLASYARCVSSSRFSNGKRKGQNNVRNGNPYLAWALIEAAHFADMHYPQAQAFVARKTEQCNRALAIKALANKLARACFFVLRDQVDFDPKRVFGS

SEQ ID NO: 487862 - protein, 347 aa, unidentified
MRFYTKQHKHYCGIDLHTKKMYICILDDTGEILLHRNINTLRESFLNAIDPFREDVVVAAECMFTWYWIADLCASENIPFVLGHALYMKAIHGGKAKNDKIDSRKIAGLLRGGMIPQAYVYPAKMRATRDLLRRRNHLMRKRAELYAHIQNTRSQYNLTEPFGRIAKPQNREGIAERFEQPCVQKNIAVDFEMIEAYDRILNQLERDLVKTATQHDPVSYALLKTVPGIGRILGLVILYEIENINRFPRVQDFVSYCRLVKCAKESNGKKYGSSGSKIGNAHLKWAFSEASVLFLKGNEPAKRYLDRLTNKHGKGKALSILAHKLGRAVYFMLKNKEAFNQNKFLGL

SEQ ID NO: 487863 - protein, 421 aa, unidentified
MKVTYQTCCGVDVHKTFLVATIIKTTSGVEPSYEKKRFSTFNSDIRHFKQWLLDNNCLDVCMESTGKYWVPVFNLLEDRINVTIANPKWVKAVKGNKDDVKDSKWIGDLFRLGLVCGSFIPCKEIRIIREYTRYRFKLVSCKTSEKNRFQNAFTVCNVALDSVVSDMFGVSASAITDYLITTDEFDEEICKSFLKGTLKAKADTVVESIEGYQMTQDQKERMLLIRSHLEFVQMELNAIDAKLDDLVAPYEEAIALLCTIPGVDRASAVTIISEIGTDMSQFDSSKRLCSWAGLTPGSNASAGKKKSVRITRAGVYLKPALVQCAHAAVKSIDSPYYKSKYERLLKRRGKKRAIIAIARMILTAVYHMLSTGETWNPCDLFKIDMPQEMQDKQKAKAIKQALKFLMLEGVISQSDTLISSG

SEQ ID NO: 487864 - protein, 340 aa, unidentified
MGEVTTIGLDLAKHVFQVHGVDAEEATVLRKQLRRAQVLAFFSRLRPCLVGLEACATAHYWARELRALGHEVRLMPAQYVKAYIKRNKHDAADAEAICEAVGRPTMRFVPVKTADQQAAVLLHRGRERLVRQRTGLVNALRGHLAEFGVIAPQGLRNVGKLIAIIRDNGDTRLPDVARQVLQVLANQIEQIEAAVAGLERQLLAWHKTNAVSQRLASIPGIGPIIATALATTVADPNVFHSGREFAAWLGLVPRQNSTGGKTRLGGITKRGNRYLRRLLINGASANLLRSKATNADPWVIGLRRRRPPLVVAVALANKTARIAWVVMLREREYQPRAVAA

SEQ ID NO: 487865 - protein, 427 aa, unidentified
MYRIAGIDVHKKKLAIVVADVEVHGEYQFERCWFGANPEQLRLLSQWLAEHQVEEVVMESTALYWKPVWGALERYWQPICQKREGAVPTSGILHLAQAQSNRGPRGRKKDFRDAERLVKRLVADELKLSFVPDREQRLWRTLTRRRYQLTRARVQLQNQLEALLEEAHLKLSSLVSDLLGISARRMLQAIAHGETNPEALAGLGDRRLRATPAQLCDALGACTELHPVYRRLIKMMLEELKVIEEHTAELNQELATLLRPHQDAVKRLAEVPGLGVDSAQQILAEVGAEAATFASDKNLCSWVGVCPGDEESAGESSSHRSPQGNRQMRRLLNQAANAAVKTKGSIFEIAYRRLVPRLGHNQTIGAVAHRLCRLIWLILRKGVRYEERGPAVSQRSRQNRTSKMIRELRILRYRVEFLNAVPSIPIP

SEQ ID NO: 487866 - protein, 344 aa, unidentified
MSEAFIIGLDIAKYVFHAHGVDERGRAIFSKRISRKKLLDFFAAQPSCTVALEACGGAHHWARQLSQLGHEVRLIPPAYVKPFVKRQKNDAIDAEAICEAAQRPNMRFVAVKSEQQQAAGLVFRTRDLLVRQRTQLINAIRGHLTEFGWIAPKGPSHVAMLAGLIEEEEMASSLPEAARAMLRLMLDLLADLDGKIADLDKEIARRAREDEVSRRLMTVPGIGPISATAIATLAPPAETFAKGRDFAAWLGLTPLQRSTGGKHKLGSTSKMGERTLRRLLIIGSSAVVLQASKRGAPKGSWLEQMLARKPRMLVTVALANKTARIIWALLVKKENYRAPVVAKA

SEQ ID NO: 487867 - protein, 356 aa, unidentified
MNSEKYIGLDVHQATISVAVMDSMGKLIMESILETKAATILEFVAGLRGTLSVTFEEGTWAAWLYDLLKPHVDELVVCNPRKNALLKDGNKSDRIDARKLADRLRLNDLKPVYHGETGVRMLRELARSYLNLVKDQTRVMNRLKAMYRSWAIPCAGRDVYYARHRAEWLGKIREAGVRRRAEHLYQQLDMLQHLRQQARRELLAESRQHPITAKLRQIPSLGPIRSALAVALIRTPHRFRTRRQLWAYSGLALETRTSGEYRCVEGQIRRSKKQISIRGLNKDHNHDLKGLFKGAATRASVQPGPFQDFYQRSLAKGIKPTMARLTLARKIAAITLTLWKKGENFDTEKLKSTLRS

SEQ ID NO: 487868 - protein, 338 aa, unidentified
MNKVSIIGVDLAKNVFQLHGMTKTGHACFEKQLTRAQLLKFLAKQPECIVAMEACCGAHYWAKEIDALGHQVKVIAPQYVKPYVQVHKNDIRDAQAIAEAASRPRTPEVAIKQDEQLDLQALHRIRERVVKERTAIGNELRGILAERGIIFPRGHRYIRTELYRILSEHSIQLGHYCRQLVFDLQQQWIERDESIQRYDKELEKLARGLKVCQKLQSIPGIGAINATLLYSYIGDVKQYRTARHLSAALGLVPRQSSSGGKEVLLGISKQGNKHVRKQLVHGARAAYKSLKNGHSDSHLSHWLKRMEGKHPNKIVVALANKLARIVWALLSYDTIYQA

SEQ ID NO: 487869 - protein, 369 aa, unidentified
MTGRAGRWGSVVGVDPHRHTLSATVVDERGGIVATGHYNVSGDGHRALEAWALSFGPVVRWGIEGASGLGRHTSVYLCRQGHDVRDVCPTRTAERAHGRYQGKSDALDSERIARETLAHPDLPLAFKRAGDDTGPDETAELIALWHKERRSLLKTRQHLLNEADALLSDLPDELRGHLPQTKAVRPRLTALRRPRRAWPAATAVRLRLLDRHRAAIFELDRRDREITQELAKLIAGTGSTLDQLCGLDTRSVAELLVEVGDPRRFTEGGFGRFSGTAPLPASSGEGAGEPIRHRLNQGGNRRVNAVLHRMAVTQLRSDERAQRIRDEARRRGHTKREAIRIVRRHLAAVVYRRMIRDLRARPAASALAA

SEQ ID NO: 487870 - protein, 338 aa, unidentified
MGYFVGIDLHGDNNYIGILDEEDRRVFKRKNRNDIKEITRVLEPYQEEIEGIVVESTFNWYWIVDGLMEAGYRVHLANTAAMQQYEGLKYIDDTRDSFWLAHMLRLEILPEGYIYPKEKRAVRDLLRKRMMLVQQRTAHILSMQTMVNRNKGIPISSDTIKKMSDEEVEGLFSDEHLVMSAQCDHEVIGVLSEQIDKIEKAVFKEVKLKKPYKKLLTVPGIGEILAMTIMLETGDIGRFREVGKYSSYCRCVSAKKVSNGKNKGKGNRKNGNKYLAWAYVEAAHFHVRYCEEARKWHQRKASKSNAILATKALSNKLARACYYIIKEQVHYDKKRMFG

SEQ ID NO: 487871 - protein, 365 aa, unidentified
MEITTIGIDLAKSVFALSCADRAGKVVLRRQLRRGQVLEFLRGRRPCLVGMEACGGAHHWARAIGALGHRVRLMSPALVRPYRSGANKHDRNDADAICEAVGRPQMRYVAVKSVAQQDLLALHRVRTQLLKQRIALSNLIRALLHERGVIAPLGAAGLRQALAQALPAENSELSGAMGEVLRELSGGLRELEQRIATITRRIECAAKDDERCARLRQVPGVGPLTSSALVATVGNAREFKRGRELSAYLGLTPRQHSSGGKTVLLGISKHGDRYLRTLLIHGARALLYRNRSNPRAAWAARIMAARGPNVAAVALANHNARVLWALLSRGTSYRPAPHPSSFPSRPSPVVARAREGKLLITTERS

SEQ ID NO: 487872 - protein, 407 aa, unidentified
MELVALYKRVIGLDIHQAQITACALIEEADGTTRIEQRQFGGFKRDRRALADWVASLRPDEVVMESTGIYWKSPYAALEAVGIRAKVVNARHVKNVPGRKTDVGDAHWLATLARAGLLRASFVPPAKLRELRLIARQRQKLVGQLAAEKNRLHKVLTDSGVRLGVVVSDLHGQSARAMVQAIIAGQAPHEVLKLASRRLKASREELFDALQGDLTASHRFVLDELMQHIEEIEARIARFDARLLAELESERNTLALLQTIPGVDLIGAAMLLVEIGSDMNAFGSADRLASWVGICPGNNESAGKRKSGHTRKGNFYVRRLLCEFAHAASRTTSVFKSKFQSLVVRRGHKRAIIAIGHKILRTIFFMLKRREHYRDSATDYEALSVQRNAPRWIKALTKFGFITPANA

SEQ ID NO: 487873 - protein, 349 aa, unidentified
MTEQRHSYAGECVYVGVDVHKETYTVTCVCHKQIVKTATVQAEPASLAASLQRWFPGATLASAYEAGFSAFVLHRALTKVGISNIVVNPASLAVAANDKVKTDRRDSKRLAVDLADGRLRGIYVPTEEEELARLLPRTRAQLVEHRATLARQIKAKLHQFGLITPSSRRLLSHRYLREIESWTLPPELRASLKMLAEQWRFVTRQLLEMRRLLREQATAQAAIDKVYRSVPGIGEVVARTLATELGDMTRFANERALFSYTGLTPSEYSSGAAVRRGPISRQGSSRVRHLLVETAWRALPYDAVLQTMFERIAATRGKKRAIVAIARRLIGRVRACFRQGTMYAVGTLA

SEQ ID NO: 487874 - protein, 368 aa, unidentified
MLFNAFTIPNNADGFHDLFQKISSLTNDFSNVKVGLEATGHYNYNLLGFLIDKGLPTFVINPLHTNLFRKSLSLRQTKTDKVDAHTIALMMMSGVNLQSYSDTSYHNEELKSLTRYRFDKVQERAKLKTSISRLVNILFPELEKLVPSLHMVSIYALLAEFPSSAQIASCHLTRLTNLLANASKGHYNKEKAIEIRNAAKHSIGSNMPAKSLELKHTIRLIQELTSEIDEIECSIKSIMDEIRSPILSIPGINYRMGAMIIAEIGDFNRFSSPDKILAYAGLSPSTYQSGQLDGCYSHMEKRGSRYLRYALFNATKFVCIWDNQFSAYLAKKRSEGKHYNVAISHAAKKLVRVIYQLEKSGQLYHRAA

SEQ ID NO: 487875 - protein, 349 aa, unidentified
MKIIGCDFHPSYQQIVMWDKATGEMLERALSHERKEEVRAFYAGLQGPVRVGIEASGQSQWFEQLLAELGHEVWIGDAAKIRASCERKQKTDRRDAELLVKLLDEERFPRIWVPTPAERDARQLLLHRHKLVRMRTQLKNQLQALALNQGVQRKWKLWSETGRKQLEALPLMPWASRRRTELLVLWDQLEASIGELDGAATEQANTRAAVRRLMTHPGVGPITALAFVLTIGPAQRFRRGKQVASYLGLIPTEHSSGGRGQRLGHISKQGNPFLRGLLVEAAQSAVRHEPEMRREYQRLAQRKCRALAKVAMARKLAVRLYWMLRTEVDYAQLIQGSHAGQLESFRGRS

SEQ ID NO: 487876 - protein, 339 aa, unidentified
MNNVSTIGLDLAKKVFQVHGVDQAGEVLVRRTLRRSQVLAYFGKLAPCLVGMEACATAHYWARELSKLGHTVRLIPPAYAKAYVRRNKNDPADAAAICEAVARPAMRFVTIKTAEQQAAAGVHKVRELLMKQRTMLMNSLRGLMAEFGIVVAEGPRHIGELVAILADPGDRRIPAPLHGGLARMADALRHLERQIEVVDKQILDWGRGNETSRHLITIPGFGPILSTAMAAIVVNPATFRSGRDFSASLGLVPRQDGTGGKVKLGPISKRGNGYLRRLLVSGAMLVLSGKRAKQNPWMVKLLATKARKVAAVALANKMARIAWAMMMRQEDFRTMPAAA

SEQ ID NO: 487877 - protein, 442 aa, unidentified
MSELVLLDPRAAFVDVGSEKMHVSIGGGPPEVFGTVTSQLHALRDFLLEHRVCSVAMEATGVYWLPLYGVLEAAGLDVRMVDGRQTRHLPGRKSDMQDCQWGATLHAHGLLRAGFVPPAHIRRLQDYLRLRGEHIAAAAGHVQHMQKALERMNIKLHDVISSLTGASGLAVVRAILAGERDPVALLELCDVRIRKVKAERVVEALRGDWADEHLFALEQAVQSWDHYQAQIVDCDRRIADILARMPGGDGPAAAVEKPAKPRTRPGVNTPQIDNLRELLQRMCDGKDATTLPAHSEYTVLQLVGEVGTDLTRWPTEKHFASWTGLAPGSAQSGKRRTAVKRRRNRAGQIFCVMARALARSKYIALGGYYRRMAARRGGLVANKALAHKLAILFWRVMVKGMDYVEQGLAHYEAQVLQTRQRLLRSLAKQFGQQLVPIQENPP

SEQ ID NO: 487878 - protein, 338 aa, unidentified
MKTYAGIDLHSSNNFIGIIDENDKRLYGKRHRNRLEEVIKALEPFKETLKGIVVESTYNWYWLVDGLQEHDYTIHLANPSAIRVYEGKKHTDDKWDSFWLGHLLRLGLLAEGYIYPKETRPTRDLMRRRTIFVKQRTTQILSLQSMISRNRGLSFPGNSIKGFNESFAEDLFDSPHLVFTAKNQITTIQFLGERISAIEKEILSMVKLEKEFEMLLTIPGVGNILALTIMLEVGDIGRFPKVGNYSSYSRCVNSRRYSNGKKKGENNRKNGNRYLAWAYVEAANFARRYCPKAQRFYQRKMAKTNSIVATKALSNKIARASYYIMRDRVPYDADKLFG

SEQ ID NO: 487879 - protein, 347 aa, unidentified
MLIIGCDFHPGFQQVAIFDNTTGEIQERRLGHRAEAEQFYRAVTGQQVRVGMEACGHYPWFERLLAELGFELWLGDASRIRAQAVRQQKTDRRDAAHLLELLLEHRFPRIWVPSLEERDVRQLLVHRHKPVQTRTQVKNQWHALALSQGVQRKRKLWTQAGRAELEQLEWLPYAAQRRKHLLQSLDRLEQEIAVLNQRVEAEVAQRPAAVKLRTHPGVGPVTALAMVLTLGPAERFASAKQVGSYFGLIPSEHSSGGRQKLGRISKQGSSFLRFLLVEAGQSAVRKDAELCRFYRRLAARKHRALAKVAVARKLATRWYLMLREDWTYAQLCRAMVSVSPSHSVVER

SEQ ID NO: 487880 - protein, 355 aa, unidentified
MNGLRYIGLDVHQDTVSAAVLDGAGKLLMQSVFATRAVAILDFLHGIKGTLHVTFEEGVHSAWLYDLLQRRVARVVVCDPRKNKLLKSGNKGDLIDARKLAELLRNNSLSPVYHGGMSALEVQHRTRSYTMLTEDTTRVMNRLRAVFRSQAIRVHGRKLFRSDLRESHLAQLSTPGLRQRAESLYRELDALHPLRLQAKREMLAECRKHPAMKWLRSVPFLGKVRTAVLIGRVQTPHRFRTKRQFWSYCGLALETHDSAEYRVVHGQVQRKSRPAQVRGLNWNHNHELKGLFKSAATMAAFRKGIFREFYSGLLAKGIRPEMARLTLARKIAAITLKIWKEGETFNAEHIKPQAA

SEQ ID NO: 487881 - protein, 391 aa, unidentified
MPQPNDLSRSLTALDQDSTLIAVVEMSQSSWLVGAIIPGVERRPAKKLEASEGMLLALLHRWRDEAAKAGCTIDRITVAFEAGRDGFWLARWLRQRGIEAHVIHATSIAVSREHRRAKTDRLDAALLQRAFLGWLRGERGHCTMVAIASLAEEDAKRPSREREALVSERTRIGNRMKSTLARLGIRGIRPGLRKAAERLEQLRTPEGAPLPPNTLAELRRDLARLRLINDQIGEIEAARLERLRQQPDEARHPMILLLARVVGIGIETADMLVQEVLSRKLRDRRAVARYGGLTGSPEESGARRREKGLARAGNARVRRGMLQLAWRFLMFQKDSALAQWYRARTADARGATRKTMIVALARKLLVALWKFVTTGELPNGVVLRPAIQAVL

SEQ ID NO: 487882 - protein, 400 aa, unidentified
MISVGIDVSKGKSTVCILKPYGEIMCSPFEMLHGEKELNALDDLLNKLDGEIRIVMEATGIYHLPILTFFHEKGYFVSVINPFAMKKYAKDNSIRGAKTDKLDSIMIANYGIEKWFKLQRYKGDEEIYAELKLLGRRYRHYMELHVKALQELTHILDYVMPGIKKMFNSWNEANGKDKLSDFVEQFWHFDLITAMSLEKFTEEYLDWAKEKKYHRSRSKAEAVYELASNGISTLSSGTPSTKMLVQEAISVLRTVDSSLFLILTRMQELAKTLPEYSTVREMGGVGDVLAVKLIAEIGDIRRLHSAKALIAWAGIDPPPYESGQFIGSKRKITKRGSLMLRKVGYEVMRVLKSHPAPKDDAVYNYILKKESEGKSKKHAKIAGLNKFLRIYYARVMAVYQ

SEQ ID NO: 487883 - protein, 352 aa, unidentified
MRMDRYIGMDVHSASCTAGVLSAKGRRLKSVVLETNGKVLVDFLKTIPSKRHLVIEEGVHSNWLHEILSPHVHEMVVVGVPKNKGQKNDRLDAFGLAEKLRIGAIETRVFKGLGDFAQLGATSKAYRNVMIDSTRVMNRLKGVFRSRGIPTGDKEIYSQSSKDKWLAKLPPKIRPLAKTYYAELEVLMELRKQAQKEMRKEARKHKIYRVLRTVPGMGPNRVAELLPIVVTPYRFPNKRMFWTYCGLGVVMRSSSDWIRAADGSWIRTNTQQTRGLNYNHNHFMKNIFKGAATTVIGQKRKDEPVYQHYLSLLENGTRPPLAKLTIARQIASITLSIMRTGEEYDTKKMKIK

SEQ ID NO: 487884 - protein, 417 aa, unidentified
MKTMTMQPFAAFVGIDWADTKHDVCIQSANSSRREFAIIPHKVAEIDEWAKSLHRRFSGPIAIALELSKGPIVYALQKYDYFVIFPINPSTLAKYREAFQPSRAKDDPTDAELALDLILRHPERFEPLQPQSVEMRELAELVVQRRRLVSDRVRLTNRLRSTLKLYYPQTLEWFNRIDTKLFCGFIERWPTLMQVKRARATTLTTFFRAGNTRNPALLKTRLDSIRSSQHLTLDEAVIAPNKLRVLMLVGMLRVILDAIKSYDQTIAELALEHDDYHLFSSLPGAGPSLAPRLLVAFGEQRSRFKNAAELQKYSGIAPVTERSGNKHWVHWRWRCPNFVRQTFVEWAAQTINKSYWAGEYYRQQREKGSAHQSALRALAFKWIRILYRCWQTRTPYDEATYLKALERRGSPLVVKAV

SEQ ID NO: 487885 - protein, 342 aa, unidentified
MQISTIGIDIGKNSFHFVGFDARGGIVIRRQCSRTQLVRALANVPPCLVGMEACCGAHHLGRILIAQGHDVRLIPPQYVKPFVKSHKNDLLDAEAIGEAVQRPTMRFVPLKTMEQLDLQAIHRLRTRLVGRRTAVINQMRGFLLERGVTCPIGREALVKRFPEVLDNPALGLSVRFCRLLKQLRDEWRLLDDDIEDVDQEILSLARDDEACDRLMQVPGIGPLTATALVAAVGNGAAFAKGRDLAAWLGLVPRQHSTGGKTVLRGISKRGNAYLRCLFIHGARSVCRHHHQKPHRLGRWLTSLEARAHPNVVAVALANKLVRTAWAVLQRNTHYDGRLLVNA

SEQ ID NO: 487886 - protein, 349 aa, unidentified
MHQTIPHIKNGLCIGIDLHKCQMTIAILDAATGDIRFERIACKCRDKIIAFFENLPKPHIVAIESVGFYRWLWDLLEPICSELVLADATQCRALAGRRIKTDREDAANVAELLAAGRLPTAWAPPTHIAALRDVTRHRHYLSQQHARVLHRVKSIMNQVNRPGPARLKADGLLRYIKAQRDKLPEQFVDQLEMAVDELILLERQLARIDIRLRETLGDGPFQPLADRLMSFPGVKYIIAATIIAEIGDFTRFERRDAISRYAGLDPRTFSSDTTTRTGRISKTGSPDLRWALVQAAWVAVRCDPAVKSRWLRLRKRMGGKRAIIAIARGMLRWMWAAERDRTNYLRRAA

SEQ ID NO: 487887 - protein, 348 aa, unidentified
MYYVGVDLHKETSWFYIVDAQSKKYDSKNIQNKPEILKKYFEQIPKPFTLAVEATYNWYFFVDLAEQYAQKVFLANSYELKAFAKRHKKTDKIDARLIAHILQKGFLPVVAIADQETRQVRELLRYRLNLVTDRSRNIFRLKALLDKLGLNSQLDFTTYKGLKSVVIEKLPGIYTRLIKNYTERITRLAQKLTGIEKEIGTVSNLDHDMVNLMSIPGVGHFSAALIKSEIIDIARFASFNRLCAYAGLAPRVSASANKTFHGPLNINRRKNLQWILLENVYHFILAVPEMKERYGILKQRKGHNTAKVVLARDMLKIIYHVLKERRPFYSDKKEFQIQSVAAPALCGV

SEQ ID NO: 487888 - protein, 343 aa, unidentified
MYYIGLHVHKKTISYCVKDAAGKIHGEGKIGSTRRELDAWIKTLPHPRMMAMEATIFTGWIYDHLLPHAEKVKVAHPLMLRAIAAAKRKNDKIDASKIADCLRCDFLPECYMTSTEIRDRRRTLRYRGLLVKQAVQMKNRISGLLMETGVSYNKQRLHKVGYFDELMSGNEEIDDSIRPLLKLSRETINRSQKLDYALVSSLERDPLLKERLERLRTVPGVGPITALTWVLEIGDVARFQSIKQAISYCGLCGAEKRSADKVMRTPISKQRNKHIQQVLVEAAKLAPRFSPELALIHEKEKQKGNRIRATLAVARKMVAWMIAVERRKQVFVPAEKFGGTVAA

SEQ ID NO: 487889 - protein, 351 aa, unidentified
MNYYISTTEYNCGIDLHSRQMYVCVMDKQGNKLVHKNIRNNDFNHFLKIVADYRHDMTVVCESTFNWYWLADACFDADIEFVLAHALYLSHIHGGKNKNDRIDSEKLAHLLRTNLIPPAYVYPSEHRPVRALSRQRMNYVWDCATLKTHLNMNQQSEGLTPAKKSGKNWDLWEERITDNYENPLHKFAVSCDIELIRTYETQIAKIEKEIIRQTKNNLSSDFNVLLSMTGIGRILAMTILYEIDTIKRFPSVKDFLSYCRLVKGSVASAGQVKGLTGGKMGNAYLRWCFGQAAITAKRKDSPLGTYAAKLIEKRGKFKGNAILASKMARSAYFMLTNGTVFDVERIITTSI

SEQ ID NO: 487890 - protein, 390 aa, unidentified
MILVGIDVAKDKHDCCITNTDGEMLFDIFTITNNSESLDILYERIRSIAPDLSKVKVGLEATGHYNYNILSYLLDKHLTAYVINPLHTNLYRKGLSLRKTKTDRIDSRTIALMLLTDLSLKPYSVSSYHRENLKSLTRYRFSRVQERSRQKSSISRLVTILFPELSQLVPCIHISSIYTMLEELPGASYVASVHLTRLTNILSKASKGRFGREMAITFREAARTSIGAKIPAKSLELRHTIADVRAIESEIREVETEIQKLMDEETTTITSVPGIGTQMGAIILAEIGDFSRFDSPDKILAFAGMSPSTYQSGKMISSYAHMEKRGSRYLRFALFNVTKYVCNYDPGFAAYLAKKRAEGKHYNVAISHAAKRLVRMLYAMETNGTLYEAA

SEQ ID NO: 487891 - protein, 344 aa, unidentified
MKKNLFFIGLDISKADFAASIYQVPDQPIVTKEAIPNDRKGFEMLLLWLNDYHINKKNGHICMEATGVYSQAIAYYLLFAGFPVSVEPPLKVKRAFDPVGHKTDPVDSKQIAEYAYRFQDELTSWKPRDEILEKIRQLLSVREQFTKQKVALDNSIQAYSKQRVQVALIKKAQKETLNQLKKQIARIDKELEKLIKQDPEIFQKASNLKSIPGYGMLLAAHLLVITENFTKIQNSKRLASFVGIVPYQHQSGTSVYKRAKIRHFGPGPSRKLLRLAAQSVATHNATFRRYYLRKLDQGKPKPLVLNNIANKLLKIACTIIRNNTRYIKDYRSINPMYLKSLKSA

SEQ ID NO: 487892 - protein, 366 aa, unidentified
MSKSSTAVSNRVEIFKDDKLTIGVDLGDRFSHYCVLNGAGEVIWEDRLPTTPKGIDEVFSKIPANRVALETGTHSPWVSRQLARLGHEVIVAHARNVRLIGGSSRKDDRLDARTLARLARIDPGLLGPVRHRSAKAQIHLTVIRARAGLVSTRTALVNAARGLTKSYGERLQKCGTQQMNRESAKGLSRELRDALDPLLAEIESLNARIAEYDRRIEQVAKEVYPQVALLKQVKGVGTLIALTYVLTLDDPHRFRRSRDAGCFVGLRPGRRNSGMSQPQLHISKEGDRYLRTMLVQGAHYILGPFGEDSDLRRWGMRLAERGGKNAKKRAVVAVARKLAVLLHKLWVSGEVYEPLRNNHKVVGRVA

SEQ ID NO: 487893 - protein, 361 aa, unidentified
MRIIGCDLHARQQTLAMLDTTTGEMVNLTLMHEGGSVREFYSQLPRPVRVGIEATGSMHWFLNLMDELGIECQVGHPASIRAAEPRKQKHDRRDAELILKLLAEKRFPAIWLPTRELLDLRALLLHRHQWVRMRTRIQNSLQAIALANGLRRGAGLWSHDGQNKIACLPLLPHTADRRSALQAKYQQMEPEIANLTQQVAEQAAQRSGAQLLMTHPGVGPVTALATDVFLGDPKRFADGKALASYVGLIPGERSSGRRQRLGKVTKQGSPLLRFLWGEAGAHAVRRDPELKRFYRRKLVQKGLGKARVAVARKLGIRLWIMLRDEIEYQEFCRRGQKQESGAACAGMPETANGANRHRPVD

SEQ ID NO: 487894 - protein, 370 aa, unidentified
MTISNILFIGMDVHKDSIEIAIADGDSYEVRRYGRIGGTHDAMRKTLRKLVSQGKSLHFCYEAGPCGYELYRYLVSEDHDCWVVAPSLIPKRPGDKVKTDKRDAVQLARLLRAGELTPVYVPNREDEAIRDLSRAREDTMLVQKSARQRLKSFLLRHDIRYQGKTSWTEAHLRWLADEVRCPSPAQQIVFQEYVNAVTESQQRLQRLDEQIKHFAQAWRLYPAVEALMSMRGVKMIVAITVVSELGDLSRFDNPKQLMSFLGLIPSEHSSGPRQKRGGITKTGNGHVRRILIEAAWCYRYPAKVSREMQLRQAKVPLVIRDIAWRAQLRLTQRYKHMQSKGKPHNVTVVALARELAGFMWAIVNEVKYPQ

SEQ ID NO: 487895 - protein, 382 aa, unidentified
MIYQRTSVGLDVHALSVVACAIDGQTGDMFKQRLCPDHGEILAWLRSLPGPVKVVYEAGPTGFGLCRSLNHAGMECVVVAPSKLQRPAGDRVKTDARDALHLARLLRLDEIVEVTVPSVEQEAARDLVRAREDARGGDLMRCRHRLSKLLLRQGIVYSGGAAWTGAHDMWLRGQKFDQPALQATFDSNYEAMLLTRDRRDRLDTAIEEMAESSPYTPMVRRLGCLRGISTLTGFGLAVEIGDWQRFTGSTIGSYVGLVPSEYSSGGTSRSQGSITKTGNGHARRLLVEAAWHHRKIYRNPGQVMRTRWEKASPAARARGHAATTACIIGGSSSPLVRSVRWSPMSPSPENLRGGGAGRWRSSTTSPELVIPPRFRSIDNPRA

SEQ ID NO: 487896 - protein, 458 aa, unidentified
MGRSKSTDRVRRAMAMVHPNAAAIDVGATTHVAAVKADRTPEPVRSFGTFTKDLHRLVDWFAECGVDTVVMESTSVYWIPIFELLDSRGFAVFLVNARDAKHVPGRKTDVSDAEWLQRLHSYGLLRASFRPKGRIVELRAYLRQRERLLEYGASHIQHMQKALTEMNVQLHHVVADITGATGLRIIRAILAGERDPAVLAHLRDSRCHATVETIEKALTGTYRAEHLFALEQALALYDTYQEKASSCDTRIEAVLKELSIRRGREAGPLPSPRQRMRRQPNGMDFDVRAALYALLGKDLTQINGLGPYLALRLIAECGDDLSAWPSAKHFTSWLCLAPSNKISGGKVLSSRTRPSASRAAALLRLAATTVGRTDTALGAFYRRLSARIGKAKAVTATARKIAVLFYNAVRHGMEYVDPGASFYETRYRARVIDNLHRSAKAFGFALQPLEPTAAIPVS

SEQ ID NO: 487897 - protein, 342 aa, unidentified
MNADYDGRQYVGIDLHRRRSVIVRMTPDGERLGWVRIDNDPVALGLELAKSGPDPEVVLEATYGWYWAVDVLQTAGATVHLAHPLGVKGFAYRRVKNDVRDAADLADLLRMGRLPEAYIATPHERELRELVRHRAKLVALRSGLKAQVHGVLAKQGLLPEVSDVFGPTGQAWLRSAPLDLVYRQRIDSLLELIDAYDGEIDLFRQMIANRFTGHRGYRVIQQISGVGPTFAAVFVAEIGDIGRFARPEKLCCWAGLTPRHRESDTTVHRGPITKQGSKLVRWAAIEACQRTRPGSKLAADRTRIITARGRNIGVVAAARRLLTLVYYGLRDGEIRTLAARAG

SEQ ID NO: 487898 - protein, 318 aa, unidentified
MTAIDAQDGYACFLGFDVAKDSVTVFDSRTGEYRELPNRPAALARFLRAYGAQTYAVCEPTGGYESILLQALGRAGIATHRADTLRVKAFIRSLGKLAKTDAIDAMGLSRYAQERWRELALWRGRSAEIENIQALVQRRQELIDMRVAETNRSKGPSAGRIAASLRSVLGVLNRQIDAIERKIEEAFAASPLLARTARALQSVPGIGRLTACVLCALMPEIGTLSGKQAAAMAGLAPHPRDSGTLAGYRRIRGGRPQIRKTLFMPAMAAARSHTDLAAFHKALIARGKKPLVALAALMRKIVVIANARVRDELASQQS

SEQ ID NO: 487899 - protein, 330 aa, unidentified
MKQISHSKSIQYIGVDVSHHQLDFAYQEDGKWIIKKIPNKSNSIKKWLDKLDASFCQLVFEPTGTYHDRLMHLAEEQGIKFSMVNTRISFHYSLAQGHTHRNDAQAAQTLATIGQKMNLAPSQTPGNQKRKRKQIHMALAALSKQRQALMNQLHSLDQLYEPEYEVVNALKTVLKTTENQIKELENQLFQYTDQQTQQVVDLLKSVVGIGPKSAAQIMRYLGDLSHFNNSKELIKFTGIAPCSHQSGSSVRTKARISRQGPAQLRATLYMAAISAKSHNLACKAMYERLRARGKPHKQAMVAVIGKLLRQIFAVVKTKTPFDNQRYLAYC

SEQ ID NO: 487900 - protein, 370 aa, unidentified
MLDTTTFVGLDVHARSIKAVSLDVMTGEVRCATFGYDAGAVAEWVRSVDPKAKCVYESGVTGFDLQKRLSGLGVDCVVGAVSKMIKPSADRRRKNDRNDAEFLARMLSVGNVVEVWVPDDECEAARDLTRALEDARDDLSRSKQRLSKFLLRHGLVFDERTPTGRRKGNWTRAHWSWIESIRFAEGADNDVLAYYVDAVRRAAEEKARLEGLVEAEARKPRWRRRVDSLRCLKGVDTATAADLVFEAGEFSRFRNARSFAAWVGLTPSEHSNGESDRRGAITKAGNKHLRKALVEAAWHYLTCSGRPKDLAKGQAPDRVARRHAAKGVRRLVERRGTLLARGVHNNKANVATARELACWVWAVGLMAEEA

SEQ ID NO: 487901 - protein, 411 aa, unidentified
MDKVYDKCCGIDVHKKLIVACFRKGSKKELRNFGATTRELLELANWLQNGGCEMVAMESTASYWKPLYNILESSELKAMVVNASHMKAVPGRKTDTKDAEWIAELLQHGLLKASYIPDKQQRELRELVRYRKSLVSERTRELNRLQKMLEGANIKLSGTVSDINCMSARNILEYLLTGEFFDEAKYDEMYKQKIIAHNLKASKEQIIDDLNGVMTPLQRRMMKELLSHLDELNVHINNLEDEIDNFMKPEEKQATQAIQDVTGIGKNSSQAIISVIGTDMSRFPTAGHLAAWAGLCPGNNESAQKRKTGKMRKGNALLRSTLVVCAHSATRNKNSYFYAQFMRISSHRGKKRAYVAVAHSMLIAIYHILKDGVVFKDLGADYYNQFNMERKINAYLKKLKALGWEVPVVAA

SEQ ID NO: 487902 - protein, 410 aa, unidentified
MRFYTTPHRYYCGIDLHARRMYICVLDAEGQIRVHRNGPATPEHFLTTIAAYREDLVVAVECIFTWYWLADLCAQEGIAFVLGHALYMKAIHGGKAKNDKIDAHKIAVLVRGGMLPMAYVYPREMRATRDLLRRRCHFTRKRAELLTHIQNTASQYLLPTLGKIAYHGNRVGVAEHFRDPEVRKSVETNLALIDEYDRLLTELELHLTQTAKVHDVNAFYRLRSVPGIGKILALVLLYEIHDIHRFPRVQDFVSYCRLVKCAKQSDGKHYGYSGTKIGNAHLKWAFSEAAVLCLRKNPPAQRYVARLAHKHGKGKALTILAHKLARAVYYMLRRGQAFEVTKFFSGTAGGDRLPRAPRMAAAPAGNDLDGGRYLDPPEIKRRGAPRRRHERDGVTTKRVVDAAARVAEER

SEQ ID NO: 487903 - protein, 405 aa, unidentified
MRIHPSVTLERVTEAVERHHTTLDNPCKSPRRACGTMSGSGTGGNLRNPGASEPVTQLRIPPVSASNSPNSHQGRVATLLPQGRAKMEGSAEVFVGIDVAKAKLDVHVHPLGTRFEVSRDPRGLAELVTRLRAIAPALIVLEATGGLETVVVSALGTGGLPVVAVNPRQIRDFARALGRLAKTDRLDAEVIALFASRMQPALRPLPDEQAILLSELLARREQLLGMLVAEKNRRQQLQARRLVKQVDAHVLWLQRQISGLERELDEAIRQTPLWRDKAEQIESVPGAGPTLTRTLVLELPELGTLTRRQISALVGVAPMAAESGTMRGARHIRGGRAVVRAKLYMATISAIRCNPPIKAAYERLLDAGKLKKVALVACMRKLLGILNAIVRSGQKWRNVEIAASA

SEQ ID NO: 487904 - protein, 359 aa, unidentified
MDTRNSSLGQTDYFIGIDQHKHYSMVTVIDSVGAKLIEEKLYHSTKDSIRKFFSQFPPDSTQIALEATGFWYWLYDLLESLHLTVKLVHPLKVKLIAESTIKTDKIDAYVLANLLRTGYLPTSYIPSTDIRNQRELLRHRIVLVYQRTSLKNRIESVLSKLGINKAVCNLYSKAGKSWLRGLNLSGPYQLEINNYLEIIEKLTDMVVGLDKQIKKYLVKDERAKYLMSIPGIGEYTAYLILAEIGEIDRFSSAKKLASYAGLVPSVSQSGQHTYFGRITKQGDTYLRYGLVESSHVTVRFDAGFAKRYAQLKSKKGSAIAITAIARELIEVVYYVLKERRNYYPRYQKIKSPELVNATE

SEQ ID NO: 487905 - protein, 358 aa, unidentified
MKKLYVGVDLHKRSCWVTVLDADGHVLESRRIGTTKPELLEFFGKVRKPAALAVEATLNWYYFLNVIEPLGLELHLVHALKTRAIASARIKHDRLDSRVLAELLRTGFLAEAWIAPRPVREERQLLRYRVHTVQWATRAKNSIHGVLNRNGIRSPFGSPFGVKGRSFLQEVELPKTDRWEVDGQLERLDLLGTQLAALDREIRKKAKASPVARALEQVPGIGPFIASLIIAEVGDIRRFPSAKHLVSYTGLAPSLYASGEHRWGGPITKQGSSVLRWALVQAAHRAALSPRFYGFYQRQRERHGASRAAVALARKLVVIVFYRWRHALHVQEALPQVEKVRERTSAGAWSEHRPSASD

SEQ ID NO: 487906 - protein, 349 aa, unidentified
MRCFQPPADTRFYAGVDLHARSLFLSILDRDGQTRFGRNLPAAPEPFLRAVQPFRDGLVVGCECLHCWYWLADTCRDHHITFALGHAWAMKAVHGSKTKCDRHDAEAIARLLRGGNFPLAYAYPKERRGLRDLLRARLRLVRQRAELYGHVHTARRQANLPPVSNDVKYKAKRAGCTADLADPFVRRRVETHLALLEPLDTTIRRLEAEIEDAAQEHYPTELAVLQSTPGVGPVLSLTILLEIDTIDRFDTRQQFCSYARLCGAVQESAGQRVGLGNRKAGNAWLKWAFSEAAVLSAQKDERIGRLLERLASKLGKAKALSALAHKLGRAFYHMLHTKQVFDVNRFVRP

SEQ ID NO: 487907 - protein, 347 aa, unidentified
MKFYTKQHKHYCGIDLHTKKMYVCIMSQEGEIVLHKNIDTNPDMFLHIIQPFKEDVIVGVECMFTWYWIADLCKKEGIEFVLGHALYMKAIHGGKAKNDKIDSRKIAGLLRGGMFPPAYTYPAEMRATRDLLRRRNHFTRKRAELYGHIKNTASQYNILDSIGSISRKRNREGLIEKFEHEDVQKSIAANLQLIETYDSLLAHLEYEIEKSAKTHDPVAYTLLRTLPGVGPILSLVILYEIENIERFPRVQDFASYCRLVKSTRESNGKVYGAGGKKIGNAHLKWAFSEAAKLFARWNEPGKKYLERMARKHNTGKAYSILAHKLGRAVYFMLKNRVPFDQKKMLGY

SEQ ID NO: 487908 - protein, 413 aa, unidentified
MEVVHVRCAGLDISKKDAKVCVRVQGAGGRKTSTTVTTWGSMTGDILRLRDHLVAEKVTCVVMESTGDYWKPFYYALEDALPVMLVNPREARNRPGRKTDVSDAAWLADLAAHGLVRGSFVPPEPIRELRDLTRARTALAHDRGRLTQKIEKVLESAGIKLSAVATDITGVSGRAMLEALIAGERDPEVIADLAKRCLRRKIPDLTEALRGRFTAHHGFMIRMHLDLIDQHTQALQRLETRIEEAIAPFTAARELLCSIPGWSTKVAEVFIAETGADMSVFPTAAELVSWAGLSPGANESAGKIKSTKIRPGNRHLKAAVGIAALVAARSTNTTFFGARFRRITARRGPMKAIVAVEHAMVTTAWHMLVNGEFYRDPGPDHYTQRRPEHTKTNAVRQLEALGYRVTLEKPDAA

SEQ ID NO: 487909 - protein, 391 aa, unidentified
MCKVIMIGCDLHDATTVLKVADGPDATVRKGFATSNRLAMIEWIKDFAFQRGASRIVFAYEASGQGFGLYDDLTDAGIECHVLAPTHLPHTTHSRKNKTDDKDALMILDEVRAHVLAGRTLPDVWVPNHQTRDDREIVRLRLEVATQRTRLKNQIRNLAKRSRLAFPDDFTSSGDWSKRSVAWLREVATGKTGALREGVRTALASLVELYQAMSVQIQALDQAIKRLSRTERYAQSSRKLKLLSGVGTLTAMVFLTELGDLARFANRRQLAAYLGLAPSAFESGERDDRKGHITKQGPPRVRHVLCQAAWAALRVSPEWKAKYDRIRRGSKSRGRIAIVAIMRQLGVEMWQTARSPELDAMLDERDALASQKTKKTTSARAPQKGAARHPE

SEQ ID NO: 487910 - protein, 384 aa, unidentified
MIKHNILFIGLDTHKTFTEVAYIEDQRGARPIHLGKILSNKAAFKKLARQLESKYPDATLHFVYEAGPCGYWIYRLLTSLHHCCYVIAPSLIPKKPGERIKTDKRDALKLAKLLKSEDLTPIYVPEPEDEAVRDLSRARETTMKDLKDAKYQLKALLLRNNINSKVKDNWSLQHLRWLAELVLPHPCQQIVLQEAVSTITERLKRLKRLDNELTHQVKNWRYYPVVKAIQALRGVRLLVATGVIAELGDLTRFDHPRKLMSYLGLVPSEHSSGGKRRQGAITKCGNSRARRLLVEGAHSYKHNANISKEMQLRQEGLSKEVIDMAWQAQLRLCRRYSRLMHKGKHRNVVVTAIAREMIAYIWAISREVVLPVIDVKLRLTRMPA

SEQ ID NO: 487911 - protein, 388 aa, unidentified
MNYMGIDISKYKHDCFVLSDFGEVVNTGFSFTNDADGFKRLEQELNLCGKGNVRIGLEATGNYGINLKLFLEKIGFEFMEINPLLVKEHVRSNSLRRTKTDRLDAKAIAGYMLSKGYRPHQTEFYSKFALKQLTRFRSRLVSIRSSYLVKMTNVLDCIFPEFKPLFDNKFSATALFILANYPSPEAIANMNSRSYDILRRKSHGKFSIDKFVTLKALAKNTVGVYDKCYGDQLDTLLDLYSQIDCKIDEVEAEITQIVEKLNPPTLSVKGIGPISAASIVSEFGDFSRFPNPSKMLSFAGLEPGYFQSGTAEHTGHMVKRGSPFLRSTLLNCCRSLRLHNETFAAYYRKKASEGKHESVALSHMAKKLVRLIFTLETKGISFDPDKLR

SEQ ID NO: 487912 - protein, 395 aa, unidentified
MKRQENKACGADIHKRFLMACILSRDGSKVLNRFDMTVEGVLGFASWLKDNNCKKVAVESTGNYWHLVYQVLDDEFEFILGNAFKTRRHSGAKTDKRDAEWLAELCLNNQIEPSMILPKEDRELRALTRARKGYVDFRSKLKARTIQELEACTIKLASELSDVFGKSGRHVLQGLVDGRSADVIVESIPSKKVKKNKEMIKQAIIAGLSPISIFLIKSHIQMIDEVDKKLVQLDAQISRLLKARKRDVEIAMSIPGIGFVSAAAILSEIGDYRNFASGKKLAAFSGLDPSVYESAGKRYNGKITKMGSKYLRRMIIECAHALSRTKAKTQLKRFFLRIMARRGKNIATVALARKMLVVLHHLLINQEMYKDDGLAKPKNVKVSFSEESKLDPSSL

SEQ ID NO: 487913 - protein, 465 aa, unidentified
MAARKQKPQKKRMSARLVEDEDYQLRHEKVAGIDIAKASGMVCLRLPPAEGKDRRSSKVWETGATVPEIEALAAELKQAGVELVSMESTSDYWRIWFVTLEAAGLNVQLVNASQARNLPGRPKTDKDDSQWIARLTEMGLLRPSFVPPPEIRALRQYTRRLVHLGQDRTRSWQRLEKLLEDALCKLTSVISKLAGSVSGRAMIEAMIAGERDPHVLAEMAMTRMRPKIPDLVKAFTGMRFGDQHAFAAASLLREIDFVSAEITALEEQVAAHLATIPAAWGVDADGTAGPDAGLGPDAAVLPAAARLDEVTGISFLSAAGIIAEIGLDMSRFPTPDALVSWAGLAPVAVQSGPRKNHGKKGHGNTYIRRLCTLAADAAAGTDTFLGERHRRISSRGGGRKKANVAVGRSILVIVWHLLKDPAARYTDLGPDHYAKHADTSRKTRGHIRQLEALGYDVVVTPREAA

SEQ ID NO: 487914 - protein, 475 aa, unidentified
MKAQKAAPSEPVRKAIRPARHLPVVQPHAAGIDIGATEHAVCVPADAVPPGESPVRQFGAFTGELDQAVEWLGRCGVKTVAMESTSVYWIPFYQKLETAGMQVVLVNARHLKRVPGRKTDILDCQWLQQMHSYGLLSGSFRPSDEICSLRTYVRQRVNLVAGCGQQVQHMQRALDQMNVHLHHVVSDLDGDTGLRILDAILSGERDPQQLVRLRDPRVRKSTEAEMEAALRGDWREEHLFVLRQSLESYRALQGQIVQCDNAIEKILERMSANPSEVPPSQRPANPVASQKQTPKRKKRTRGNGPRQDLRAQLQRICGVDLTQVVGLNVLSVLMLIAEIGVDMSRWPHAKAFASWLGLCPANKISGGKVLSSRTAHVANRAAILLRTLAPSVGRTDTWLGSFHRRMKARLGPAAANTATARKLATLVYHLLRYKEEYIDVDRLVYEEKFRRCRLGRLRSQAAELGYEIVELKSVA

SEQ ID NO: 487915 - protein, 373 aa, unidentified
MEHNITIVGLVGLDAHKNSIEIVTAETAGNQEVRHYGKIGGDMTSLDKAIRKLRSNGAELHFVYEAGPCGYEIYRHLTKQGFQCIVVAPSMIPKKSGNRIKNDRRDAENLARLERAGELTKVYVPREEDEAMRDLTRAREDAVKAQRAARQLLGAFLLRHGHRYPGKQSWTPAYMRWLSDITMPHPAQQITLQEYIHTITEGTGRVTRLTDQIQKLLPEWHMAPVVKALQALRGVAPIVATTSVAEIGDMNRFERPKQLMTYLGLIPSEHSSGESIKRGGITKTGNGHVRRAIIEAAQAYSFPARVSRHILKRQEELPQSVREIAWKAQVRLCGRFRRLMARGKQRNKVVTAIARELAGFMWAIAKEVQVPGV

SEQ ID NO: 487916 - protein, 381 aa, unidentified
MLAERTWVGLDVHARSVVGCAIDDEACEIRSQRVAPQTDAIVAWVLELPGPVAVTYEAGPTGFGLARALAAAGVRCEVVAPSKLERPPGDKVKTDRRDAERLARLLRIGELPAVRVPSEAEEAARDLVRAREDARGDLMRARHRLSKLLLRQGIVWDRSAWTGEHIDWLRRQHFDRRGVQLAFDEALDAVFSVHARRDRLDTAIEEMAETEPLAGPVGRLRCLRGVSTLTAVGLCVEVADWHRFTGSTIGSYLGLVPSEFSSGARRVQGGITKTGNAHARRLLVEAAWHHRRPLRPSRERARRADGQPAAVRARAEAGNRRLHQRWCRLEQRRKRPTVSVVAVARELAGWCWSLAVLDQDGLDQDGLDQDGLDEHQHHAAA

SEQ ID NO: 487917 - protein, 316 aa, unidentified
MGTAQTYVGIDVAKQHLDVAIRPTGEYLRASNDDGGVGSLVERLGQEGRVLVVVEATGGLERVLTAALSVAGIAVAVVNPRQVRDFAKATGRLAKTDRIDAAVLARFAEAVRPEPRPLADEASRELSSLVARRRQLLSMVTAEGNRLPHAPKALRKRIEAHLRWLRKEVGRTEAELGRVIQENLAWREKDVLLRSVPGVGPAVSAVLLAELPELEYLDRRRLAALVGVAPMNRDSGTLRGLRTVWGGRSGVRTALYMAALVATRYNPAIKEFYERLLSKGKPKKVALTACMRKLLTILGAVLRDRTPWRPTYPLTP

SEQ ID NO: 487918 - protein, 338 aa, unidentified
MKSYAGIDLHSSNNFIGIIDEQDQRLYQKRLPNRLEHILQALEPFKESLEGVVVESTYNWYWMVDGLQEEGYKVHLANPSAIKQYEGLKHTDDKWDSFWLAHMRRLNILKEGYIYPKEERPVRDLLRRRLLFVKHRTAHILSLQSMISRNLGIQMSCRAIKRLDEEAPETLFDSPHLLLAAKSNISVIHFLKERIKSIEKAVKSHIKLRDEFKYLLTVPGIGDILTLTIMLEVGDINRFPQVGNYSSYCRCVKSERLSNGKKKDENNRKNGNRYLSWAYVEAANFARRFCPYAQAFYQRKMAKTNGIVAIKALSNKLARASYYIMRDQVPYDPKKLFR

SEQ ID NO: 487919 - protein, 315 aa, unidentified
MVSYLGIDVSSLSLDAAVRPQGTRLHVSNDPAGFEALLDGLCGLSIKRVLLEATGGYERNILRFLQDAGYKVIRVNPRRARAFAESIGVKAKTDAIDAEVLAHFAEVIPDQPTLRISPERALLRELLQQRDRLVQQRDDDRRRLKQAQFSAVSDFLKANLQHFKSQIKLIEQAISQQTEALKDERVTQLVQVKGIGVVTAGKLITLLPELGRVESKEIASLVGVAPFNHDSGKSVGKRSISGGRFEARRSLYMSCLVAIKYNPALKARYEALRGRGKVAKVALVACMRALIVRLNAMLRTGKPWLDLVLPQPMRT

SEQ ID NO: 487920 - protein, 346 aa, unidentified
MPRYSTAFGMDVHLRSTTVCALDAETGEAVTRRFRGNPWGEVAEWMSGFPGPSLAAYESGYLGFAPQRELSGLGVDCVVAAVSKVPRSAADFSSKNDRNDAARMAKAILSHDISPVWVPSPEIEGLRDLAGAHDAATARLAAAKRRLLAFLARRGYAYGGTTPAGNPRRYWTYDFLRWLDKVRPADDGGIRALAALRNEVEAAAETRDDLLAEYRAAVAAGPLSAEVEALQSIKGCGFALAAAFASEVGDFSRFRSGRQVTSYFGLAPKQRSSADSVRLGGISGAGNALVRRLAVEGSWSYVQASHQPKLMPKGSGVPLEVRMHGRKGSERLLRRRVLMFTKKWSE

SEQ ID NO: 487921 - protein, 300 aa, unidentified
MQDDFSILPSPGQADCGRPSQKTNNMNTSHPYDLVIGLDRSDKKADLHLITTATGQRRAQTIDTAPEALWEWLLEPRQQHPQARVALCLEQPAVHLIAFLEAYDWITLYPINPITLQKFREAFVTSRAKDDALDAQYLALIRHYDTQITTLEVQLKKLTKERAGRDYPLLPTTPGIGEYLGLTILHELGDIARFPTVKDFLSYCRLVKGTVASAGQIKGLRGAKLGNPYLRWAFGEAAVIAKRDPAVLGPLAQRLEARMNGNKFKANTVLAIKLARAVYFMLRNHTVFDPDRLVAALSKN

SEQ ID NO: 487922 - protein, 343 aa, unidentified
MDHFAGLDVSVKETSVCIVDDVGKIVREVKVASEPEVLLAVLKKPAYRFKRIGLEAGPLSQWLFSALAEAELPVVCVETRHMQVVLKAQLNKTDRNDARGMAQMIRAGLYRPVHVKTLRSQKLRMLLTHRKLLQSKAIAIENDLRGTLRNFGLKVGIAGTVKFEARIRELVENLPDLAALVEPLLIVRRVLHEQISVLHRRLLAIVRDDAVCRRLMTIPGVGPVVALTYRATIDVPARFKNSKAVGAVFGLTPSKYQSGEINRTGAISKCGDEMMRVMLYEAAQVMLTRTNKWSWLKAWAMKIARQRGMKKAIVALARRLAVIMHRIWVDGTEFRWTRKVVAA

SEQ ID NO: 487923 - protein, 416 aa, unidentified
MNAVGIDVSSRKSTVAVLRPLGEVVCLPFDVTHDIAGLASLAEKLKAIDGETRVVMEHTGRYYEAVAKALHEAGFFVCAVNPLLIKEYGANSLRRVKTDKADAIKIARYALDNWADLRDFTPMDAIRYDLKTLNRQFQLASKQRTASANNLIALLEQSFPGIRKCFDSPVRSDGTQKWVDFAHSFWHVDCVRKQPFPAFCERYRKWCKLHTYFFKLRNAEKVYALAKRAVVLTPKSKVVKVLVQEAANQLISISRSVEVYRAEMDRLAAMLPEYPVVMAMYGVGKSYGPQLMAEIGDVRRFERKQALVAFAGIDPMPNQSGDKNVRSNKSSKRGSPYLRKTLFNVIRTYLQCAPQDEPVFQFLNRKRAEGKPFYVYMLAAANKFLRRYYAKLRDYFASLDTLQPVAPIPTILKAAL

SEQ ID NO: 487924 - protein, 347 aa, unidentified
MKFYTQMHKHYCGIDLHARCLYVCILDQDGNILVHRNIKADPNALMRLVTPYQDGLVIGVECMFSWYWVADLCRDQQITFILGHALYMKAIHGGKAKNDKIDSHKIAVLMRGGMFPQAYVYPREMRGTRDLMRRRIRLMRLRAELFTHIHNTNSQYNLPPISKDLRHIGNRHGIAERFADPGVQKSIELDLSLVGFYDQQLNKVERAVQTHAVNCDQHSLILLRTIPGIGRILSLVILYEIHIIERFPTVQDFASYCRLIKCQKESAGKLYGTSGKKIGNAYLKWAFGEAAVMFLRNNSEAQLWLKKTANKHNKARALTILAHKLGRAVYFMLKRKTVFDQERFLNN

SEQ ID NO: 487925 - protein, 353 aa, unidentified
MYYVGADLHKEQTWFYSMDHNGAKIDSKSIANSPDSLKNYFAKIPTPFTLAVEATYNWYFFIDIAEKFSQHVYLANSYELKAFAKRHKKTDKIDARLIADILRKGFLPAVFIPSPVIRDLKELLHYRINLVRDRCRTIFRLKNTLDKLGADSSGDFTTEKRLRMIPIDSFFEHYRYIISGYRDHIITLSQRIHSMKTYLRNELLEDKEIKNLISIDGLDYFSAALIKSEIADVNRFASFNRLCAYAGLAPLVSQSGDKTARHGSLMTNRRKNLQWIVLETVFHFIKTSNERQAHYEELKARKGANTAKVIMARQMLKIIYHVLKEQRPYYREQSEARRPKDICQIQPVAAAAL

SEQ ID NO: 487926 - protein, 322 aa, unidentified
MFDTSIVVAGIDTGKGKLHVCLLPEGERFSVSNDDRGIATLVARCRKAGVVRAGIEATSIYHRAAARALREADIETAELQPRQARGFAVALLRRAKNDTIDAFVIAKLVEALNGPWKQPPAAHLEALAEALTYIDMLDDRLVVLKTQRERFSSKRFLDRFDKEIKALEKQQRAELRRLIARLRKDATMSDKFDLLLSIPTIGERTAIGMLIRMPELGSMTREQAASLLGVAPFDDQSAKRDGQRHIAGGRARLRKTVYMAAFSGSQRWNEDLKRFYERLRVRGKAHNAAVIACARKLIILANTVLMRGTPWQDRRGMPCLVK

SEQ ID NO: 487927 - protein, 418 aa, unidentified
MKSNKTEKIKTINQKTLIVALDIGKKVHYGYFRTPKNKDIKPFPIYNTGQSFKKFWKKLCRFKEEHMLDEVVIGFESTGPYAEPITNYLRKRPVNLVQVNPMHTKRVKDLTGNSPNKTDKKDPRVIADVISLGHSLTVIMPEGAAAQLRRLTHARERSIERRTAMNNQLQHLVFVIFPELVSIIKPSTKTGMYLIENFLDPESIVSIGIGVLCNIVRKISRGRISIERAEKLYNAAKQSVGITEGKESVILETSHLVSNIENENRYIKSLEEQMVEQLEQIPYSHSILSVKGIGHVTVSGLIGEVGDFNKFNTISEITKLAGLDLYEISSGRHKGQRRISKRGRPMMRKLLFFAAINMVKTNGIMHEKYKQMLDRGMLKMKALIAISRKVLGLILAIVRDNTMYIENYTKQNHYKLAA

SEQ ID NO: 487928 - protein, 344 aa, unidentified
MDYFVGLDVSLRTVSVCVIDADGGTALERSVPCEIEDITRCVAGFDASALRIGFEAGAMSQHLFFGLRAAGFDVVCMEARQVNAALSAMRNKTDKTDARGIAQVLRSGWFNPVHMKSREAHAVRALLSSRKAVQRKCIDLGNEIRGLFRIFGLRLPSRVDQSSFDDRVRATIEADPDLSHALLPLLDARAVLYQTYRELDRRVKLAASRDDTCLRFMAIPGVGPIAALTFKAAVDDPKRFSSSRTVAAHFGLTPRRYQSGEMDNPGRISKAGDPDVRSALYAAANAMMMRSVASSEIKSWGLRLMRRKGRRRAVVAVARKLAVVMHRMWADGTEFRQRPLEGAA

SEQ ID NO: 487929 - protein, 356 aa, unidentified
MPTQVPGGRVIVGVDTHKHLHAAAVLDERGALLATATFDANTSGYRELIDWAGTFGTASSFGIEGTGSYGRGLAAAVRRSGSDVLEVMRPNRQDRHRRGKSDLLDAENAARAVLAGHTEAIPKTDDGTVEMIRHIKVAKNAAVKARTTAMQSLKAVLITAPAELRETLQPLPNMALLRRCASLRPGPTTSVTAAAKYSLRAIAQRWLALNDEVTEHEKLLGTLIEQIAPQLTAAVGIGPDNASELLMALGDNAERIRNEAALAKLCGTCPIPASSGKTRRYRLNRGGHRRANAALHRIVVVRMKYHEPTRAYVARRITEGKTKPEIMRCLKRHLIREIWTLTKHLRQQPTTHQTAA

SEQ ID NO: 487930 - protein, 335 aa, unidentified
MKNYKTFIGIDVSKLKLDVWLMRNPQDSKQMHFIVDNNEKGIKEMVKIIRKQKVLISECLFCYENTGAYGMPLSFYLSKIKADFWVVPALEIKRSKGISRGKNDKTDAKTIGFYAFTHLHKLKLNVLPEKEIAQLKVLFSEREKLVKAIKIMDSTKELNGFMPGEIINETLKTNSKTVKQLKQQLKVVEEKMGEIIKQNEKIDRQRELVTSIPGIGKHTAIYLIITTNCFELFGDWRKLACYAGVAPFENTSGTSIRGRTQVNHLADKKMKSLLQMCVLTAIKNDVELKTYYNRKTEEGKNPMLVMNNIRCKLLARVFAVINRGTPFVNTQKFAA

SEQ ID NO: 487931 - protein, 351 aa, unidentified
MVVVGADVHKRTHTFVAVDAVGRQVGQRTVSATSEGHARALAWARSEFGLDLRWAIEDCRHLSARLERDLLSAGQQVVRVPPKMMAEQRRVARTRGKSDPIDALAVARAFLREPSLPVASHDAVSREAKVLVDRRESLVATRTRTINSLLWRVHELDPVHAPKERSLHLVTHQQALRAWLVTLSGVVAEMALDELDDIIALTVRIKEFDRRIGALARREVPALLALPGCGELSAAKLLGESAGITRFHSEAAFARHAGIAPIPVWSGHTAGRVRMTRSGNRQINCAIHRIAITQARIPGTLGKIYYEKKLAEGKSKTEALRCLKRRLARVVFNLLTTDHNNRQTTALPAAA

SEQ ID NO: 487932 - protein, 356 aa, unidentified
MTTCDERTVVGGVDCHSQVHHAAALDGTGRRLGERAFPATQPGYEQLLVWLRGYGPVTTVGVESTGSYGAGLTRYLLQSGVRVVEINQPHAHLRQRRGKTDAIDAEAAARKVLSGEATSVPKETTGAVEAIRQLRLTRRSAVKARAGALRQLGDLIVTAPAKLRERLSRKTLPGQAAICARFRPDRQRLADPVQAAKLALRTLARRIAALDAEIAQLDAHLEQLVRATAPRTIALLGIGPQHAGQLLVTAGQNITRLHGEAAFAHLCGADPIPASSGKTTRHRLNPGGDRAANSALHMIAVVRLRYCERTQKYAKRRIAEGRSKREILRCLKRYIAREVYRALCVDLAHLDVATAA

SEQ ID NO: 487933 - protein, 424 aa, unidentified
MKVTYQTCCGVDVHKSFLVATIVKTSGGIEPSYQKKRFSTFNNSILEFKQWLLDNDCHDVCMESTGKYWVPVFNLLEDEINVVIANPKWVKAVKGNKDDTKDSKWIGDLFRLGLVKGSYIPCKIVRILREYTRYRYKLVSCRSSEKNRYQNALTVCNVALDSVVSDIFGKSSTSIIDYLLEQSGTSINHEEIASKLLRSLKSKEDAVIESVEGYQMTDAQKYRMRLVRAHMDYITAEIKDVDKMIENMISSNPDFENAVQFLCTIPGVKRDSAVTIISEIGTDMSQFSSSKRLCCWAGLTPGSNESAGKKKSVRITRAGVYLKPALVQCAHAAVKSDKSPYYKKKYESLVKRRGKKRAIIAIARMILTAIYQMLSTGEQWNPSDLYKIDMPEALVEKQKAKAIKQAKKLLQREGILPPDEPLAS

SEQ ID NO: 487934 - protein, 348 aa, unidentified
MGRSTTATTTSTVTYAGIDYHKKFSWVCLGDADGNIVAEKKLYHDDTAAVKEYFKPYRGIVCTVESCRAYEWFVDLLKDCGLEVRICNPRLAKLIVQSRCKTDKLDGKKLMELLAKGYLPTCYQASPEEKRLREWLRWRASIVRSASRVKIQIHSLLDKERKGLGPDTFASKMRPVLQEIELSPARRQLLDKQLELLSYFETKVKAEDAWVKAEAKQNGSVQLLKTIPGIGDLSALLYIAEVGNPHRFRKAGQVSSFLGLVPSESSSAEKRHLGAITKQGSPLLRWLLVQDAWQAIRTSAEFRRRFTSIRRRQGKHVAIVAIARILAEVAFHVLVEQQPYEEAKLQQR

SEQ ID NO: 487935 - protein, 327 aa, unidentified
MDDPLYYIGIDVAKHKFDVAVKLPNGKYKHKVFCNHHQGFDEFICWLNAFDGRFCAVMEATNIYHEALADCLVAQNIMVSIINPKCSASFAKSDNLRSKTDKIDAKLLVDYACEKGHKLVCYQPMLPAQRQLLRKSRQLDHLKDKLAQEKVRLSMLIDEDCIAYTKAMIDFIKGQIKALQQSIRQCVASDDTLKQNVSLLLSIPAIGFDSAVKLICYLGDGSRFKNAKAAAAFAGLTPMIKSSGSSLHQVMGISKIGQADIRKALYCPAMNFAFGRYKDGAYRLFVDRLNSQGKAKKVVITALMRKLVSIAQAVLQTQTPFKLELHR

SEQ ID NO: 487936 - protein, 428 aa, unidentified
MQINQERITRITPTTIIVGIDVAKVIHWARITDYRGVDLSKPFKVHNSIDGFENLQARIEKLRTKHGCDQVVIGMEPSGHYWRALGWYLKLHESKPVLVGVNPYHTKQAKELDDNSQTKSDPKDALVIAHLIRDGRYFDTYLPEDEYAELRQLNTERQRIMKQLNRANNVLIALLDEFFPEYATVWSDVTCPTSLELLNVCAFPSDIISAPRDKLLKDIRMASNGTEGTKLMERMIKASSQSVGVKEGLRAVRVRMQSMIDELHYFEGKKEDIEEKLEAVMDTLELGKVLQSMSGVGPIISAAFLGEVGDISRFTDWKQVRSLAGLNLVENSSGQHKGKTKVSKRGRPYLRHMLYMAGESGCLHNPEMRALYRYFRDRKNNPLSAYQAYVATGLKVLRIMFHLAKTGEKYDPSKALGAARLQQIASLA

SEQ ID NO: 487937 - protein, 344 aa, unidentified
MNEVITIGVDLAKNVFQVHGIDAEGAVVFRRQLRRSRLLRFFKQQPPCLVGMEACATAHHWARQLIELGHEVKLMPPHYVKPYVKRNKNDAADAVAICEAVTRPTMRFVSVKSMEQQSVLMLHRTRDLLVRQRTMLINAIRGHMAEFGIVAPVGVPQVKKLLSIIADRDDVRLPPIARTCLKSLARQFLSLHEKICAAEKRIHTWHRSNEVSRRLETIPGIGPIIASALTASITDPEVFKNGRELAAWIGLVPRQNSTGGKQRLGKISKQGDQYLRWLLVAGAMSVILHAKRRGTTNLPWLADIIARKPTKVAAVALANKNARIVWALLRQGGTYQKPATVPTA

SEQ ID NO: 487938 - protein, 345 aa, unidentified
MEHYVGLDVSLKLTAICIVDRTGKIQREGVVHSDPEAIAEFIKSNAPHVVRVGLETGATSTWLWTELKKLGLPVICIDARHAKAALKMQINKSDRNDAVGIARIMQCGWYKEVRVKDLDSHAVKALLVSRALLVKIKRDLENQVRGLLKNLGLVIGPAKMNTFALRAAGLTEDRPELAAAVTPLLKARMAIEQQIAELDRKVMKSARNNAQVRQFMTAPGIGPITALCFLATIDDPGRFRRSRSVGAYVGLTTRRFASGEIDWTGRISKCGDKMLRSYLYEAANVLLTRVAKWSALKAWGIRLAKRSGLRKAKVAVARKLAVILHRMWIDGTDFRWSKETAAQTA

SEQ ID NO: 487939 - protein, 465 aa, unidentified
MEKKTKIPDTLSMAVIHSHAAGIDVGSREHYVAIGQQPGDVSTFGVYSKDNAALVTHLQQKGITTVAMESTGTYWQPLFACIQAAGIEVVLSNNYIKDPQKKTDAKDARWLQRLHTLGLLKTSFIPAAQIEQVRTYHRHRSSLVAQAASCIQKMQKSLRLMNIRLDIAISDITGVSGMAILEAIAAGQRDGTALASLVHYKVKKSKEEIAEALQGQWKTEQLYILIDELQSYKNYQLRMTSCDKQIEVLLQQMTAAIAVSNQSEQPASVNASSATAQIKPTKIKKNKNSAAYDVSKLSMEYFGVDLLEVEGIGSATVMTFIAEVGSDIIKFPSKKNFTSWLRLSPNNKITGGKIFSSRTPKGKNILSNAFRLAANTIAQRKEGVLKKIFSRIAFKKGRAAAITALARRLAEIFWIMTVRKVPYKAQNEMEYDEQTKKSIIKNIQHKMRKMNLTTQDIAMSGLATS

SEQ ID NO: 487940 - protein, 354 aa, unidentified
MIIIGCDYHPGFQQIAFVDTDTGEVQERRLEQREEAETFYRELEAQGLKVRVGMEASGHARWFERLLGELRFELWIGDAAEIRTKRVRKQKTDRQDAQLILRLLLEDRFPKVWVPNWENRDLRQLLWHRHRMVQARTRIMNQLQAVALNEGVHCKKRLWRDAGREQLQSFKLAPWASRRRRDLLELLDRLTPTIAELTQAIEQEADKWPEAQRLQTHPGVGALTALAFVLIIGRAERFQCGKQIASYLGLVPSEESSGQRRRLGHISKQGNSLLRFLLVEAAQVTVRGDQEWRNRYFHLVLRRGRKIAKVAMARRLAVRLYWMWRKGWDNEQLKNFGSHAGEPGHPDGVQSSTE

SEQ ID NO: 487941 - protein, 414 aa, unidentified
MLKIVYPICCGMDVHKSFIVACIASTDSQGVTTYKSHRFSTFTKGLRELSQWLLQNNCRDICMESTGKYWIPIYNILETTCKIVLAHPKYVKSIRGKKTDKKDAKWIADIFKHDLVSGSFIPPADIRQLRDLVRYQFKLTNYITGEKNRAQNCLTVSNLKLDDVFSDVFGKAASAITTRLLENTKPFDVAPYLTKNHKASVEEIQMAVDGEMCPEQAEKLRIIRSHMDALNLAKLNLESIILSVAEKYLPQINLVLTVPGIQSFSAIAIIGEIGVDMSVFPTSKQLCSWAGLTPQNNESAGKKKTTRITRAGAYIKPLLVQCANAAIKGTRHPEVKNRYLALKKRRGHKKAIIAISRMLLTAIYNILKKNESYNPSLYRDLDRPPVHREVSVDEAVYILQRQGYLVSAPRSTAT

SEQ ID NO: 487942 - protein, 337 aa, unidentified
MEQQRQYVGIDLHRRRSVIVRVAEDGSVLGTVRVENDPLELALAVAKAGPGPEVALESTYGWYWAADLLEANGAKVHLVHPLGLHWDSRRVKNDERDATELANRLRRGDLPEAWIAPPEVRELRELVRFRAKLTAVRTSAKAQIHAVMAKHGILPTLDDMFGPGGQKLLDKMAFEGGYAIRVHVLRDLLELYATELQMVEQALSRRLRHHEGYQAIQAIKGVGPIMAAIFVAEIGDVTRFSSARHLCSWAGLTPTVHSSDDKTTRGHISRQGNGLIRWAAVEAVARYHGGAPIAPAYHRIAERRGNKIARVAAARKLLGLVYYGLRDGEIRCLAKAG

SEQ ID NO: 487943 - protein, 337 aa, unidentified
MYLGVDTHLELHVATLINELGQVVKSKPFSVDLAGYRELLAWCKSYGFLQKASIEGTGSYGAELTKFLKKNSIDVYEVMRPNRMERRLKGKTDVIDSENAARSVLSGEAAVIPKSHTGPVESLRNLLMTRNSAVKSRTQAMNQIRALLVSGPDELKQSLYRPKPSACATACLARCSNSREPLIISLVLLAQRWNFLNDQVKSLDNALKKLTLNTAQSFVSRFGGGTNVAATLLVAAGDNANRLKKESSFAALRGVNPIPASSGKTTRHRLNRGGSRSANNALWTVAMVRMRSDPRTKDYIARRTAEGLSTKEITRILKRYIARELFPLILKDLASLS

SEQ ID NO: 487944 - protein, 410 aa, unidentified
MQTLVERGCGLDVHQATVVACLLIVLKNGKVQKQVRTFGTTTRELLGLREWLLSENCTHVAMESTGVYWKPVYAILEGALKIVVANAQHVKKVPGRKTDVKDAEWLADLLCHGLLRSSFVPPQPIRELRDLTRYRRKLVESRSAERNRLLKLLETANIKLASVATDVFGVSGQSMLRALVEGKATPQEMAELAKGRLRNKIPELGPALEGKLEEHHRFLLRLQLQRLEAAEKDLAVLEQRIEDKLKPYAAQLALLQEIPGVDWTLAAVIIAELGVDISVFGSVSQLASWAGVCPGNNESAGKRKSSRIPKGNIYLKTALVEAANAAAKAKGTYLRDKFYRLKARRGYKRAAVAVAHKILVAIYHMLSHQVSYNELGDAYLDKRNKHQLTRNLVHRLERLGYSVTLEQKAA

SEQ ID NO: 487945 - protein, 335 aa, unidentified
MSKITLIGIDTAKSVFHMVGIDRHGKYVWRKKVNRQRFLSTLAQLEPCKVVLEACGASHHWARQIKACGHDARLIAPQHVKPFRRGQKNDYRDAEAIISAALSPGIHFVGIKTTSQQAEQALHRVRSRLLSHRNAAANGLRGLLGEYGCAFALGHKALRSGAVAFIDSEQAQALGLVELITDVLEEMMGLEQRLKRYKCQIEERVKADEVSTRMRKELHGIGPMSASALRVKVADPRDFGNGRNFAAYLGMAPGHRGTGGKVKIGKIRRNHDRYLRQLLIHGARSALRHLGDKQDDQSRWLRAVLERRGFNIACVALAHKNARQAWAIMAQEQVT

SEQ ID NO: 487946 - protein, 406 aa, unidentified
MRDIESWEMWLDRAWAGVDIGKGHHHVLVLGADGEKLFSQRTANDEPALAAVIEQVSALAGVVTWAIDLQGSESALLVALLLERGQAVVYLPGLAVSRAASSYRGAGKTDARDALVIADQARMRRDLAVLRGDEELIVELRMLLARRQDLVTDRTRAVNRLHDQLLAISPAVERALDLTNRGPLVLLTGFQTPAALREAGACGVEEWLRARGVRRAAALAAAALRAAESQRARLPGEQLAASLAARQAEEVIALDEQVKEVDELIRDRFRRHPSAAVITSMPGIGILLGAEFLAATSGDMTAFGSADRLASFAGVAPVPRDSGRISGNLHRPQRYHRGLQRVFYTSALISIHCNPQSRRFYDRKRREGKRHTQAVMALARRRVNVLWALLRDGRSYHLTPPTLAAA

SEQ ID NO: 487947 - protein, 339 aa, unidentified
MSLYAGLDLHSSNTYIGVLDQQFKRIFKKRVANDLDLILETLEPFRGQLQGLVVESTYNWYWLVDGIMDAGYSCVHLANPSAIKQYEGLKHSDDQHDAFFLAQLLILGILPQGYIYPKEARPVRDLARKRMFLVQQRTAHILSLQSLLARCCGQKVSSSQLRKVTGQDLKRWLKEEHLVLSAQANLDNIVFLKQQIGRIEAAIQKQVKLTEAFNCLLTVPGIGKILAMTIMLEAGDIRRFANVGNFASYCRCVSTQRLSDGKSKGSGNRKNGNRYLSWAFTEAAQMARRFNSRFRSYYDRKAAQTNSILATRALSNKLARVCYYIMRDRVEFREELASH

SEQ ID NO: 487948 - protein, 336 aa, unidentified
MKQKYFIGIDISKGKLDCAMILEDYTVVSECVIANNVKKIKSFMNGLLKKHKTGFDQMLICCESTGIYNGPLRQVCKQLNIGLWEEHALKIKRASTDMRGKSDRKDAMRIAEYLVRYLDRAVFYEHPSEVLQSMDQLNKVRETLLRQKLAMQNQLGESKAFDPEGFKILSKHYKQVISQIENQLKKIKLEIQDLLNQQKDIQQRINLMKGVPGVGSQVALQVMLFTQNFTLFKSVKQFACYAGVVPFQNESGVVIKRAHVSKMASKKLKTVLHMAALAAVRTESELKIYYIRKLAEGKNKMCVLNAVRNKILQRIWAVIERETPFLSQKDFRPIGK

SEQ ID NO: 487949 - protein, 321 aa, unidentified
MIVGIDVSKDSLDANFARDQRKQSRTFENAPDGWNLMLTWLKAMGGRQAHVCMEATGRHSLGVALALHDAGHVVSVVNPAQIRDFARTKLGRNKTDKVDAILIREYAELFKPAPWAPPSPATRRLCELQTVRTGIVNNRAEWKNRIGSGLSDSIAIGLAAATIAHFTAQIEAVDNAIRETIDQDDELRGRHNLLLSVVGVGETLAASLLVEMPEPEVLRRSGEIVAYAGLNPSHHRSGTSIDRPTRISKVGNATLRSSLYMPALSAMRYNPAIVALVMRLKNAGRLRPKQIVVAAMRKLLMICFGVLKTGKPFDAAIAMPA

SEQ ID NO: 487950 - protein, 363 aa, unidentified
MAIKVERNKINFKGKKVNIGIDMHKKSWRITALVEGDIVMAVTLARPNYDSFKKLLVNFLGNYLRIVYEAGPGGFHLYDRLTDDGIECIVTPPSLIPTASGSKVKTDKKDSYKLARLLESNMLKQVWVLSPEERAHRQLVRTRRQIANHRSDVMRQIKSLLLFHGIQIPFPGKQQWSAPFITWLKELDLGDEYLNKSLEALMKLFDYLSIEKKSLTHEVIKLAEEEKYASRVKLLKSVPGIGTLSAMEILVELQDITRFKTADELAAYLGLTPSQHSSGEHTRMGHITHAGNDRLRTTLVECSWILIGKDPEIKKKYDNIKYRSGGKRAIIAVSRTLSARIRRMLLDQIPYKIDLNKPLKKPA

SEQ ID NO: 487951 - protein, 419 aa, unidentified
MSFKIIKKNCCGLDVHKTWIYACIGIADANDRVEYKQARFSSFTKGLQELCDWLAKYHCSDICMESTGKYWIPVFNILEKNNLWVTLSHPKYTKPMKGNKTDRKDAKWICDLYMCGMVKPSFIPPADIRHLRDLVRYRFKLSCMITGEKNRAQNCLTVSNLKLDDVFSDVFGKSSRSITEHILQHPGETFDVTPFVDKRCKTPIEEIQAAVDGAVSPEQAVKLRQCLDHIDELEKHISEVAQEIYRLSEKYEAALELIRTVPGFDKNNLTAIQILSEIGGDMSVFPTAKNLVSWAGCCPRNDQSDRKIKSTRISRAGSYIKPVLVQIANALIKSKKHPEFTDRYRRIKARRGHKKAIIAICRMLLTAIWHILSDLKPYTADGFLEPRPVNESRVLTTSQALNLLKQRGYTIKDDPAIAS

SEQ ID NO: 487952 - protein, 427 aa, unidentified
MRFIALDVHRDFCEVAIKDQSGLRLAGKVRTAVAELQLFAESLAPDDQVALEASEPALQIARILEPHVGGVAIANTRKLRAIAESKVKTDKLDASTLCELLAAGFLPAVWSPDEFTRALRRRLQRRAKLVRARTRAKNECHAVLARNLKGKPPMSDVFGKKGRRWLAALELPADESETVACCLREVDFLHSEIGLVERELAAQALGCEEIRRLMTVPGVSLVSAATFVAVVGDVRRFSSPKKLVSYVGLDPRVRQSGEAPARHGRISKQGSPEARHMLCEAAWVLIRTPGPLRAFYERVRARRGAQIALVATARKLSVLFWHLLTREEDYAFQRPTLTRRKLLGLELKAKDGRRSWPSGHSVGTKQDREREREYAKQVETAYRRLTADWQPRAPRSGAGATRGRAFSSHLLGEETATRQGTAPEPAL

SEQ ID NO: 487953 - protein, 438 aa, unidentified
MRRRAYGAARVNDVDVAKVVHGPDGLAVVVGVDVGKYKLLAVCRWADGRFERPWRVDNPGEIVELVALLKRLGAGRKLLVALESSGTYGDAVRQALQDADIEVHRVSTKASHDYAEVFDGVPSQHDGKDAAVVAELAALGKSTPWPYRPTEVWEQELAYWVDWMVGHRQVLNLWQGRLEGLLGRHWPEATRVLKLSSVTLLRVLWHYGSPQAVAADRAAAAQLARWGGRFLDTEKIKRLLAEARVSRGVRPGEWETRRIQDFAQQALQARAQGQRGQRRLRVLARGHTVLEAQGKVVGVPTACVLWVNTGDPRKFYAAAAYRKAIGLNLVERSSGTYQGQLHISKRGSARSRQWLYFAVLRLVQRAGVRSWYQAKKARDPDAAKSVLVAVMRKLALALYHVAVHDKEFDPRRLFARIMCSHTKTAPAFSPEKRVSVEG

SEQ ID NO: 487954 - protein, 430 aa, unidentified
MAYRIAGIDVHKKMLAVVVSDVEIESEFQFERRWFGSNPEQLRSLAAWLLEQKVEEVVMESTAQYWKPVWEALERYWKPIREKREGARRRSGTLHLAQALSNRGRRGRKRDFPDAERLVKRLVSRELTLSFVPDPEQRLWRTVTRKKYQLTRDKVRLQNQLEALLEEAHIKLSSLVSDLLGASARRMLQALAEGETNPAALATLADQHLRATPEQLCDALGACTDLKPVYRRLLKMALEQLQFLEQQMGQLDQEMANLLSQHQDAVQRLAEVPGLGVDSAHQIIAEVGPSAATFPSEECLSSWVGVCPGQEESAGVNYSHRSPKGNRNMRRLLNQTANAAVKAKGSIFEIVYRRSVPRLGHNRAIGAIAHRLCRLIWLILYRKVRYEERGPAVSQKSKQARTSRMIRQLRRLGYRIEPPNTQHASSAQVQ

SEQ ID NO: 487955 - protein, 524 aa, unidentified
MKVLYERVAGIDVHKDMVKVAIRSPGEKPWTRKTEILEFRTFYGVLQEMARELRRRGVTHVVMEASGVYTEPVYYALCEQDFEQVAVINPAHAKALRGHKTDAKDCARLAELFECGLLRGSYIPPAELKEVRDLTRYRMKTVQARTSEIQRLGKALESAGIKLGSVASSITGVASTAMIEALIDGERRGGVLADLAIGRMRAAGKLTDLSMALAGRFTEHHALLCRLHLDRIAVFDDAVDGLDKRITGKAARWQREAGLLTSVPGFGDVVAQAWLGEIGPAPHRHFATHEKLASWVTLCPGNNISARKRKHGRTGDAGTYIKPMLVQAAWAAIRVRGRLQARYSRLVRRFGGDKNPGAKKKAITAIAHTLLKIAYQVLKSGTPYQEPGADFYTRRESPEHKQAWLERQLQKLHPGCTITVTISPPEAALPAGTKTTSPIPTAPEPPPTQAPRPSRRTSQRHCPALATAQARVHCRAPTGDPVIVSGTDGERTGGRRRMGHGELDGPRAERSAAAAADLHGGAGR

SEQ ID NO: 487956 - protein, 344 aa, unidentified
MDHFAGLDVSVKETSVCIVDDAGKIVREVKVASEPEALLAVLKNPAYRFKRIGLEAGPLSQWLFSALAEAGLPVVCVETRHMQAVLKAQINKTDRNDARGIAQMIRVGIYRPVHVKTLRSQKLRMLLTHRKLLQSKAIAIENDLRGTLRNFGLKVGIVGRVRFEARIKELVENLPDLAVLVEPLLLVRRTLREQTIVLHRRLLAIVREDEVCRRLMTIPGVGPVVALTYRATVDVPARFRKSKAVGAVFGLTCSKYQSGEIDRTGRISRCGDEMMRVMLYEAAQSMLRSKKWSWLKAWAMQIARRRGMKKAIVALARRLAVIMHRIWVDGAEFRWTREQVAAAA

SEQ ID NO: 487957 - protein, 479 aa, unidentified
MIDHRRLVGIDLGIASDHTVRVLDGGGGEICRRRARPTVESLAAVEAAALAGVTAETRLEVVIEPTGPAWLPIAVFFTARGHRVFRVSSAKAADLRRFLSRHAKSNSIDADTLARLPLLAPDTLHPLELPATAEAAALDRRVRACDRLTQQGALHQRRIKDLVRQLMPATPLTGELTKTDLAVLGRWPDPRALLAAGRARLLTVITQASHGHQGADRAEQWRQAAMAAVELYAEHPAMAWTDLAAEVATEVRLLAAVRAELAGHAAARAEAYRFTDPARLAATLPGLAEVGAPTVTAIVGRAARFRTGRQFRSFTGLAPRASETGETDRKGQPMSKAGNRLLRTTLIRAADNARRQDPQLAKIYWVQMVERGADHLKACCVVAAHLAERLHAVLVRAMPYVVCDTDGTPVDPATAKQLIAEHWTVPREVRARRRSRKTTSTTRAGKVPQHVLTGHDRSDTQRADRRGDLPRPASCSRPA

SEQ ID NO: 487958 - protein, 355 aa, unidentified
MPGLNLAFAKKQNPLRALRLRRTVERALRSRIRETKPVAYTTRFVGLDISKSSLDVCLLPDAERASFPNTAEGVVGLVRFLASLAAIERVILEPTGGYERLAVAALQAAGLPVAKVNARQVRQFARACGQLSKTDSIDAFVLADYGRRLQTRILPERSAPLLALGQLVLRYRQLSHMIVQEKNRREKLTGGEGDTRSRDWIEETLRFLDAQRQTVVDEMTACIENDAELAAKAEVLMSLKGIGLRTACFLLADLPELGLIEKGQIAKLVGVAPLNRDSGQMRGKRMIAGGRRPIRDALYVAALSAIRFEPAIKAFNANLRNRGKLGKLAIVAVIRKIVVILNARMRDHLKKALVA

SEQ ID NO: 487959 - protein, 482 aa, unidentified
MKKRNIFQNQSQEILAIFEMAGNRSKVMCIPMDYAKKDHVVMFCNGNGKVIRKPFSVKNSPDGKNYLIDQVTKSCLHHGIKPEHIFFGGEDCGSYADNFIFALRSENCLVAGVNACDAKKHRDNKQASTDILDLLGICKMLLNCKGNCSPAQTGIYWNLRMLVRQRRKLVQMATGVKRRIHFIIDQIFPGFLDEKKSDIFPFSRGSLALMGNRFSVHQIRRRNCSTLSRFLARNLVHHADHCAERLQKYTSQVLQPPAKHVATLQLALQQQVKLFVCLQESIQQMEKEIAEHLAQTPGAFLTSIRGIGIVLAAGVCAEIGDPDRQKSLSQLVSYAGIIPRIKQTGGVQGKTKVKKVGKRCNRILKDYVVRSGYQIGRIGPEELKLDHKRRGAQGQHADFGMSRRYLRMAMCLMRTSQTYLPKSLRDTKAPMKERAQYYILTWSTLREKWKRKDALEFAFDKDRPLGQWRNVVQALYGIELGL

SEQ ID NO: 487960 - protein, 339 aa, unidentified
MKVSTLGIDLAKSVFVLHGVDHTGKNVLRKKLSRSQFIPFLAQLPPCLIGMEACSASHHFARVLEKAGHDVKLIPPQYVKPYVKTNKTDAADAEAICEAVTRPNMRFVQIKTVEQQGVLALHTERSFLMRQRTACSNSLRAMLAEFGCVMPTGFKALYQGVPEILEDGDNGLPHFVRQCVRRQLELLQELDARILQTERELNGWSKTQPACEQLQKVPGVGLMTATYIVASIGNGTQFHTSKQFASWAGLTPREHSSGGKQRLGHISKRGDGYFRSLLVHGARAVVNVVGRHERNMPWLSALVKRKHHNVAVVAQAAKTARIMWSMLVHGTEYRALPVA

SEQ ID NO: 487961 - protein, 344 aa, unidentified
MNPCYVGLDVSLDRTSLCVLDGAGRVVCEARLDTDPDAIAAYLDQAGLPIERLGLEAGPLSQWLHAGLVAAGLPAVCIETRHTKAALGAMAVKTDRGDARGIAQLMRTGWFRAVHVKTRQAQEWRLLLTQRRLLVNKLVDVEAEVRGTLRGFGLRIGRVGRAGFAARVRELLADEPNLLRVVEPVLAVQATLLAQREVLHRMVLQAVRQEEVCRRLTTVPGVGPITALAFRATVDQAERFARSRDVGAHFGLTPRRYQSGETDRSGAIAKTGDALTRHALYEAATSMLVHATKPSALRSWALAIAKRRGLQKARVALARRLAVVLHRMWRDGTAFQPHGRVAMA

SEQ ID NO: 487962 - protein, 430 aa, unidentified
MTEHDHVAPLPPFAALVGIDWADRKHDVCLLDVDTGRREHLVLAHTPEAIDDWACQLRSRFGGRPVAICLEQSKGALVYALLKYDFLVLFPLNPARLKSYRQAVSSSGAKDDPTDAQFLLEYLECHRAHLVAWRPDDARTRQLGLIGEERRKAVDLRTRLGNRLRTCLKNYFPQALELVGEGLHTRMACDFLLKWPTLAAAQKATPKALRRFYHSHNSRQAGLIDRRIEALRAARPLTTDTALVQSYRLTATLLARQLLELAGAIEAYDKELACLMAEHPDAALFERLPGAGAALAPRLLVAFGSDRQRFAGPGDVQTYSGIAPVTRRSGRSSSVHRRTACPRFLRQTFHEFAGHSVPRSSWAGAYYRQQRARGRGHHAAVRSLAFKWIRIIYRCWKERTPYDEETYLASLRRRGSPLLAYLPTPSPAEG

SEQ ID NO: 487963 - protein, 313 aa, unidentified
MDTSEINVGIDTSSKQLDIYVRPIGQFFSVCNDTAGIKDAVKRIQKLKPKRVLIESTGRLELEFVCAAHKAGLPIVVCNPGHVRSFAKSAGRVAKTDKLDAMDIAHFGEAMKPRLSSIKPEKLRAISDLLVFRSQCLEMSTMQKNRLKRMPKSVHKPIHAILKAIKKELKSIDKALDKLINSIAEWRQKRDLLLSAKGVGNVLAYTLMSELPELGQLNRKEIAALVGIAPMNRDSGSFQGKRYIRGGRHRVRTVLFVSMMSAIQCHPKLKPMYERMVTAGKPKKVALIACMRKQLTILNTMVKNNTYWDEKMA

SEQ ID NO: 487964 - protein, 468 aa, unidentified
MNSKSITMKTAYLGVDVSKGYADFVLIDEDMQQLADPTQLDDTTKGYKKCEQWLRKSITKHGLTQIRAAVESTGGLENNWLASFKTMLSGFDLSMIRLNPATVKFASKATLSTVTTDEKSALNIAQYLVRYGKSLDFNAPENPYLPYKKVLMQLRYLTKINTGSKNIFRQLLYETFPELQAFCPKDVPNWLIELLKKYPTPSRLARAKPAVIAKIKGITVEKAEQLIMAAKNSAASAKDDSIGLVMDTQIRQIQYEKEQIKKLKLYLERNVKGPEIDLLTSITGIGTYSAAVLMILIGDCNRFPSPRKLASFFGVTPEIRQSGDKKGHSKMSKKGSSLARATLFMCARSAAIHDEHMKRIYTNHITRGKNYYQAIGVIMHKLLRMCWGVLTSKTPYNPAIDQKNQQNPVSNELQKDQEWINKREEQAFDPLAPVSNRARKQRKEHLLSQAVRDGHVRDLESAPLLVET

SEQ ID NO: 487965 - protein, 350 aa, unidentified
MIIIGVDFHPEFQQIASVDSETGEFQEKRLGHREEAEKFYRGLAAASQPVRVGMEASGHARWFERLVAELQFELWIGDAAEIRTRRVRKQKTDRQDAQLILKLMLKDDFPKIWVPSWENRDLRQLLWHRHRMVQARTRIMNQLQAVALNEGLRCKKRLWREAGREQLEAIPLAPWASRRRHDLLELLDRLNPTIAELTQTIEQEVEKCPEAQRLRTHPGVGALTALAFVLIIGQAKRFHCGKQVASYLGLVPLEDSSGNRRRLGHLTKQGSSILRFLLVEAAQVTVRSLPEWRSKYLHLMMRRGRKIAKVAMARKLAVRLYWMMRQGWDYEQVKKFGSHAGQPGNRHGVQ

SEQ ID NO: 487966 - protein, 424 aa, unidentified
MNRSEFKATIGLDWADRKHDIWIRPADGSKPLHRRVEHSPEALHAWVAELRARFPEGRVALGIETSRGPVISLLLAYDFIVIFPINPKAMKSYRDCFAVSGAKSDRPDAFLIEEYIRLHGEKLKPLQPDDTLTRKIGGWSEVRRQLVDERTALINQLQARLKTYYPLAVELLGGQFNTVMAAEFVTLWPDLESLQAADQEKVRSFFYKHNSRSKKKMEERLLAIKDARALTKDAAIIEPGRDLVRALAGMLKSLHKSVEQLEGKIERAMDEHPDAPIFRSFPGAGPNLAPRLLAAFGTQRDRFQSADEVSQFYGIAPVVIQSGNSRVTRLRRRCPKFGRQTFHENAACAAKSAKSQDWAKPYYEACRKRHEDKHHHTCRSLAYKLIRIYFACWKNKTEYRQQTYLQALEKSGSPYLVKAAAAGK

SEQ ID NO: 487967 - protein, 412 aa, unidentified
MNVVVERCAGLDVHRDSVVATVRLPGAGRRRREQQTRSFGTTIGQLDALADWLGGLGVTLVGMEATGVYWKPVFYVLERRFECWLLNAQHLHNVPGRKSDVIDSAWCCQLLEHGLVRPSFVPPPEIRRLRDLTRLCVAQTEERTRAIQRLEKVLQDAGIKLSSVASSTYSASARAMLEALLGGVSDPAVLAELAKARLRAKIPQLQEALANRFELAHHGVLVAGLLAHIDALDQTVATLDARIAVLTEPHAELVELLCTIPGVRVNTARVLIAECGLDMSVFGTAERLVSWAGICPGLNASGGRRRSGKTRHGNRWLRKTLTEAARAAARSKNTYLASHYWQIRGRRGDAKAIGATRHDILIAYYHIVRDRVPFRELGPDWLARRHSVEHRTRRLVRQLEALGNTVTLETAT

SEQ ID NO: 487968 - protein, 351 aa, unidentified
MVIIGVDYHPSDQYIAFVDTETGECGERRLNHSDREAEKFYRELAARGVSVRVGMEATGYSRWFERLLAELGIEVWIGDAAEIKTKRVRKQKTDRNDAQLLLKLLLENNFPKIWVPSPENRDLRQLLWHRHRLVQMRTRIMNQLQALAMNEGQRRKKKLWNEQGRAQLEKLPLATWASRRRQDLLELLDRMNPTIEELTRASEQEAKKRPEVLLLMTHPGVGPLTALAFVLIIGTPERFKGGKQIGSYVGLIPCEDSSAGHQRLGHITKQGSSLLRFLLGEAAQAAARWDADWRRRYVHLAMRRQRNIAKVAMSRRLAVRLYWMWRNGWEYSEWVKFGSNAGQLGIRHGVK

SEQ ID NO: 487969 - protein, 379 aa, unidentified
MIYVGIDIAKLNHFAAVISSDGEILIEPFKFTNDYDGFYLLLSKLAPLDQNSIIIGLESTAHYGDNLVRFLISKDFKVCVLNPIQTSSMRKNNVRKTKTDKVDTFVIAKTLMMQDSLRFMTLDDLDYIELKELGRFRQKLVKQRTRLKIQLTSYVDQVFPELQYFFKSGLHQNSVYALLKEAPTPTAIASMHMTHLAHLLEVASHGHFGKEKARQLRVLAQKSVGVNDSSLSIQITHTIEQIELLDSQLFHTELEMANLVTCLHSVIMTIPGIGFINGGMILGEIGDIHRFSEPKKLLAFAGLDPSVHQSGNFQAQRTRMSKRGSRVLRYALINAAHNVVKNNATFKAYYDAKRAEFLANLYLTFHSWSPFFSFIFMLF

SEQ ID NO: 487970 - protein, 447 aa, unidentified
MNNLKNHANSFAAYIGLDWADKKHYWSMQTGDGKRSRGELKHTPEAIDAWAAELSQRFGGRPVAIALEQARGALFATLSKYAHLHLFIVDPSRLNHYRKSVSPSGAKSDLVDGDLILDFQLKHPELLRCQEPDTVETRSLQFLTEQRRALVNQHTCQVQVLTHWLKQVFPQMIAWFDDLSTPLVADLLQRWPELAKLKKARPETLLQFFHDHNCRSAERNQQRLEEIRTAVIATHDAALLKTANLVIQTSVQMLATLRASIEQFEGQIQAVYATHPDRFLIESFPGAGPALEPRLIAALGTNRSRFKSAADMACCFGIAPVTESSGNSRWVHWRWACSKFVRQTFHEWAACTVRKQGWARDHYERQRAKGKGHHAAVRSVAYKWIRILYRCWRDRVPYSEQRYLEALGAHGVGKGKATASAVEPSINLPAVQWKNCGGFSKPTQFSS

SEQ ID NO: 487971 - protein, 409 aa, unidentified
MDRIVERVAGLDVHKKTVSVCVRLPGPRGGRTQEVRTFGTTTTELFAMRDWLVAQGVTEVGMESTGVYWKPVFYILEEAVTCILANAAHIAQVPGRKTDVKDCVWIAQLVEHGLVRGSFVPPPAIRELRDLTRYRKTLIQDRVRSANRLHKVLEDAGIKLASVANDVLGVSGRAMLDALVEGTTDPAVLTDLARGRLRAKLPALRQALTGRFRPHHAFLVSQLLAQIDFVEEAIDQVSEHVAGVMAPFTAELERLDAIPGINRRTAEVIIAEIGVDMAVFPTAKHLASWAGLCPGNRESAGKHKPTTTRKGDRWLRTALVEAALSGSRVSRSALAARYRRIMRHRGHKKAVIAVAHAILVSVYHILARQVAYQDLGPAYYDRRHTERVRRHAIAALERQGYRVRLEPAA

SEQ ID NO: 487972 - protein, 430 aa, unidentified
MKSNTQNAKIEAITEKTLVLGIDVGSETHYARAFDYRGIEYSKKPFKFSNTEAGFVTFKEWILDLKERHEKDKVVPGMEPTGHYWFNLGKFLQDNEMKPVLVNPHHVKKSKELDDNNPTKNDRKDPKVIAGLVREGRYMIPYLPDGVYADLRTASNIRFQLQAELTRIQNRISRWFNIYFPEYKTVYGKPDAKSGMLILKAAPLPEDILTLGIDGVNQIWRDAKLRAVGKARAKTLIEAAEHSVGSKEGAVSARMEIRMLLEDYESRNTRLQEVMVLIEELVRKIPMAEKLLEIKGVGIRTVSGFLAEVGDISRFNNPKELQKLAGLALVENSSGKHKGETTISRRGRKRLRYLLFEVAMSLVSKNPEFRGLHNYYITRRLNPLKKMQSLMAIAAKLIRVFYAMLTKGVDYDPKKMVSDIKRPAVYLQAA

SEQ ID NO: 487973 - protein, 345 aa, unidentified
MQSMYYIGLDVHKRTISYCVKDGSGKIHAEGTIPATRFDLDRWMRTLPQPWTAAMEATVFTGWIYDHLLPHAAALKVAHPLMLRAIAAAKKKNDRIDANKICDCLRCDFLPECYMASTAIRERRRTLRYRNLLVRQMVQMKNKISGLLMEAGVNYNKQRLHKAGYFRELLATNPDIDEGLCGLLRVCRETVVRLQKTESAVVRSLERDALLVERVERLMSIPAVGPITALTWALEIGDVQRFSSIKKAISYCGLCGAEKSSGNTIQRTPLSKQRNKHLQTTLIEAAKMAPRNSADLAMLYDREKQKGNANRATLAVARKLVAYLVAVDRRQKQFLVVEKENCAAA

SEQ ID NO: 487974 - protein, 340 aa, unidentified
MNIAFMGIDLAKNVFQLCGLNQAGKPVYTRRVERKILLQTLVNIPACLIGIEACTGAFYWQREFEKLGHKVKIISPQYVKPFIRGQKNDGNDAQAIAVALMQPTMQFVPPKSPEQQDIQALHRARQRIVNHRTATICQIRGLLLDRGISIGTAMSRARRAVPLILEDGENGLSIRMRKTIAELYELFIDLEKRINFFDKEIETVFRQSAECQRIAKVKGIGPKTATAVVAAIGNGQEFKDGRHFAAWLGLVPRQHSSGDRQVLMNITKKGDKHLRTLLIHGARAVVRVATNNNDGSLNQWVNQLKERRGFNKTTVAVANKNARIIWSILRHETEYQPALN

SEQ ID NO: 487975 - protein, 316 aa, unidentified
MNQTPLYVGLDVAKTQLDIALRPTGQRWSVANNEAGVADVVARLQSLAPALVVLEATGGLQWPVVTALAAAGLPVAVVNPRQVREFARATGKLAKTDRLDAQALAHFGEAVRPEPRVLPNAQAQTLQALLARRRQVVTMLTAEKNRLSSALPPIRPRLETHITWLEQELTALDDDLGQMLRQTPLWRERENLLRGAPGVGPVLTFTLLAELPELGTLDRRQIAALVGIAPLNRDSGSLRGKRSVWGGRATVRTALYMATLAATRFNPVIQLFYKRLCASGKPKKVALTACMRKLLTILNAMLKHRTPWQADHALNS

SEQ ID NO: 487976 - protein, 391 aa, unidentified
MLPTRLREQNESDKVLIKGDSMSVRRILAKTIDTDLEYEAIGIDLAKNCVSAALLTTDGEVVCIDRLDYSELEKSAQALSSTTFAMEPCTEMNYLVQKLEAWGHRCLVIGGKNVQNYVENHFSGQKTDLNDAQALAFLAQDTQLRTIKAKDIEQQKYASLTTLREQYIKQYRQTIVSLKGICQAWGLNISKGISGKARLKDLIENHAAFPEELKESLVDMVTHAQTAQKALNKITKTLEELAKNDKLCQLIRTIPGLGLICSCRLRATIGDIKRFKNPKDFPAYYGLVPRSIATGHNEKKGRITHRGDKTMRSLMVQAAGSLVNMATKGKLKSKQLTKWILKKQKEKMPWGKLVCAVAAKLLRIVRAVLISSKPYNPQIAGVAKCSLPKGT

SEQ ID NO: 487977 - protein, 346 aa, unidentified
MTISVVGVDLSKSVFQISLADAKHHVVDRKRLSRTQFHRFLAQTEPVRLVMEACGTSNHWGRTAQSLGHEVKLLHANYVKAYVRRTKTDAADADALILADSDKSLHPIPVKPEEQQALQGLHKIREQWKRARVARICEARALLAEFGISTPAGVRGIGRKLTLVTEQAPMLIQPTLLDLIQEIGELEQRLKRVDQALAAYANSNPDVQALLGIQGIGITIATAFVARVSSIHMFKRGRSFSSWLGLTCREYSSGQTRRLGRITRQGDRYLRTMLIHGARAALMAARRKAANGKELTRLETWAVNTQARVGHNKATVALANKMARIMWAVWTRHDTFNGNDALRFAA

SEQ ID NO: 487978 - protein, 382 aa, unidentified
MNENDKSGVSVYAAIELSKSTWLVAVLSPNSDRVKLRQVRGGDTAALVGMLKREQASAAQVDGCPAEIVVCFEAGYDGFWLARFLRKRGIRTSVLDSTSFLVNRRSRRAKTDRLDAESMVMMFRSFDQGDRTVCREVRVPTPEEEDAKRLDRERLQLSAERTRHVNRVRALLNLHGIREVKALWGGDWRKWLQMVRTADDQPLGKFLAAELTREFERLELVHTHIRDLDRQLEEGLSGGTLGIPNVDKVRRIATLKGIGKLSAVLLVSEVFHRQFANRKCLASFLGLAPSPYASGAVKHDQGISKAGNRFARRLLVELAWCWLRYQPTSALSQWYLGTFGAGSGRSRKIGVVALARKLAVAIWRFVEDGLVPQGASLKPEAP

SEQ ID NO: 487979 - protein, 483 aa, unidentified
MKNKQPEKTEEAPCRPTQGHWHEMNRKQRREMMRKIQSDDLRLEVVHPDAAGIDIGNESHYVAVPPTRDSESVRRFGCTTAELKEMADWLKQCGIRTVAMQSTGVYWIAVYDILEEAGLEVYLVNARETKNLPGRKSDVQESQWLMKLHTYGLLRNSFRPSQEIRTLRTYWRQRNDLVRAAGRHIQRIQKAMTQMNLQLANVLSDVSGMTGQAIIKAILGGERDPQKLAEFRDSRVKASKEEIARSLEGHWQEDLLFVLQQEQSGYEFCQKQMAECDQRIEQYLKQREDRSAGDNLPEEKRKERLRKKKKGNAPQFDLRAELFRMTGADLTQIDGVDVMTAMTILSEVGWDMTKWKTEHHFVSWLRLCPDNKISGDKIIGKGRLPTNNRATSALRMAASTLRLSNTYLGAQFRRLRTRLGAPIAIKAMAAKLARLVYRVLRYGMQFVDKGAEFYEAQHRTLQINYLKWRAAKMGLQIIEAPAA

SEQ ID NO: 487980 - protein, 466 aa, unidentified
MENNYILYVGMDSSKGKADAAILKVSDRRSVKPKFLRKKLSFKFVKSEVASFLETVRSYSDVNCTSICFALEVTGIYSTNVYDYIKANLYENESIKFLNTDFVNQWRIAHNIAKSDPLDAQTISTIIGTDSDVQYVSDNVFENKNGYKDLKALVHRHYQIKKIYSQEINRLIAQCDCLFPELQYVFEPKSAAFIAVLSSYPTTHDIINTSRLEVFNVVYEATKHRCSMDKIDKLFDLCHDTLVPDNISSYGRSIILDLVENIKNIKGQLKMIERYIRDVASLNPAYKLLLTITGCGPLTAATVIAETGDIKRFRNADCFVSYSGTSPRNKRSGTSVETMGKISKKGSRYLRHAIYMIAEFARRHNPVLKHQFERIKNGNKKRHKLANIAVANKIARYIYSIMKNESSFVILHEHIMRLPEETQNTFFNSISLDFPKNTRKQIYQYSDINGEAHKFVYTKLEETMIV

SEQ ID NO: 487981 - protein, 362 aa, unidentified
MEYFAGLDVSIDETAICVISDAGETMLEASVATDPATIAETLRPFAGRLRRVGHEAGALSPWLHPELLAAGVPAVCLETRHVRAAMSAQRNKTDAKDALGLAHIMRTGWFRQVHIKTESSYRIRLLLVQRRNLKRKFLDLENTIRHSLKAFGIRLGKIGRAGFDQAVRDAVTGDAMTVGLMECMLRARAALWAEYLVLNKLVVQLAMADDLCRRFMAIPGVGPVTALSFVTAIDDPARFKRSRDVAAYFGLTSKRWQSGTSIDIRGRISKAGDPDVRRALYEAASAMLTRFKGADTIKTWGLGLAKTKSHAKARVAVARKLAVAMHAMWRDGTFYVGDPHATEKETAIWIAAKAKRLSYART

SEQ ID NO: 487982 - protein, 314 aa, unidentified
MKALKSHVAGIDVHKEMLAITVLIGELDGEPKEYQFESSTFTDDLMALGLKLKEMGFTDVAMESSGIYWKPVFNVFNPLGLKVVVANAAHIKNVPGRKTDMNDSRWIAELHRFGLIRASFIPDGEFQRMRLLSRHRTNLTEDLARVKNRIQKVLEDGNIKLSIVVSDIFGVSGLKVLKQIAGGYTHPNILITEVTTKIKRMEEMKKALTNCLTTEHCFVINVLMKQYEELKNRIEEGENELCKKVEPYAHLVEELDKIPGIDAILAMGIIAEASANMSSFKDERAFAAWSAVASGNNESAGKKKRAKCRKGNLH

SEQ ID NO: 487983 - protein, 403 aa, unidentified
MRSVLSIDVANGKSEVLLITEHGEVLIEPYEVKHCLNEFTLLKNKIDNFKLDNLTIFMESTSTYHLPIQRFFIKNNYNVQVINPILGKNNTRNLRKTKTDIEDCYKLADLFFKNTVKIHNKNMNDIYSSMVELSRQEKHLTESLVRSKNRFKQIISNAFPEYINCFPSNDIYEKTSLNFIKEFPHADIIKSKRIDALANNLYKSGNNCVSYSRCLNKAKKIKELANNSYPGIDINSYEVENLINIVEIISYNNFKLNEVKQNIINLAKQTPYFNIINSIYGIGETATAQIIAELGDINRFENIKQLNAFCGLDPTVVQSGKSINYNGPISKRGNRNARKILFITCCSIIRTSVSHNVDNNILIYYRKKQAENKHFKECIIACSTKLLRIIFAMCKNNSLYVQK

SEQ ID NO: 487984 - protein, 342 aa, unidentified
MHIVSIGIDLGKTTYHLVALDERGSVVIRKKFSRQQLLAYTANLKPSLIGMEACSGAHFLGAMLREQGHDARLIPAQFVKPFVKSNKNDFLDAEAIAEAVSRQNMRFVPIKSDEQLDLQALHRVRDRLVQRRTAVINQIRGFLLERGITFGKGPAQLRSHMAEVLEDADNHLTPRMRTLLERLWVEWKQLEGDIDIAAEEIERICSEDAACQRLREIPGVGPLVASATIAAVGNGTAFRKGREFAAWLGLVPRQHSTGGKTRLLGISKRGNLYLRRRFIHGARAVVFRIRYDTGGLGQWVQRLQERAAPCKVIVAVANKLARIAWAVLFHGVAYRNPALAQV

SEQ ID NO: 487985 - protein, 445 aa, unidentified
MARKKKKQRLEIVHPRCAGIDIGSREHWVAVDPQGCDQPVRCFTTFTDDLQTLAEWLKSLGVEVVAMEATGVYWIALYELLDSRGFDVHLVNSRATRQVSGRKSDVLDCQWIWQLMSHGLLKGAFRPADAVCSLRSYVRQRAAKVQEQSRCIAHMQKALTQMNIQLDNVVSDLMGKTGSAILRHIVAGERDPQDLAKLRDGRLRADEATVARSLHGNWRDEHLFALTQALAHYDFLGEQISACDRQISHALGALPKLTEEPAPEPVKPLRNPHRTAAQQKQLHQALHVAMGVDLSAIPTLGIDTVLVLAGEIGADLSRFPTERHFCSWLSLAPPTHISGGKPLPGRKPKTFNRAGQAMRQAASNARRSESYIGACHRARLARMDTAKAIKATAHQLARLIYAMLTKGQAYVEKGIEAFELRSRERQLQALQRKASKFGLALTEAV

SEQ ID NO: 487986 - protein, 339 aa, unidentified
MEHIAIDLGGRESQICVRNPAGEILEERRWPTQDLAQYLASRPQSRVVLETCAEAFRVADAAVATGHEVRVVAATLVRSLGVGARGTKTDRRDARVLSDVSCRIDLPSVHIPTGTARERRTMCGMRETLVRARTQVANCVHGWLRTQGVRVPSGDVESFATRVRRGVPERPRYVDGHLEVLDELTTRIRRAEADLRRRAKTDPLCRRLMTVPGVGTHTALRFTAALDRVERFPDPHHVQAYLGLVPGENSSSEKKRRTGITKAGSPALRHCLVQAAWAAKRTRPNDPLQLWARRLEKRRGKRVAAVAVARKLSGILYALWRDGTTYEAARAARVSTPPR

SEQ ID NO: 487987 - protein, 436 aa, unidentified
MNQTKLNRKRTASDGGDFAALIGLDWASQQHALCLYDCATGKRESSTLEHAPEAIAQWAHGLEQRFGGRKIALCLEQAKGALINALLEYSFLVLYPINPATAARYRQAFKTSRAKDDPSDAQVCLELLLHHREKLTPSLVNDGATRELSRLLEARRSLIDLRTLLTNMLRDALKSYYPQALELAGQDLFAPLGCQFLLKWPSLGQLQKARTESVRKFYYAHNCRRMEVIEKRLHSIASMIPLCRDPALIEPAIVQVKMLARQLLQLGIALKEYDSRIEQLFTQHKDASIWGSFPGAGPTLAPRLCCAFGNERSRYQSALAIQQYSGIAPVIERSGKNQHWVHRRWGRPHFVHQSFFEYASQSVLHCFWAKVFIQDQIARGKAYPTAVRALAFKWQRIMFVCWRDRLPYNETIYLNSLKRRGSHLTSKLNHELPKAA

SEQ ID NO: 487988 - protein, 306 aa, unidentified
MIIASDFIGIDVGKYTLEIFAGREFSIANTEAALADWLAGLSRPELVLFEATGRYDGKLRRALEQAGIAFCRVNPAQARAFARATGQLAKTDKVDAQMLARMAQALRPHPQAAADERRRLLGELARRRDQLVDMRRGELTRQQEMAEPEILTDICAHIELLTSRIAVFDSRIAALIAATDELAQAQRLLRSIPGIGLVTATTLLAFLPEVGHRSPKTIAALAGLAPFNNDSGLFRSKRSIRGGRPRVRVALYMAALTACRSTGLLGQFFRTLTAAGKPKKLALIAIARKILVIANAVLRDQTPFKT

SEQ ID NO: 487989 - protein, 445 aa, unidentified
MDVVFLRCAGLDVHKKSITACRIVPDPTGQETEGIAELRTFGTMTLELLALADWLTEASITHVAMESTGEYWTPVYNLLEGTLTVFLVHAAHVKNVPGRKTDKADARWLAKLMRFGLLQASFIPPQGQRDVRDLPRYRTKLVQERVREVNRLQGGLERANIKLASVASDIMGVSGRAMLAALIAGKADPATMADLAKRRMRAKLPLLEQALTGVVRDHHRQLLAMQLAHIDFLDEHIAALNTTIATALRALSADASLSPQPLPRATASSALPLTGSTPLTFTRAVELLDTISGVDQRGAEVIVTEIGMDMSRFETAPRLAAWAGVAPGNDASAGKQRSGKTRKGNRSLRASLTQLAHAAVRTKGTYLSALYQRLAARRGKQRAIIAVAHSMMRSVFHMLSRNESYRELGANYFDERRRHYTVDRLTRRIEPLGYRVHLEPVASVA

SEQ ID NO: 487990 - protein, 414 aa, unidentified
MTDDARWFVGIDWASETHQVCLVDASGKIVGERGFPHGGAGLAEMCIWLLVTTRAEPTVIAVAIEVPHGPIVETLLERGFLVYAINPKQLDRFRDRFTVAGAKDDRRDAHVLGDSLRTDRHCFRHLAAEDAVTVELREWSRMAEDLQQERNRLANRVREQLWRYYPQALKISDDLGADWFLELWAAVPTPAKAARVHESSIDRVLKTHRIRRIAAAEAAQVLRQQPLTVAGGTVEAASAHIRAVAARLKLVNRQIKEAHHRLDALCGKLAAGEEKTAQAPEQRDVTILRSLPGVGRIVLTTLLAEAAEPVRRRDYHALRTLSGVAPVTKRSGKRCIVIMRQACHMRLRGAVYHWARVAIQHDPLSRCRYAELRKRGHSHGRALRSVADRLLAVACTMLDQQTMFDPGRANKQAA

SEQ ID NO: 487991 - protein, 391 aa, unidentified
MIYVGIDVAKDKHDCIITNSDGEVLHRPFIISNNRCGFDELYSRITQSTKDLDKVKVGLEATGHYSYNILGYLLDKGLTTFVINPLHTNLFRNSLSLRKTKTDKVDAHTIAKMLMSEVDLKSYSNTSYHNEELKSLTRYRFDKVQERAKLKVSISRLVNILFPELEKLVPTLHIPSVTAMLSEFPGAKQVAHAHLTRLTNLLYEASKGHYNKDTAIAFREAARESIGSVMPAKSLELRHTLKLIHELDIAISEVEDEIKKIIDSMNTNILTIPGISYRMGAMIIAEIGDFTRFDSPDKILAFAGMSPTTYQSGQLDSSHSKMEKRGSKYLRYALFNAAVYVCNWDPTFSAYLAKKRAEGKHYYVAISHAVKKLVRVIYQLEKTQQPYIKAT

SEQ ID NO: 487992 - protein, 435 aa, unidentified
MNKLQRIRPNCAGVDVGSSRIFIGIENKPVRSFDTYTNSLRQAVIYLTESGITELAMEATGIYWITFFDMLVAAGIEVHVVNGRHVKHVPGRKSDVADCMWIQQLHSYGLLTNSFVPDDNIRQLRTYMRIRKDSIEMQITHVHHMQKALTQMNIRLTEAISEIHGVSGLRMIEAILAGERDSEKLVDLCADQIVKRKRGVVLEALNGFYKEEHLFELGMAYTGYNFYEAQITNCDKEINYWLEKHMPEERLVELKTKTKKIRHHAPRIKELHSKMVQLYKGKDVTALPGITQYTWLQLTAETGMDLSAWPTAKQFTAWLGLAPSKYSSGKVSKNKKRKSSTKAGQIFKEASIAVLNSKNHALGSFGRKIRSRRGPNVAIKAIARKIAVMYYYTLTQGVNFVEEGIKAYEDKYQLVQRRLLEKKAKQFNLQLIPLD

SEQ ID NO: 487993 - protein, 388 aa, unidentified
MIYVGIDIAKHNHFASALSSDGEVLIEPFEFYNDGDGFNMLISALDSLESDNIIIGLESTAHYGDNLVRFLVASDYKVCVLNPIKTSTMRKNNIRKTKTDKVDTFIIAKTLMMQQSLRFVTLEDVDVMDLKELGRFRMKAIKQRTRLKIQLTSYMDKTFPELEKFFKSGLHQKSVYALLKEAPTPEAIASMHMTHLANLLKVTSHGHFGKDQARELRVLAKRSVGQSNGVLSLRITQAIEQIELLDKQLDRIETDMTDIVKCMFSLIMTIPGIGYVNGGMILGEIGNIHRFSNPQKLLAYAGLDPTVYQSGNFTAKRTRMSKRGSKALRYALINASHNVVKNNATFKAYYDAKRAEGKSHYNALGHCAGKLVRVIWKILTDEVEFNLD

SEQ ID NO: 487994 - protein, 340 aa, unidentified
MGEVTTIGLDLAKQVFQVHGVDAKGATVLRKQLRRAQVLAFFSRLPPCLVGLEACATAHYWARELRALSHEVRLMPAQYVKAYIRRNKNDAADAEAICEAVQRPRMRFVPVKTAEQQASQLLHRGREQLVRQRTMLVNALRAHLAEFGLVAAQGLRNVGELIAIVRKQDDTRVPDMARQVLQVLANQIEQIEAAIAALEKQLLAWHKTNAVSQRLASIPGIGPIIATAIATTVADPNVFRSGREFAAWLGLVPRQNSTGGKPRLGGITKRGNRYLRRLLINGASANLLRSRATKADPWVIGLRRRRPPLVVAVALANKTARIAWAVMLRQNEYQPRTVAA

SEQ ID NO: 487995 - protein, 445 aa, unidentified
MEIINPKAAGIDVGSRSHWAAVGQSEQDIKEYGVFNEDLFALADWFDLHGIKTIAMESTGTYWQSLYAVLLSRGFHVILCNGKFTKNIKGKKTDVKDCQWIQKLHSLGLLSGSFLPDGETEQLRTYCRHRSNLIHSSASISKKMQKYLRLLNLRLDVVVKDVCGLTGLAIIQAICDGEKDPQKLASLRHGNCKRSEEEIAKALHSNNREDYLFALKQELDTYRYLQDKIAQCDLEIERKLSEIIGRDDNKKQHYIDPKVHKRVNKNTPKNIDLNLKSYQMFEGTDLLAIEGMSYSTVLALMSEVGIDGIKKFSTAKHFASWLRLAPNNKVSGGKVLSSRVPKGSNRLKIALRNAANAIGNLKESTPLRDFFHRINFRKGRVSAISATARKLAVIIWNMVVKGTPYINPEGYLFLDQKRKLGLVKRIKKQIDKFALTNEDLGIEIN

SEQ ID NO: 487996 - protein, 426 aa, unidentified
MGMGKFTKTLCISERKEYSIMEGPIITVDVSKGSCHYQPFIENGHPMRKPKQLSATNDGFQKLGQTIKDLEAKTEREDIPVIFEATGVYHRSLQKYLEDHKIRYYIISPLLSATYRKTDLHSNKTDALDCAHIAKAYYCEKGLRQYQAQPQEYKRLYQLSHLYESELVHLRKRKVSLRSMLDIIYPRIDRTFKGNQNLYDPIPMEILKRYPHPSLLLSHREDTIVKTVGHRTGHLKGYTERIVHKIYEKAKECYSGCDIDDIEVVKLPTMIENVQEQKKKCNSLLKEMIEIARTCPYFASVVSIVGIGENLTARIIAELGDVNRFDNRAAIVAYAGLNPKIQQSGDIDGLHLKISKKGNKHLRCLLYLGAQCNYRLRKEDPLYEFTKKKRQQTQCPLSSKAAYTASAHKLLVIIYSLCKNGTLYHS

SEQ ID NO: 487997 - protein, 359 aa, unidentified
MDDHTSLTADVIGGLDTHKDLHVAAVVDGRDCVLGTRSFPTTRQGYRQVLVWMRTFGKPVRIGIESTGSYGAGLLRFMQAAGIEVMEVTAPDRHDRRKRGKNDDLDAQNAAHAAFAGHRTVTPRSRDGMVEALRVLRICRKTAVNARRIALQMIQNTIIAAPDGLRDQLRQMTRMQLIRVLAALRPHLTTYRDLEAAYRISLKSLARRYLELHDEIADLDVMIGAIVNELAPELLARNSIGQNSAGQLLLTAGDNPERLRSEASFAALCGVSPVPASSGKTVRHRLNRGGDRAANSALHIIAIGRPRTDDRTKTYVARRVAEGHSKLEAIRALKRYIAREVYNVIMRRQKEINAIGLAA

SEQ ID NO: 487998 - protein, 370 aa, unidentified
MTYITSIGLDVHARSVSACAFDPFTGEVAQRRFGTDAGEIAEWILGFESPKAVYESGPTGFALCRELRALGVDCVVGAVSKMQKPSAEKRRKNDRRDAAFLARLLATRNITEVWVPPVEAEAARDLSRALDDAREDLQRARQRLSKFLLRRGLVFDETDALGRRRSAWTRAFWRWAESCRPSDPAAAAAFDHYVACVRCAESDKRALEKRVLAEARADRWRGAVEALSCIKGIDAVTAFCLATEAGCFSRFPTAGAYASWLGLAPSEHSSGEKEAKGGITKTGNSASRRALVEAAWHFKSCSPKPKAPPAGSAVPAAVKRRCDDATARLRRRRESLGAAGKRPCVANVAVARELACWVWEVGRRAEGTLA

SEQ ID NO: 487999 - protein, 386 aa, unidentified
MTDYSAFVGLDVHKDTIAVAVADAGRSGEVRFWGEIANTPDAVASMLRKLGARYPRMHFVYEAGPCGYGLHRQILGTQHHCEVISPAQTPRKPGDRIKTDRRDAVILARLSRAGELTPVWVPDETYEAMRDLIRLRQATVKDLRAARQRVKSFLLRHGRVFKGASWKRSHRIWLGNQSFAHPAQQIAFQSYLNAVDQALARRDDVDAQIRQFAAEWSMAPVVEALQALRGVAFVTAVTVVCEVGDIRRFAKPRQLMAFLGLVPGERSSGETRRQGGITKAGNVLARAVLVEAAWSYRSPAKIGAHMMLRQEGIPQAAKDIGWKAQVRLCGRYRRLMARGQKVPAGNHGRGAGTCRLHLGHSPYHRASPGLRYGVIPVRTQKRRCPP

SEQ ID NO: 488000 - protein, 394 aa, unidentified
MKLIGIDIGKNKHFFCVMDQQTGEIISQPVSFSNDKEGFDFLVQKIKSYPKDSILIGMEDTGHYHFALLKYLLDLQYTVALINPKTTDFNRKMQGGITKNDKLDTINICDVLDTPERKKQYRITKVNSFDLYEQKQLTRHHHNLKEEENVYKNRLQKCIDIVFPEFNKLFNSKYGIVYMNILKMFGSAENIANTDIRTIRKCFEIEGRGNRISLTPERLKECARSSIGISSSAEVIQIKHLTAQIELIEEQLTEIDKKIEEFSIQNNSPILSIPGISHFSGTSILAELGDISNYSKPSQIIKFAGVAPLHYESSQFNAQHTAITKKGSKYLRKTLYQIILPVIRHNPVFTKYYQLKISQGKGHRCAQGHCVRKLLRIIYHLLKTNQQFDPQLLR

SEQ ID NO: 488001 - protein, 364 aa, unidentified
MGNVRFVGLDVHADSIAIAVAEARGGEPSGLATIPNDTALLLKRLRRPGEVRCCYEAGPTGFGLHRDLVAAGIECVVVAPSLVPARAGDRVKTDRRDAVKLARFLRSGDLTEVYVPDEATEAIRDLERARDDAKRAERAARHQLGKFLLRHGRRSPVKTAWCRKHLEWIRTQHFEHPAQEAVLVDYLKAVEDLGERVARLTNSIGEMVEQWDRRPLVKALQTLRGVSAISAAIVVAELGDLSRFQTAPQLMGYLGLVPSESSSGETRKQGRITRTGNGHVRRILVESAWAYRFRPSVSDAIRLRSQGVSEEVKRIAWRAQERLCGRYRKLTARGKNKNRTVVAVARELAGFIWAIGRQPVLLAN

SEQ ID NO: 488002 - protein, 456 aa, unidentified
MSKKRPVGKQKSSAQTKVDWKALEIVHPNAAGIDVGGSEHWVAISPDRDRVPVRRFGCFTADLREMARWLVEKGVRSVAMQSTGVYWMPVFEVLEQHGLEVYLVNAQHTKNVPGRKSDVQECQWLLKLHAFGLLNNSFQPTDQIRVARTLWRQRGNLVAQASRAIQRMQKVLIEMNVQLSSVLSDISGISGMSMIAAILDGERDPWTLAALVQPEVKATRKDIAKSLEGNWREELLFILRQDVELYGIYHKKIDDCDLQLRKHLESFGSVVDLKTQPLGPRPKGKKGSKNAPKFDLRTELYRVTGIDWAQVNGIDVLTAQTVIAECGAGLSAFASEKKFASWLGLVPTNEQSGGKILNRRTRKVVNRATVALRNAATTLLRSRSYLGAQYRRLRTRLGAPKAITAMARKLACLFYRLIKHGQQYVDKGNEYYEAKYREQQIRSLIERCLQVIDGLS

SEQ ID NO: 488003 - protein, 436 aa, unidentified
MRAAHEATLCDERGEVIWSKRRFGNRHQELVAVVAQGGDCDQLTVVMEPTRNAWVPVAAHFMAVGADVVLILPQRSADLRRYYTKHTKNDRLDSHVLARLPLHPEGLNPIDSLGPADALKRAVHRRVKLVEWQLASRQRLDSMLDLLGPGYAETIGGARYTKTALEILEHYGNPRRLRRLGVNRLTVLMRGTSGDQWSEDKATELVAAAGEAIALWEHDQLDFDELAWDLASEVRLVRQLGDEITRLQERIDVLYEKADPAGIVISALGVGPILAGGILGRLGDAKRFATLAGVRSFSGMVPKVNQSGHTETRPGITKAGDAGLRRDIWFAADQARHVDPQLGAKYHRLIVERRLHHYSAVCHLATTLLTRIAACWRNDERYVIRGRRGPTYHCHRRESHRQSPLPDPTRTPDPDTHHRHNERISAIRSRPKPIRR

SEQ ID NO: 488004 - protein, 389 aa, unidentified
MTIEHAAFIGLDTSKLKISVAIAEGERNGEVRFLGDISSDPSSVAAMVKKLAKLGAKLHFCYDAGPNRYGLYRQIVELGHECSVVAPSLVPKRAGDRVKTNRRDAISLARLHQAGELTPVWVPDEAHEAVHDLVRARDAAFEAQKQARQQLNSFLLRHGRYYTGRKAWTRAHGRWLASQAFDHPAHQILLAEYCQAVEDAGVRLDRLNKLIGETSASWSMAPVVAAYQAMRGVAFMTAVTFVVEIGDVRRFDSPRQLMTYLELFPTESSTGERVRRGGITKAGNARARRALIEGAWTYRYPARISPTINARLTDLPKSVCAIALKGQVRLCTRYRRLIGAGKAKTVGVTAIAREMAAFIWAIGHEVPPRQALKQACCTSDQIILENNIC

SEQ ID NO: 488005 - protein, 359 aa, unidentified
MNRIVRIGVDLAKNVMQLHGVDETEHVIVRKPISREKFLEWFANREPCVVAMEACSSSHFWARRLREYGHDVRLIPPQFAAPYRKGGARVKNDALDAEAICEAASRPHMRYVPVKTVAQQGTLTLHRMRQGLVEERTALVNRLRGLASEFGVFLPQGIHRFRDRFVEAVEDGANEMPGSTRVALMRGWTRLGEVDEEIAWFDKQIAQHAKGDPPARRVMEMFGVGVLTASAATATVGDARQFRNGRQFAAWIGVVPKQNSSGGKDRLGRITKQGNDYLRTLLFQCARVTVTAAKHRQDRLSRWIMQLSERVGYGKTLIAVANKHARVLWAILAKGERFDPTYVPPSRGASNVSQEIVKA

SEQ ID NO: 488006 - protein, 423 aa, unidentified
MEIMHELVAGLDVHKETIVACVRVGAERKVTRECRSFATTTDGLLALLAWLVECRCSHVAMEATGIYWMPVWKILGEGDFTLIVANAAHIKNVPGRKTDMNDAMWIADLLACGLIKASFVPEEDVQELRSLLRTRKQLGREQTRHVQRIQKTLAEANIKLDSVLSDIMGASGRRMIEAMIAGVRNPHQLAALASAKIKATPKQLYDALHGRLTDHHRFLLKLHLRQWDGLDVTIRDIDQEVAARIARMDKEVKAGEVPFCDLIDLLCTIPGVSTLSARTILSEIGRDMSRFPTAGHLVAWAGLCPGQNESAGKRKTTRLRKGAPWLKTMLVQCAWAAKRKKDSYYKAQFFRLQSRRGPQKAICAVAASILTAIYHILKNGTEHHDLGADHFNRRSTEGQTKRLVAQLTKLGFEVKLQRTTEAA

SEQ ID NO: 488007 - protein, 341 aa, unidentified
MEEYIGLDVSMKETAISIRRDGKRMWRGKCTSDPAVIANLLRKHAPSAKRVIFETGPLSVWFYHALCAEGLPAICIDARHAKAALDMAANKTDANDADGLAHLAEVGFYREVRVKGFDSMLTRTLVSARTRLVRITTELSNQIRGLMKTFGLVVPAGKGSKFDEHVRALLDDQKDLAAIVLPVLEAWRSMRLRAAELGRQLIANARKSEACQLLMSIPGVGTVTATSFTTAIEDPNNFRKSRSVGAWLGLTTRRYQSGQVDYDGHISRRGDRHLRSLLYEAATVILTRSSAESGLRTWGLALKERLGFKRAAVAVARKLAVTMHAMLRSGEMFDRTAGATA

SEQ ID NO: 488008 - protein, 367 aa, unidentified
MNQRNQAIDGEAKAKPKVIKLGLDLHVRQVTECRQLDGSTPKPAQQWDPWKLLAQVKDWVQAGIKVYSSYEAGACGYWYHRELIKAGALNFVVVPRVLENQRTRHQKTDRLDARALLDRLENYLNGNLHAMSIVRVPSLQEEQQRSVVRYREQLMRDRRRAEARGRAIALVQGIEVPVGWWREARWQEFNRQLPEWMSLQVRHWREQAVALDYQERTIRRELQKSLSIELPLGIGALSWITLERELRGWDRFHNRRQIASYTGLCPGIHNSNGRGREGSINRCGNSVVRYTLIEMAWRLLRWQPNYGPLQKLRKAFVSKRAKRRLIVALARRLAIDLWRWATGRATAQELGLQLASSMEQKNQALKA

SEQ ID NO: 488009 - protein, 375 aa, unidentified
METIYIGVDFHARQQTICYLTTETGEFVTHELKHQDKDEVRTFYAQFGGRVIVGLEASGYSPWFEQLLEDLGHEVWLGDATEIRRRARWRQKNDRRDAELILDLLVHDEFPRLHRPSLESREILRMLRYRHKLVKMRTIIKNSLQALALQSGLSRRTKLFTKIGQQELRAAPMSPVMKQQQEQWLELLLVLNQRIVETTLWLKQQSLNDARIRLLRTHPGIGLLTSLGLVHTLDPISRFRNQRKVTAYAGLEPMERSSAERKRFLGISKAGSRLLRFLVIEAAHTAVKKDDDLKRFYRRLQERRGRPKAKVAVARKLLVRSFIMLRDEIDYAEFQRRAVAARLARQSSRPSVPDRLIGQPASSESQERVLSAAKK

SEQ ID NO: 488010 - protein, 434 aa, unidentified
MNASNSTLLDPAPAPSAITYAAFIGIDRSDSRLDVCLQDNQPSARLETLALQNTPEAIQQWLKQLCQRFGEQALAICFEQPAGSLLHQLADCPFVQLYPINPLTLARYRQTFTTSRAKDDRRDARCLMEIVRDHRDKIMPWQPDLIQTRVLAALVEARRGAVDLRTQLCNRLKTHLKSYFPQALELVGEHLYTPLCCDFLLRWPSLPELKRARGATLQRFYIEHRSRQPAVITRRVQLIRDSVPVSEEAALLTSTVLTTQMLAGQLKQLSASVAAFDAKIDELFHNHNDAFIFASLPGAGSVFSARLLAGFGSDRTRFATAQEMQKYSGIAPVIKQSGHNCVVQRRRACPRFLHQSLVEYAAKSILHCTWAKAFYQQQRACGKGYWAAVRALAFKWVRIIFRCWQERVAYDEARYIEGLSRSRSPLLAYLEVPV

SEQ ID NO: 488011 - protein, 388 aa, unidentified
MDQIHERVAGLDVHRDSVAACARVPGQRRDVVTRKQQFSTTSRGLAALVAWLGEHAVSVVGMEATGVYWKPVYYALEERFEVWLCNAHHVKNVPGRKTDMSDAEWLADVVAHGMVRPSFVPPPLIRQLRDLTRYRKRQIDTRAAEVQRLEKVLQDAGVKLSSVASEVLSVSGRKMIEAMIAGQRDSAVLAQLAIGRMRNKLPALAEALHGHFGAHHAVVARQILDHIDFLDARILAVSEQVASRMPPFTAAVELLIEVPGLNQRSAEVVLAETGGDMSRFPSPAHLASWAGLCPGNYESAGKRKRVGTTNGSPWLRRTLIESARAAARTKASYFAAQYRQIAHRRGPNKAAVAVAHSLIDVIWHLLATGERYTDLGIDLLPAPPRPRT

SEQ ID NO: 488012 - protein, 447 aa, unidentified
MKSRKLPSALTPPGGPDPETIGTRRRREKRERAAAFLAGNPLLAGVDLGKDRHAVWLAGRATDLALIERLMVENSLAGLEKLEHRAEQHRQQRGFDRLIVFMEATSYFWQNVANVLESRGIAYRIVSPLAVDRQREIEHLTYAKGDYRDAELIVALGAKGQWVECVLGHEPLWITLDVFAREHEVLLKAEVRERQRVRSFLELALPEFLECFEDPLRKTARALLRKLTRRPEEIPSTVALFLERAAAIEGVRLLRGRLRALAARLELRQSYGVERALAPLLARIGLAVERYELLHEQREGLRARLVALYRTTPYCAVLDTIPGVSPESHALLLGLIGDPKRFDRATCLVKLAGTEPRENHSGRTEGAHAISRRGRSALRHLLHRIVLGFPRGNAEFAMYLERLRKREENRLSWQQAAVAAGNKFLRLVHHLCVSGEPYDASKLTFKP

SEQ ID NO: 488013 - protein, 338 aa, unidentified
MYYTGIDLHKKTSFITTIDATGKIVKKANIHNAEEAILDYFLSLEEETKIVVESMASWYWLYDLLTEKGFDVVISNPVKTKAIASAKIKNDKIDSHMLAQLLRADLISPVYVSGLQTRKLKELLRHRSRLVRDATRMKNRIHILLMKNNYRSPYSDLFGVLGLRYLQEIGLPDYHRHQVETYLFLYKELREQIEPLTQKILALAKHDHTAQLLMTIPGIGPITAMFIVAEIEDISRFRSPRNLASYAGLVPSLDASAGKEKRGRITKQGSVYLRTALVEAAQTIPRIKNCRLNIFFRKRIVKSGYQRAIVATAHKILQYAYYIMKNQTPYRETSPASA

SEQ ID NO: 488014 - protein, 343 aa, unidentified
MTVIIGVDPHKASHTAVAIGHDESELGRTRVRATRKQVLQLLAWAQPLGARRWAIESAGGLGYLLAQQLVDAGEIVLDVPATLASRIRVLGTGRSDKNDPNDALSVAIAALRTPTLRKVRPADHAEVLRLLAKRNIDIGNHRTRVVCRLHNAVMELAPGGIAKELYASDAVALLDRIEPGTPVEQARHDLAVELLADVQRLDAQLKESHRRIRVAVTASGTTLTDLFGVGPIIACYLIGFTGDVGRFTSRDQFAAYNGTAPVERSSGGRVVHRLSQRGNRRLNHALHLAAVCQIRQPHSDGRAYFDRKLTEGKTKKEALRSLKRQISNAVYRQLLSDANRTTP

SEQ ID NO: 488015 - protein, 438 aa, unidentified
MEEKKTADYLSVFDYPEYCTPVGIAAGEESRRKHKGGTKRFVGLDLSKQSCHVCIVDQQGMVVLHEGYSLRSSQRDKLYEVLEEGDLVLMEASTGTFNIAREMNNIPGVVACVVNPHSTRINQTKKKTDKEDSLFLARLLLRTPVEELQLVSIPSDQEMANRDTISHYRSIDRSHSQMINRLHALFFNKGFPEVGKVHNMHTKTGRAAAIEACFGTDRSLAPSKRIAKELSMQLALLEELQERGEKQLAKIARSDNRTATILGSIPGVGLKTIASFIAFVGDIGRFHSAKQLAAYCGLVPRVYQSGQRDAARKITKEGQAALRGYLIESVFAMMRTSFDFPLKRKYEEFRERMGARKAAVAIARKLVTMMYAMLKHGTIFTVEDAEERQDVAAYHARKDLKAIGRYNKIQQSCKAYPEMLNLTNSLITNELGVFKFPD

SEQ ID NO: 488016 - protein, 326 aa, unidentified
MTPPKLGIDISKKTFDVALIRDPETMKVKQRQFSNTPDGFRALQTWLAKQGVGRVHAVMEATGAYGLDLAECLHGAGHLVSIVNPAKIKAFGQSELQRNKTDRADAALIARFGWRHNPEPWTPPEPEQQELQSLVRHLDDLIEQRTQVSNRLSDARLTKLVRESWEEILQALNERIEEVKRQINQHFDDHPTLKRQRELLDSIPGIGPETAARLLAEMPQLGEFDSARAAAAHAGLTPKRHQSGTSINAPARISKIGNPRVRYALYMPAMAALRSSKEFKELAARLTERGKKKMQIIAAAMHKLVRIAYGVLKNQQAYDPNYGSAV

SEQ ID NO: 488017 - protein, 311 aa, unidentified
MTEITIGIDVSKDALDAHRLSDGICRQFTNDSKGHKALIAWIGKDVDRVVFEPTGPYHGVLERALARAGLPMVKVNPRQARRFAEATGKLAKTDRLDAALLARMGAMLQLEARPAHSEAIAELKQLHIAREALVKDRTAAKNRGKSISLGLLKRQNAERLKHTERQIAAVEAEIESRILADAELALRFEILVSIPGIARLTAFVLLIEMPELGTLEPGQAGSLSGLAPVARQSGRWTGKAFIRGGRANVRQALYMPALVAMRFNPDLKAKYDQLVGAGKPAKVAITAIMRKLVVLANALLKAGRPWMQKNA

SEQ ID NO: 488018 - protein, 343 aa, unidentified
MKIHALGIDLGKTVFHLVGLDASGQVVVRKRCSRTQLLAFTANLQVGLIGMEACSGAHFLGRALRAQGHEVRLMPAQYVKPYVKTNKSDYIDAEAIAEAVQRPRMRFVPIKTEEQLDLQALHRVRERWVMRRTAVVNQIRSLLLERGLTLPKGRSHLDEQLPRILEDAELHLSDSFRVLLAQLKLELEQLAARIEEMDRVIQKTARENEACQRLTEIPGVGPVTATALIAAVGNASAFGKGRKLSAWMGIVPGEYSTGGKQKLLGISKRGNKYLRRLFVQGARSVLQQRHKQAPGLSEWLAQLLARTHQNVVVVALANKLVRMAWAVLCKNERYRAPVLAITT

SEQ ID NO: 488019 - protein, 430 aa, unidentified
MGLIVPTTIQPEREDQPLPYEWFVGIDWGSQQHQVCVLDRARRLVGARAVDHDGASLAQLAAWLWTLSVGQPQRVSVAIEVPRGAIVEGLLERGFHVFAINPKQLDRFRDRHSVAGAKDDRRDAFVLADSVRTDRPSFRRLQLDAPHLLLLRELSRVEETLLEEFRRSANRLREQLHRFYPQMLQLCSAADEPWLWDLITLAPTPTHAMLLSEEQVQRGLKAHRIRRIKATEVLACLQAPALPVAPGTAEAAQAHCGFLLPCLRVLAEQLQACGQQVDALLRTMADEPGEGERPSDVAIVLSLPGVGRKITAWLFAEAAQPLTERDYQVLRTHSGVAPVTKQSGKRRLVVMRRGCNPRLRHALYHMARVAMQRDAHFSSVYTALRAKGQRHGQALRTMSDRLLRILVAMLRNGTCYDASRIRRESAVQMG

SEQ ID NO: 488020 - protein, 327 aa, unidentified
MEPANMGIDVSKNSLDVVLLYEGKSYYQVVGNNLSGFQHLSTWLEREGFQQVHLCMEATGQYGDAAATYFYQRGYPTSVINPARIKAYAASHLSRNKTDKADAKLIAEYCQKEKPPLWIPPTDAFRTLKALVHYLDDLMSMRQQERNRMEFSSTDKLVESTMLEHIAFLDEKIKKVHSAIHQHIQSDLQLRHCCELLVSIPGIGERTAARLLAEIQDFRSFKNAHQLAAYAGLNPRKYQSGSSVHRKSRLSKVGNAHLRYALYMPAIVAMKHNPIIRELCQRLSERGLAKMAIVGASMRKLLVLAYGVIKSDLVFDPNFTHKCAIAS

SEQ ID NO: 488021 - protein, 342 aa, unidentified
MEYYAGIDVSLEYSSRCVVDGTGKIVREAKAASEPAALIAWFGSLGLGLTRIGLEAGPLSQWLYLAMKQAGLAVELLETRHVRDAFKAMLVKSDRNDARGIAQLIRLGWFRPVHCKSMDAQEVRAMLTARKLVQTKLLDVENSLRGILRGFGLKVGKTTDRSFATRIQELVKGHPNLEAIGEALLSVRAVLLREFNAFEKRVRAMSRLNARAKLLMSTPSVGPIVALTYASAIDDPARFKSSKQAGPHFGLTPKKYQSGETDYSGRISKIGDAAVREALYQAAHVMLTKPIKGCSELKSWAMRIARRAGMSKAKVALARKLAVILHRMLANATPFNAAAAAA

SEQ ID NO: 488022 - protein, 454 aa, unidentified
MAQGSGLTRGDRNRNRRIGALRGVVRRDRAVLAVDLGEDKQAAVLVDHEGRVLARKTVTAKAYQLGGLLEGAAGQAARAGFAGLVVACEPTGHRWMALMGLADGAGHGFCCVQSLAVHREREKDDYTRDKTDHRDAYLIGRLVIRLDCYLPERAEEAWARLRHLGARRFALVADVICCTQQVSDLLACAWPAALGTAARPLESTTWLAGMGVVTDRCCGDPSRLRKMGYDTFLAAVRRELPRWGASRAYRKIVRGLWEALADAGGVAAQRRGALERVHLLMADWRSLLARLADVEARMCAVLDELGLTGLVTSIDGLSAVGAAVILAETGDLSRFASARSVVKHAGLNPAENTSATLAGKTRISRRGRPGLRTAAWRAAWAGLRHNRVLRARYAHLTGRDGGNRLSDGQARAACAAALLRWLYAVVTRRQAWDARIAAGTIPARAGAVTVPAAA

SEQ ID NO: 488023 - protein, 199 aa, unidentified
MKRDKYMGMDVHQATTVVAVIDPEGKIVLETIVPTAAGPIRRLIEGITGPVHVTLEETTQAEWLHDLLEGFVAEVVVCDPRRNKLLVEGSKGDKADARKLAELLRTGMVRSVWHGRKTTRGLKEVVRAYETFAVDTEGHRHKAIELLRTIPRIGPIRAAQIVASAGTPHRFRTKRQFWSYSGLAVVTHTSAEYEMHTRE

SEQ ID NO: 488024 - protein, 395 aa, unidentified
MFIVGIDVAKRSHEVCMITSDGQTVQRPFSIRNNCTGYNLMLEKIRKHTNIKSQIVFAMESTAHYWLALFTRLRKDGYHVILLNPIQTSAMRDMFIRKIKTDAKDSFIIAELIRFGRYAESNVAQDRLLALKELCRNRFYLVDMAGDLKRKLIALIDRVFPEYEAQFDTIFCKSSVALLKKYPTPQKLSNAHLDKLTELLWNSSNGHFGEWKARELKELARNSFGVEDCDGAYSTLILLMLDQIQSLSGKADALEKEISRLFQSFDTTVTTIPGVGPIIGAVILSEVGDISRFSSADKLAAYIGVDPSVNQSGEFQAVHAHMSKRGSPYLRRCIWMASQVAVQRDPMFRAYYEKKAAEWLKYMTIIGHVTRKMTAVVFAILRDHKVYEPVLPTAA

SEQ ID NO: 488025 - protein, 456 aa, unidentified
MIRRKTNKPVAGEMSNFTQINPNAAGIDIGSAEHWVCVPPDRTPQNVRKFSCFTPDLIEMASWLEECRVDTIAMESTGVYWIPAFQILEERGIEVKLVNAHHVKTVPGRKTDVLDCQWLQQLHTYGLLSGSFRPDDQICVLRSYIRHRDNLIKSGSTHLLRMQKALTQMNLQLNKVISDITGVTGMAIIRAIVAGERNPQVLAGLKNSRIKSSTADIAKALTGDYRAEHIFVLKQELQLYDIYQGQIANCDVEIDRYLASFADREHNPPPAPPKRGNRKPRGHEPTFNLRNHLYRISGVDFTQIPGFDALTVQTLLSEVGLDATRFPTVKHFCSWLGLCPSTKITGGKVKSSHTRRVVNRAANAFRLAAQSLSRSQSALGAFYRRLRSRLGAVSANTAAAHKLARIFYHLWSTKTAYADAGGDYYEQKYRQRLVSKLEKTAQSLGFELVSKPPQLD

SEQ ID NO: 488026 - protein, 338 aa, unidentified
MNYVGIDHHRQYSHMTVMDQMGQVLRSGRVPNLQDEIGKFLEGFEAVEAVIETGRSSYTMVDVLEEMGVTVKIAHPNEVKAIARAKIKTDKRDSEVLAHLLRMNMVPEVYRRSVENRQSQRVLRQRAFYVRAMTALKNRVYAFLSQQREEVREEVARETNIFSERGQKVLLGLKLVPGEKRLLDALLKTYRHLEKRTKESATFVEKLYEENREAQLIRTIPGFGKYLSVLVAVEIADLSRFADAAHLHAYAGVIPSVHSSGDNTYYGKIIRAGNRWLRWAAVEAVWPAIRADFDLRCFYERLARRKGANKAKVAAARRLLTIVYKVWKEQRNYIPYRR

SEQ ID NO: 488027 - protein, 374 aa, unidentified
MKKVKYVGLDVHKDTIVIAVADFSARGEVRLFGTISSDLRALEKALRKIRGEGITLAVVYEAGPSGFVIYRRLKQLKIECIVVAPSKLPKRSGDRLKTDKRDAVNLARLHRAGELEGIHVPDAVDESVRDLCRARSDASGDLRRTKQRLKGFLLRLGYHYKGKANWSDAHRRYLRELKLPLVVHQAVLEEYLLAVDEAQTRLDRIKEMIEAHAPLWRLYSVVEALMAMRGFQLVAATTIVAELGDVRRFTHPGQLMAFLGLIPDVHSSGTKRRQGSITKTGNAHARWMMVEAAQHYRLPPKVSAPLAKRQEGQSHQVRVLGWKAQTRLNKRYWQLTARGVMTAKIQVAVARELCGFVWDMIRTTWPEPREASAR

SEQ ID NO: 488028 - protein, 349 aa, unidentified
MGEVSTIGVDIAKSVFQIHGVDAGGTVVIRRRVGRARVLEFFADLPACLVGMEACATAHQWARELKKLGHDTRLMPPTYVKAYVKRGKNDAADAAAICEAVTRPSMRFVPIKNVEQQSVLMLHRTRDLLIRQRTQLINALRAHLAELGLVAAKGREGVHQLVTVVTECGGERLPSNARFACQAIVTQLHAVQIEISGLDKRITQTHRVNADSKRLDTIPGFGVILSTAVVATMTDPKAFKTGREFAAWIGLVPRQNSTGGKDRLGSISKQGDRYLRRLLVVAATSVINSARARPYKYPWVIELLGRRPTKVVAVALANKMARIAWAVLAKGEPYRAPTRSSNAVVPAAA

SEQ ID NO: 488029 - protein, 381 aa, unidentified
MVAVARIEECTPERVVFLVMELSAKTWHLGFTTGLGEKLRNRSIDAGDLEALWDEIARAKERFGLPESAPVVSCYEAGRDGFWIDRAMAAQGIRNLVIDPASVQRDCRKRKRKTDRLDVKKLMRCLIHWYQGDEKVWAVVEPPSEDAEDARHFHRELEALKKERTRHAVRIKSLLNLHGIRVDKLGSDFKDFLDEVRLWNGSKLSPQLKDRLVREHERYMLVREQILTLERQRRAAIQEMKDPRMDQVRHLVRLKGIGENGAWLLVMELFGWREFRNRRQVGSIAGLTPTPWASGDEDKEQGIDKAGNRRVRAMMIELAWCWLRYQPRSELALWFERRFGSGGKRARRIGIVALARRLLVALWRYLVDGVVPKGAVLMTPR

SEQ ID NO: 488030 - protein, 325 aa, unidentified
MTFIHFIGIDISKNFFDVAYHAAGARSAKAKESQHQAQKFANTPKGYRDFCATYSDMLPDALVVLESTGGYETALVADLLQKSVAVHRADPLTAKHFIRSLGKRAKTDALDAAALARYGAERHTHMTLCKMEDKSQTLMNALLARRGDLVAMRVAEQARLKHPRYALLKASLGAVLATLDNEIKQIEKQIHSLIVQSPKLAATVQVLTSVKGVGKQTAYALLGCMPELGTLTRRQAASLAGCAPHPRDSGNTVGYRRTIGGRAIVKRALFMAAMTARNFHPELKPFYERLVKQGKKPMVALTALMRKLITILNAKLRDEIYAKTW

SEQ ID NO: 488031 - protein, 387 aa, unidentified
MNTVTNIAASVILAIDLGKYKSVACVHDPDSGEFRFTTFDTSRDEMKKLCAKERPAVVIIEACLLAGWVRDLCDDLGVRCLVANTASEAWKFKHLKRKTDKDDALRLAQLYLLDQLPTVPLPPTAVRQWRSLIAARQALVGRRVAVQNRIRALFVGQGLPAPRGAKAWTETGLAGISLQAKALADCGPEELWRGLLDLTLVEYRQTTALIAQAEARLDALGKRNAAVILLQTTPGLGPRTAEVIAAYVHDAKRFRNAKAVSAYSGLVPRQHQSGEVDRRGRVTKRGPALLRKLLVECAWCMLRYNGWARATYLRLTGGGQRRKKQAIVAVARKVLVRAWAMLRDRKPWRDPLAGPKAALCPSKQKRRDEAERRRRDKPATPTSAGAV

SEQ ID NO: 488032 - protein, 425 aa, unidentified
MNYKQNEKINQVKESTLVVGIDIGSTTQYARAFDWRGIELGKVFPFSNSREGFESFKAWMQHLQDKYRKSDVIVGIEPTGHYWFDLGAYLEDEGILLVMVNPYAVKQTKELDDNNQSKNDRKDPKVIAKLVTEGRYSAPYTPDGVYADLRIMVANRKRLIREMTQIKNRFTRWFAIYFPEYTDVFGDYEAQSSMLLLKKVCTPEAIVELGAEKINQIWRDAKLRAVGMKRATTLCETAKRSIGLKKGSSAARYEMKLLLEDYEYKKAQLDAVMEEIEKLCRKIPESRQMFAIKGIEVITVAGFLAEVGDVRRFESPGQIQKLVGLSLRENSSGKHKGQTTISKRGRSKLRAVLFNAAIPLIAKNPEFKSLHEYYTTRANNPLKKKQSVIAISCKLIRVFYAILAKGVIYDAQKLISDIHRQPQAA

SEQ ID NO: 488033 - protein, 351 aa, unidentified
MLIIGLDYHPSVQQIAFVDLETGETGERQLNHNEGEVEEFYRELKQRGINVRVGMEATGSTCWFERLMTDLGFELWISDPVQIRRQRVRKQKTDRRDAHLLLKLLLEERFPRVWVPNPENRDLRQLLWHRHRLVQMRTRIMNQLQAVAMNEGVRRKKGLWGKQGRAQLESFLLAPWATRRRQDLLELLDRLKPIIADLNTAVQEEAERRPEVRRLMTHPGVGPITALAFVLILGTPKGFQCGKQIGSYVGLIPSEASSAGCRRLGHITKQGAAEGYWIFRAGSAILAGKLAGRIRAANAAYIASAAAHGRWIPILLRLRLKRRPVRSIRSVNPAFHAQLGFSSHCCYRSWR

SEQ ID NO: 488034 - protein, 412 aa, unidentified
MEVLYACCCGLDVHKKSITACVLWAEGKGKTRKEKRRFGTFTRELLQLADWLRACGVTHVAMESTGVYWKPVWNILEGQFEVLLVNAQHIKAVPGRKSDQKDCEWIADLLQHGLLHGSFVPPKEMRELRDLTRYRVSLAQEENRIANRVQKVLEDANLKLASVASDPLGVSGRAILKAILAGEEDTERLAEMSKGILRKKIPDLRLALEGRVTEHHRFLLQELLDHQEFLEKKMAEVEAEIEKRMRPFEAEVERLDTIPGVDRVTAWSLVAEVGVRMEQFPSAGHLASWAGLCPGSFESAGKRLSGRTRKGSASLRRCLCQVGSVVSHMRDNYLSAQYRRLAARRGGKRAVLAVAHTVLVMAYHILKRKQNYQELGADYFDRLNADAICRSLVRRLERLGHRVTLEPLPQFA

SEQ ID NO: 488035 - protein, 409 aa, unidentified
MIYCGIDWAERTHDVALVDDTGRLVAKRHITDDAVGYKVLLELLAEHGDTEATPIPVAIETSRGLLVAVLRTGKRKVYAINPLAAARYRDRHSVSRKKSDPGDALVLANILRTDMHAHQPLPDDSDLGRAISVLARAQQDALWNRQQLANQLRPLLREYYPAALNAFATWTNGLCRPETRELLKIAPTSTQAAQLTRAQVQAALKRAGRQRGIEAEADRLRNIFRAKWAHQPPLVEDALGKQMLALLMQLDAACTAADQLAEAVEEAFPQHPDAEILTSFPGLGVQLAARILAEIGDDRTRFADARGLKAYAGSSPITRASGKKSSITRRWVKNDRLNHAGYLWAFAAPNGSPGAKAHYRRRRDEHGDWNAAARRNLSNRLLGQLYHCLQKRELFDEQIAFPTELATAA

SEQ ID NO: 488036 - protein, 345 aa, unidentified
MLYIGIDVHKRSLEICIMDRDGNVMSRCRLKNELGSVLGYFETITRPASVVLEASHNWGMLYDVLSDQGFEVHICHSREAKMIGLASVKNDKVDAYKLATLLRVGLLPEAYVPNPKSRELRGLVRGRASLKGHSTAIKNQVHAILRANWIDSPWSDTFGKSGRVFLENVRIGESYRLVISTKLAILDRIQEQVAVLDGEIVHRAHMDARAMLVTTVPGFAEFRAVMLLSEIVDISRFDRAENLVSYTGLNPREHSSGDKTRRGRISKEGSSWLRWIFVEAAHQAIKEEGKIRDLYLRVSERRGHNRGVVAAARELVVAIFWMLKRMEPYRPSGRRAMMGLPSEVG

SEQ ID NO: 488037 - protein, 504 aa, unidentified
MTTTSSTSFPKSVYRNQNAIIRAIFERAKTPRKILCVALDYAKNKHVALCCDGNGDILKKPFPVDNNAGGVDFLCTQIDATARRRKIGKKNIFLGGEDEPAYIANFAAALRGRGYLVVRVSAREAEKNRENLIASTDDLDLLGIAKTLLSRRARVIELGATDGSADAEDSAAAVYRQLRELSRARRGLVRQQTAASNRIHALADQLFPGFLNHSKSGITPFTEASLELMRERFSAPQIARRKPTALANFLRSHRSHHPDETASKLIDLARNALPPQAARVPALQKTLAATVDLHVCLERNAKSLRIDAALELADTPYALATSIPGIGFVLAAGVAGELGDPALLGNTDSLCAYSGIVPRVAQSGGPDQPARHGSTAKRCNRVLKDWVAQSAQKIALYGPPELKDRMTRWKVNGQHAVFAGAKRYLRLLRCIVRNEVPYLSPTGRRAGASQQESADACRETWKILIAKWRKIPGWREVAFADDKPIGFWRRVVMDLHGIDLPFGE

SEQ ID NO: 488038 - protein, 308 aa, unidentified
MSSSTNVAVSAVHSIIYLGMDVHKESITIAVLPDGATVPTRLDRLPNDLPKLKRWLDRLARDGEIRACYEASGAGYVLHRAMKEWGYASEVIAPSLIPKRAGVQRKHNKRDAADLARLYRAGELTAVRIPSEADERVRDVVRCRETFQREILKSRHYILKFLARRGFVFREGTNWCTPHLKWLQHLTTDNSPLAPHDRLVFREYHALLLYKLERRDELDRQIEQLALLPTLAPMVGRLQCFRGISLHSAMVLATEIVDWRRFERPAQLACYLGLVSKEDSSGDRTRLGSITKAGNSHCRHVLVQAAWS

SEQ ID NO: 488039 - protein, 408 aa, unidentified
MDLTAMHKRVIALDVHQAKITACAVVEHDDGRVEVTKRDFGAFKRDRRALAQWALELRPEVVVMESTGVYWKSPFAALEAVGIIAWVVNAHHVKTVPGRKTDMADAQWLATLARAGLLRASFIPPVDFRQLRLVARQRQKLVGMCSAEKNRLHKVLVDAGMRINVVVADIHGASARAMVKALIAGQPMHAVLDRKGRLRASREELFEALSTEQFSAVHRFVAEEIMQHIEQIEQRIARMDQYLLEGLKAWQPQLNLLQTIPGIDLQGAAMLLVEIGADMAVFGSAERLASWVGICPGNNESAGKRKSGRIRRGNAWVRRLLCEFAQAAARTRCALQAKFESLAIRKGHKKSIVALAHKMLRTIYAMLSSGTHYKDKTVDYEALSVARNAPRWMKMLRKHGFMAETAAA

SEQ ID NO: 488040 - protein, 345 aa, unidentified
MPENAPAPYDLFVGIDIAAVSVAVSWIAPPAAPTAAWTIDQTPEGYALLHRRLVATKVPPGRILVVMEATGSYWMTLATTLVGAGFAVSVINPAQAHAFAKALLKRAKTDAIDAQTLAQLAATLQPTCWSPPPAIYHELQQRLAQRDTLLDLRTQVRNQLHALQHGPVVIATVRERMEELIATFDAQLDVVDAEIRAVIVQDEEWAAAATRLQTIPGIGLLTAAWLLTTTLNFTTCPTPEAAAAYAGLAPYERRSGTSVRAYPTIGHTGNGRLREALYMATLSATRHNPLIKPFFDRLRAAGKPRKVARCAAARKLLHIAWAVATKGQVFNPLHGQTGGAVVAQA

SEQ ID NO: 488041 - protein, 435 aa, unidentified
MEVLHSRCCGIDIHKRSITVCVRIREAGRKEQKHLREFATTTSEILNCADWLRSLGVTHVAMESTGVYWRPVWNLLEGQFDLLLANATHRRNVPGRKTDIKDSEWIAQLLQHGLLKPSFVPNTVLRDLGELSRDRTSLVAERSRLKNRIQKILEEANIKLGSVASDVLGKSGRAMLTAMVEGQENPQQLADLALGQLRLKIPQLVEALRGRDRGVHRFRLKQQLERVDFIDAQIAQLEAEIEKQNAPFDEAVSLLAEIPGFDRTTAWSVIAEIGIDMNQFPSADHLASWAGVCPGNNESGGKRLSGKTRKGSRWLRQKLCQSAWCASRCKNSYFTAFFQRIAAHRGRKRAIVAVSHSLLVVCYYLLKRRCHFQDLGEQLLRPAQSGKTYSLFRQTANPTWPHSHPRTLFGRSLNPFQERANQLFPSQYRQPNFQV

SEQ ID NO: 488042 - protein, 330 aa, unidentified
MNYIGMDIHKRFTFAVVKDEQGAELAKERFDNLKTNFESFLLPFKPEETKIVMESTGVWEYIYEILESMKYNVKLANPVKTKAIAYAKVKTDAVDASTLADLLRANLVAESYIPPKGVRELRELTRLRKMVTKQRTQTENRLHAVLTKKGIFIPNRTLCKKSIKFLEEFKQEPLIKEFLEVIAFQRERESEAKKRVEDASLSNKDAEILMSFPGIGSLRAMEIIAEIGEIQRFPTAEKLCNYAGLVPSIRQSGSSSHFGGLIKQASRTLKHTFVQTAWCVIRIRESNPLQEFYKKLAKKKGKQKAICATARKICCIVYAMLSKSEKYRTS

SEQ ID NO: 488043 - protein, 317 aa, unidentified
MKIIGCDFHPSYQQIAMLDSATGEMVEKALGHERKEEVRAFYAGLEGPVRVGIEASGQSQWFERMLTELGHEVWIGDAAKIRASCERKQKTDRRDAELLLRLLAEDRFPRIWVPTAAERDGRQLLLHRHKLVRMRTQVKNQLQALALNQGVQRKWKLWSKTGRKQLESLPLLPWASRRRAELLQLLDQLEASIAELDRAVAEQAQARPTVRRLMTHPGVGPVTALAFTLTMGPAERFSRGKQVASYLGLIPSEHSSGGRQQRLGHISKQGNPFLRGLLVEAAQSAVRHGRRCVAPINDWPSGSVVGWRKWPWHGSWR

SEQ ID NO: 488044 - protein, 362 aa, unidentified
MKKYIFAGIDQGDKNSVARIAVDREKGERLGFVNTRGGRARLFKELNRQAEQAGGAKILLAYEASSCGFVLRDEAQARGMICWVLAPTKMEKSVEQKRNKNDDRDADDVLEKLRGHVLAGNRLPTVWVPDMETRDDREVLRTRLALSEKQTQVKAQIQMLLKRYGLEKPADLGSTRSKQYRQWLESLCVCASLGWGTRQSLASLLRQLSGIEEEMGNLDKLVRQLGSQPRHKPIVEALMKEKGVGLLTALVYRTEIGQASRFRRGRQVGKFVGLTPTSHESGQQQDRKGHISRQGPPRLRKVLCQASWVHVRYDPHSREVYQRLVAKNPKKKKIALVAVMRRLSVRLWHRMLEAELELKNQP

SEQ ID NO: 488045 - protein, 354 aa, unidentified
MSITKQSVGIDISKATFTACVCQRDETGALTFSKASSFSQDQKGYNQLLRWVKQHTVKGPEIVFLMEATGVYYEPMAYHLHKIKKTVHVVLPNTSKHYFSSLNIKTKTDHADARVLSQLGVERLHKSWEPPSAVLRQLRNLTRYYVQLQEQKTALGNIKHSKDSSYEVQAFILKSNSKLIEQIDKHIQECLSAIKKLIASDKALQDKVQKISTIKGVGMITIATIIAETNGFEGFSSAKQLTSFAGYDVVQRESGTSIKGKTRISKKGNRYIRNALYFPAMVACRFNPDLKAAYLRIVMNKPSKMIAQVAIQRKLLVLIYTLWRKDSAFIPAYKASSPNIKAGTTQDNPVDELP

SEQ ID NO: 488046 - protein, 411 aa, unidentified
MDVVYTRCCGLDVHKRGVVACLVTPGADGAPTKEVRAFTTMTDDLLALSDWLTAAGCTHVAMESTGVYWKPVYNLLEDGFALLLVNARHVKAVPGRKSDAKDCEWLADLLRHGLLQASFVPDRPQRELRELTRYRTSLVRERTAAANRLQKTLEGANIKLAAVATNILGKSGREILAALVDGQTDAAELAQLARGRLREKLPELERALAGRVEDHQRFMLAEQLAHVDFLEAAIDRVSAEVAARLDSAEDQLANLDSIPGIGRHVAEALVAEIGTDMGRFPTAHHLASWAGMCPGNHESAGKRQSGKTRKGSPWLRALLVQAAHAAARTKGTCLAAQYRRLAARRGKSRAAVAVGHTILVVAFHLLRDGTTYRDLGPTYFDQLDRQHVERRLVHRLHDLGYRVTLEPIAAD

SEQ ID NO: 488047 - protein, 398 aa, unidentified
MNLELPDRQFRVGLAAQQIKKQWDGLLLTYNSASRCQTGSYDQPVNSEKESVMEIIRVGVDLAKNVYQVHGVDGEDKPVWRRQLSRKNWLAAIVKKVEPGSEIGIEACAGAHHWARELQARGYAVKMVAPQFVKPYVKSNKSDYNDAEAICEAISRPTMRFVSIKSVEQQDIQAMHRIREELVGARTAKSNQIRGLVAEYGLVAPQSLAKLRAAIPQWLEDAENGLTNRFRGLLAGVWADLLALERRVTELDDEIGALAKSHPAARRLQELRGVGPMTATALIATLGSGEQFCKGRDFSVSLGLTPRQHSTGGKQRLLGISKRGDPYLRKLLVHGARSAIHAAKDKDDPLSQWLMRLTSRRHMNVATVALANKTARMAWSMIRNELDYEPQRAASSLG

SEQ ID NO: 488048 - protein, 277 aa, unidentified
MDITTVGVDLAKNVFQVHGVDERGKVLLRKSVKRAELTKVFANLPRCLIGMEACGGAHYWARRLMEFGHTVKLMAPQFVKPYVKSNKNDASDAEAICEAVARPNMRFVPVKSVEQQTVLAVHRARQGFVVERTAQGNQIRGLLYELGIVIPKGIRHIEKHLPQILEDADNGLPEISRSLFARLFEHFCQLGHQVKELESQIKAWHRQNEASGRLEAIPGVGALTASALVASVGDAKTFKNGRQLAAWLGLVPRQDSSGGKERLLGSANAAIRTCEHC

SEQ ID NO: 488049 - protein, 325 aa, unidentified
MEKVFIGIDISKATLDIYVASTSLAQHYQLENTPKAILKFFKTFDNTPNIIVAMEDTGRYNFALYAILSTMNFSVYVVNPLHLKRSIGLLRGKNDKIDSQRICRFIEKHYMDLELWKFSSLAIQKLSVLRTERRHRIKIKCGLKAQLKDEEFLKGIIDKEMIKLNKAMITLIDKQIRIIEEKMMRIINASTELKDQYQRLQSIPGVGKVLATLMIIKTKGFTEIKSARKMACYSGIAPFEHRSGSSIYYKPRVSTMADRELKKILHLAAMSAIRLKNDLALYYHRKVQEGKNKMAVLNAVRNKIIHRIYAIIKNNSVYQNNLFLS

SEQ ID NO: 488050 - protein, 346 aa, unidentified
MTTVDATRPVTGGVDTHLDVNVAAALDAIGGLLGVAEFPTTPAGHRRLAEFLASFGTLTRVGVEGTGSYGAGLSRYLRSTGVEVVEVDRPNRQSRRRTGKSDPVDAIEAARAALSGRAQGAGKSRDGNVEAIRALVVAKRSSRSTKIQTLNQIRHLGFTAPEELRSRLKGISRQHLGAEAAALRPRAGGDPVVFATKTALSLLGHRVLVLDAERERLNLLLGELVEKTAPQLLEIHGVGVDTAATLLVTAGDNPGRIRSEAAWAHLCGVSPIPASSGKVSRVRLDRGGDRQANSALWGVVITRLRSDPRTQAYMERRLKEGRSKPEIIRVLKRYVAREVYHRLTSP

SEQ ID NO: 488051 - protein, 343 aa, unidentified
MTKISTIGLDLAKNVFQVHGVEASGAVVLRRQLRRSALEKFFAKLPPCTVGMEACGSAHHWARVIGRYGHQVRLMPPAYVKPYVKRNKNDGRDAEAICEAVGRPSMRFVPVKSVEQQATLAVHGTRALLVRQRTMAANALRAALSELGIVAAQGLEGLRELMAKLEAPNEDIPEIMRGALLVLASHWQVLDADERALERQIAKTARADRNARRLMEVPGVGPIIASTVLAKVPDAKMFRSGRDFAAWVGLTGRDHGTGGKHRPGRISKQGDRMLRALFISGASAHLRQQKRRGVNDPWLRELLARRPYKVAMVAFAAKTARIIWAMLVKGEQYRVRASASAAA

SEQ ID NO: 488052 - protein, 345 aa, unidentified
MIYSVGIDIASEKFDVVFKEEVQGIIKIKGSKNFSNNAKGFGELLQWSQKRQKNGYDLLFVMEATGVYHENLCYFLYDQKEKVKVVLPQKVKYYAKSLNIKTKTDKVDAGIIAEIGLERSRKLRGWQPPSKQFKAIRDISREVTRLKKSKSAAASQVHALQAGHESFPEVVDVAQRHQENLGDLINELEDLLLDKVKEDEKLYEKLKKISTIKGLGILSAIKIIAETNGFLLFDNIKQVVSYAGLDIIERQSGKYNGKSRLSKKGNAYLRQILYMPAVSAATHNKKLKNVYGRLNEKFIHKKQSLVAVMRKLLVLTYTLWKNGQEYNPNHQWQGEKRKREVALPR

SEQ ID NO: 488053 - protein, 360 aa, unidentified
MVLIEAERTRRIVGGVDTHKDLHVAAVVDESDKLLGTSSFATTRQGYRQMVTWMRSFGTLHRVGVEATGTYGAGLLRHLQAAGIEVLEVTSPDKVDRRRRGKSDDLDAEAAAHAAFTGKRVATPKRRDGMIEALRVLKSCRNTAVAARRVTLQMISSTIVAAPEELRDMLRTMTRMRLVRTLAAWRPDLTDYRNPLSAYRIALKSLARRYVELHDEIAELDTMIASIVGELVPDLVARNAIGHETAAQLLITAGDNPERLSSEASFAALCGVSPVPASSGKIVRHRLNRGGDRAANSALHIIAIGRLRTDSRTQAYVARRIADGHSKLEAIRCLKRYIAREVFTIIRRRQRDINETQLAA

SEQ ID NO: 488054 - protein, 314 aa, unidentified
MEHITIGIDVSKATLDVAVLPTIRELTVTNDEPGCRELIVVLKPLKPQLIVLEATGGLENLAVGMLAAEGFPVVVVNPRQVRDFAKATGKLAKTDRIDAKIIARFGEAVKPEIRPFKDEQSQVLTALITRRRQIVDMLTAEKNRLGISHKSVHKDIKETIAWLEKRLKEIDDDLTKAIKENPVWKEKEQILSSCKGIGRVIATTLLCSLPELGNLNRREISALVGVCPFNRDSGKMRGKRTIFGGRATVRAMLYMAILSAKKYNPAIKSFYDRLIKAGKLPKVAITACMRKLLTILNSMLKHKEMWNPNLLQIA

SEQ ID NO: 488055 - protein, 391 aa, unidentified
MIFVGIDVAKDKHDCFITNTDGEVLFKSFTITNNLDGFDELYQKIESVMEDVSKVKVGLEATGHYSYNLLGYLLVKGLPTYVINPLHTNLYRKSLSLRQTKTDKVDARTIASMLMSDVNLKSYSDTSYHNEELKSLTRYRFDKVKERAQLKQSISRLVCILFPELEKLVPTLHQNSVYELLYEFPGAKHVANAHLTRLSNLVKTASNGHYTKDTAITFREVARTSIGSNMPAKSLELKHTIKLIRELDAEIEEIENEIKIIMDEINSPILSIPGISYRMGAMIIAEIGDFSKFDSPDKILAFAGMSPSTYQSGQLDNCYARMEKRGSRYLRYALYNATAYVCLWDPTFKAYLAKKRSEGKHYYVALSHATKKLIRVIYQLESSGQQYIKAN

SEQ ID NO: 488056 - protein, 313 aa, unidentified
MSTHPLVVGIDVSKTHLDVALGSTGPLFQVPYTQEGLQTLANRLQGATLVVMEATGGLETRLIQFLTLAGFPTARINPRRVREFANATGTLAKTDRIDAHILAWYGEALHPPVTPVPDENRQRLEALITRRRQLIEMRVAEENRLASAPDVIRPSIQQHLEWLQEQISALDEEICQLLQSDPDWAEKVEILQSVPGVGIVTAATLLAELPVLGQASHKEIAALAGVAPMNRDSGRRKGKRHITGGRPSVRQVLYMATIAAIRCNPVIRAFYRRLLAAGKEKKVALVACMRKLLTILNALLRKRQRWNPASAAY

SEQ ID NO: 488057 - protein, 338 aa, unidentified
MSIVMGLDQHRAQITADWLDTDTGEVKRGRVAPADRAGVGKFLQRFRGQELEVALEATTGWRFVVEELRRVGAVVHLAEPAETAGLKGPKKRAKNDRADARHLRELLMIGRLPESWIAPDHILDLRARVRLRHELGEQRSEWQQRIQATLYHHGCPQRRQLMVGDGREWLAGQPLPETAREQVTVALGMIDALDGQMRPIEKELRSYARRQIGCKALMAHYGIGELTAVTILAELGDCTRFSSSRQAVRYAGMDITVYQSDRHRAPGRISRQGPPALRWALYEAAQVARRPGSPDRDYYTQAAERVGGNRACLSVARKLLKRSYHTLRELGQEALAPA

SEQ ID NO: 488058 - protein, 342 aa, unidentified
MKEVSIVGLDLAKRVFQAHGARADGSVVFRRKLSRGQVLVFFTGLPTCVVAMEACATAHYWAREIGKLGHEVRLLPPAYVKPFVKRQKNDAADAEAIVEAASRPSMRFVAPKTESQQARSMIFRTRDLFVRQRTQLINAVRAHLAEHGFIAPQGITNLAALTEIIEDTNIGLELIVVETARLYLEQIDMLSSRIASLEKTLKSEAKRSESTARLMSMPGMGPITAMAIEAFAPSMTVFRKGRDFAAWLGLVPRQYSSGGKQVLGRTSKMGQRDIRRLLIIGAMTVIRWACRKAPAETSWLARMLTRKPRMLVAIALANKMARSIWAMMTKNEDYRDSGLAAA

SEQ ID NO: 488059 - protein, 342 aa, unidentified
MRLFIGLDVSLAKTAICVVSEHGKIVREAEIASEPEVLSRWLYGLDRRIAMVGLEAGPLSQWLHRGLIEAGLDAVLMETRQVKGAVKAMPIKTDRRDAEGIARLLHLGWFRPVHCKSVSAQETRAVLGARKAIQQNMIALEMSLRGLLRNFGLKVGAISRGQFEARIRDLTDSNLMLETTTAPMLRARASLRLELAALEKQVRQLAQEDSVCRRLMTMPGIGAVVALTFRAAVDDPTRFRTSKRIGPWVGLTPARNQSGERDVSSGITKAEDVSLRRALCQAATVMMNRGRSTWLRTWGAQLAHRRGRKIAMVALARRIAVILHRIWVDGTTFQPDAAPKIA

SEQ ID NO: 488060 - protein, 350 aa, unidentified
MIVGIDVHKQTHAAALIDDRGALVGALSITNGPQGFRKLIDWLVDRDAASAVIGVESPGSYGRCLVAALAGAGFEVLQVPAWRTHRERHRRGPGKTDPGDALSIAKVVMADRVDLGPAQEPELVRALGMLELQRRRFVHDRTQAIQRLRSDWTQFDPVAEAGTIRCDRKRELRKLKRITLGDSLAQRTAARCLRELAEDIDDLNDRIAALDTEIADLLAQHGRPLEQLHGVGSNLAAVIVAQAGDVRRFRNASAFARYCGAAPIPCGSGKTAGRHRLHRGGNRQLNAALYRIAIVQQRHHPQAKAFLARKLREGKTPREARRALKRHLANVLYRQLTAWANSTPAMNHLT

SEQ ID NO: 488061 - protein, 338 aa, unidentified
MKLYGAVDLHSNNSVVEIIDEQDRVVYEKRLPNELPFILSQLSPYQSSIQGIVVESTFNWYWLVDGLMDAGYTVHLANTAAIQQYEGLKYTDDHSDGRWLAHMLRLGVLAEGYIYPKEERAVRDLLRKRSQLVRQKTANLLSIETIVTRNTGALISANRIRQLTPETVGSLFANQDHALASQANLSVMRCLEEQIQILEQAVKKRIRLRPTFRYLKTVHGIGEILALTIMLETGDIRRFPQVGNFASYCRCVDSRKISNGKRKGSGNRKNGNKYLAWAFVEAANFAVRYNPSVKRFYQRKKAKTKGVVAIKAVAHKLARACYYIMKDQVPFDTAKAFA

SEQ ID NO: 488062 - protein, 425 aa, unidentified
MSEKDYNRQVGKRERISRDTLIMGVDVGNAWNAVGFMNKEGNVLGSCAKLYNSREGFEQFIRITEGFKAKHGMNSVLIGMEPTGHYWRKLAYFAKEKGYEVRFVRTTALKHHRELDESSSAKSDKRDALTIANITREGKYIDTVIEDGVVRQLRTLSKVRERLLRYSVGAKNALHAALDDYFPELHEIFWSMNSRSLWAILERCPFPEDVVSMKRSVLKELIACSSRKKTGAAQKAKALYESAKKSIGVKSIGSADRYRVKICLEEVKRTVLMLKDIDRQMKSVLKEIPASEYLLSIPGIGPLSAAIFLGELGNPAYFQNARQIVKYAGYDPQESDSGYRISRKFISKKGRWLLRKCLFFMSMRVVVLTNYFQEYYQRKLQTKNRFGQLPRKKEILCAVAIKLIKVIFSLLRDSRRFQDTASDAA

SEQ ID NO: 488063 - protein, 355 aa, unidentified
MNQEKYIGMDVHQATISVAVMDAGGKLIMECLLETKASTIVEFIQGLQGTLSLTFEEGTSAAWLHDLLKPHVSRLVVCDPRKAALLKEGNQSDRIDARKLAEWLRTNQLKPVYHEEHGIRALKELGRSYLTITQDVTRVMNRIKALYRSWGIPCRGAGVYAPRHRAEWLAKLVEPGVRVRGEHLYQQLDSLQPLRLQARRELLRESHKHSGVKLLRQIPSIGPIRAALLVALLQTPQRFRTKRQLWAYSGFAVETHDSGEYRCVRGKLQRNRERITVRGLNDNHNKDVKNLFKSAAISASTRPGPLHDFYVARVEKGMRPTMARLTLARKIATITLTMWKKGVGFDPQNLPRQAA

SEQ ID NO: 488064 - protein, 348 aa, unidentified
MPSLAEVVDVVIGVDTHKHTHTAAVVDASTGGLLAELTAPTDPGGYQQLLDLARQHGARAWALEGAGGYGAGLARHLVAAGEQVIELDRPARAPRRHGAKSDSLDAARAAREALGRSHLAQVKSDGPRAQLAALMAARRSAVEAATLAQRQLHALVIAAPETLRAMFRGQSTTAMTTTATRLRTRASWDAHTVTTATVLRALARRTTALQREARDHEHAMATIVRAWRPDLLEQPGIGTIVAAQVLICWSHPGRIRSEAAFAMLAGTAPIPASSGLRTRHRLNRSGDRQLNRALHVVALSRTRYDERTSDYVERRRAQGKTDREIRRCLKRYIARDLFRQLEHGALPA

SEQ ID NO: 488065 - protein, 343 aa, unidentified
MNYVGIDLHKKTIVLCVMNQDLKVITRRTLACCQTEAIREYFAGLGPFRAVVEATASYEWLVALIEPLADKVILANPKKLRVIAESVKKTDQLDAQVLAEFLTRGMIPEAHRPSPRQREHRALVRHRQYLKQCGTALKNKMRRIASDYNADRKDLFSADGWNRLEQVKLSASDRFVLDQLHAQWQFLEEQLWDLGKQLKAFAASAPAREAEARAKLGTIRGVGPVTIDVVVSELGDVSRFRSSKSVTAYSGLAPKVRQSAGKGKDLAITKEGSPLLRWALVEAAWRVVHQSAAWQRIYERVKKRAGGKKAIVAVARRLLCVMYAMLRDGTNYDLLKVGEPQAG

SEQ ID NO: 488066 - protein, 418 aa, unidentified
MKVVFPTCCGVDVHKSFLVATIIKTPQDSLQPSYQKKRFSTFNSDLNHFADWLHENDCLDVCMESTGKYWVPVFNILEKRGICVVIANPKWVKAVKGNKDDTKDSKWIGDLFRIGLVKSSFIPDKDIRILRELTRYRYKLTSMRSSEKNRFQNAFTVCNVALDSVVSDMFGKSATAITDYLTSGEDFDAQHCISLLQRSLKKKADDVLQSIEGYEITAEQKTRIGIIRDHLHYIDTLIERVDICINTMIDKYEGYIVLLRTIPGVDRSSAITILSEIGVDMTQFGSSKRLCCWAGLTPGNNESAGKKKSVRISRAGVYLKPALVQVAHAAVKDKLSPYYSLKYERIAKRRGKKRAIIAIARMILTAVFVMLSNLEEWNPVDLYRADMPEHLKEKQLAKAVKQAVRFLETQGLTVLDSA

SEQ ID NO: 488067 - protein, 318 aa, unidentified
MNTSVIGLDIAKHIFHMATLGADGKMIKKKLKRSELLAFFANYPASTIGIEACGGAHHWARELTKLGHEVVLLNARYVKSFVVGNKNDFNDAVAIYDAVSRPNKRVVAIKTIEQQDIQLIHSLRQELIDKRTALVNQLRGLLNERGIIINQGIKQVRQQLPLILEDAENGLTALSRELFAEQYERLKSLDDEIKAQDQRVNRLCNANELSKRFLDIPGIGPLTATIVAADMGDNGKGYQSSRDYAASLGVVPKQHSSGDKPVYLGISKRGNRYIRTLLIHGARAVLKSCTQKTDKLSLWLQALVARRGFNKGYVCINS

SEQ ID NO: 488068 - protein, 337 aa, unidentified
MTFKRIAVDTSKSVFTLHGVDKQDRPILRQNLSRARFETFFAKLSPTEVVLEACGSSHHWGRFLQRLGHTVRLIPPQYVKPFVKRGKNDRNDAEAICEAASRPTMHFVPVKSAETQADAMDLSARDLLVRQRTQLVNAVRGHAAEFGIIAAKGVAQVAPLLKKIIATDMPPAAQETLAQLGRCIAQLDAQLAEVDQRLARQHKANPVSQRFATIPGVGPITALTMAVKVDPGQFQSGRHFAAWLGLTPKEQSTGGRQCLGGISRAGDERLRQLLVLGATTVIRHAKPGSKTASPWLLTLLERRPRKVVAVALANKMARIVWAMMTNDTAYRGTPQAA

SEQ ID NO: 488069 - protein, 337 aa, unidentified
MDRQYVGIDFHRRRSVIVCLSADGGRLGVHRIVNDPCELVAVMAHCGEGPEVVIEATYGWYWAVDLLQELGAVVHLANPRALNWGDRRVKNDVNDATDLADMLRLNRLAEAWVAPPALRELRELVRYRAKLVQLRSGLKAQVHAVMAKEGALPAVSDLFGPAGTRQLDQLELGRPFARRVRSLRELIARYDREITGLERDIHRHLKSHRGYQAVQAINGVGRVSAAVLVAEIGDVSRFPTPAHLCSWVGLTPKHHESDLKTRRGRISKQGSRLVRATLIEGISRYHGGDVLHAQYRKIAKRRGKNKARVALARKVLTLVYYGLRDGEIRCLAQADAA

SEQ ID NO: 488070 - protein, 355 aa, unidentified
MKQEKYIGLDVHQATISAAVMDCGGKLLMECLLETKAATILEFIQGLRGTLSLTFEEGTSAAWLHDLVKPHVSRLVVCDPRKAALLKEGNKSDRIDARKLAELLRTNQLKPVYHGEHGLRTLKELGRSYLSVSKDVTRTMNRIKSLYRSWAIPCSGSSVYAPRHRAEWLAKLLEPGVRMRAEHLYQQLDSLQPLRLEARCQLLRESQKHAAVRRLRQIPSIGPIRAALLVALLQTPHRFRTKRQLWAYSGFAIETHDSGEYRIVRGKVQRNRERITVRGLNDNHNKDLKSLFKSAAISASTRPGPLRDFYLARVGKGMRPTMARLTLARKIATIALTMWKKGVSFDPKQLQPQAA

SEQ ID NO: 488071 - protein, 429 aa, unidentified
MNYTQNQRISQITESTLIVGVDIAKHKHVARAQNDRGLMYGKAFSFSNTRQGFDAFCHWMKSLMTEHEKTEVIVGMEPTGHYWMTLAAFLRSRGVPVVVVNPMHVKKSKELDDNSPTKNDPKDARVIAQLVKDGRYSAPYFPTGVYAELREAVKIRDHLSNELQRIQAKVHNWLDRYFPEFLTVFTSWEGKTALETLKRFPLPQDILQAGVSGILTTWKEIIKRGLRPKRAHELVEQARQSVGLREGTKMARLELQALLTTYEVIQQQLEQVMKEIEDFLNDIPGVAHILTIPGMGIVTVAGFFAEVGDLSRYQHPHQLQKLAGLNLKENRSGKYRGKTRITKRGRPRLRALLYKVIRPLVAKNPVFQALHVYYTTRQQNPLRKQQSLIALCCRLLRIMFVLARKQINFDMNKMMKDTPLCGQKQSLAA

SEQ ID NO: 488072 - protein, 405 aa, unidentified
MPYILALDVSMGHSYSVLYKDDTCLFEDEIEHTQRGFHALLEEIQHLPERPLIVFEATGIYSRPVEKFFQDHHFSYCLLNPLEAKKQMEENTLCSWKTDKSDAHRLAQTHLKNQRQPKEVQSNFYLEMRDLARFYQEIEKKITRLRMDLHNCLQLTFPELEQFFSNRLTPYALTLIRLFPHPDFVLASTRTKIKNKLINETRKKISANRAEQKADQIIHYAQCAYPAVEKDSIHCQKTVYYAELLQDLLEQKEALATQMIKKAEGSPCFLLYQTFPGIGALTAALLLGELGDITRFKTHKQLNAFVGIDIRRYHSGKYTGQDRINKRGNPKARKIIFFTIRNMIRQQRAAPNHIVDYYYKLKKQPIPKKDKVATVACMNKLLKCMHAMVRAHTEYVYAYAVSVDH

SEQ ID NO: 488073 - protein, 389 aa, unidentified
MIYIGIDVAKNKHDCFITNSDGEILFKPFTIPNNLEGFDDLYHKIESTTNDPSQVKVGLEATGHYNYNLLGYLIDKGLTTYVINPLHTNLFRKSQSLRQTKTDKVDARTIASMLMSDVNLKSYSDTSYHNEELKSLTRYRFDKVKERSALKVSISRLVCILFPELENLVPTLHMASVYALLSEFPSATHIASAHLTRLTNLLKTASKGRYDKETAILFRNTARSSIGSNMPAKALELMHTIRLIQELNSEIAEIESVIQTIMDKLNPPILSIPGISYRMGAMILAEIGDFDRFESPDKILAYAGLSPSTYQSGQLNNSHSRMEKRGSRYLRYALYNATKYVCHWDPLFNAYLSKKISEGKHYNVAMSHAAKKLVRVIFHLQKTGQLYAS

SEQ ID NO: 488074 - protein, 339 aa, unidentified
MKLYTSFDLHSNNSYLGIKDGDGKRVFRKKLPNEPEVILNTLKPYKNDIVGIVVESTYNWYWLVDLLMAEEYKVHLANPAEIQKYSGLKHADDQDDAFWLCEMLRLGILPEGYIYPREDRPVRDLLRKRMHLVKLRTSLIVSLQNILCRNNGFKLKTGDVKLLGEDRVAPYLSGNEDLALAGTVSKESIDFLTRQIKKIEAAVEDRVELKPPYAKLQSVFGIGKILGLTIMLETGPITRFPKVGNYVSYCRKVSSKWMSNDKMKGKGNKKNGNKYLAWAYSEAAEHARRSYTQARTYYNRKMQKTNFMVAHNALAHKLARAAYYVMKDNVVFKPEKIFV

SEQ ID NO: 488075 - protein, 410 aa, unidentified
MIKENYMYVGIDLHKETHTAVIIDCYNQKLGEITFPNRPADFPKLVTKVKKCNTDGKEVVYGLENAYGYGRALAVWLIDKGYFVKDVNTAISHRQAKHRGAMYRKSDSDDAKAIALATLNMLDKLQDACPNDAYWSLGQLVHRRDNIMKQRTRLVNQLHEQLCIVYPSYKQFFNDISRPTALYFWEHYPSRKYLKGKSVEYLRAELVPVSHNKCSTKTCEKILDAVASDKVKNNNFQDARDMVTLSIVSDIQHYDKQLVEVDKMLEQMYKMLGCTLTTIPGVNVITAVKILAEIGDIKRFGNANKLAQFAGIAPLHLSSSGKGKDVATKQGNRRLQATIYFLAIQMVQVSSKGTPRNPVVRAYYEKRKAEGKTSQQALICISRRLISVIYGMLKNGTEYRMPVVENAGEK

SEQ ID NO: 488076 - protein, 401 aa, unidentified
MNMTSKSAQFAALIGIDWASQRHALCLYDCATAKRESSILEHTPEAIAQWARGLQERFKGKKIALCLEQSKGPLIYALLEYPFFVLYPINPATAARYRMAFKTSRAKDDPSDAQVCLELVLHHREKLNPWLPHDAPTRELSCLLQHRRAAVDLRTLLTNMLRDALKSYYPQALELAAQDLFAPLGCQFLLKWPSLQELHKARKESVRKFYYAHNCRRMDVIEKRLDAIAQMTPLCRDLALLEPAMVQVRMLARQLLQLGGALKEYDSKIEQLFAQHSDALIWESFPGAGPTLAPRLACAFGTQRSRYQSAVAIQQYSGTAPVTEKSGKNQHWVHRRWARPHFTHQSFFEYASQSVLHCSWANALSQGTDGAWQSLSHRHPRPGLQVAAHHVRVLARPRPLR

SEQ ID NO: 488077 - protein, 349 aa, unidentified
MEFYAGLDVSLEATSVCVVNADGRIVREGKLPSDPEAIERFLAEWGVQLKRVGLEAFSFSAWLFTALDEKGLPVVCIETRHTKAVLNAMINKTDRNDARGIAQLMRTGWFRAVHVKSREAQTLRVLLAGRKALLGKVLDMENMIRGLIRPFGLKVGAVSVGKFEARVRELVAGLAELEQIIAPLLAARAAMRLQFARMHKMTLAAARQDTAVRRMMTVPGVGAVVALTFRATVDDPARFKKSATVGAHFGLTPRRYQSGETDWSGRISKCGDAMTRSMLYEAAIAILTRIPRRFKLRLWGLRLVKKKGVKRAATAVARALAVLLHRIWADGTTFRHGTGMKDGRIATAA

SEQ ID NO: 488078 - protein, 416 aa, unidentified
MKLFVGIDVSSEKLDVCFLTDDNQLSILSEISVANDIEGASFIRETILEFNDSYHFDQIVIGMESTSMYSFHPSMFFHEDEKLKKLNTLVTIENPFRVKQFSRMFDENKTDRNDALRIADFLRIQRFTTSPIKEEKYMALQRLTRTRYQLIKQLIRTKQHFLENLTYKCNTLAREMRDESTSLFSATLISLMTEDFTLDELAELPLEAFCDLLQEKGKGRFKQPEKIAKAIQRAITMSYRLGALAQESINVVLSVLVREIRALEKNIKELDKAIEQVIVVIPEYQCLTSIPGVGKVYAAGLIAEIGQIERFEDQTKLAKYAGLSWKVNQSGNYQSQNTPLTKQGNRYFRYYLVEAANSVKNYLPEYKAFYQSKYKEVPKHQHKRALVLTARKFTRLVDTLLRKHQLYTPQRRVIEK

SEQ ID NO: 488079 - protein, 411 aa, unidentified
MENILACCAGLDVHKESVEACVRRSDPNSRVHSETRHWGTMTRDLLAMTDWLAAEGVTPVAMEATGVFWKPIFNILESRFTVLLANARHLKQVPGRKSDVRDCQWIAQLLQCGLLKGSFIPPLAQRELRDLTRHRTQLVDEKTRTINRIQKVLEDANIKLASVASDVMGVSGRAMIQRLIEGENNPYRLADLAQGQLRGKIPELEKALEGKLTDHHRFLLKLLRKELAQQEELIAELDTKIDEHTRPFAAEVKRLEAIPGVDHRVAEVLLAEVGLDMKPFPSDEHLSSWAGMCPGNEESAGKRRRRRITPGNRWLKRTLTQAAWAASHTKNTYLASQYRRVAGHRGRKRALIAVGHSMLVIFYHMIRSGATYAELGGDFFDRLEPERLTRYYVKRLERLGHKVTLETSVAA

SEQ ID NO: 488080 - protein, 356 aa, unidentified
MSHDVKYIGMDVHKEATVIAVLNGSGKQVMESIVETKTSSILQFIHGLRGELHVTWEEGTWAAWLYDLLQPQVQRVLVCDPRRNALLKEGNKSDKIDARKLADLLRTGMVRPVYHGEHGLGTLRELGRSYQTIGQDLNRVMNRIKALYRGWGIPGAGTQVYAPRYREEWLHKIEHVGVRRRAELLYQQLDGLQASRRTLRPELLAESRKHKAAKLLRQIPCIGPIRAARLLALMQTPHRFRSKRQLWTYSGLGIETRDSAQYRWVDGQLQRTKKPQQIRGLNRNHNHEMKEIFKGAATRASCGVGPLREFYVALLDKGMKPEMARLTLARKIAAIALTLWKKEERFDAEQLKSQAA

SEQ ID NO: 488081 - protein, 347 aa, unidentified
MDQVIRVGMDTSKSVFQLHGVNAAEQVVLRRQLRRREVLAFFARLGPTKIGIEACGGAHYWARELRALGHEVVLLPPQYVKPYVKRGKNDRIDAEAICEAMSRPTMRFVAVKTEAEQAALMLAGLRAQTVRRRTQLSNTIRGYGAEFGLVAAKGLSKIEPLLARVATKERVPDLAKEVFGDFGREYAALEQRIARLEARLMAWHRQNEPSRRLAEIPGIGPITAVMLVMKAPDPAAFGCARNFAAWLGLTPKDHSTAGKTRLGVITRAGDEDLRSLLVTGAMSVIQQVQRGRGSPSPWLLGLVRRKEPKLAAVALANKMARIAWKLMVSGQSYDPRRANAKGLAKAA

SEQ ID NO: 488082 - protein, 391 aa, unidentified
MPEDAPRPAQAAIRTALGAIFVSLELSRRTWLITSLSPGGGEKMSKHSVPAGEVCGLLRRFADLRRKAAARTGRDFPIIVIQEAGLDGFWIHRVLQSEGIESHVVDAASILTSRRRRRAKTDRIDGETLVRTLMAYKRGEPRVCSMARAPTPEEEDRRRVCRERRTLVGERVRHVNRIKGLLSAQGVFGYEPLRKGRRERLEDLRTGDGRPLPVRLKVQIIRELDRLEVLLEQLKTVEAERDTLLKPASDEAASPAAMLARLKGIGPETAAVLWTEGLFREFDNRRQVAAYAGLAPTPWQSGSIDHEQGVSKAGNPRLRTTMVELAWLWLQNQPTSALSLWFHERVRRPGGRMRKTIIVALARKLLIALWRYTTAGVVIEGAVMKAAPATI

SEQ ID NO: 488083 - protein, 412 aa, unidentified
MTTASHARNVTGGVDTHSRVHVAAVIDSTTQQLLGTASFPVSAAGYQALHSWLEEHGAVDAVGIEGTGTYGAGLTRRLSAAGLAVREVNRPDRAARRMHGKSDPLDAEAAARAVIAGRATGLPKSRDGHVEAIRMLRLVYRTAVADRTQAINQIHALISTAPEQVREELAGITIQRQLQRVRSSRERSREDLVQRVARQALRELASRVHHLDEQIERMDRDLTDLTEQVAPSVIDLAGVGFHTAAQLLVTIGDNPNRLVNEAAFARLCGVAPVPASSGNRTRHRLDRAGDRDANHALWRVVMARIAHGDPRTLDYLARRTREGLSKQEIIRCLKRYVAREVYRAITTPRPPAPTGQQIRQLRMQIGVTQLDLAETIGLPNTTISRLERGQLRRGDLQRRCYDALAQHRAASA

SEQ ID NO: 488084 - protein, 414 aa, unidentified
MKVIYRRCAGLDVHKKTVVACRVNIDDNLEQRPEETRTFKTMTKDILVLSDWLKEGGVTHVAMESTGSYWKPIFNILESDFEVILINAKHIKHVPGRKTDVKDAVWIAQLLQHGLLKASYIPEESQRALRDLVRYRTKLIQERSREINRVQKVLEDANIKLSSVVSDVMGVSARAMLTALVNGQEEPEAIAQLAKGRMRSKIAELEEALTGRMANHHRLMLSLHLEHIDDLNTKIERLQDEINQSITPFNQNQEVQRLDGIPGVGLQVAQVIIAELGIDMSRFPSSGHATSWAGLAPGKNESAGHNQSAKTVKGNRHLKAMLVQAAHTVARSKDNYLSAQFRRISRRRGKKRAAVAVARSILVIAYHLLRDGTEYIELGGDYFEKRNKKQLERRLVKRLEQLGHKVLLEPAMPA

SEQ ID NO: 488085 - protein, 372 aa, unidentified
MKENNAIFVGLDVSKLKISVAAAEGERSGEVRFLGDISSEPASVAALVRKLSKPARTLHFCYEAGPTGYGLYRQIVELGHECAVVAPSLIPKRPGDRVKTNRRDAMSLARLHRAGELTPVWVPDESHEAMRDLVRARDAAQEVLKQLRQQLQSFLLRHGRIYTGRKPWTRAHARWLADQAFEHHAHHILLAEYCQAIDDATVRLDRLNKLVTDTAASWSMAPVVAAYQAMRGVAFMTAVTFVVEIGDVRRFDNPRQLMAYLGLVPSESSTGERIKRGGITKAGNIRARRALIEGAWTYRYPARVSPTIQARLVGLPKVVRDIAWKGQVRLCTRYRRLISAGKAKTVAVTAIAREMAAFLWAIGQEFAPLGKF

SEQ ID NO: 488086 - protein, 309 aa, unidentified
MEHYVGLDVSLKQTSICVVNQVGSVVREGVVDSEPEAIAAFVRSKAPGAVRIGLETGPTVTWLWTELKQLGLPVICIDARHARAVLKMQINKSDRNDAAGIARIMQTGWFKEVRVKDLDSHSVRALLASRALLVKIKRDLESQIRGLLKNVGLVIGRAKFNVFAVRAEELIEDRPELIAVVGPLLKARKAIEQQTDDLDRKVLKLARYDAQVRRFMTVPGIGPITALCFKATIDDPTRFKRSRSVGAYVGLTTRRHASGETEWTGRISKCGDAMLRSYLFEAAGVLLTRVPKWSALKAWGMRLAKRNGL

SEQ ID NO: 488087 - protein, 420 aa, unidentified
MAVPPDRDPQPVREFRTFTADLQRLADWLAQCGVKTVAMESTGVYWIPIYEMLEQRGFEVLLVNARDVHHVRGRKSDVTDCQWLRELHSVGLLRASFRPAAAIVPLRSFMRQRATLVEEAATRIQRMQKALTEMNLKLHTVLSDLTGRTGLAIVRSILKGERDPERLATQRDHRCHASHAEIVAALTGNYRAEHLFALKQNFAAYEFLLRQIAECDSEIEAGLTTLAAQQPPPAATLPAPRHRAISKHQPQFDLRSPWHRLTGGADLSQVDGISSQAALQIIAEIGTDMSRWKSEKHFTSWLALAPNNKVSGGRLLSSRTAPSANRAAVILRRCAMSLARTATALGAFYRRLAAPAGKAKANTATARKLAVLVYRVLSGNFLYEDPGATAYYQLNRARQLNSLRKRAKLFGFDLVDHATG

SEQ ID NO: 488088 - protein, 482 aa, unidentified
MKKKNIYVNQSQELLNLFEQAGNNEKIMCVPIDYAKKDHVVMFCNGYGHILRKPFSIKNSPEGVKYLTEQVTRSCSHRKIETKHVFFGGEDVGSYADNFVNTLRSGGWIVAGVNAHDAKKQRANIQASTDRLDLMGIASMLLNRRANCAPAQSGIYLNLRTVVRHRRKLVVISTEVKNRIHTIIDRLFPGFLDEKKSGIQPFSKSSLYLMEDRFSPHQIRRRKLQTLINILQRYGTAKPESTAAKLQGYTVRVLNTPDEYITTLQLSLAQHVKHFRCLQDSISQLENEIAVWLAQTQGAFLTTVRGIGIVLAAGASAEIGNPYEQKPVNNLVSYTGIIPRVKQTGGPEGKTHTGKVAKRCNRILKDYVVQSANHMGLHGPEDLMADYKRREAAGQHADFGIGRRYLRMAMCLMRTSQIYMPQRLRNTEVKPEERAGYYLMTWPSLREKWNKAGALEAAFEKDRPLGQWRNMVQELYEIKLKL

SEQ ID NO: 488089 - protein, 412 aa, unidentified
MGRVIGLDLSKHSAEVAVLHSGTNRVERSRFAACPEAIRSFAQQLGPDDRVAFESCTNAVAFQRLLCQHAGQVVVSNPFKTRVIAEAKVKTDKVDAEILARLLAADFLPAVWVPDAATDHLRHLVSHRLGLVTQRTQAKNRVHAILSRNLLITELTDLFGKSGRRFLSRVELSSGERCLLDADLRVIDFLDQEILQTNKVLAELVYEDAEVRRLLTVPGLSMISAVGLKAAIGDIRRFSAPGKVVSYFGLNPSVYQSGLKAYSGHISRRGRSHARSVCVEVAHQLVQAPGPFHAFFQRLRRRKPYNIAITAVARKLVVLTWHMLTRGEDYRYMPAALTRRKLGEMHRLATGEPQSRVPRGRAPKRADDKNGALKAEAQYEAFIQDRFGPKGPEGIDHPNRTEPAGRKQKKRA

SEQ ID NO: 488090 - protein, 368 aa, unidentified
MSKISKPAVGKKTSMDKPEMTMGIDVGDRYSHLCLLDEDGEVVERDRVRSTESAFRRHFEGASRLRIALECGTHSPWMSRLLKQFGHQVVIANARKIPTITESESKNDRNDAEQLARLAAFNPKLLSPLEHRSLARQQDLNLIQARAVLVKARTMIVNALRGLVKSAGGRLPTCSSKSFPDRAAGAVPPALTDVAGPLVEQIARLNVQIGAMDQQIEKLAAKYPEIGTLRSAPGVGPLVAAAYVLTLDRPNAVPSSRSAGAFLGLRPGQSQSGDSDPERRITRTGNTYLRCLLVQSAQYVLGRFGPDSALRRWGLKLAAGGAKRAKKRAIIAVARNWLSCCTACGAAASDSNPFHSRCRADRQRNRNL

SEQ ID NO: 488091 - protein, 338 aa, unidentified
MTKNYFIGIDVSKQTLDVAFIVRANDSFSTPLWKQFDNTTAGLLKMKHWLLQMKVPLNQQTIVVIENTGIYHRVLWQFFSKLQIDLCIENAAQVKWSLGIARGKNDKVDSRRLAVYAARHADRLKPTPALHQQVLALKDLITLRNKLLVQLKSIQTAFNELKMVSPISFVNSSERLLKPAIDGLKNSLKKVEDQIKVLIKKDQQLFHIYQLLISIPGVGPVTAIYLICCSNVFTMCTSGKQLACYCGVVPFDHQSGISIKGKHRVHKMANKELKKLLHMCALSAIQHYPEFKDYYNRKKQDGKHPMAILNAIRNKIVLRAFAVVKNDRPYVNNYEKAA

SEQ ID NO: 488092 - protein, 348 aa, unidentified
MDKITAVGLDLAKQIIQVHGIDAAGRVVLRKAVRRERLLALLAQLPRCVVGMEACSGTHHWARELRQLGHEPRIMAAEFVRPFRKSLAAKNDANDAEAVCTAVVQPNMRFVSIKSVEQQALLSLHRIRQGLIEERTATINRLRGVLAEFGVVLPQSAVRLQRALPAVLADEERLPVLVQRSVQMLREHLHELEARVAEFDRGIAQHAKSSAPAQHLVALSGVGPLTASAVVATVGNARDYRNGRQFAAWLGLVPRQYSSGGKRKLGRITRRGDAYLRALLIQGARSTLQAALRRAPARHDRLSAWIVQLAQRVGYHKTLVAIANKHARIIWALLARDQALDLARTTTR

SEQ ID NO: 488093 - protein, 330 aa, unidentified
MKKWEFTLGVDVSKNTLDISCSELNEHVKIKNGTEGFTVFLKWCKHFKIDLKQSFLVMEFTGGYEYKLIQFCESRGILYTRIPGLAIKNSLGITRGKNDKVDSSRIAQYGEEKHKSLTPSRPLNPAIVSLKELLSFRKRLVRENAGYQATIKERIHMYGGNKKDIIVKKLEQKLKGNIKNIAAIEAEMLNIVAQDEKISINYSLITSIKGIGKINGLMTIAFTENFTSFTNPRSYAVYVGVVPFDHSSGISIKGRKRVSHIANKELKQELNQAARSAMEWDKEMRSYGEEKLKTKCYKIVLNNIKIKLILRMFAVVKREEIYVENYRNVA

SEQ ID NO: 488094 - protein, 473 aa, unidentified
MSRVGEESKDVLLLSLTGLESQNSEEDVVVQGNGLSRGDKRRNDKLGVLRELVPLANAILGIDLADEKQVLVLADHDSRVLARKRVQAKAWDLGPVLDWACRVADQHGFAGVTVGCEPTGHRWRVLDQLAAQQNMALVCVQPLLVGQARQREDYTSDKRDDKDAVLIARLVSQLNCYAPERAEETWAQLRQLGARREELITQATRCVQQLRDLLECAWPAVLDAAASPFDSTNWCAALAVVLERCDGDPRRLARRGRDRFSGAVRRELPRWGGQRLWRPIVGAVFSALSDPAGVLAQRRGALQRARWVLDDWRLVKIRRAEVETHMVTLLDELGLTELVTSIPGVSAVGAAAILAETGDPTRFDSPRAMVKHAGLCPRENTSGTYTGRSRISGRGRPRLRAAAWRAVWGALPTNPVMATRYRHLTTRKANPLKDGQARAALAAALLRWIHVIVTQHVTWDAALAGAGALAAAA

SEQ ID NO: 488095 - protein, 369 aa, unidentified
MADYREAFVGIDVAKLKNAFAIAEAGREGEVRFFGEVDASVTSMRRVIGRIASRFDYVHFCIEAGPTGYGLYRLIRSLGHECTVVAPSLIPRKPGDRVKTNRRDAISLARLLRAGELTAVWVPDEGHESIRDLVRARAAAVETLRVHRQQVSAFMLKHGRSYPRKKSWTMRYLRWLQEQRFDHPAHQIALQEMVEAVRVSKERVERLERVIEEFVPAWSLAPIVWALQTLRGVDLIVAVTFVTEVGDASRFESPRQLMGYLGLVPGERSTGETVRRGGITKAGNGRVRHMLVESAWTYRHPPKVGKAKLYRLEQASPKVCEIAWKAQSRLTARYRMLSARGKRTTVVCTAIARELVGFMWAVAREARVT

SEQ ID NO: 488096 - protein, 345 aa, unidentified
MNITTIGLDLAKNVFHVVCFDNKGKELKKRMLRRHQVAKFFANVPPCRVSMEACASSHYWGRKLREMGHDAKLIPPQYVKPYLRGNKNDYNDARAIAEASCRPSMPFVAIKTVEQQDMQALHRVRSKCVKSRTSLSNSTRGLLGEYGIVLTRGIATLRRGIPELLEDPDNGLSDRFRQLLQRCYEQLVELDEHISFYTCELEHLSQQDEACQRLQTVPGFGPIVASAFRSAIGDGSAYSRGRDASASLGLVPRQHSSGGKDNLLGISKRGDKYMRSLLVHGARAVVIQAARKDDSLSRWINRIREKRGWNKAVVAMANKITRIGWAVLKNSTTYKPALAATAITS

SEQ ID NO: 488097 - protein, 320 aa, unidentified
MMAQNDLVVAGIDVAKDKVDVCIRTLSLRCTFASTVEGQRELASWIRRHKVGKAVMEASGGYERAWAKALRNARTEVRIVDPKRVRDFARSAGRLAKNDAIDAEMIAWFAETFDGAPGQACDAEREKLAQIVNARQGLLELRTTLQNRGEQAGPEPVQKMHARLLKKIAAEVAKLEAVIAAMIKATPHFAELAEIIESVPGLASTTSAGLIAKMPELGQVGNKVAPALLGAAPYDDDSGRRQGERHIKGGRRKVRNLFYMACLGAATQHNPVLKAFYDRLIAKGKEKKVALVACMRKLIVILNIMIARRQKWDPNLHVLG

SEQ ID NO: 488098 - protein, 434 aa, unidentified
MSQQNISTPSTPPVYAAFVGLDWGDEKHALSLCAAGATVIERTTLPQTPEALADWANVLRSRFPSGKIALCLEQARGALLAGLMQYEHIVPYPVNPKTLACFREALYPSRSKDDPIDADLLLDLLLKHREHLRAWQPDTVQTRQLALLNEQRRHFVDHRTALTNELLSHLKAIFPQALELVGQSLASRLATDFLKKWPTLQAVQKVKPAVLRQFYYGHNSRSEELITGRLQRVKNAVALTSDPALLAVHSLAIQTLAGQLQALRPFLDQHEQQIAELFAAHPDAALFDSLPGAGSALAPRLLAALGSDRSRFPDALSIQCYSGIAPVTERSGKTQYWVHLRWSCPKFMRQSWHEFANCSLKFSTWARACYQDLNKRMDHHEAIRKLAYKWQRIVWRMWQERQPYDETRYLRSLQKRGLKIYADLVPQPIAPAGE

SEQ ID NO: 488099 - protein, 351 aa, unidentified
MEYVGIDYHTRYAVATRMTGEGEILSEKRIPNLKDDIRNYFSQLPVDTQVVLEATNNWAAFVEWTHDLPIEVKLANPAKTRAIAEARIKTDSLDSRVLADLLRSNFIAESYLAPREVRDIRELVRYRMTLVRLKSQLKTRIRSVLFKVGERVPTANIAGPLAREMLSKFSLRDIYRDEINSCLSLIETFSKQIGEFEEKIESQAKLDSDTKLLMTIPGISFFSALLITAEIGDYRRFSSDRKLCCFAGLVPSVHASGGKIRHGRIIKRGSANLRFALLQAIPHLIRKHHGLARHYQRISRKKGVKTARIAISRKLLAIMLTMLKTRAPFRLDTRVKEKPMLTLSASARESV

SEQ ID NO: 488100 - protein, 387 aa, unidentified
MTTDHPAAKVQTTARPNNSKLFVSLELSRSAWLVTASAPGSDKFSKYAVAGGDGRALVDLLDRLRRTAERRVEVSVEVVAIQEAGLDGFWIHRLLANNGVECHVVDAASIAVDRRHRRVKTDAIDGETLLRTLMAWARGERRVCSMVRPPSPAEEDRRRLTRERGTLLKERIQHTNRIKGLLSGQGITDYDPLGKNRHTRLDALKTGDGRTLPDRLKMEIRREIDRLDLVNAQIATVERERDALVKTTVDVDAQNAAAVLSRLKGIGAEFSSLIWLEALFRSFANRRQIAAYAGLAPSPWQSGSTDRDQGISKSGNRRLRHTMIELAWFWLRHQPDSALSVWFRARVGQARGRLRRIAIVALARKLLVALWRYATQGVVPEGAVFKA

SEQ ID NO: 488101 - protein, 389 aa, unidentified
MTYFVGIDIAKFEHVASILDSSSGELIVNSLLFDNNIKGFNLLLSNLSMLNKEDVVIGFESTAHYHLPLFNFLNENNWKCVLVNPIQISRFRKISIRDTKNDNIDSRVIANFLLLEHKHLLEEEFYNNELKELCLQRHFLIESSTRLKIKLTSYLDRVFPELQTTIPKGTLHTMGVRAILKKFPTAKLISNVRIDHLVNIAKKASKGRYKESMVIKIKEAAKSSIGFNSIGLALKIKQSIESLESIERQIDEVESIINSHHTIINSPLHQIKGINSIEIAYIISAIISINRFSSDKKLIAFAGLDPKVRQSGTWEAKSTRMSKRGNRLLRYALIWTANNMRKYPSKMKDYYNKKRSENKSHYNALGHCAAKLCRYIFFILNNPNVEFIN

SEQ ID NO: 488102 - protein, 328 aa, unidentified
MRKNAAGQVLSEGKIGSTRRELDAWVRTLPEPRMMAMEATIFTGWIYDHLLPHAEKVKVAHPLMLRAIAAAKRKNDKIDASKIADCLRCDFLPESYMIPTEMRDRRRFLRYRNLVLRQSVQMKNRISGMLMETGVSYEKLRLHRKGYFDQLMKSNEEVSDSIRPLLKLCREQIDRSIRLDATLLRTLERDPLLSGRLERLRTIPGVGPLTALTWVLEIGDVSRFRSIKQAISYCGLCGEEVRSADKVMRTPISKQRNKHIQSMLVEAARLAPRYSQELALLYDRERQRGNANQATLAVARKLVAHMVAVERRQSSFLPAGEFKQTAAA

SEQ ID NO: 488103 - protein, 337 aa, unidentified
MSKITLIGIDTAKQVFHLVGVDAHGHYVWRKQLSRRRLLSALAQIEPCKVVLEACGASHHWARSIKALGHTLRLIAPQHVKPYRRGQKNDYRDAEAIIAAAMSPGMRFVGVKRVEQQAEQALHRVRSRLLSQRNAAANELRGLLGEYGVVFRRGLKPLREGAQCFVGTEEAHTLGLVELVNDVLEEIGVLQVRMDHYERLIEQRVQADETSRRLRKELSGVGRLGASALRVKVADVRDFGNGRHFAAYIGLAPGHSGTGGQVHIGHLKRGHDRYLRQLLIHGARSALRHVGDKQDAESRWLRGLLERRGFNIASVALAHKNARQAWAIMAREQVTPS

SEQ ID NO: 488104 - protein, 452 aa, unidentified
MEQEATWYVGLDLGSRGHEVAVCDGEGREVQGFKVPRGREGYRALREEVGRCLPPGANVVYLVEAAGNLWQEVVHPLEAAGEAVSSLSPVKCSDLRKFYRRHTKTDVIDAAATARVGISDHALRRAWVGTPEQESLRRLCRLSWKLSMEARDKKRRVSALLELVLPGIGKVWKNRYCSSARLFYRRYLDPSRAHRLGRKRLGEVLRRRAWGKFSEKKLSQLWSVIENAPELRYRYDDLMLEVECELEGLEAIEKRREKLTERIEELYSEVDPAHRLESVPGLGGFLGAALTSAVGDVARWGGADQLVASSGLVPRKRASSGREKANQRLTKYGDPMLRSWLYVAAQLVRHYDPELQAFYTRLRRRGKHHNTAVCAVATKLLRRIYAVLRDETTYQVVAKERTHNAEKPVRESVYEVAQALLRDNPDAASPKTDYIAPVPDATPALAAAATER

SEQ ID NO: 488105 - protein, 388 aa, unidentified
MQTVADRPEAPTAIRTDLGAIFVSLELSRSTWLITSLSPGGGEKMSKQVVRGGDVAGLLERFARLREKARARTGKVFPFVVIQEAGLDGFWIDRALQNEGIESHVVDPASIATSRRRRRAKTDGIDGEVLVRALLAYKRGEPRVCAMVKAPTPEEEDRRRLCRERKVLIAERVRHVNRVKGLLFSQGISGYEPLHRDRRERLDALQTGDGRLLPDHLKAQVRRELDRLELLLEQIKAVEAERDVLLAAQQVAAPTPAAMLLDIKGIGPEFATILWSEGLFRHFDNRRQVASYAGLAPTPWQSGSIDREQGVSKAGNPRLRTTLIQLSWLWLRHQPQSALALWFEERVRRNGGRLKKKTIVALARKLLVALWKYVTAGVVIEGAVMKAA

SEQ ID NO: 488106 - protein, 416 aa, unidentified
MKIVRPICCGMDVHKNIIVATIGITNKKTRITEYIQETFSTLNPDLLNLKQWLINHKCFDACMESTGKYWIPIFNILEDEINIYLTHPKYVKAIKGKKTDKKDSKWICDLFKHDLIKFSFIPPKEIRALREISRYRYKLVGMRSSERNRYQNCMTVSNIGIGSVFSDPFGKSAQAIMKEVLESDIIEDEKILKCIHGSCKNKDKILDSIKHCNIETDQRFKMNESMTHMEELQVHIDNCEIEMMKRAAPMFDRFMHITQLPGISTLSAILIISEIGVDMKQFESDKQLTCWAGLAPANNESANKKKSVRISKAGQYLKPLLVQCALGAIKDKEGYFGIKYSRIKKRRGHKKAIIAIARMMLVSIYHMILTGETFNPSDYESFKNPKPPIKQQVLTEESAIEFLKKSGFDVSKLTKP

SEQ ID NO: 488107 - protein, 344 aa, unidentified
MSHSIRGTHRVLPPEGHSRPNGSVVGIDICKDYFDAFFAGQHRRYAYSLEGIEAFMSETARLDEACFVMEATGNYFYKLALALVEAGRKTYVVNPYRVRAFGKSRLQRHKSDKADARLIHDFAVANAEAMVPWQPESQTIAALRQLRTVRVQVQKTATVYENQLHALLQLPESKQSQDALQICKQMIAYCHEQLNIIGKQMQALLDDELKKNYALLDTIAGIGRESALTLLILTGNFTKFRSAKAFADYIGIAPTHYESGTSVKGRGSISKMGDARARQVLYLAAMSAVRHNEACRAFYVRLRQTGHAHKHAVVAVANKLIRQAFAVIRQQAPFENRGAWSVST

SEQ ID NO: 488108 - protein, 405 aa, unidentified
MDIQPIYRCSVGIDVHLALLCVCVIVAEPGCEPVVHRREFGGFKRDRHAMAEWIAGFKPDIVVMESTGIYWKSPYAALEKAGIQATVVNAQHVKKVPGRKTDTGDAEWLAMLARAGLLRGSFIPPEELRTLRQVSRHQQKLTGMRAMEKNRLVKILGDAGIRITAVVSDAHGVAASAMIDCLLDGGTPEQALAHAGQLHAKREDLLAALQGELSPDHVFVAKTIRDHIAFLNAQLADLESHLLDALQPHEAALQLLMTLPGVDRLSAAKLAVEVGLDMAAFGTAGRLCKWAGVCPGNDESAGKRKRGDTAPGNRYVRAVLCEIAWAATRTASQFKGRYQSLVSRRGTKKAIVAIGHQVLKIVFVLLSRKVPYKDPSVDYGELLVKRNAPRWIRALKKFGYLPQAA

SEQ ID NO: 488109 - protein, 316 aa, unidentified
MAEELYVGIDVSKAELVVAVRPSGERMTLANDRAGIKRLVGRLGELKPQLVVVEATGGLQRQVVAGLWLAGIAVAAVNPSWVRNFAKGRGVRAKTDRKDAELLALFAERERPEPRPPADAETQALQELVTRREQLLAMLVAEKQRLTRASGTMRKELRHHIAYLEGRIKQVEEDIDQTVRRSDGWRRKNEIVRSMPGLGEHFSAMVLAKVPELGTLNRKQIGALVGVAPMPDDSGSRHGRRAIAGGRFEVRNKLYMCAMVAARFNPVLKQFYQQLVARGKPKKLALAAVMRKLIVTLNAMFKTNSLWRPPCPDPSI

SEQ ID NO: 488110 - protein, 428 aa, unidentified
MSKQETIRRKQYCQIVKEITGSNEYLVVGVDIAKEKHHAFMGTATGKSLLRKLIFENNIDGFSRLLKTADAIKVQNGLSKIVYGIEPTGNYHKPLARHLTRCDGDVVLVTGQAVKNNRVLIDGRWDKNDTKDAANIADLVSRGKCLYYDCPTQSIIEIRVLLSLRRRLKKEEHSLRMRIRNNFLALYFPELDRFYSACESETLAIVGWCLTPDTIAAMEFEEFFHLVTKTRRGTAQALRLRKIHSLAIESIGCPIGPAGEHEAELLVEKLKQVRNQIQETNDLIEDFCLEFSEYSYLLTIPGFGPYISARVLASIGDPFRFENRKQLIKMAGYDLCANRSGRTSDKAIPVISKKGNSELRYALYQAANIAAARVDLFREYFTKLLRGRERERGIKTKMRVKLAAKMLVIAWTLMKKREVFNPDYIDIE

SEQ ID NO: 488111 - protein, 489 aa, unidentified
MSRASQQQQGKKDATLNAKALKRKARGSHRPQGEGHQRRSQLRITNRDAAGIDIGSQVHYVAVPEERAERAVRSFGAYTAQLDEIAHWLKECAVKTVAMESTGIYWIPLYQKLEEAGFEVLLVDARQAKHVPGRKSDVQDCQWLQQLHTYGLLRAAFRPEDWVCRLRTLQRHRKSLVEYAAMWVQHMQRALNEMNLHLHHVLSDISGCSGLAILDAILAGERDPRKLASLADYRVKKSQAQIEAALTGDYRPELLFVLNQSLQDYRQIQQQIAQCDLSIEKQLAQMADCTNPSQDSGPRQQGPESAGGKRGKIKPKDGLEVSLAGHLKRILGIDLTTIPGLNVLAILTLISEIGTNMSKWRNEKAFVSWLGLSPNNKISGQRLLSSRTRKVVNRAATTLRLAAMVLGHTNTPLGSFYRRKRAQLGAPKAITATARKLGCLIYRLIKNGEAYQEPDLHVYELKYKDQILNSLRKRANSFGFDLVEVPKAA

SEQ ID NO: 488112 - protein, 357 aa, unidentified
MKQLSKVVGLTVGLDLGDRFSRFVILDAEGRILQEGRLGTDEAGLSRFFCDRAPMRIAIETGTHSPWVSRQLAEYGHNVLVANSRKLRLIYENPNKDDRVDARYLARLARFEPALLSPVEHRDASSQKDMALLRSRDALVAARTLLVNHVRGVSKSFGKRLPACSTSCFPGSVLKQIPQLLEPVLCPLLEQIDSLSKQIKKLDRQIQTLADANYPQTRLLRQVKGIGPITSLTFILTLGHPQRFAKSRTVGAYLGLVPGRKQSGHSDPQRRITKQGDSGLRRLLVNAAHYILGPFGPDCDLRRFGWKISSRGGKLAKKKAIIAVSRKLSVLLHHLWRTGEIYQPLHRSIRNSKAAVA

SEQ ID NO: 488113 - protein, 415 aa, unidentified
MEKQNNKVCGADIHKKFLMATILSRDGTKSSGRFGMTLDEIIRFKEWVIENECEQVAVESTGVYWVPIHTVLEDKIEVIVVNAYKIKHIPGRKTDMRDSEWIAELCLNGMIEPSRIFPKEDRELRTLTRARESLVNNSTQMKNRVHQALESSCIKISSVLTDIFGKSGQKILNGLLEGKMIDEILAGINSKTVKKKEQELRDAVKNSLDPAKILLIRNCLELMEEIEKKIKKLDIEIMSRIVRMKEDVEIATSIPGIAFISASAILAEIGNYRDFKNGEKLAAWCGLTPRVSQSADMLVTGSITKQGSKHVRRMLVEVAHAISRTKNSVLKRFFLKIKAKKGTKKAAVALARKVLCVLHHLLINREKYQENGNAKSKPVKFNWTSSQIQMTEQDMINVLANAGYIIKKKDARGCI

SEQ ID NO: 488114 - protein, 494 aa, unidentified
MMLKHHKLVWFCLVLRAPIGSLMPYKRIYLFETNRHGAILTLKSTNMSKSTKKRESVKRISQLSEINSHAAGIDVSDTEMMAAFPVTPEKLEIRSFGCFTQDLHLLARCLQQHGIETIAMESTGIYWVTLFLMLQEYGFEVVLVNAKHVKNVTGRKDDESDAEWLQKLHRFGLLSASFQPDSLTRQLRNIVRHRKNLVRTSSTYLNRIQKVFELMNIKLHTIISDIDGKTGIAIIEAILSGERDPEVLADLRDCRIKASREEIIKSLEGYWSSDHLFELQQCYTLFCAHKEMIRACDKEIEQGLIKIIASKNQGIIPDIPVLNRKVSSKTKVSFNLTSYLKVLIGVDVTEIDGINELTALTVLSETGTDMTKWGTEHHFTSWLGLAPNTKISGGKVISSKIMKKKHHAGQAFRAAAFGLSNSKGSIGTFYRRIRSRSGPAKANVASARKLAIIFYMMVSKQQEFNPLLLNKYQEKLKEKTIIQLKRKLAMLEAA

SEQ ID NO: 488115 - protein, 365 aa, unidentified
MIVIGTDPHKSQHTAAATQAATGELLDDLTVAAKPKGHAELLRWSRSLGRERLWAIEDCRHLTGNLERYLVAHGERVVRVAPKHMAGARRSVRERGKSDPIDALAVARAALREGPDQLPSAFLDDEAMQIKLLLDHREDLEQEATRIVGRLRWHLLDIWSELELPVRAFERMVWLDRIGRRLARAEQSTRVSICREQIRTLKALLRRSRELERELTVLVKVKNAALLELPGCGPLTAAKLIAQTAGAERFPSEAHFARLAGVAPIPVSSGRNDRHRLDRGGDRQLNCALHRIAVTQKRMHAPAQDYLARKQAEGKTKREALRCLKRQLVRSVLGQLRPVSSDRTDPLAMNKLTKIKEPLQVAALT

SEQ ID NO: 488116 - protein, 349 aa, unidentified
MTLTIVDEARAVTGGVDTHADTHMAAALDAVGGLLGVQEFPATLAGYARLLAWLRGFGVVHLAGIEGTGSYGAGLARHVAAAGIRVVEVDRSDRQDRRRKGKSDPLDAISAARAAQSGRASGAPRGRDGAVEAIRALMVAKRTARAQRTQTINQARALILTGPDDVRARFAHQTPAGLVAELAALRPRPGSMVRYHTLLSLRELGRRAQFLDAQLARLDELIVPLVTARAPRLLQLYGVGSDTAATLLIAAGDHPRRLRSEAAWAHLCASAPIPASSGKVTRHRLNRGGDRQANHALWRIVITRMGSHPPTRAYVARRSKEGLSKPEIIRCLKRYAAREVYPHLRPGPG

SEQ ID NO: 488117 - protein, 393 aa, unidentified
MPQQRKPNDLSRSLIALDMDTTLIAVVELSLSSWLVAGIVPGIERQPLKKLRTDENALLALFDRWRDEAVRSGHKISRIAVAFEAGRDGFWLARWLKARGIEAHVIHASSVAVSREHRRAKTDRLDTELLKRAFVGWLRGERDHRKTAAIPSLREEDAKRPSRERESLVGEQSRLVNRMKATLIRLGIRAFNPKLRYAEQRLETLRTPEGEPIPANTLAELKRDMQRRRFICGQIRSIEQERLERLERTPDTEPHAMVRLLARVTGIGIETADLLVHEVLLRNMRDRRAVARYGGLTGSPDRSGGTNREKGMARSGNARVRRGMIQLAWRFLLFQKDSALVQWYRRRTEHSPKARKTMIVALARKLLIALWRLAREGVVPEGVAMRPGVMNTI

SEQ ID NO: 488118 - protein, 343 aa, unidentified
MTKILKQVAGIDVAQNELVVSLGRVDQSLCKDIYAYKIFANKQSGFAALLVWIKKHTDHEVAVRYVMEATGVYHEKVAYYLSDQGFEVSIVLPNKISNYMKTLEIKTITDKTASQAICQFGLERGLDLWQKPKNIFRDLKQLTRERDQIVADRVVAKNQLHAEQSEAFPNDRSIYRANQRIKLLNEQEREIKQEMAQFVKTDNELHKKIDLITSIPGVGSLTAVIVIAETNGFELIRNKKQLVSFGGLDIIRKDSGTSVKGKPRVSKKGNRHLRKAMHMPALTAIRNDERFKTIFVRLVSKHGIKMKAAVAVQRKILEMIYTIWTTEKLYDKEYLQKANTITA

SEQ ID NO: 488119 - protein, 467 aa, unidentified
MIWLVEASFIAGSSCHMQGCELTREGMERFKFKFIFVKEAFVMNVLPVAGIDVGKEFSEMAILSPTNKVYARMKFFHDSFKKVDKAIDLLKKAEKDFAIRPVIAMESTGHYHKILFHAGFEIVITNPLQTNCINNLGIRKVKSDKVDARKVALLYRFQELKTTSIPNDTTDCLKSLCRQYYKMTDQLTAYKNKLIGIVDQVMLNFTDVFKDVTSKTALALLEKYPTPTLMLEGKRDEIISLISKTSRMGVKRATSKYELLIQKAKDFEPLSISSPANISLIQININMVRTLEKSISDIEDAIAKLIEDDSNKDMPVLALTLELLCSIPGIGLMTAATILAEVGDFSKFQKPNKLVAFFGIDPSVKQSGKFEGTQNKMSKRGSRFLRKALYISALANIRKKRNGELNNPVLYEYYQKKCVNKPKMVALGAVMHKLVYIIFAVLRDKKTFELRTPEQHAKHLAAKNDAA

SEQ ID NO: 488120 - protein, 391 aa, unidentified
MSMYFVGIDISKYKHDCCIISAADQQIVSKFTIANDKDGFEHLLTTLNSLSNPEDIKIGFESTAHYALNLELFLENAHHSFMEVNPVLIKEYKKSTSLRRTKTDSVDCESIARWLMTVEYKPHSKGFYHAYSLKSLTRLRDRLIRQRSFYLVKITNVLDHTFPEFKPFFNKRLSKTAIYLLENYGSAEKMAHMNSTSYDKLRCVSRGKFSIQQFLRLKELAANTVGVNNSIFDIELNSLLTLYNSLCKEIKVLETEITRLIEEVHPHYMSIPGIGPISAAVIYAEYGDISNFSNPGQMLAFAGIEPGIDESGTESHGGRMVKHGSSQLRYVLLNTCLPLIRFDITFATYYAKKRAEGKKHRVAITHVAKKLIRVIYALEKQDIDFNAQKLR

SEQ ID NO: 488121 - protein, 356 aa, unidentified
MTIVAHAYPFVIGVDAHARSHALAVLASPTGELLDETQFPATVAGLQRAVSWVARRTGGDLDVLWVIEGVGTYGARLARVANDTGYAVAEAGRMNARANRGVGKSDPLDARRIAQSVLAVDVAMLRRPRADDGVRAAVRVLIASRDHISTERTSAANALTALIRVADLGIDARRPLTAAQITAMAAWRARDEDLATTVARKEAGRLAKRVIAADRELAANTKQMTDLLNASPARVLLDQPGIGPVTAAVALAAWSHPGRVRSEAAFASLAGVNPIPASSGNTVRHRINRGGDRRLNRALHMAAVTRIRMDPRTRAYVERRTAEGRTPREIRRCLKRYLARQIYRQLNAAETALNPT

SEQ ID NO: 488122 - protein, 348 aa, unidentified
MHIAVMGIDLGKNSCSVAGLDRSGQIVLRRRLHRDSVVKLASRLPACVIAMEACCGAHHLGRLLQACGHEIRLMSPEYVQPYVKAQKNDERDAEAIAEAATRPTMRFVELKSEQQLDMQSLHRARSRLVGERTALINQLRAVLLERGITVAQGRHRLQRYLVLALEGDDTPPVPLSPRIRLLIDDMRARWRELDRRIAAFDAEFVAEARSDAAARRLATIPGIGVLNATALIAAVGDARSFVRARDLAAWLGLVPRQATTGGRPRLLGITKRGNKYLRTLLIHGARAALPLLARTESPLGTWLRGLSARAHRNTVIVALASKLARIAWAVLRSTATYNAMIGARPAAA

SEQ ID NO: 488123 - protein, 405 aa, unidentified
MELTTLHKRVIGLDVHQAQITACALIEEADGTTRIEQRQFGAFKRDRRALAEWAAALRPDEVVMESTGIYWKSPYAALEAAGIRAQVVNARHVKNVPGRKTDVGDAQWLATLARAGLLRGSFIPPAKLRELRLIARQRQKLVGQLASEKNRLHKILTDGGIRLGVVVSDIHGQSARAMIKALIEGWPPHEVLQFASRRLKASREELFDALQGELTGSHGFVLDELMRHIEEIEARIARFDVRLLAGLHDQRNVLGLLQTLPGVDLIGAAMLLVEIGTDMDAFGSADRLASWVGVCPGNNESAGKRQSGRARKGNPYVRRLLCEFAHAASKTRSAFKSKFQSLIVRRGHKRAIIAVAHKLLRTMFFMLKRGEYYRDCATDYEALCVKRNAPRWIKALRQFGFIPAA

SEQ ID NO: 488124 - protein, 359 aa, unidentified
MASKVKRNAISFNGKIVNIGVDMHKQSWRVTALVEGEVAFTGTLAKPNYVSFRKLLARFEGNYLRIAYEAGPGGFGLYDRLTVDGIECIVTPPSLIPTESGSRVKTDKKDSLKLAKLLETNMLKKVWVLSPEERADRQLVRTRRQIVDHRSDVMRQIKSLLFFHSMDIPFSMHQQWTGPFIKWLHELDLDDQCLNQSLKTLLHLFDYLSAEKKRLTHEVIELAREEKYAQRVKLLNSIPGIGTLSSMEILVELQEITRFKTSDELAAYLGLTPSQYSSGEHIRMGHITHAGNDRVRTTLVESSWILIGKDPSMRRKYENIKHRRGGKKAIVAIARVLSACLRRMLLDQVPYEIGFSKAA

SEQ ID NO: 488125 - protein, 401 aa, unidentified
MQETKQHDAVDVFVGVDVGKGQHHAVALDRNGKRLYNKALPNDEVKLRALIAELKTHGRLLFVVDQPSTIGALPVAVARAEGVLVAYLPGLAMRRIADLHAGEAKTDARDAAIIAKAARSMPHTLRSLRLADEQLAELTMLCGFDDDLAAQVTQTSNRIRGLLTQIHPALERVLGPRLDHPAVLDLLERYSSPSALAAANEKTLANRLTKLAPRMGKNLAAEIVQALNEQAVIVPGTQAATIVMPRLAQQLAALRKQRDEIAAEVERLVLAHPLWPVLTSMPGVGVRTAARLLTEVAQKAFATAAHLAAYAGLAPVTRRSGSSIRGEHPSRRGNKVLKRALFLSAFAALRDPVSRAYYLRKIQQGKRHNQALIALARRRCDVLFAMLRDGTIYQPKSAPDA

SEQ ID NO: 488126 - protein, 422 aa, unidentified
MLEDTQDREEIIERVAALDIGKAEVVVCVRVPSPNQPGRRAQEIATYSTMTRALLRLADRLRELGVTRVVMEATSDYWKPVFYLLEAQGLDPWLVNAKDVKHLPGRPKTDKLDAVWLCKVAERQMLRPSFVPPVQIRQLRDLTRYRLDLVNTRTAEKQRVEKLLEDAQIKLSAVVSDVFGVSGRQMLAALLAGERDPQVLAQLARTRMRAKIRLLEEAFVGHFTDHHAFLLRTMLGRIDETSADIAAVETRIEELITPFARAVEKLDEIVGVGITAAHVILAEIGTDMTRFVTAAHLCSWARFAPGVKESAGKNKGRGATGHGNPYLARVLGEAAVAAGKTDTFLGERYRRIARRRGKKKAIVAVGRSILIIVWHLLSDPDARFHDLGPDFYDTRIGPDRKKRNHIRQLEALGYKVTLEPAA

SEQ ID NO: 488127 - protein, 353 aa, unidentified
MDRISQKSEKIYCGIDFHKNESVLYAITANGQKVEKLKVKSDRLVQYLSNKKDWVLGIEISGGVNQKVMELRASGHEVKLINSNKFRGIGIGGKKTDERDAKALAECLRFEFTPEVHLKSEGSRRLKSMLVCREFYVRSRVNGVNHVRGTLREYGLNIPQGMESFRKNVGGEIDKIDHPQLKSLLEKTRALITELEECEKAAEKILEDIAVEDGRVQNLLTVPGIGLMTAVAMICVVDECSRFKNGKEFASYIGLVPSVHASADKCMMGSITRSGCEILRRYLIHGARAWMKYKPDSDKNRVWAERVLERRGANKATVALAHRMARISFSILRDGVPYTGKAKRIRLRKTEAA

SEQ ID NO: 488128 - protein, 317 aa, unidentified
MTTRIEETFVGIDVSKNQLDVAVWKRKKVMQYANDNKGILTVVTELAELTPTLVVLEASGGWEMALVAELAFAHLPVAVVNPTRVRAFARATGQLAKTDKLDARMLAWFAQAVRPEVRTLRNEQEALLTALITRRRQVVGMLTAEKNRRHTTPGLVGERLDAHIAWLETELRCLEQEISDFIHKSPVWQEKEGLLQSVPGVGPVTAFTLLAELPELGTLNRQKIAALVGVAPFNRDSGPRRGKRRIFGGRAGVRNVLYMAALSASKTNPVIRAFYQRLLDNGKEKKVALVACMRKILVILNAMIRDGNLWQQRPACV

SEQ ID NO: 488129 - protein, 456 aa, unidentified
MAEKKTRHVKSSGQLSTINEHAAGLDVGSTFHVVAVRSDQDDEPVRTFQSFSGDLHAMADWLKRVGITTVAMESTGVYWIPVFEILEAHGFEVLLVNARDVKNVPGRKTDVNDAQWLQRLHQHGLLRASFRPRDELVGLRAYLRHRQGVVEYAASHVQHMQKALMQMNVQLHHVVADITGVTGLKIVRAIVAGRRAPEELAKHRDARCAASEETIRQALTGNYRPEHVFALKQALELWDVYQAKIAECDVEIEAALKSLNDHHPPPGTSPPARRQPKVKNEPNFDVRTALHKMLGTDLSQIHGFGPYTILRLVAECGDDMTKWPTEKHFTSWLSLAPGNKISGGRVLSSHTRRSSNRTAALLRLVAVSVGKTQTALGAFYRRLGARIGKAKAVTATARKLAILFYRAVRFGMTYADPGAKYYEERYRSRVIENLTRRARNLGYQLVPNAVPIEGVS

SEQ ID NO: 488130 - protein, 397 aa, unidentified
MRFYDQQHRFYAGIDLHARTMHVCVLDAAGTVVLDRNLPCHFETLLQAIAPFREGIVIGVECMFGWYWLADRCAEHEIPFVVGHALYMKLIHGSKAKNDRIDAHKIAHLLKGGNFPLAYAYPKGMRETRDLLRRRMYLVHKRAELITHLEILNAQNNLPPFGKKLSYAANRAELNIAKRFTDPSVQMSATLDLDLIDKLDELIATVELHLTRAAKVDDVQTYHRLRTIPGVGPILALVLLYEMHQVERFERVGQFLSYARLVRCAHESAGKKLGSGGQKIGNAHLRWAFAEAACLFLRGSERARHWKQKQEKKHGSAKVLGILAARLARAVYHMLRKEEAFDEERFWSGHSTPSPTPTRPTRQAAAKGQAQQGAAPTDSTKPAAARGSRQRERATVR

SEQ ID NO: 488131 - protein, 392 aa, unidentified
MVCVGIDVAKDKHDCFILNSEGEVLADVFTIANNREGFETLLQRIRSCTTPADKIRVGLEATGHYSYNILGFLLDKGMPTFVLNPLHTNLYRKSLSLRQTKTDRVDARTIASMLMSDVDLKSYTDTAYHNEELKSLTRYRFDKVRERARLKQSVSRLVVILFPELEKLVPSLHMASVYAMLSEFPGAKQIAGANLTHLKAVLSDASKGRYDRDKAVAIRDAARRSVGSVMPAKSLELQHTIRLIHELDKEIEEVEEQIRTMMDTIQSPITTIPGIGVRMGAMILAEIGDFSRFDSPDKLLAYAGLSPSTYQSGKLNATGTYAHMEKRGSRYLRYALYNATKYVCLWEPSFVAYLEKKRAEGKHYNVAISHAAKKLVRLIFALETSGKAFQPA

SEQ ID NO: 488132 - protein, 343 aa, unidentified
MQTVTTIGLDIAKSVFQVHGHDGAGQVVIRRQLKRRSVLAFFQKLPPCLVGIEACASAHHWSRELQALGHKVRLIPPAYVKPYVKRQKNDAADAEAICEAVTRANMRFVPTKTLEQQSGLVLHRTRHLFIRQQTAVINAIRAHLAEFGIVASVGRHGVEELLNVVADPNDKRVPEMARACLSAFGAQLRRIQEQVLEFDRLIRAWHRSDEMSMRLDEAPGVGPVLATAVVATVADPKSFRSGRNFSAWIGIVPKQHSSGGKNRLGNISKQGDRYLRGLFVAGALAVIRYAKIHGTKHRPWLTALLARRPTKVAAIALANKLARMVWAMMARGERYKEPVALAA

SEQ ID NO: 488133 - protein, 402 aa, unidentified
MNKFNPTTTKVSTTSALGTILTVQSALDKYAAYIGLDTHKDTIVVAIALPGRALAYIDSELANNEKNISKLIRRLSKQFAGQLLLFCYEAGPCGYGIQRQILASGHDCEVIAPSKIPKKPGEKVKTDRIDACKLAQYLRSGDLTAIWIPDHEQEAMRDLTRARSDMKSQELKARQQLNAFVLRHGHSWPSNKTRWTQSHYNWLESLKFNHDWLQVVLQEYINAVKAASGRVKDVTDQMERVLPQWSMAPVVDSLIALRGIDKLAAMVLLAELGDISRFDSPKQLMAYLGLVPSEHTTGSKRRQGSITRTGNSHARRMLVESAWSYRFPARQTMHLKRKATKASDEAKTIAWRAQKRLCGRYATLIQAGKNTKQTTVAIARELIGFIWDIVCHEMPKVKIVVQ

SEQ ID NO: 488134 - protein, 427 aa, unidentified
MSEKDCNKQVERRQKISKSTLIVGMDIGSEFNAMALMNEGGEVLGRYPKVYNSREGFGYFERAIEEVKRKKGLKRVLIGMEPTGHYWRKIAYYAKDQGYEVRFIRTTALRHQRELDESSSAKTDIRDSVTIANVVREGKYIDTVIEDGVYRQLRMLAHVRENIQRYNVGTKHRLGAVIDDYFPELHRIFWSMKAKGLWAVLEACPFPEDVIKFSVEQIAELIGKSSKRKGKALEKAKKVYKGAKETIGLKDVSEADRYRLRSCLEEIKRCEGQMKEVESQMEGLLEQVPAAEILMSIRGVGLITTAVFLGELGDPKNFSNPKQIIKYAGYDPQEDDSGKSIGRKRISKKGRWLLRKYLYFMGMRVLYRNTFFRKYYERKLKTKNCWGQLLKKKEAICAVVIKLIKVIFALLRDNRKFTSARPMAVAV

SEQ ID NO: 488135 - protein, 404 aa, unidentified
MFYFGIDWGQDHHNLCILNEAGARVSQVQFKHSLAGFAQVEVERRKLEVPASECLVGIETTYNLVVDFLLEHDYPIYVVPPQATNGYRNRQRSSGAHDDESDATLLASILRTDRASHRRLRPNLTLTQQILAEVRLIEILRRSIQRQTNQLRAVLFRTYPQAVGLFSDLTNQIALEFLLAHPTAQDARTLSREAFEAFLRQHGYTRSDLIPLRYAHLVEPFPTANPAIVQAYQGQVRALAQVLLPQVRGRTQAIAHLGQLFEQHPDAFIFNSLPGTGLLLAPALLAKFGDDRDRFPTSVDVQALAGTCPVTARSGKRKLVLFRHGCDKEFRRIAQQFARASVPQSGWAAAYWHEIRPHCHSDSHAYRILANRWLAIIWKMWQDRKSYDEAYHLHQRALRRKPRA

SEQ ID NO: 488136 - protein, 386 aa, unidentified
MKPSNPSIATRGAENTAVIFVSIELSKKSWLTAIHTPLADKIGLHKVEAGSGTELLALIRRVMKKVERTMKGPVKVLSCYEAGYDGFWLHRILVEAGIINYVIDPASLQVNRRARRAKTDRIDALGMLRALMAFERGEEQVFSVVRVPSVEGEDTRRVHRERERLVKERIQHVNRIKGLLATQGIYDYEPMRRHRRERFEALTTAMGTLIPRHLRDEITRHLQRLELVLEMIRAVEAQRDAVVEAEPAANEDGRKIQHLVRLKAIGPQFATVLVGEVFHKKFANRRQVASYAGLTPSPFNSGSLVREQGISKAGNPRARTTMIEMAWLWLQYQPHSALSRWFHERVGTGTGRVRRITIVALARKLLIALWRFLESGLLPDGAELKA

SEQ ID NO: 488137 - protein, 341 aa, unidentified
MGQVSTVGLDLAKSIFQAHGADAAGEVVFRKKLGRGRLLDFFAGLPPCVVAMEACAGAHHWGRELTRQGHTVRLIPPIYVKPFVKRQKNDMADAEAICEAAQRPSMRFVPLKGEEQQASSVVFRARDLLVRQRTQTINALRGHLAEYGWVVPKGVPHVDRLIARVEDPAEALPPAARTILLVLVSTLRTLDQQIAVLDEEIAARARHDPIARRLMTIPGIGPITATAIVALAPSHESFKSGRHFAAWLGLTPRQRSTGGQQKLGSITKMGERTLRRLLTIGASAVIKQAAIRGAPAGSWLDQMLARKPKMLVIVALANKNARIVWALLAKGEVYRAPGAPA

SEQ ID NO: 488138 - protein, 340 aa, unidentified
MQVTTIGLDLAKNIFQAHGIASDGTVAFNRALRRGQVLPFFAKLAPCLVGMEACGTSHYWARELSKLGHEVRLMPPIYVKPYVKRGKTDAADAAAICEAVTRPTMRFVAIKSPDQQALLSQHRARQLMIGQRTQLSNMIRGLIGEFGCIVAKGLNHITAFAEALRSGEGPSLLATAQDVIVSLCEQLLALHQRIRMLEKKIFAASRKDARVRLLETIPGIGPVTASAIVATVGTPDQFRTGREFAAWLGLTPLNRSSGGKERLGRISKMGDRYLRRLLVAGMTSRVRAARARPDRVEPWLASLLERKPVRLATVAMANKAARIVWAVLTRNEPYKQPVAA

SEQ ID NO: 488139 - protein, 370 aa, unidentified
MKYVGIDLHTNRFTCCYLFDDSKEKQMETFELEPEGLRKFYSTINKDTYVLVEATVNTFAFISLFKDLVKEIIVANTFQLKSIGIAAKKTDKIDAFKLAEKLKVQVISGVQQIVPVTVPPKEIRDLRALFATYRVLRKEIGITKNRIHSLLKENLFPFTKEYIFGKKARIEIRNISRDITLSFQINMFMDTLEYMEKKFDELIDEIKKAGAVFISQIEILTSMTGISVITAIAVIADVSDISRFRNSKHFASYLRSAPRVESSNDKTIIKSTNKAGRKLSITLLSQSLNHFRDSNRNLCNFYERAKVFKKKGVVRMALCRRVITQIYQMLKKQEYHYFCNPVLHEKKMAEYRRFLETENIIFSKNFKFAA

SEQ ID NO: 488140 - protein, 334 aa, unidentified
MHRAQITFDALDTESGEVTRGRIDATPAAVARWVERFDRRELHVAVEACTGWLFVCDALVAAGAVPHLGEPVETRALRGRKRRAKTDREDARWLRELLADGRLPEAWIAPGHVRQWRSRARLRHTLLDERTQWFQRIRATLFHHGVSGSPESLRTREGRAFLERLNVPADARERIEVALMMIDAIDAQLGPLDRELRQLARRQTGCRALMGLYGMGELTSLVTLCELGDVARLSASRKAVRLAGIDIGVHRSDRRSRVGKLNRQGSPHLRWALYEAALAACRASSPDHADYLALKARGLSHTRATLTIARKLARRSFHVLRELGPAALEPIATS

SEQ ID NO: 488141 - protein, 402 aa, unidentified
MNCVGIDVSKGKSMIAVMRPFGEVVVSPFEVRHTANELSELAGLLKSLDGETRVVMESTGNYHAPVAWLLHDAGLYVSVVNAMLVHDYGNNSLKRAKTDKKDAVKLANYGLDHWLTLPRYVPEEDTRLMLKTCYRKYQQYSKVQTMLKNNLISLLDIAFPDANRLFTSPPRADGSEKWVDFVATFWHCECVCGRSEKAFTTQYQKWCRKHGYNFSEDKALDIYASACRHFGVIPKTDTAKLLVEQAISQLRATSAALAALKQEMQSLAASLPEYPVVMGMFGVGPTLGPQLLAEIGDVRRFHSKKALVAFAGIDAPPYQSGQIDVRSRSISKRGSASLRRTLFLVMSVILQCAPIDEPVYQFMDKKRSEGKPYRVYMMASANKFLRIYYASVKAYLESLEHD

SEQ ID NO: 488142 - protein, 402 aa, unidentified
MHRDSVVACFRQLGPKGGVVREKERFTTTTAGLQVLEAWLADRSVELVAMEATGVYWKPVLYALERRFTVWLCNARAVKKVPGRKSDLSDAEWLADVAAHGMVRPSFVPPPPIRELRELTRYRKTQIDARVAEIQGLEKVLQDAGVKLTSVASKVLTQSGRSMIEALISGEQDPAKLAALAKGKMRPKIPALTEALAGHFGPHHAVVCRRILGHLDFLDQTIRELTEQIDARTAAFDAVYRALLPVPGHDRLTIDVIIAETGADMTRFPTAADLASWAGVCPGSHESAGKRRRVSTTPGNKWLRRTLIEAARAAVRTKGSYFGAQYRQIARRRGPNKAAVAVAHSLIELVWHLLSTGEVFQDLGDDYFTSRQDPERRARRLVAQLQELGYAVTLETTPPVAA

SEQ ID NO: 488143 - protein, 410 aa, unidentified
MAERFVGIDVALREHRIAVLDRDGEVVGQSFTIAASKDGVTTLLRTLDARAATAAQTLIGLEASGHLWENLEAALVGAGYRVLVLNPLQTRRYRDVVRRKAKTDDIDAHVIAGLLRSGAAQASYVPDEQIQSLRELARLRARLMADRQDYLRQLSAQLDVVLPEPHAVLGDLLSARARGILAQFPTAHHLAQASPRAIRRAAEDAGTRGFSLDDATAVRDAARRSIYSGKAAPARAHVVRTLVSQLERLTSAIDDVDRAATTLLPPSEPGAGPSDAQLLQTIPGVGPQTAATLLGELGALTRFTDARALVAYVGFYPVISESGERAATPRLSPVGSRIARHALYLAAVNAVRRSAEWRTLYLRKKAQGKKAKQALIVVAVKLLHTVYAMLKHRQPYNPSRLLVAPPTIGT

SEQ ID NO: 488144 - protein, 335 aa, unidentified
MLYAGVDLHLKVTQVAVVDERGELVLNRRVRSDREELLRVFGETGPEQALEVAFEATYGWGWFADLLEDAGIPAHMAHPRANKAITSARVKNDAVDAKTLAHLLRTDLLPESWIAPPPVREGRRLVRMRTSMVRIRSRLKNQVHAIFADYGLHPTESSLFAGNNLTELCRRLPILTRKRVEANLRLIEDIDKELDLADAQIHKLFARDAGVRRLLPIPGIGIITAAIIVAEVGDITRFPSARHFCSWCGLTPTEHSSAEHTRRGHISKQGSRWLRWVLVEAACHSYRNRELAVLQGNVASRRGDKIARIALARRLATLSFYALRNPEGCRAFPAR

SEQ ID NO: 488145 - protein, 341 aa, unidentified
MNITHIGVDLAKSVFSLHGVDERGRRHLRRDLRRAQMLPFFATQPACVVGLEACAGAHYWARELGKLGHEVRLINPRFVVPYRKSNKNDHNDAEAICEALTRPSMRFVAVKSPEQQAVLTVHRARALLGSQRSALMNQIRGLLGEFGIVLAQSPSALRTRLPEILEDADNALPDLAREIFAELYERLLEQERCLAEYDKRIKRLARASEPAQRLMKVPGIGATIATAALATGGDLSVFRNGREFAAWLGLVPRHSASAGKCRTGRITKRGDIYLRTMLVHGARAALRTAGRRDDALSHWALAVKERRGPNKAVVALAAKHARIIWAMLVRDLDYQPRPLGA

SEQ ID NO: 488146 - protein, 343 aa, unidentified
MQAITTIGLDIAKSVFQVHGVDAVGRVVIRRQLKRRYVLAFFQKLPACLVGIEACASSHHWSRELKALGHAVRLMPPVYVKPYVKRQKNDAADAEAICEAVTRANMRFVATKTPEQQSCLMLHRTRHLFIRQQTAVINAIRAHLAEFGIVAPVGRNGVEELLNVVADPSDKRVPEVARICLAALGAQLRRIKEQILAFDRMIMAWHRSNEASKRLDAIPGVGPMLATALVASIADPKVFRSGRNFSAWIGLVPKQHSSGGKNRLGSISKQGDRYLRSLFTAGALAVIRYAKIHGTKHRPWLTALLARRPTKVAAIALANKIARMVWAMMARGERYKEPVALAA

SEQ ID NO: 488147 - protein, 387 aa, unidentified
MKAIKLYLGLDVHKDSITIAIAQAGPQGEIRLLGTITNDLQALGKALARIRKAHPGAHLEVTCEAGPCGFGLARRLQQLQVPCLVAAPSLIPKQPGAPFKTDQRDARSLARLLRAGELTAVYVPEPTDEAIRDLCRARTDAVDDLRRCRQRLKSFLLRHGYRYQGKANWSQPHMRYLRELVLPHPAMKAILEEYLQGIDAAHDRVQRIEVSSLALLENWRLKPAVQALMALRGFQRVAALITVSELGDIHRFAHPRQLMTYLGLVSVEHSSGPRQHLGGISRCGNGHARWLLTECAEHYALPPKVSQELSRRQEGQPSHVRALSWKAQNRLHLRFNRLLARRVQRNKAKVAVARELCGFVWALLRTQECYRQATGGAASKGSTACAT

SEQ ID NO: 488148 - protein, 333 aa, unidentified
MHMLSPSNLLWIGVDVSKATFDAALWGHQDFQKMATAAFPRTEEGVRAFRTWALAHGGDAVGVVMEATGCYSQELARWLQRDLPGSRVAIVNPSLVKAFGRSLALRNKTDRLDACMLARYGQERAPEAWMPMAPERAELRDLIRTRAKLVRLQVTIRLRLDDALGRIGSPAGKAQQKVLKVLQGQVEALDKAIDRQLRQVAELGHAVELLTTIPGVGKVTAATLLGEAGDLRSFRRGRQLAAFVGVSPRRYDSGSSVRGRTRMCRIGGVHARTVLYMAAVSASRTATPLGDFYRHLVNQGKPKKSALGALMRKLVLVMRAVLIQDKPYSPLPA

SEQ ID NO: 488149 - protein, 416 aa, unidentified
MTREGIENLASILPEGDLTIGIEASGRIDHNLTAWFGQWALACQRKRSVKIIRINPGQSARFGGPKPRRDQTDGSDSQHIAEFTRVYALRLEQFNYDRKVQWLSRLVSERQRLVEDQTATKNRIHEQLLVCFPEFVQIFKDPFSKLAQAVLREVPTARCAARRQALSLARVKAERKGASLGIEQARQLIKLAERSIASAGEDHDGKALIFLLDELDLIGSRLDSIKNAFANYVEEGKSKIGTDSDKGPSTARQIELLDSMPGMALISASSMVLGTRGIGRFCSGKALSAQWASCPERVQTGTSLNKTKLTKRGDHKRRAMLYLNAQTACMHDPAFAFHRWRMIQKGLTPQQAVCAAMNRMARISWTLVAKNQLYDINHMIDQIKIHHADLWKTFVRLHQNDRKLWKKVEPKHRKIA

SEQ ID NO: 488150 - protein, 360 aa, unidentified
MHTQRTELNFEGQNVFVGIDAHLKSWTVSILTDHLFHKTFTQPASAEPLYNYLERNFPGGVYHSVYEAGFCGLWPHYKLKGMGIDNIVVNPADVPTSQKEHLQKDDPTDSRKLARSLRSGDLKAIYIPDPSTLEDRSLVRMRATLIKDMTRFKQRIKSFLYFYGIDYPQKFEKSGSHWSKRFMKWLNEGVSLQYDSGTQALKILVQEADQQRKLLLEVLRKIRLLSRSEKYAKSIVLLRTIPGIGFITAITFLTEIEKIERFENTDHFAGFVGLIPDRHSSGEKDNNGEMTFRGNDILRRSLIESSWMAARFDPALMMSYHGYIKRMEPNKAIIRIARRVLNRMYFVLKNNVEYVSGVVK

SEQ ID NO: 488151 - protein, 338 aa, unidentified
MDKYAMCGIDVSAKQLVVVVQREGRNQPARSFANSRQGHKELKRYLAGAGSRLRVCLESTGLYGLDVALFLHADTRFEVMVANPRAVKNFAQALLERSKRDPIDARVLAEYAARMPFQAWQPPSPAALSVTALARRIHALTESATREKNRLHALSATATTLKVLVADLKRSLQSMAQAQARLAREARKIIAADALLERRFRLLLSLPGVGQTSALQLLGELALVPVDAEVRQWVAYAGLDPCERTSGSSLAKRPRISKVGNRHLRRALYMPALTAAHHHPAFGSYYRALQERGKCKMVALVAVMRKLLHAVFGMFKHDALFDGARVCPSLALPTSVAA

SEQ ID NO: 488152 - protein, 339 aa, unidentified
MKYTPVGVDIAKHVIQIHFINEHTDEVVDKQLRRQDFLTFFGNREPCLIGMEACGGSQHWARELTKLGHKVRLLQARFVKAFVMGNKNDVMDARAIWMAVQQPGKEIAVKTEEQQSVLVLHRTRMQLVKFRTAQINALHGTLLEFGETIHKGRAAMEREFPEALERMKERLPPYLIMVLENQYNRLNELDSLIEDIEKQLTSVARQNETCKRLLDIPGVGPLIATAAVATMGEASAFKSGREFAAYVGLVPKQTGSGGKVRLLGISKRGDTYLRTLFIHGARAVALVAKEPGPWITELKKRRPASVAIVAMANKLARTVWAITAHDRKYDRNHVSIRPY

SEQ ID NO: 488153 - protein, 413 aa, unidentified
MISVGIDISKDKITVCALEQGSKIIWKPFDVSLKKTEVEKLLNKLEKLKEEVKITMEATGKYHLPILYELKDRGYFVAVINPLKMKQYCRALNFRKAKNDKIDAKQIAEYGLMYWKELEEYKVDKDNYKILKELNRSYQHYMELRIDQMNYIDQTIHQTFPGIKKLIPHNSGNFSKDKLLDFLEKWWHKDLVLEKTEEEFIEEYKRWAKEKRYHPNANKAKAIYQLAEDSISTQPSHNSKIETNIREGINLIKQINQILNRILSQMIEISEPLEEYKEAKKFSGISEKLAVQIVAEFGDLSKFKNKKSLISFIGIDAPPYESGNFKADQRKISKRGNAILRKVGYQAMKCMMSAKNPENEIYKYMIKKEKEGKAKKVCKFAGLNKFLRIYYARVMELKAQKQELKVAQNLKLH

SEQ ID NO: 488154 - protein, 394 aa, unidentified
MKIFVGLDVAKEVHWACAIDQDARPVFSQAVNNDPDGIAGLLSEIEALDADEVTVALDLLGGIATLVCAMVAAAGFRLVHTPGLSVNRARQGMRGGENKSDPRDAATIAELARTRPGLRTVDAEREIDINIRLLIGRRRELVQDQTRRLARLRDLLSSLFPALERRIDVNTKTGLAFLSLHAAPHELRSARAASVAKKVIRTGPHLRGVLQLAEEAIALAKAQPLDVPGAATRARLVRDMASEALSAREARERIDREVADMLADHPDAALIQSLPGMGVVLTAELIANIGDIRRFRSADALAAAAGLTPVLRQSGKSYAIRRANSGDKALKRVFYQSAFVALGHPESKAFYDRKRREGKRHNQAVIALARRRINVVWAMLTTRQPFTENFKTAA

SEQ ID NO: 488155 - protein, 343 aa, unidentified
MQIRSVGIDLGKTTFHLVALGDNGEVLLKKKFTQKQLIKFTANLQTSLIGMEACSGAHFLGRALRAQGHDVKLIPAQFVKPFVKSNKNDFIDAEAIAEAVDRQNMRFVPIKTDDQLDLQALHRVRDRLMVRRTSVINQLRAFLLERGMVFAKSPIRLREAIPEVLENANENLTPRLRNLVAMLWSEWKHMELQIQEMNEEIERIASSDAACCRLRQIPGIGPLVATAIVASIGNGAAFRKGREFAAWMGLVPKQHSTGGKTKLYGISKRGNRYLRKILVHGARAVVLRSKRNRIAMGPWLTSLEMRAPRNVLIVAMANKLARIAWAVLSSGQDYKAIPGAIPA

SEQ ID NO: 488156 - protein, 352 aa, unidentified
MIVLGADMHKGSHTVAAVAAATGEVLGEKTVAVSERGFVAVLDWVHSLGEERVWALEDCRHVSGSLERFLLVSGERVIRVATKLMADARRAARSRGKSDAIDALAVARAALREGLDALPAAQLAGPELDIRLLVDHRERLVRSRVAINNDLLWHLHDLWPELRLPGRALVSKKWSTAIGRRLARAEQTARVRIARDELRRLRELTIAVDALEDEISELVAEVAPHLLSEPGFGPLTAAKLIGEIAGASRFSTEAKLARAAGVAPIPVSSGKTNRHRLDRGGNRQLNATLHRIAITRARCHPETKAYLDRKRAEGKSTREAIRCLKRHLARRVWHLLQPPHPALETPPSPSIS

SEQ ID NO: 488157 - protein, 338 aa, unidentified
MKVYVGMDLHATNTYIGMVDEENTVLHKQRYRNELPLILSGLDPFKKDIQGVVVESTFNWYWLVDGLMDQGYRVHLANVSAIKQYEGLKQIDDKRSAFWLANLLRLGILPTGYIYPKEERPTRDLLRKRLQLVRHRTSHVLSVKNILARNLGLRMKSEDVKRITDPEVRRLFPDREMQTMVLSSVGLIRHLEDQISTIEAMITKKLRVRKEFTKLMTVPGIGKILTLTIMLEVGDIHRFPTVGDYSSYCRCVKSIRTSAGKIIGYGNRKNGNKYLSWAYIEAAQFARRFHETVRTYYEKKMAKTNRIVAIKALSHKLTRASYYVMRDQVDYDPARLFA

SEQ ID NO: 488158 - protein, 427 aa, unidentified
MNIDEATRYADFCQFRTEIRLSKNYLIVGIDVAKDKHHAFFGTATGRTLLRRLLFDNNRSGFEQLITRASQLGVEHGLSRIVYGLEPTGNYHKPLADWLIGNGQMLVLVSSKAIADNRQTMDGRWDKNDTKDSANVADLMGQGKCQFFEIPDLAMVQVRNLLSLRRRLKRDEHALRMKIRNGLVTKYFPEFDRHWGSSLTENLAIVRWCLDPRKISSMGFEDFVRQVTRTDRGLRQHKRLKRIYEAAALSIGCRIDEAAEFEARLLVDRLEVIREQMQSTETEIKQICLGFASYRRLLTIPGFGPYVASIVLARIGDPHRFKGRKQVIRLAGYDLNAKRSGKRSKDAVPVISKRGNSELRYALYQAALIATYHNDRFRALFTRYLKGREKERGIKTKMRVKLAVKMLVIAWTMMKTDSAFNPSLIEV

SEQ ID NO: 488159 - protein, 313 aa, unidentified
MSQNTMTTIHTGLDIAKLNLQLHLAGRIHDLPNTAAGHRRLFKLLATQPGVHVVCEATGGYERDVVAALHAAGVPVSVLNPARVRHFARATGQRAKTDDIDAAVLTAYGHALQPKPTAPRTEQEQQLAELIRRRVQVVEVLVGQRQQTERLTLPALRRQAQSLVRRLERDLEQIEAQLHALRVQATVLDARVQKLEAITGVGTITALGVLAELPELGTLNRRQAAALAGLAPHPRESGQWHGRRSIGGGRAPVRRALYMAALVAARSNRQLKAFYQRLRAAGKPAKVALTALMRKLIVLMNHILKNPNFALQN

SEQ ID NO: 488160 - protein, 402 aa, unidentified
MNAVGIDVSKGKSMVAIMRPFGEIVSAPFEIKHTASDINSLVELINSVEGESRIVMEHTGRYYEVLAHQLSVANLFVSAINPKLIKDFDNDSLRKVKSDKADAVKIARYALDKWQNLKQYSVMDELRNQLKTMNRQFGFYMKHKTAMKNNLIGILDQTYPGVNTYFDSPARSDGSQKWVDFASTYWHVDCVRKMSLNAFIDHYQNWCKRKKYNFSQSKAEEIYGKAKELVPVLPKDAITKLIIKQAVDQLNSASTTVESLRTLMNETASKLPEYPVVMAMKGVGTSLGPQLMAEIGDVSRFTHKSAITAFAGVDPGVNESGTYEQKSVPTSKRGSADLRKTLFQVMDVLIKTHPQDDPVYQFLDKKRAQGKPYYVYMTAGANKFLRIYYGRVKEYLSSLPES

SEQ ID NO: 488161 - protein, 331 aa, unidentified
MNIIGIDVSKSKLDCVLICSSRPDKELEKRVTNSEQGISKLIDWCTRKANCDPSQIHAIMEATGPYHEPVALALFKGGCKVSVVNPAQIKHYGQGLGRKAKNDKQDASVIARYGFKEKPRLWQPDPEEYRHLRALLYRLDAVESDIQREKNRLEKAQAAQSPPVISQSIERSIEFLEEEKARLEKQIKEHIDNHPHLKKDKELLESIPGIGPVLSSWMSLLLRNGQRFDAAPQAAAFVGLTPTEHKSGSTVFKKPQLSKVGPSIYRAKLYMPAIVAIKHNPDVKDLYQRLLAKGKTKMAALGAAMRKLVHICFGVIKNQSPYQPQIAPLGG

SEQ ID NO: 488162 - protein, 356 aa, unidentified
MSKNITADQGITIGLDLGDKHTQCCSLDDSGEVEETFCVRTTAPALSKRFGSIVPCRIVLEVGTHSPWVSRLLSELGHEVIVANPRRVRLISANDSKNDAVDSELLARLGRADPKLLSPITHRGQQAQKDLVLLRNRDGFVRSRTQLINQARGFAKSLGDRLPSSSAVAFPKRVRAAKKDQLFSGLETLLQVIDTLTVAIGDMDRKIERLSRERYPETMLLRQIKGVGPLTALCFLLTLEDPNRFKNSRSVGAYLGLRPKQRDSGEQQPQLRITKSGDEMLRRYLVTASHYVLGPFGPDTHLRRVGLRLAEHGGKAAKKRAIIAVARRLAVLLHRLWVTGEEYQPLGYGTAGSKAA

SEQ ID NO: 488163 - protein, 330 aa, unidentified
MQYCIGVDISKNSFNAAVFDGEKILEDMVFEYTPAGINGFYEHVKNMDCLVVMEATGTYYLRLAEHLHYYGVKVSVVNPLVIKRFSQMRLMRTKTDKADARIISRYGYSEKPDTFIPDTDNVKKIKLSAQLIQDLIVTRTEYKNRLHALENETIDTGQFVGHYLALIETINNEIKTLENSITGLIKQEYPEEYEKVMAVPGVGQRTATVIFGYLKGFKNFESAKQVISYIGTNPVEHRSGTSVKGKSHISKKGSRYLRGVFYMSAVAAFQFNPACRIFYLRLRSEGKPFKFAVIAVINKLIKIIFAIVKHKRDYDPEFHLKNLQKNMTFA

SEQ ID NO: 488164 - protein, 390 aa, unidentified
MSSSPAVAAASTIYLGLDVHKDSITIAVLPNEAKAPTRLERLPNDLPRLKRFLDRCARDGALAACYEASGAGYVLHRAMREWGYACTVIAPSLIPQRAGVQRKHDKRDACDLARLFRAGELTPARIPSEAEERVRDVVRCRETFQREILKSRHYILKFLARRGFVFRDGTNWCTPHLRWLEHLTSETSPLAPADRLVFREYHALLAYKLQRRDELDRQIEHLALTPALAGAVARLQCFRGISLHGAMVLATEIVDWRRFERPGQLAAYLGLVAREYSSGDRERKGSITKAGNSHCRHVLVQAAWTYHYRPHLSVEIQRRQHGQPPAVVTHAWKAQQRLHQRYQHLAFRKRPQIAVVAVARELVGFLWAVMQDLPQDLPQDLPTAEGRTIA

SEQ ID NO: 488165 - protein, 412 aa, unidentified
MKRIRARVAGLDVHRDTVVACCQVQQSDRSVEVTKQAFPTTAKGLGELAAWLRDAGVETVAMEATGVYWKPVYYCFEGLFDELWLCNAQHVKNVPGRKTDLTDAEWLADVAAHGMVRPSFVPPPAIRELRDVTRYRKTQVEARIKEIQRLEKTLQDAGIKLSSVASKVWSQSSRAMIEAMIDGERDPKVLAQMAKSRLRAKIPELEEAFSGRFGSHHALVCRQVIDHIDFLDRSIATLTADVTQRLCPFEPAVTILCSIPGVSRTTAEVMIAEMGIEMARFPTSGHLCAWAGVAPASHESAGKRHPAGTRKGSTWLQRALVEAARGASRTKGTYLSAQYSRIARRRGPNKAAIAVAHSILDVAWYLLTDGALYDDPGSRFFQLRHDPAVEARRLQRRIEDLGFKVSITPAAA

SEQ ID NO: 488166 - protein, 423 aa, unidentified
MKPLATHQFSAYVGIDWADTKHDICLQVPGNASREFDCIAHRVAAIDQWAQSLRQRFGSPIAVALELAKGPIVYALQKYDFLVLFPINPSTLAKYREAFKPSRAKDDPTDAELALDLLMRHPERFAPLQAQSEDMRALLSLTEQRRELVADKTRFTNRLTHTLKQYYPQALDWFDQRDTVLFCDFLTRWPTLTQVKRARPSALKAFFYAHNGRRAHLISARLDAIKAATPLTQDLGVIAPCRLQVLVLVEQLRTTLQAIERFDREIAELAPRLPDYSLFRDLPGAGPHLAPRLLAAFGEDRRRFQRADELQKYAGIAPVTERSGKKSWVHWRWQCPTFVRQTFVEWAGQTINKSFWAAAYYRQQRDKGSSYQAAVRSLAFKWIRILYRCWQTNTPYDESRYLNALKKRRSPLLKNLDLGAQNA

SEQ ID NO: 488167 - protein, 331 aa, unidentified
MKNFYIGADVSKKTLDLVLYNADKEKMRASYIKITNDKKGVDELIKWMKEHKIVKSKAIVCMEYTGKYSFCFAELLETKKIDFVLVPALKIKGSFAGARGKSDKTDAERIAAYAFRYRDELAPTSLKDDRIVRLRDLMNDRKLAVKHAAAYKTIMTEYKERKSSPRYKRAERMVSEYKKQISAIEKEIKGVISGEENMKKNYDLVTSIPGISFVNAVNLIVFSGNFVLFDNGRKFASYSGVAPFEYSSGTSVNRGTHVSKMANRMLKADLSQAAKAAINFDPWLKEYYERKRKEGKSFGCVLNAVKFKLIVRVFAVVKRGTPYVNIMKYSA

SEQ ID NO: 488168 - protein, 386 aa, unidentified
MQASTASTPITGPISTIFVAIELSQKSWLVTVYNPDKDKMSRHKVDGGDHASLLALIDRVRDRAARKLGAVPAVACCYEAGYDGFWLHRLLMKAGITNYVIDPSSIAVDQRARRVKTDRIDGEKMLRTLMAYLRGEPRVARMVRVPTPEQEDARRATRERDRLVKEQTAHTNRIKALLRLNGFAVGNPRRRDWLTQLAEQRDWQGQAVPPRILAEIEHEHARLMLVRKQLDALERTPAAADPTPAAAEMTRRSKLLQRLKSLGPAFATTLTQEVFFKDFCNRREVASYFGLAPSPWQSGGIDRQQGISKAGNPRARCSAVELSWLWLRHQPESELTQWYRARTLNASKRIKRIAIVALARKLMVALWRYLTTGLVPAGAVLKSVEA

SEQ ID NO: 488169 - protein, 393 aa, unidentified
MRYLGLDVHRDFCEVAICERGRARSVGRIASTRDALELFAASLAPDDRVVLESTGNALAIATILRGHIADVVLANPMQVRAISHAKVKNDRVDARTLAELLAADLLPRVWIADEPTRVLRRLTSRRTQLVRQRTRTKNEVSAVLVRNLIARPEVSDLFGKAGRHWMATLVLPVDERHTLDGCLRQIDFLGEELAVIDRAIAEHVLASSDMRRLLTIPGVDATTAATMMATIGRIQRFPTPRHLVGYVGLDARVRQSGNHPARHGRISKQGASAARHVLVQAAWAAIKTPGPLHAFYRRVKARRGAQIAIVAVARKLAILIWHLLTKQRDYAYQRPQLVARKLRRLELQTGAPPRRGQRASHPNTDPAALQRARLAEARYADLTSNWQTRPLRA

SEQ ID NO: 488170 - protein, 420 aa, unidentified
MKAYNVDNFAVLIGMDWADKKHDICEHPTGTNKYHYTVIKHTPEALHEWAMDIKQRYPEQKIAIVCELKKGPLIYALAKYDHLTLFTVNPCAVAKYRQAFTPSGAKDDPSDAFVQVEILTLHMDKLSVIEPESAAMRTLSQLVEYRRSLVQDSVDLSNKITATLKNYYPQALEWFKEKDTYIFCDFIQKWPSLTAVKKARKQTLLDFFESHNSHYSTVNNARLDSIKNSMPLTLDEGVIVPNQMLVEVLITQFKVLLKGIEKLDKAIKSAYKAQQDKKIFDSLPGAGPQLAPRLLVAFGSNRARYNDAAELQKYAGIAPVIERSGQKMWTHWRYSCPTFLRQTFVEWAGFSIRYSFWAKAYYEQQKAKGKPHNSIIRSLAFKWIRIVFRCWKTNTPYDESTYLAALKRRGSPLLKFAVNS

SEQ ID NO: 488171 - protein, 339 aa, unidentified
MATRKAFKTAVSHVCGIGIDISKSGLELCALSQTDTETESVSLVNDVSDIHWLSTTLKKGGYEGKIIMESTGYYHWLCAVILTEAGLDVRLVNPLLASKHHKSAIRGSKTDQMDAYRLATMAITERDLPKPWEGDRQWVEYRHKVGILCAIDKTLQQLKASLGAHQDALKIMGVTSDPMVEQWREHIRSVRRTYEAQRKALGEALGRLSDGEDYERIASITGVSGYAAGLMCLLLRKDVRSDRAWVAFAGLDIRSRESGQWTGRGKLSKRGNAHLRKVLYQTAWGLKQNDPGFKAYYQRLRDQGRPYVECLLMVARKFLRVCFILIKTQQQYNPDLLMA

SEQ ID NO: 488172 - protein, 384 aa, unidentified
MKNDNILFIGLDTHKEQTQVSYTLDHRTAEVNDLGRIQTTKSGLVKLARQLQSKYPHATLHFVYEAGPCGYWIYRLLTSLGHCCFLVAPSLIPKKPGDRVKTDKRDAQNLARLLKNNDLDPIYVPEPEDEAVRDLSRAREVAMRDLNDAKHQLKSMFLRNNIRYKGSDNWSLKHIRWLTEIVLPHPCQQIVLQEMIQSISERMARLQRLDNELTHQVKQWRYYPVVKAIQAMRGIRLLIATGMIAELGDLSRFDTPRKLMKYVGLTPSEHSSGNTRKLGSITKCGNGRARRLLVEGAHSYRHAAKISKEMQLRQEGLPKEIIDKAWEAQMRLCRRYERLIMRGKPRNVVITAIAREMIAFVWSISREVVLPRIDPKTRLSRVPA

SEQ ID NO: 488173 - protein, 457 aa, unidentified
MGRARARGIPAQLVEDEEYQLRYEKVAGIDIAKAKGDVCTRLPPARGGGRRRSKVEEVPATARDVLALGARLLEDGVELAVMESTSDYWRLWYYLLESLGLAVRLVNSSQARQLAGRPKTDRLDAQWLARLAEMGLLRPSFVPPPEIRALRDLTRTRLQLVRDRTREWQRLEKLLEGALIKLSSAVHSLARVKTARLILEALAGGQRDPKALAALALGPLAGRRAELEQSLEGMALGAHHARLIRVHLDHVTLLDRSVAAIEDDIAAALAEIPAAQGVAADGARSPDPGPGAAVLPAGQRLAEIPGVTLDLARAIIAETGLDMSVFPTPAHLVSWAGLAPVARQSGPRARKPKKGQGDGYLKCYLTQAANGAGKTDTFLGQRLRRLAGRLGGSRAHCAVARSILIIIWHLLADPAARFTDLGADWHTRKNSRDKKIRGHIRQLQALGLDVTVTETAA

SEQ ID NO: 488174 - protein, 415 aa, unidentified
MKNQNREVSVTAMGLDVHYKFSTVTMRGGDGKVVARERLEHRDREALRRRLAQWPKGVPVVLEASFGWGWLSDEMVAAGLDVQLSNCYKVEQMRKARDWAKTNKKDADLLSLLPAENEPWWRTWLAPPDVRDRREWMRYRADLVEVQTATKCRICAVFHRHGIFHDYSDLFGGKGRAFLAELCREGRHAAGVLPAGALAALRGQVRLLDQVRGQLADLARKLREDMDRDELTRRLSSIPGFGQILSNVLKAEVGQIERFGGCHNRLAAYSLLGPRANETGEQDPTKTPLGRHLGHRGNRTLKWTFIEAAHGAVRRGGRFRAMFDRATKGGTMDRNRGYIRVARELVKVVTAVWKNGTCYQETPPARPGSFRAAGAGEHIKTHGRRMNRKQAEQFFGSTRPGTGQLYHPMVPAAKA

SEQ ID NO: 488175 - protein, 400 aa, unidentified
MQSKAEARVSEPQGDVGRVIGLDMHPDSFTAAALEGHNAMDARVLWVHDNRPQEGLEQWAQQHVEPRDLIVIEASGNTFHTVKRLCACGCNAVVLEPLRASQVRKAYCTTDKISAVKLARVYFSGLAVEVWIPDEKTRERREVLFAHRRAVQDTTRGRNRIRSWMNQFSIRRRKGLKLTDPSGRQWLMEQRGWNPTQRLLIDQMFTDLWQAEARRKTLRQVMAEAVAADPQLLKLNRLFGVHVIAAYAVAAIIGDVHRFRTPRKLTAYLGFSPNTNRSGLGKHDGGSSPWGCGEVRRILIQAAKAILRYQHDSPVQRWGLALACRKGRNLAAFAVARKLVTAIWYLLKGFFSPLTEPTLLLRRKLEELGEEIGSKRLADLGFENSGIFRDRMMKILLGTA

SEQ ID NO: 488176 - protein, 391 aa, unidentified
MICVGIDVAKDKHDCFILNSEGAVLVDVFTIANNLEGFNTLLDKLRACSTPQDSIKVGLEATGHYSYNILGFLLDNGLSTYVLNPLRTNLYRKSLSLRKTKTDRVDARTIAAMLLSDAGLKPYTDTSYHNEELKSLTRYRFDKVKERAQLKQSVSRLVCILFPELEKLVPTLHMASVYALLSEFPGARQIADAHLTRLKTLLTDASRGRYGRDTAVDIRDAARCSIGSRMPAKSLELQHTIRLIRELDAEIEEIEAAIQAIMEELHSPITTIPGIGYRMGAMILAEVGDFSRFDSPDKLLAYAGMSPSTYQSGQLKNCYPHMEKRGSRYLRYALYNATKYVCLWDPAFAVYLAKKRAEGKHYNVALSHAAKKLVRLIFALEKSRQPYCPAV

SEQ ID NO: 488177 - protein, 387 aa, unidentified
MTEQSAAAPSATAFAHDSTLVLALELSGKSWEIGAVLPGVARRPRRQLTLRDMTGLLKQIERWKAEALRAGSTVQRTVLCYEAGRDGFWIARYLLAHDIEVQIMHPASIPVERRGRRVKTDRIDIDMLLRTLLAWLRGEPRVCSMVRIPSEAEEDMRRPERERERLVSERVALENRIENLLCLHGVADFKPRLKKAAARLDELRSYTGEPLPPRKMDELKRMMVRHGVLSDQLKAIEVAREQVVTAAEPDHAAQQIKMLALLYGLGLGTATGLTREVFCRTFHDRKAIASFVGLTGTPFNSGGSEREQGISKNGNPRVRRLLMQLTWRWLRFQPDSALSCWFAERTAGAKGRIRKIMAVALARKLLVALWRYVETGEVPSGVRLAAA

SEQ ID NO: 488178 - protein, 339 aa, unidentified
MKFAGCDLHKQTITICVVDQSRRVLERRTVRCGEERTILAFFERLGEFEAVVEATASYEWFVRLIEPVAHRVLLAHPKKLRVIAESTRKSDRLDAQILAEFLALDMIPTSYRATPRQHEHRRLVRQRGGVQRRLTSVKNRLRRILCDYNADRPSLFTVDGLAYLAQVPLLGADRFAVDQIVEELHFGRRQLLAVNARLKEFAEAAPLCEQEARTLLRTIPGVGFVTTEVVLAELADIDRFGSQKRVVAYAGLSPGQRESAGKSRELHLEKNGSTLLRSTLVEAAWRLVQHSLRWRRIYERLKLRVRAKKAIVAVARRLLCLMTAILKTGQPYSLSQQPT

SEQ ID NO: 488179 - protein, 399 aa, unidentified
MTAVMIGVDPHKGSHTAVVIDPAERQLGTLQVRASAVQAAALVEWAAAWPERTWAVEGADGLGHLLAQQLLAAGEHVLDVQPKLGSRVRLLSSGSSNKTDPNDARSVAIAALRAPVRKIVTADDHPVVLKMWSKRHRDLARLRCQAACRLHATLCELIPGGVSKKITTPRATALLASLVPDGTVAAARHDLALAQLADLRRIDDQLRQTRAKLTAAVRASGTTLTVIFGVGPVIAATVLGDVADVARFPSADRFAAYNGTAPIEVSSGKRKVYRLSRRGNRRMNHAIHMAAVTQIRNRHSDGRAYYDRKLKEGKTPREALRALKRRVSNAIYQQLLADARCAAAAAAGPGGQPGNGSASSATGSHPARQLFGSATPRPDHSLRRPASPAAALRKPRQAT

SEQ ID NO: 488180 - protein, 428 aa, unidentified
METPTSNSEVVAWIGLDWADQAHEIRLQAVGSERIESCRVEQKPEALQAWVAQLRARFPQGQIAVALEQSRGAVIYALMHYDFLLLYPVPPKGLARYREAFFTSRAKSDGRDADLLLELVRSHRDRLRVWHPDDALTRQLRLLVEHRRHMVDDCTRLTNRLTALLKTYFPQALDWAGELSKPAACEFLSQWPSLEALQAAGRSTWRRYYRRHRRLSAEELDQRLNAIAQAQPLTRDRALLEASVLMTGGLVEQLRILLAIVQRLDQKLEELFDQHPDQRIFASLPGAGKALAPRLAAAFGTDRQHYQNVQELQQFTGIAPVTEASGKMRWVHWRMACPKFLRQTFHEFANASRKKSRWAEAYYQQRLQQGASHHAAVRALAYKWIRILFRCWKTSTPYDESVYLQALKRRHSPLWLATISLSMQEAHA

SEQ ID NO: 488181 - protein, 419 aa, unidentified
MVHPKMKWTYIGVDSHKDTHCAVFLDCFFGKIGEITFNNLPSEFDAFLSEAQKHRIGGTAFAFGLEDTSAYGRALNVFLTRKGQMVKHVNAAHVASERKSGNILQKTDSFDAECAARVLISRFDSLPVSDPQDKYWILGGIVARRNSIVKINVALKNHLHALITDNYPKYRQYFPDLATKSALTFFENYPSPLTLQGMTADELLEPFRSAFNNRFTLEKAAALLAHVDKSGFTASEYQAQKDFTIKSTVRQIKANLYEITEIDKMLADFLKNFDYKLTSMKGIDTVTAANLIAEIGDIKRFSTASKLAKYAGVAPVTYASGKSDWQFANERGNRKLNRIFFRLALTLTMVSGKGDKIANHYFYDYYRKKQAEGKTKKQALKCLEHRLVNIIWGMMKNNTEYINPPLLDKPKEETAEPKP

SEQ ID NO: 488182 - protein, 315 aa, unidentified
MHSEATFVGIDVSKDQLDIAIRPGEARFRESNDDSGIQALIVRLLSFKPQLILLEATGGYEILAAASLRQAGLPAHIINPRQVRDFARSSGRLAKTDKIDAAILAHFAEALKPDLRPWPDEQQQELAALMSRRRQLVEMLVMEKNRLAMTYSPRVRKSLQTNLQSLKEQLKELEQDLDDFIRQSPIWLKKAQLLQSVPGIGPLTCQSLLAWLPELGTLNRKKIAALVGLAPFNRDSGQMRGKRTIWGGRARLRPPLYMATLAACRVNPAIRAFYLRLVAAGKSKKLALTACMRKLLIILNAILKEQQPWCHQASV

SEQ ID NO: 488183 - protein, 367 aa, unidentified
MSESIVAYRSFVGVDLHKCTVTLVAVGPDGQVIAKLKISTKCVKKIAAWLLDLPGPRWMAVEACPFVEWFIDAFRDCVERIDIADATELANLRGKRRKNDPNDARDIAQRLARGECPLGFIADEELTQLRKLGRHWRQLSRVLARAKHCMKSILLAANLRGPRFDGASAQRWILAHGHRLKPAQHRAFRDFLEVVQLVELQRGPLRQAILEAVRSERFAPLIELLESVPGIGNIWSTIIAAEIGPFDRFPNADALEFWAGLTADLKESAGRTQSGHITKAGSATVRWALCKAAVTLCRSDPKQEAVRQRLVKRIGKPKANVAMGRRLLRILYAMVREGKPYQRSGSTRHTAAANQARLARKRRKEAA

SEQ ID NO: 488184 - protein, 417 aa, unidentified
MFKIFRKNCCGLDVHKSWIYACIGITDTNGRTEYKQARFSSFSKGLRELADWLAKFSCTEVCMESAGKFWIPVFNILEKTCFVTLAHPKYTKPQKGNKTDRKDAKWICDLFMCDMIKPSFIPSPVIRHLRDLMRYRFKITNMLTGEKNRAQNCLTVSNLKLDDVFSDVFGKSARSITTYILDHPSEPFDVAPFVNGRCKTPIEEIQDAVDGAISPEQAVKLRQCLAHIDELENHKREIEQAILLLVQPFSAILDLLRTIPGLNSNPMTAIAILSEIGPDMSVFPSSKNLVSWAGCCPRNDQSGGKVKSTRISRAGCYLKPLLVQVANALLKSKEHPEFQEKYHRIKTRRGHKKAIIAVCKMLLTAIWNILHKQEPYTPEGFLEHRPVNESKVLTKAQALELLRKRGYTITDESPVIT

SEQ ID NO: 488185 - protein, 418 aa, unidentified
MRMHKRTYRARKIKDLKMADLLNLVRGQRVVVTTDVAKTDMVSSIELWDGTSATLVKWRNPFELREFVSLVLTVGREAEEVECVQEPTGTYGDPLRVALQKAGLPVYRVSPKHVHDLQEVYDGTPSSHDPKAARVIARVHREGMSSLWTEHSPELTTKYRRYEWFMDEQTRLRGRVEARLARHWPEVNELLDLDSTTLLRLFERYGGPAAMAAAEADARSLMSSTGRGLLDKGKVEAVLRSAGETVGVPVTKEEAEELQLLARESLRIKEALRAEHQQLGAAGEGTPGIQDMKDVVGPATAVVIFALLGAPSGYGSAGAYIKAAGMNLREHSSGKKKGQLAISKRGPGPVRHMLYFAVMRLIQKDPLFKAWHERKMARCSPRQGKKSIIALARKLMGALWHVGQGVPFDSTRLFAQSS

SEQ ID NO: 488186 - protein, 411 aa, unidentified
MDVFCGIDWAEDHHDVALVDAGGQLLARLRITDDAAGLAALLELLAQHGDSGQDPVPAAIETPRGLLVACLRATGRPVYPVNPMAVARYRDRHSVAGRKSDKGDATVLANVLRTDRHAHRPLPADSELAQAVAVLARAQQDAVWERVHAQNKLRSHLREYFPAFLAAFGSARGGITRPEARAVLAAAPAPADAARLTRARLASLLRKAGRQRGIEAEAARLHAAFGQQQMRQLPLVEQAMGRQALALLRQLDAACQSADDLEQAATESFNQHPDAGIITSFPGIGALTGARVLAEIGDDRSRFKDARGLKAYAGAAPVTRASGKSRSVTQRKVKNNRLAAAGYTWAFAALTASPGARAHYDRRKDAGDRHTAAQRNLFNRLLGCLWHCLQAGCHYDEATAFPARQAAQAAA

SEQ ID NO: 488187 - protein, 460 aa, unidentified
MRRWPTERKKISARLVEDEEYQLRYERVAGIDVGKGKADVCTRLPPVREGGRRVSRTEEVTSTVAEVAALAERLLADGVELVSMESTSGYWRIWFYVLEAAGLNVQLVNSSHARQLAGRPKTDRLDAQWLARLTEMGLLRPSFVPPAEIRALRDLTRTRLQLVHDRTREWQRLEKLLEGALVKLSSALSSLARVKSARLILEALAGGERDPRTLAGLAAAQVRAGRAGIEQALEGMRYGDHHGRLTRIHLDHITFLDRSVAAVEDDIAAALDAIPAAQGIDAAGARSPDPGPGATVLPAAERLAEIPGMSLDLARAIIAETGLDMTLFPTAAHLVSWAGLTPVARQSGPRSRKPGKGHGDSYLRGYCTQAATGAATTDTFLGERLRRLSRRLGGNRARCAAGRSILVIIWHLLADPEARYTDLGPGWHARKTDTDRRTPSLLNQLRALHPDSDITIAPAA

SEQ ID NO: 488188 - protein, 322 aa, unidentified
MAMLSFGGIDVSKDRLDITVLPDEQCSSVSNDAAGWAELVEQLRGSSITAIGVEASGGYERGVVRALLAANLSVRQINPFKLRQFAKASGTLAKNDRLDARMIASFVAIMPTRPAQRQAPMIEQLAAMLTVRRQLSDHKVATENASKLLEDSMLRRLSRRRVARLTADIELLDQRLVEIVTADAALAYRFRLLTSMPGVGAVLACTLIALLPELGQMSRKQVAALVGLAPYDFDSGKLKGRRCIWGGRARVRHVLYMAALSASNWNPELKAFHDRLEATGKKPKVVIVAVMRKMITMLNAMLRDGTTWVDRYNGRRSVPTAR

SEQ ID NO: 488189 - protein, 346 aa, unidentified
MTENHYIGLDVSARTVNLCVVDHSGQVVHEAKLTSEPEEIAQHILALPFIVYRVGLEAGMLSQHIFGTLAEAGLPVICVETRHMKAALAAQMNKTDRHDARGIAQMMRVGLFKEVHVKTPTSRRLRAILTARQLLRNKLQDVENEIRGLIRDFGYHLGKVTARDFEPRVRELTADTDLHVVTDTLLAARRGLREQFGRLDDLLVKLARQDELTRRFMTVPGVGPLVALTFRATVDVPTRFMRSRTVGAHFGLTPRKQQSGEVDRSGRISRWGDAMMRSLLYEGAQVLLTRVKRWSALKAWAMQVARRRGHKKAIIALARKIAVILHRMWIDGTEFEWGERRQPASL

SEQ ID NO: 488190 - protein, 360 aa, unidentified
MAKTKSVRPPFVVGGVDTHKDLHVAAVVDENNRVLGSDFFATTRQGYRQMLTWMASFGTVARIGVECSGSYGAGWLRHLQNAGITVLEVTAPDKMERRRRGKSDTIDAESAAHAAFSLIRTVTPKTRSGMIEALRVLKVCRKTAVAARRIALQMIQMNIVSSPDELRDQLRNLTRMQLIRTLAAWRPDVTAYRNVQDAYRIALKSLARRYLELHDEIADLDIMIASIVDELAPELIKRNAIGYESASQLLITAGDNPQRLQSEPGFAALCGVSPVPVSSGKTNRHRLNRGGDRAANSALHIIAIGRLRTDTKTQEYVAKRVAEGHSKMEALRCLKRYIAREVFTLLRNQNRQINSTQITT

SEQ ID NO: 488191 - protein, 400 aa, unidentified
MLSIGIDVSKGKSTVCGMKPGGEIVYTPFEVQHTREGMSELVSLLRGSGEEVRVVLESTGSYHCPVVAALLENGIFVSVVNSLRMKRFCSQSIRRVKTDQIDAMQIALYGLAYWQELQPTRLPENTYRELQLLARQYYQMTSLLIKAKVDFNALCDQVLPGMQELMSDHAGRHKLSDFVLRYHHTAHILKMGETRFRKDYCKWAEKKGYRNHERMAALIFATAQNGIPVLPDAPSTQIVITEAIRVLHTVEASRDAILTQMQALAKTLPEYSLVREMPCIGDTLAPRLIAEIGDVRRFHSKRALIAYAGIDAPPYQSGKFCANNRHISKRGNRYLRKTGYEVMQSYVMHKPANDPIFTFIEKKRSEGKSGKLAVVAGLNKFLRVYYGKVTELYRSLPAIE

SEQ ID NO: 488192 - protein, 398 aa, unidentified
MAHEVPAAGVAGWLANEEPPVRVLTAVWLERGTCTDDLKQECPRGPNSCETTEVLMTVIIGVDPHKASHTAVAIGHDESELGRTRVRATRKQVLQLLAWAQPLGARRWAIESAGGLGYLLAQQLVDAGEIVLDVPATLASRIRVLGTGRSDKNDPNDALSVAIAALRTPTLRKVRPADHAEVLRLLAKRNIDIGNHRTRVVCRLHNAVMELAPGGIAKELYASDAVALLDRIEPATPVEQARHDLAVELLADVQRLDAQLKESHRRIRVAVKASGTTLTDLFGVGPIIACYLIGFTGDVGRFTSRDQFAAYNGTAPVERSSGGRVVHRLSQRGNRRLNHALHLAAVCQIRQPHSDGRAYFDRKLTEGKTKKEALRSLKRQISNVVYRQLLSDANRTTP

SEQ ID NO: 488193 - protein, 418 aa, unidentified
MSRRDSNAVLSVVHHDCCGLDIHKDKVSAALLMTHEDGTIEENICEFGAFTEDLYRLKEWILEQGCHVVAMESTGVYWRPVHNVLEDTCQVILVNARHVKHLPGRKTDVSDSRWLASLLRHGLLKGSFIPEKHIRRWRDLARLRKTYVESLADYKRRVHKLLECANIKIDSVATDLFGVTGRNLMDLLISGDEITLESVIGCTRGRLKGKVGELFKSIKGFFTEHHRFQLVSILTLIESVEKQIAVVHERLSTLLSDRREKVDQLMQVPGISDVSAQALLSEIGDTLDQFQTAASLASWAGLCPGNNESAGKRHSGRSPVRGSIVKTIMIEITWAAIRKKGSYYREKYYSLRARKGFRKAIVAVAHRILNAVFHIIKFNRPYHELGESYLIQLNNKARLHNLHNQAAKLGYKLVSAQA

SEQ ID NO: 488194 - protein, 355 aa, unidentified
MDSVKYIGMDVHKEAISIAVLNSSGKLVMECVIETKAITILDFLKGLRGSLHVTFEEGTWAAWLYDLIKPHVTELVVCNPRRNALLKEGSKSDRIDARKLAELLRSNLLRSVYHGEQGVRKLKELARSYLAISKDLGRVMSRVKAIYRSWGIPCGGKQVYAQRYRSEWLGKIQEAGVRRRAEFYYQHLDALRPLRQQVRQELLAEAKKHSAWKLLRAIPFIGPIRAALLIALIQTPHRFRTKRQLWSYSGFGIETHSSAEQRFINGELRRAKKPACIRGLNRNHNHDLKNLFKSVATVAAAKAGPFQEYYDALVAKGIRPEMARLTLARKIAAITLIIWKKGARFEAQHLKPQTA

SEQ ID NO: 488195 - protein, 457 aa, unidentified
MMETKRRREQRSMLPVHPDAAAIDIGATVHVAAVGPARDPEPVRSFGTFTGDLHRLADWFAQCGIKTVVMESTGVYWIPIYEILEQRGFEVWVVNARDAKHVPGRKTDISDAAWLQRLHEFGLLRGSFRPQGAIAALRAYLRQRERLLDYAAAHIQHMQKALTQMNLQIHHVISDITGATGMRIIHAIVAGERDPDTLASYRDIRCHSSVETVRQALIGNYREEHLFALAQAVELYEVYQAKVATCDEKIEGVLERLKQPGRAPAKPLRAARHKTRQPNAPAFDARGALYAVLGVDLTQIHGLGPYLALKLISECGTDLSAWPSAKHFTSWLSLAHGNKISGGKILSSRTRPSGNRAAALLRLAATTVGRTETALGAFYRRLSARIGKAKAVTATARKIAVLFYNAVRHGMDYADPGASYYEERYRQRVLTNLQRRAKAFGYVLQPTEIKVVSMAVS

SEQ ID NO: 488196 - protein, 356 aa, unidentified
MDKVIREEAVRVGVDLAKRVIQVHAVDATGHVLTSRALPRARFIDWCVRLPAGCVVAMEASSSAHHWARKLIALGLDARIISAQLVEPYRMEGVSGKNDANDAAAICEAASRPKMRFIPVKSIEQQSMLCVHRLREGLKEDRTACINRIRGLLAEFGLVFPQSPRELQAALSDVLEDAGNELGTLARLTLQRAQAQWRELDDHLAWCDERIDAHRRSNPEVQHAATLIGIGPVTASAAIATVGDFKQFKNGAQFGAWIGLTPRQRSSGGKNNLGGITKRGDTYLRTLLIQGAKSAVMTAHRRQDKISSWVLALRERSGWQKAVVALANKNARILWAVMTRGDVFDPNHLSVKPTAC

SEQ ID NO: 488197 - protein, 376 aa, unidentified
MKVVYPVCCGIDVHKRFLIATIITTKDGELTPHYERKRFSTFNNQILALKDWLLEHNCYDVCMESTGKYWVPVSNLLEGELNVTIANPKWVRAVKGNKDDKKDSKWIAELFRMGLVSGSFIPPKDIRVLREFTRYRTRLVSQRSSEKNRLQNAFTVGNVAMDAVVSDMFGVSSKKVRDYLISTDHFNPDHILTLLHGRMRSKGQELIESVEGYSFTPEQIIRIRLIEEHKIYLDHTIELLDHQLNQMVQPYDSALQLLETIPGVSRQSAIQIISEIGVDMSQFSSSKKICSWAGLAPSSNESAGKKKSVKISRAGVYLKPTLVQCAHAAVRSTEKQPYYYKKYERIRKRRGKKRAIIAIARMMLTAIYHMLSTGEI

SEQ ID NO: 488198 - protein, 352 aa, unidentified
MQHFIGCDVHTRNQVVAWMEEETGEIKKRRLEHAGKEVKEFYAQFPRGTVVGIEATFPAYGFERLMGELGHELWVGDAARLRASEVRYQKTDPRDAEGLLDLLRTGRFPRIWVPSLAERDLRQLRVHRLKQVRARTQVKNPLHALAISQGVCRKRKLWSVKGRKELESLALLPWAVRRRKDLLESLDRLDAQVRELDRAVEEAGRARPEVALLRTHPGVGMVVARAFVLTVGPVERFRNRRQLVSYGGLNPRENSSGGRQRLGSISKQGNTRMRWLLVEAAQTAARLDPQLRRPYLRLKKQKTSGVAKVAIARRLAVRLFGMLRTRHHYTQLVHMSGSPSSAVVPPQGGPKV

SEQ ID NO: 488199 - protein, 317 aa, unidentified
MSKHITVCAGIDTSKRKLDVALEGKNERLQVANTPEGHERLSHWLQRQGVNRIGIEASGGYEFAVVATLRRQGFVVVVFQPVQVRAYANFHLQRAKNDKIDAALIAGCTREVKKIHAPPDPRLAAFAGPLTAIEQMTDDLTRLKTRRESCRDARLRQLWKEEISRLKKLQKAEFKTLVAAIRQHHDLARRLALINSVDGIGLPTAVAILVRMPEIGQITREQAAALAGVAPYDDDSGTYAGVRHIAGGRERLRGALYAAALPAAFRWNPQLIALYGRLTGAGKLHKVALIACARKLLIFANTVVARGTPWTPQAGAA

SEQ ID NO: 488200 - protein, 390 aa, unidentified
MHYVGIDMSKNSFNFCVIDNSEKVIKQGSFPVSKDGFTDFVNLISSFNNPIVVVESSSRYHLPLVYSLVSNNFPVYVVNPKAVSNFIKFKSPNNPSKSDSKDAFFISLFAKSESKNLKPYSPSDSLKLIARKIDSISKEIAKTKTQINQHIDVLFPELGKNVNFFSKAVLNLLLYYPSAFDISNATVDKINNFLYSPIGRKVSISADEIILLAKNSVGVNNVALKVSLKADIERLFFLENQLKELESVFTQMMRDFFCDDIEIVSSIAGISERLACRFIAEIEDISRFESAKKLISYAGTDPVVKQSGKWKVRMSISKQGNPFLRNILYQMATGVVMWNEIFREYYRRKYQQFKSRKKAMIAVVNKLVRVIFAMLSNRQFFNHPSLISNT

SEQ ID NO: 488201 - protein, 359 aa, unidentified
MPMLAEIIDAVVGVDTHRDTHHVEMAAPTGTPIATCSVSNDTSGYAQLLAWIHDHAPGPRLVVSIEGTRSYGIGLARAATAAGLLVLECEQPNRKARRGKGKSDPIDAHLAVLTALRLDTTRLPIPRADGDREALRILLGARHDLTVTSTAQINRLRALLRDGNDTDHQLARAALTDATLTGLARRRLPRDASREHAVRHAEVRRLALAIHDASRALKTNRAQLQSIVDDIAPGLTDRRGTGPVTAAQVIVSFSHPGRCRNDAAFAALAGTCPLPASSGRTVRHRLNRGGDRALNRAIHTIATVRMRDCPTTKAYIARRTAEGKTIREIKRCLKRYIARELYRTLTATMTPTTNAPVAA

SEQ ID NO: 488202 - protein, 353 aa, unidentified
MRIVVALDVHRRQITYKTLDRESGEVRRGRIVPATRGAVREWLEQFAGCEAEFALEGTTGWRFVVEEIERAGQRAHLADPAETAGKRGRKRRAKTDNADCDLQLKLLLAGELPESWIPPAYLLELRTRVRMRKVLIDQRTAWQQRLQAQLFHQGVAAGLKPRTRAGLEALAQAELSPAGRELVALALRMLETIDRELAPLDRALCAFARRQPGCRALIANLYGVGVISATAILAELGDCRRFTSSDDAVRHSGLDVTVHQSDSKRAAGHLSHQGPELLRWALFEAAHQSARRSSPDHDYYLQVAGRIDHNRACLSVARKLCRRAHHILRELGDQALAPVESEPQAEEAMQAAA

SEQ ID NO: 488203 - protein, 489 aa, unidentified
MARKKRKNKQGVCGNKKPLQVRNTTAKRRTPRRGGVPVDNAPPPIESLKQVNTNAAGIDIAANVHFVAVPKDRDAENAVRSFGAFTADLEAIADWLTECRIETIAMESTGVYWIPLFEVLERRGFDVILVEPSQIKKFRRKTDVLDCQWIQTLHTFGLLTGSFRPDDQIIVLRSYMRQREMLVKCAAQHIQHMQKAMEQMNLKLTEVVSDILGATGTAIIDAILEGERNPHRLAKLRNEKCKNDEATIALALQGNWRDEHLFSLHQAVDLYRYYHQKIVEVDAQIEAYMRQFEDKSGGEPLAKPPRSKQRSKTTNEPKFDTRTLLYEVLGVDLTSIDGIGAHSALQIVSEIGTNVDAFPTEKHFVSWLSLCPEANKSGGKKQKKGKSPTHRSSNRVAQVFRVCAQTLIQSKCALGAFGRRLRGRDGAASAITAIARKLAIIVYTMVKTGRPYKDVGSDVYNSRFQDKLVASLRRRAIELGYDLQPTLSV

SEQ ID NO: 488204 - protein, 421 aa, unidentified
MNFNIRRYKQMNAVGIDVSKGRSTVAILRPMGEVVQTPIDVRHNAVSLERLAYQLLALGEDTRVVMEATGRYHEPVARELHDHGIFVSVINPIAIHGYCASGTVRKVKNDRKDALKIARFALDRWTELREYTPMDTLRQQLKIFSRQYDLYMKSCVALQSNLISLTDKVFPGVNELFKSPQRADGHEKWVDFVTTFWHCECISMVSEKAFTERYQKWCRRMGYNFSRTKAADIYVESLGHIVTLPKNNNTRLLIQTAAKELTAMNELIAVVRGEMTRLAKELPEYETVHAMYGVGDTTAAQLIAEIGDIRNFSRRSALVGFAGVDPAVDDSGKNVGSSKPATKRGSPHLRKTLFQIMTIYLRLKPQDEPVYQFLDKKRSEGKPYYVYMTAGANKFLRIYYARVKECMAKLDASAEDSEAAE

SEQ ID NO: 488205 - protein, 378 aa, unidentified
MSKISKEAGRKKTTKDKPEMPMGIDVGDRFSHVCLVDNEGEVVERDCVRSTEAAFRRYFEGTARLRIALECGTHSPWMSRLLKQLGHQVIVANARKIPTITESESKNDDRDAEQLALMAAFNPKLLSPLEHRSLGRQQDLNLIQARAILVKARTMIVNALRGLVKSAGGRLPACSSESFPDRAAGAVPSTLADVAGPLVEQIARLNMQIKSIDQQIEKLAVKYPEIGTLRSAPGVGPLVAAAYVLTLDRPDAVPSSRSAGAFLGLRPGQSQSGDSDPQKRITRTGNTYLRSLLLQSAQYILGRFGPDSALRRWGLKLAASGGKRAKKRAIVAVARKLAVILHSMWRSGQRFELFPQPAQAQGLTGTSTATSQPTANQM

SEQ ID NO: 488206 - protein, 400 aa, unidentified
MRVVFGIDVSKVSSEVAILVNGEKVHGYTMSNDAIGFSRLLGDLKTVHKPEIIFEATGVYSRRLQTFLEDNGYAYTRLNPLEAKKQLDSLRVRKTDQIDAEKLAQSQFVLNRKPTYVQEEVYQNLRDLSRFYQNLTEDIVRAKNRLHKVLQVTFPELETILSTPTGEQYWNLVTAFPCKDFVLELSKDELSKSIRQSTSKRISDKRVAYLAEKLIALANQSYCAVKKTSPIMEEVRYYAKELLRLSEQRQAVLDEMVELAQPLPEYNILLSIPGIAETTATSIIGELGDIRRFQSANQINAFIGIDLRHYESGNFIAKEHITKRGNPYARKILFKCIHNIASASHTNPCHIADFYEKRKRQSRTTSTKPHTIASIHRLIRTMYYLITHNKLYDYTSTQNR

SEQ ID NO: 488207 - protein, 336 aa, unidentified
MIVGCDFHPSFQQVAVLDTESGELQERKLMHETGEAEQFYRGLVTPSLIGMESVGNSQWFVQLMERLGHEIWIGDAAQIRASYVRKQKTDKRDATHILKLLIEGRFPRIWVPDAEMRDQRQLLIHRHKLIQIRTRVKNELQHLMMNQGIQKKHKLWGVRGRADLEKLPLQHWASQRREDQLCLLKMLDHQTEQLDQAVAIAARENDMAQLLMTQPGVGPVTALAYVLTIGDAGRFRHSKQVASYLGLIPRESSSGGKQRMGAISKQGNRLLRVLLVEAANSAVRFDPQFRKEYAHRCHQKHRAIAKVAAARKLAVRLYWMLRTQTPYPNVVTSRAA

SEQ ID NO: 488208 - protein, 368 aa, unidentified
MPKTAIHSRLRNLKQENPMNVNHYIGFDVHKKSISYCVKTADGTITEEGKLGATHLAVREWAEKRREAWHGAMEATLFSGWIYDALKPYAAELQMGHPAMMKAIGASKKKNDRLDARKTADLVRCNLLPACYVATPEIRELRRMLRYRNVVVAQAVRMKNKMSGLLMEVGAEYNKQRLHGKEYFTELLDTIEAVPESVKDLLRLSRGALEMFQTTQQQLLAKLEKDPLLAKRVSVLKSIRGVGEVTALTWALEVGDPHRLCSVGNAVSYCGLTSALDASADKQRRGPISKQRNPHLQTVLVEAAKLAPRWNPQLAAVHAREVQRGHRNRATLEVARKLVAYLLAVDKSGKPFQIRTPATAEQEVETAA

SEQ ID NO: 488209 - protein, 345 aa, unidentified
MKITTVGIDLAKDVFQVHGVDAHGKAVLRKQLKRKDVVSFFANLEPCLIGMEACGSSHYWARKLAALGHTVRLMAPQFVKPYVKTNKSDRNDAEAICEAVARPNMRFVPVKTGEQQAVLSVHRARQGFVKARTAQANQIRGLLAEFGIVIAKGMGHIAKRLPEILEDGENGVPGMMRELLQRLGENLKEMDKQVGELERQIKLWHRENEQSRKLEAIAGIGPITASAYVASVGDAKSFKNARQVAAWLGMVPRHEGSGGKVKPGRISKRGDVYLRTLLIHGARSVIRQFERKPDQAEGWLKELLARRHKNIAAVALAAKNARIAWALLAHERSYESDYVATRPAA

SEQ ID NO: 488210 - protein, 456 aa, unidentified
MGHARARKIPAQLVEDEDYQLRHERVAGIDIAKAKADVCTRLPPARDGGRRASRLEEVPATAREILALAGRLLDDGVELVVMEATSDYWRIWYYLLETAGLAVQLVNPAHARQLAGRPKTDRLDAQWIARLAEMGLLRPSFVPPPEIRAVRDLTRTRVQLVRDRTREWQRLEKLLEGALIKLSSVVSRLARAKTTRDILEALADGQRNPKTLAALAAGQIKGGRAAVEQALDGMLLGEHHPMLIRVHLDHITFLDRSIAAIEDQIDAALDAIPAAWGIGADGVPSPDPGPDAAALTAVERLAEIPGVSRKLAMAIIAETGLDMTRFPTAGHLVSWAGLVPVARQSGPRNRKPKKGQGDAYLKGYCTQAANGAARTETFLGERLRRLSRRLGGNRAKCAVARSILVIIWHLLADPGARFTDLGPDWHNRKTDRDRKIRAHLRQLQALGLEVTITPAA

SEQ ID NO: 488211 - protein, 433 aa, unidentified
MLKINYMSTLFVGIDVSSKSNAVYAMDFEENKYISSSFGNNQPGADELAGMIADCMQNHKNLDTVIVCLESTSVYSVHIANFLSTCELLMPYKPCVFVVNPKTTANYRKSYIGMEKTDPADAFLIADFARVGRTKKLEPWRGSQFIALKRLTRHRMHLSECIAREKTYMVSNLYLKFSELQLLDGNDRPFGNIYGATSSAVLTEFLSPQEIIVLSEEELLAFLAKKSRNHISDISRTSELLRKAARDSYRLDKCMYEPLNVSLASSFNCIQAYQKEIKLIEQAIEKCINGMNPNAFLILKSIPGIGPVWASGILSEIGDITAFHSSDALAKYAGLYWLKNDSGDFTSEDNAVSKAGNPYLRYYLGEAANSVRRYVPEYADYYAKKHAEVSKHQHKRALALTSRKFVRLVFGLLVKNQLYTGEKLDTEYNNESN

SEQ ID NO: 488212 - protein, 355 aa, unidentified
MTIVAHAHPFVIGVDTHARNHVLAVLAATGEVIDTAQFPTTAAGMARAISWATRRTGGDQSALWVIEGVASYGAGLAAACEQAGFEVVEAARMNTRANRGVGKSDPLDAHRIAAAVLALECDQLRRPRMADGVRAALRVLVTARDHMTSERTATINALIALLRIVDLGIDARRALTGTQLLAVSRWRARDEDLGEATARLEAIRLAKRVVELDEQLAANSSRMTELVKASQATSLLDKTGIGPVTAAVCLTVWSHHGRVRSEAAFASLAGVNPIPASSGNTVRHRLNRGGDRRLNRALHMAVLTRMTHDPDTRAYVERRSAEGRTTKEIRRCLKRYLARQIYRTLSAAEPVHMPA

SEQ ID NO: 488213 - protein, 368 aa, unidentified
MSRQRTLLFSMELSNKIWRLCFTDGAKMRQKCIGARDTGALLQEIGRAKEKFALPASCGVISCYEAGRDGFWIHRFLAKNGIENRVLDPASIEVNRRSKQQKTDRLDASKLTRLLLRAERFAEKKAFSVVRVPGEEEEAAMRTYRERERLVKEIKGHVCRIKSLLNLQGLECNDPGKCRFAFLVDWQGRALCPPLIRELQREQQRLCLAKEQLAEIEHYQWQHLKKPQSRAEQQGKQLAQLRGVGLQSSWALGHEYFGWREFKNRRQVGACAGLVGTPYDSGDSRKEQGISKAGNRRIRYLMIELAWGWLRYQPGSALSQWYQERFGFGNRRLRRIGIVALARKLLVALWKFVQYGQLPEGAQLGGAI

SEQ ID NO: 488214 - protein, 434 aa, unidentified
MLGGNQEKLMSQNQPEIQYAAFVSIDWADQKHVWSLQEANSRTREHGEVGHMPEAIEAWIAQMSQRFAGRPIAVAVEQSRGALVFMLSKYEQLHIFPVPPAMTANLRKAFYSSGAKTDPADTDLLQDVLQMHREKLRRLSPDTEATRLIQNLVEERRKLVDEKTAQSNRLEAHLKIYFPQIPQWFGDVDSPLVCALLERWSALEALQKARPDTLRSFFRKHHCRKEELIESRIKAIGEAMPALKDRAVVEAQLAVVKVLVQVIQVLHQGIEDFNRQIQEAAEAHPDFFIFESLPGAGAVMAPRLLAAFGSQRERYRNAAEVQTLSGIAPVTESSGKSSWIHFRFACSKFVRQSFHEWAALSITQSQWARAYYELQCRRGKRHHAAVRALAFKWIRIIFRCSGSNENCVVRSACENCGGGVNFSDGPVEKIKLST

SEQ ID NO: 488215 - protein, 436 aa, unidentified
MIQAAIERCAGIDVGKKWLAVCMLVGPLDAEPRAETRRFGTNVSDLECLRDWLQENGITHAVMESTGSYWKPVFNILEEALTVYLANPHQVKPRKGHKTDNKDGHWLAHLLRHAMIQPSFIPPRPIRELRDLTRRRKKLIGAGTSEKNRIQKVLEDANVKLGNVLSDVFGVSGQLMLEALLEGKAGAPEIAQMAKRRARKKIPELVAALEKHRMSDHHRHMIRFSVEHMELLEKQIRRLDQEIEAKIRDIGLTKQWELLQTIPGMQAYSAATTLAETGADMQPFGDERKISSWAGVCPGNNRSAGKSKSSHTNKGNPWLRSTLTECAQGASKKKNCFLKDKFWRITTKHGGKRAPAVMAVAHNLLRFVFQVLSTGKPYQEKSAMPLEPQQRERMIRHHIRRLGKLGIPVHGPEPAPLRPRRRTTATKRGTSLAVST

SEQ ID NO: 488216 - protein, 351 aa, unidentified
MNKDIIVGMDLGDKTHEMCVLDANGKVIERRKISSTRKAVERAFREFSGAVVVVESGTHSRWVSQEAEKQGHEVLVGNARKLRMIWKSSRKSDVRDAEMLARIGRFDRELLYPIKHRGVESHCDLELIKARDLMVRARAGMINHVRSVVRSHGERIPKHSTDAFGRKAQLPQQLREPMEPLLQMIRDLTEQIKSYEYRIEQLNRASYPETKHLMQVTGVGHLTALAYVLTLEDPGRFKESRRVGAYLGLVPRRDQSGQTDKQLRITKEGDEYLRRLLVGSAHYIMGPFGPPCDLRKHGAKLMRTGGKNAKRRAVVAVARKLAILLHVLWRTGAIYDPHYNSKSKKPSVPAT

SEQ ID NO: 488217 - protein, 360 aa, unidentified
MIRQRTSVGLDVHARSVFGCALDGETGEVIERRMTPHHGEVLEWARSLPGPVSAVYEAGPTGFGLARALLAAGIDCQVLAPSKLIRPAGDRVKTDVRDARHLARLLHLGEVVCVAIPSQAQEAARDLVRAREDCRGDLMSVRHRISKLLLRQGIVYTGGEAWTGKHEQWLRQQRFDNFGQQAAFDAGFDAMLATVDRRDRLDRAIAEMAADSEFTDVAERLQCLRGISTLTAFGLAVEIGDWDRFTGRTIGAYVGLVPTEYSSGDTRSQGGLTKTGNGHVRRLLIESAWHHRRPYRPSQRLRRRWETVTPALRARSHAANRRLHTRWVRFDQRHKRPVIANAAIARELAGWCWSVAVLDG

SEQ ID NO: 488218 - protein, 342 aa, unidentified
MKQYVGLDVSQRETSVCVVDDTGKTVFRGKAKSDPGALTELLRKRAPHASRIGFETGAMSSWLWHELKRVGLPVVCIDARHAKAALSVRMNKSDENDARGLAELVRVGWYREVKVKSAESQATRSILVARSRLVEIRRDLENQTRSMLKEYGLQFSRSIGSQFRRKVWELVADGHPLRSLVQALLSVHEQVCCQQEKLDRQVRHLAREHEVTRRLMTVPGIGVVTALTFRHTIDDPSRFRSAANVGAYLGLTPRRKQSGETDINGRVSRWGDRLLRTYLYEAASVLLHRTKKWSTLKGWGMRLSRRIGLKKAKVAVARKIAVLLHCIWVDGSSFEWGNEKMA

SEQ ID NO: 488219 - protein, 353 aa, unidentified
MRKMLDYVLEGKHVFVGLEDSKRTWKLCVRSSGQIVAETSMPADYGNLQSYFEKRFPGCQIEVMYEAGFGGFWLHDLLVADGVECVVTPAHTVTQEKVSVVKTDKVDARRLARNLESGDYKRCEVPDRERREDRQVSRTINQLQKDITATKNRIRKFLDYHGLNAGFPAGVFRKGDYQRVKELRLDRSLQVSLQALLTMLDALEEIKRGLLVELKAISAKERYRQGIAIKASFPGIGWLTATRLTLEWGDLSRFADGKKLASYVGLTSSEYSSGEHVHRGRITGQGSGIVRAWLIQSAWRAISIDPVLLTKFQGVWKNSGSKKKAIVAVARKLTVRIHNLEQQGTPYEIGVIQ

SEQ ID NO: 488220 - protein, 346 aa, unidentified
MESYVGLDVSLKRTSICVVDRTGKVLCEGTVNSTPEAIVEFVKSKAAGAVRIGLETGPTSTWLWTEIKALGLPVICIDARHAKAVLKMQINKSDRNDAFGIARIMQCGWYKEVRVKGLDSHAIKAVLVSRALLVKIKRDLENQIRGLLKNLGLVIGQAKMNVFVVRATELIEHRPELVAAVEPLLKVREGVEKQITDLDRKVMRLARNDVQVRRFVTAPGIGPITALCYLATIDDPTRFKRSRSVGAYVGLTSRRYASGEVDWTGRISKCGDPMLRSYLYEAAGVLLTRVAKWSVLKAWGMRIAKRSGLRKAKVAVARKLAVILHRMWVDGTEFKWSSKEDATQPA

SEQ ID NO: 488221 - protein, 349 aa, unidentified
MSQDLNSTVAVIGIDIGKNTFHVVGLDDRGAIVLRQKWSRGQIEARLANMPPCLIGMEACVGAHHLSRKLKALGHDARLMPAKYVRPYSKGQKNDFRDAEAIAEAVQRPTMKFVATKTADQLDLQALHRVRERLVSQRTGIINQIRAFLLERGVAVRQGLRFLRAELPRILATPPDVLSARMVQVISDLAEDWRRLDHRIDDLSNEITLLARQDAGCERLMSVPGIGPIISSAMVAAIGAGEAFSKGRDFAAWLGLVPKQISTGDRTILGKISKRGNRYLRVLFVQAAWVVLIKPMSWERHGLKHWIDAARKRLHRNVLAIALANKLARIAWGVLAGSRTFEASKLQTA

SEQ ID NO: 488222 - protein, 414 aa, unidentified
MFAVGVDVSNGRSTVAVLQSKTKMILKPFEVPHTPEALGKLVEKLNSLGGETRVIMEHTGRYYESIAMFLNSAGFFVSALNPLLFKDYKEGISVHPVKTDKADAVRIAKFGLDKWDLLRQYEPMDTIRYQLKTLNTQFHLASKSKTAFTNNLIALLEQNYPGIRKHFSGPARPDGSQKWVDYVGTFWHLDCVRKLSLNAFTVRYLKFCRKHEYNFSEDKAAELYHHAQSTIALVPKSDISKLMVKEAVSQLNSVSRTLETYRAEMNRLASQLPEYQTVMEMYGVGPSMGPQLMAEIGDIRRFPQKNSIIAFAGIDPKKEDSGDKVSTTGKSTKRGSPYLRKTLFVIMDILIQLKPADDPVYQFLDKKRSEGKPYYVYMTAGGTKFLRIYYGKVRDCLIEKGLWDKPMIESGNPD

SEQ ID NO: 488223 - protein, 376 aa, unidentified
MTELTHGPIVRVGVDLSKRLYQVHAVDQWGHRVLAKSLSPERFYAWSATLPQGCLVVTEACGGAHHVARQLRAIGLDARLIAAHFVTPYRMAGKSGKNDANDAAAICEAASRPHMHFVPIKSAAQQGQLVVHRLREGYKQERNACTNRIRGLLTEFGLVFPQRPEKLRKVLAGVLEDASNELPGVVRLALERALLHWIDLDIQIAWCDERIAAHLRSDERVQRAAQLQGVGPITASALVATVGEFQQFRSAKQFGAWLGLVPSQNSSGGKTSLGNITKRGDDYLRTLLIQGAKSAVNTAAKRGDRLSQWLVQLKARVGWQKAAVALANKNARILWCVMTRDTSFDAGHVPPMPVQRQRPNGELQVAPDLAQLSAAY

SEQ ID NO: 488224 - protein, 326 aa, unidentified
MRTKLGVDISKRKFDVALLDAQGKFRSKVFANDAAGFSQLMDWIESHVQGGKSEAHACMEATGSYHEALAVFLHDSGVAVSVVNPLRVKRFIESEGIRNKTDNADAKALARFAHKHELELWEAPTLGLRRLQALVLRLQTLQDMRQAELNRLDVAHDSVRPSIQAMVDSLVGAIEEVTAQIKSSIDDDPDLRGRKELLQTIPGLGEKTIPQLLAYIGRPERFSSAKALVAYASLSPMIRQSGSSLNRSRGTHPTGHKELRQALFYPAMVAAKYNPLIAAFWARLKAQNKPGLVVVVACMHKLLAIAYGVLKSKKPFDPAHGTALAA

SEQ ID NO: 488225 - protein, 353 aa, unidentified
MMVIGIDPHKQSHTAVAADELGRKKAQRTVRARREGHRELIAWARELAPAGRLWAVEDVRHVAGGLIRELLAAGEQVVFVPPKLMAGERRGGRERGKSDPIDALAIARLALREEGQLPAARLDEQVLEVRRLTDYRDGLVAERTRVVNRLRWMVHDLDPELAPAPRSLGSGRARDGLEAGLRALPASAGQRIALSQLARITALSAEITQLEKDLAALVTVLVPELLATPGVAVITAAKIVGETGDIRRFRSPAAFARHNGTAPVPASSGTGSDGPQRLNRGGNRQLNAALHRVAVVQARCHPGAAALLERRGQDKHETGKASLRVLKRHLSDVIYRALNADAWRLDQPAPHAA

SEQ ID NO: 488226 - protein, 450 aa, unidentified
MKQVLEGLPVIRRAVAGIDLGSEQHWVCAPTVDQAGREIADFGATTPELIRMRAWLTERKVESVAMESTGVYWIATHELLEAAGFDVLLVDTRQLAQVPGRDKKTDPNDCEWLQRLHSCGLLRGSFRPQEEICMLRTLVRDKGTLVAESGDWVRRMQKSLDQMNVRVHRAVADIDGVTGMAILRAIAGGERDAHKLAKLRDHRCRKSEKEIAEQLTGHWREDHLFSLKQSLQMYDTILERIADYDREILRKLAQMQKQEVRDHAVPQLKNSAKAKAIQKRGEEPMREALYRMSGVDMTGIDAIGVQTVQVVLTEYGPDLSRFPSESEFISHVTLAPHRPMSGGKRLRKKRSKTSTRVAGALRMAALSLRNSSTALGAYYRKISRRAGADVAVFATARKLAVLIYRLLRWGQTYVDEGAEAFEKRYEQNRIKALEVKANALGYRLIQTSDV

SEQ ID NO: 488227 - protein, 347 aa, unidentified
MGTVLKQVLGIDVAQNELVVTFGRLMDDLAVDLVAHKVFKNTENGFCTLLLWIKKYRCPEVPLRFVMEATGVYHQKFVYFLDEKGYEVSVVLPNKISNYQRTLDVKTITDKSMSECIARFGLERKLDNWKRPKTAFRNLQQLTRERNQIVDERSVVKNQLHAHQVEAFPHEGSVNRLKARIVFLNEQESQIKKEIENEVVNDPEVSTSMRLICSIPGVGKLTAASILGETNGFELIRNKRQLVSYAGFDVIEKTSGTSVKGKTRMSKKGNVHIRKAMFYPALSAIKNNEHFKEFYKRIVERSGVKMKGVMAVSRKILELIFVLFKNGEEYRMDYEKNRVEAQLILTL

SEQ ID NO: 488228 - protein, 338 aa, unidentified
MNKISIVGLDLAKNVIQMHAISAEGSVEIRKKLRRSQVLSVLARLESCMVAMEACSGAHYWGREISKLGHEVRLIHPSYVKAFVKRQKNDAADAEAICEAAQRPGMRFVAVKSEERQASVMIFKVRDLLVRQKTQIINALRGHMAEFGILVPVGHQHVSKLIDKINDPTTDIPHLARLTCMPLVQMLNALGEKIREADLEISTRAKANDVSRRLMTIPGVGPLIATAIEALAPPMNSFEKGRDFAAWIGLTPRQNSTGGKTRLGRTSKMGQRDLRQLLIVGAASVVRWASNHGAPEGSWLAKMLAKKPRMLIMVALANKIARTAWALMKSGENYRQPA

SEQ ID NO: 488229 - protein, 383 aa, unidentified
MSSMIVDQDHVIHLAIELSHATWLVAARLPHAEKPRLHKVAGGDTTALLTLLASLRTHTAAKLNRTIGIVCCFEAGRDGFWLHRLLTERGIDNYVLEPTSILVNRRARRAKTDRLDAEGMLRVLMAYLRGDRKACSMVRVPTPGEEDDKHPHREREYLVRERIRIENRIEALLFTQGVRERPSLRSWERDVAALRTGDGRTMPRHLQAELGRLRRQLVFTLELIREVEAARDMAAETEPQEQTHRKIAALCCIRGIGSNFAAVLTREVFYRSFDNRRQLASYVGITPMPYSSGKIDRDRRIGRAGNPRARTTMIQLAWLWLRYQPGSDLAEWFRERVGTLAGRTRRIAIVAMARKLLIALWRYVETGVVPVGVAVDTSHTVAA

SEQ ID NO: 488230 - protein, 352 aa, unidentified
MTVTNLARSITGGVDTHLDVHVAAALDERGALLGVESFATTTDGYKLLLGWLSDFGPVELVGVEGTGSYGAGLTRHLQTERIRVVEVDRPNRQRRRRKGKSDPQDAISAAHAAQSGEANGEAKTRDGNVESMRVLRVARSSARKGRTQALNQMRSLISTAPEPIRAELRGLNVFHLLERASTYRPGAKRDVASLTKFSLRMLARRAITLEEEIAEIDSILKPLVKETAPELVASLGVGTDAASTLLVAAGDNPERLRNEAAFAHLCGASPIDASSGKQHRHRLNRSGDRQANSALWHIVITRMVYDPRTAEYIDRRTKEGLTKKEAVRCLKRYVAREVFSLLPHEKLGLDSP

SEQ ID NO: 488231 - protein, 408 aa, unidentified
MNVLFKRCAGLDVHLREVVACLRLMGRGKAKYEVRRFPTTTSGLLALADWLEEAGCTHVAMEATGAYWKPVWHILEGRFELVLANAAHIRAVPGRKSDVNDATWIADLLAYGLIRSSLVPPEPIAQLRDLTRTRKQLGREIVQHTQRIQKVLEDANVKLSSLISDVLGTSGRRILRALIDGESDPRRLAALGSERLKCSREELVEALRGRVTAHHRFLLAQHLRMVEDLERAVADFDARIEEHTAPFRAQLERLSAIPGISRTSAQVLLAEIGADMSRFPSAGHLLSWAGLCRRQDESAGKHRSTRLRKGAPWLKPVLVQCAWAAARKKNSYLQAQFLRLKSRRGPKKAAIAVAASMLTAAYYILRDEVDYRDLGADYFTRRDKARVAHRLAARIRDLGYEVELREAA

SEQ ID NO: 488232 - protein, 420 aa, unidentified
MKAYNVDDFAALIGIDWADKKHDICEHPKNTEQYHYTVIKHKPEALQKWAMDLKWRYPDQKIAIVCELKKGPLIYALAKYDHLVLFTVNPSAVANYRKAFTPSGAKNDPTDAFIQVEMIKFHIDKLSVIVPESTSMRALAQLVEYRRSLVQDSVDLSNKITATLKNYYPQALEWFKEKDTFIFCDFISQWPSLTAVKKARKQTLLDFFNRHNSHYETVNNARLLSIKAAVALTEDEGVIAPNQLLVEVLIAQFKVLLTGIEQLDKAIKQLYKKQQDKAIFDSLPGAGPQLAPRLLVAFGHNRERYTDASQMQKYAGIAPVIESSGKKTWTHWRYSCPTFLRQTFVEWAGFSIRYSFWAKAYYEQQKSKGKPHNSIIRALAFKWIRIVFRCWKTNTPYDESKYLEALKRRGSPLLKFAINS

SEQ ID NO: 488233 - protein, 407 aa, unidentified
MEKNEKRYIGLDVHKHYLIALGVDENLEVVLTARRVELSNLESWMRKALTKQDEIVLEMTTNTWQLYDELSAYAGSVTVVHPPYVALITRAQVMTDKIAASILARLLAKGLLVGVWVPPQEVRELRGLVAQRQKMTRLATQAKNRLHAVIQRHHLLPPEGNPFAKKNNGWWEALTLGRLEKMNLQSDLETLQFSEKQESRLQEELIDIAAENEEIGRLLHIAGFGVITAVTVYAAIGDILRFEDAKHLVGYAGMGTRVHDSGLTTRTGKITKAGRRDLRVALVEAAHVAANSHPHWKAELARLEPRLGYNKAIVAIARELLVTVWHVLARKVADRFAEPEKVSKKLLHIAYEVGKENRAGKSAAQFTRERMDALGMGQNLTSIPWGSKKPIPLPPSKLKGRSDVPNK

SEQ ID NO: 488234 - protein, 355 aa, unidentified
MQVIYERCCGLDVHKRTITACRLKWLGREWQKEIRQFGTMTKDLLMLSDWLVSEGCTHVAMESTGVYWKPVYNILEGQFELLVVNAQRLKAVPGRKTDVRDAEWIAELLAHGLLRGSFVPPPSIRELRDLTRYRSSLVRDRARTINRLQKVLEAANIKLGSVVSDIDGVSARLMLEALVGGERDTEQLASLAKGRLKEKHAQLVEALSGRLQPHQSFLIAEHLAQIDYLQGAIERLTAEIEERLRPFEQEIGWLDTIPGVNRRTAEVLWAETGGDMSRFASARHLASWAGMCPGNNESAGKRHNGRTRKGSPWLRHCLIEAAHGAAHTKNKYLSAQYHRLAARRRDLLFDRSGTH

SEQ ID NO: 488235 - protein, 423 aa, unidentified
MSERKSLELRVSVDVGSRRHSVAIGLPDGRVLEEFEIMHRPEGFQEFFSRIEKHQKAQGCGVAVAMEGYNGYARPLDSLVRQRGYRLYNINNLKLARFKEIFPGAAKKDRIDARKGLELFQLRDHLPLAKKVLQEVTGTPKENEILKRLTRRRRRLINERVRVVNNLQADLQAVCPGLLEITTEASNQWFLNFLLSASTLPQLARLRKSTLLTIPAVGRKYASLIQDWQKRAHFSSEVEWVGEMIHEDAQRCLELEEKIKTLGTKIEQVAKDSKIAKILLSIPGFGPVCTSELAGEIGTVERFGKEGSLALYLGMSTLDNSSGNYHGTKQPKHVNTRAKAAMMTALDRHRKYVPESQRYYEKKRSEGKKHNQAIRALGRHLCRIIYKMLTEEREYQIRPEKGNTKTKVSSRSCVKTKIRRPKF

SEQ ID NO: 488236 - protein, 363 aa, unidentified
MYDSTTTVTVGLDVHARSIRLAAVRAEELLEERTLPYDEEAVERALRRWPVVRCCYEAGPTGFGLHRFLVERGIDCQVVAPGLVPQRPGDKVKTDSRDARKLARLLAGGLLEPIHVPAPTLEAARDLVRAREDARLDRMRDRHRLSKFCLRHGRRLPGLSWGVVRRKWLSEQRFEFAAQQQTFDTYLHAVDLVDARIEQLERAIRETADEQPWSGLVARLRCLRGVETLTALALVAEIGDFGRFKRAEEFMAFVGLVPSERSSGEQRRRGSITKVGNAHVRRLLVESAWHARRRPSVGYRLARRQRGQDAVVIERAWRCQGRLHARWQRMAGRGKPQQKIVVACARELAGFVWAIANDQPLRS

SEQ ID NO: 488237 - protein, 368 aa, unidentified
MLTSIAPTFVGLDVHKDSISVALLRPGQDDPDQERIPNTPEEVRRLVGRWADPARVRVCYEAGPCGYELQRQLRSLGVDCVVIAPALTPRRPGDRVKTDRRDARKLCRLFRAGELTTIRIPPPDEEAVRDLLRLREDLGEDILRARHRLSKFLLRHGRVFRDTTNWTKAHWSWIRAQRFDLPLLERLRDEHVVAIEMRIAQRDQLDRELHAIALTLPYAAAVRRLSALRGVRTLTALTLIVEVGDFARFGSAAEFMGFTGLVPSEYSSGGRRQQGAITKTGNSHLRRVLVEAAWAYRSRPASSRERSSRRVDQPAAVLALSVAVEQRLYRRYWRIVQRGKLSQVAAVAIARELAGAVWALMRETPAAA

SEQ ID NO: 488238 - protein, 386 aa, unidentified
MAHSTNILPRSADYDQTLVLAIELSNKSWVLAAQVPGLSQTKAKRTIDPDKNDLLAAIDGYRTRAAAAGRSVKRVITSYEAGWCGFWLARWLMAHGIEVHVVQPSSVPVDRRMRRGKSDGIDAELLLRTLLAWLRGEPRVCSMVPIPDEADEDARRCVRERSELVSERVGLVNRIGAILATLGADDYNPLLQSRRRRLTELRTGLGDPIPPNALAKITRLLTRLELVLAQIAELELERDAAARTDAPDHAGKMIQQLISLRGIGVQSATVLVREAFVRRFANGKALGSYAGLTSTPYSSGGIDREQGIGKAGNRRLRTVMVELAWLWQRYQPGTAQVAWFRERVGSTGRRVRKVMVVALARKLLIALWRFVIDGVMPEGAVTKPSI

SEQ ID NO: 488239 - protein, 400 aa, unidentified
MRAVFGIDVSKASSEVAILVNGEKVHGYTMSNDALGFARLLGDLRTVHKPEIIFEATGVYSRRLQTFLEDNGYAYTRLNPLEAKKQLDRLRVRKTDQIDAEKLAQSQFVLNRKPTYVQEEVYQNLRDLSRFYQNLTEDIVRAKNRLHKVLQVTFPELETILSTPSGEQYWNLVIAFPCKDFVLDLSKDELSESIRQSTSKRISDKRVAYLAEKLIALANQSYCAVKKTSPILEEVRYYGKELLRLSEQRQTVLDQMVELAQPLPEYDILLSIPGIAETTATSIIGELGDIRRFQSANQINAFIGIDLRHYESGNFLAKERITKRGNPYPRKILFKCIHNIASASHTNPCHIADFYEKRKRQSQTTSTKPHTIASIHRLIRTMYYLITHNKLYDYTSTQNR

SEQ ID NO: 488240 - protein, 321 aa, unidentified
MPEATGPANAGLRVLGADVAKDAVVFHDNVTGRTWSVANSLTALSQTLSAYADYDWMVCETTGGYERRLLEAAVAVGPPACRADAAQVKAFIASHRGRAKTDRIDAAWLSRYGLDRAAELKAWRPPAPEREAFAELLRHRQDLLAQRVQTNNRRSAPGGARLQALLDEQIAFLTGQIRRVDMELAQVLEAAPDLGRDEQALRTIPGIGPVAARTLLALLPELGLLGPKQAASLAGLAPHPHESGQTRRRRRMAGGRTGLRPVLFMAALTAARAHPALSAVYQRLLLAGKPKRLALAAIARKLVVIANAVLRDTKAASAALT

SEQ ID NO: 488241 - protein, 381 aa, unidentified
MAPRAHTRFTYVSFLTRVVEVDGPTASCANVELLTTNERAAHMEFKRIAIDTSKHVFTLHGVDEQEKPQLRRELKRSQMVPFFSKLSATEVVLEACGGSHHWARVLGALGHRVRLIPAQYVKPFVKRSKNDHNDAEAINEAASRPSMRSVAVKTVDQQAQCIILKHREMLVGQRTQAINALRGHAAEFGMVTAKGTSKVAALLALLIAENGIPAAAIAMFEQMGAHIETLNNRILDLDAQLAALHKENALSQSLSEIPGIGVVGAITATLTVDPANFASGRHFSAWIGLTPKEKSTGGKQRMGGISKAGNERLRQLLVVGAMSVIRFAKPGSKSASPWLLKLLERKPRKLAAVALANKMARIIWAMMAHGEAYRRQPMATA

SEQ ID NO: 488242 - protein, 357 aa, unidentified
MTGVRIAQRTERVVVGVDTHADLHVAAALDPLGRMLGRLEVVTSTRGYAQLLKWAHPFSPTTTFGVEGTGAYGAGLARFLVHAGCEVIEINRPDRRARRGHGKSDPIDAEAAARSVLAGGPHCIAKRDHDRVGMIRTLRVARRSAIKMRTQVGNQMRALVVTAPDSLRHQLRDLPLDKLIAVTAAARPGTVTTPSAASKLALRSLAIRHQGLTAELVVLDRELGRLTLEVAPALCDLTGVGPDVAGALLVAAGDNPERLRSDAAFASLCGVSPVPASSGKTNRHRLNRGGDRIANNALWRIVMVRLTCDQRTTTYVARRTTEGLAKRDIVRCLKRYVAREVFHALLATAQASTRISA

SEQ ID NO: 488243 - protein, 355 aa, unidentified
MTSTKYIGMDVHKESVSIAVRNDAGKIVMECVIETKASTILQFFDGLRGDVHVTFEEGTWAAWLYDLLKPHVTKVLVCDPRRNALLQEGNQNDRVDARKLAELLHNNQLRSVYHGDHGLRTLKELVRSYLTITQDLSRVMTRVKAIYRSWAIPCTGKQVYGLNHRAEWLAKINEPGVHRRAEFYYQQLDALRCLRQQVRRDLLAESKKHPTWKQLCGIPSIGPIRAAELLGILQTPHRFRTKRQLWTYGGVGIETSSSADHRVLKGQLERKKKQVEIRGLNSNYNHDLKNIFKGAAIVAATKPGPFAEFYAELLAKGMRPEMARLTLARKIATIVLIVWKRGVSFDARHLKPQTA

SEQ ID NO: 488244 - protein, 425 aa, unidentified
MREYDTDAEAGTDQLPRRDAVFDTEDVGVFLGLDVGKATHHGHGLTPAGKKVFDKPLPNSEPKLRAVFDKLAAKFGTVLVIVDQPASIGALPLTVARDAGCQVAYLPGLAMRRIADLYPGEAKTDAKDAAVIADAARTMPHTLRSLELTDEITAELTVLVGFDQDLAAEATRTSNRIRGLLTQFHPSLERVLGPRLDHQAVTWLLERHGSPAALRKAGRRRLVELIRPKAPRMAQRLIDDVFDALDEQTVVVPGTGTLDIVVPSLAASLAAVHTQRRALEAQINALLEAHPLSPVLTSMPGVGVRTAAVLLVAVGDGTNFPTAAHLASYAGLAPATKQSGTSIHGEHAPQGGNRQLKRAMFLSAFACMNADPASRTYYDKQRARGKTHTQALLRLARQRISVLFAMLRDGTFYEPRIPEDVELAA

SEQ ID NO: 488245 - protein, 346 aa, unidentified
MIIVGCDFHPGWQQVAVFDSATGEIREEKLENGNGEAERFYRRLPSPARVGFEASGNTQWFEDLLDSLGHEVWIGDAAEIRASYVRKQKTDRRDAAHILKLLIEDRFPRLWRPSQAERNLRQLLIHRHRLVGIRTRVKNGLQHLMLNRGVQLKQKLWNEAGQRVLRELPLEGWAAQRRQDLLKLLSELNPQIAKLDQAVERAAYQHPRARLLMTQPGVGPITALAYVITMGDVTRFQRGKQVASYLGLIPSERSSSHRRRLGSISKQGNPFLRMLLVESVQTVCRLDEGFRKQYKHRCHRMKKGVAKVAAARKLAVRLFWMLRTNTAYPEIARIEGSPRHGVVGGS

SEQ ID NO: 488246 - protein, 342 aa, unidentified
MDYYAGIDVSLECSSVCVVDAAGKIVREDKVASEPEALISWFGSLGLALTRIGLEAGPLSQWLYAQMKLAGLAVELLETRHVRDAFKAMPVKSDRNDARNIAQLMRLGWFRPVHCKSLAAQEVRAMLTARKLVQSKLLDVENSLRGILRGFGLKVGKTTKTGFAGRVEELVKGHPSLELIAQALLRARAVLLAEFKGFEKRVHQTSRLHAHARLLMSTPAVGPVISLTFACAIDDPSRFKSVKQAGPHFGLTPRKYQSGETEYSGRISKVGDASVREALYEAAHIILTKPIKGCAQLKSWATRLAKRAGMSKAKVALARKLAVIMLRMLKDNMPFNPAAKAG

SEQ ID NO: 488247 - protein, 411 aa, unidentified
MELLVARCAGLDVAKDEVVACVRLPDGRGGRAQEVRTFQTFTSGLEALADWLTAEGVVQVVMEATGQYWKPVWYVLEEAGFELLLVNARHVKILPGRKTDVCDAAWLAELLEHGLLRGSFVPPAPIRELRDLTRYRKRLIQAHASEGQRIQKTLEDAGIKLDSVAAEVLGVSGRAMLAALVAGERDPGVLAELAKGRLRTKLPQLRQALRGRFGAHHALLIRLGVAHLEQLEASIVELDTQIDRVLAPFAAARDRLDTITGVGKRAAECMIAEIGVDMSVFPTAAHLASWAGRCPGNNRTGGKRRSGKPTKGNRWLGEVLIECAWAAARSRDTYLSAQYWRLARRIGKKKAAVAVGHSILVIAWYLLTDNCDYRDLGGDYFARRDTDRQRQRAVAQLQALGYRVVLEPLAA

SEQ ID NO: 488248 - protein, 359 aa, unidentified
MENQNNNLSFKNQDFYVGIDVHKKQWTICVTHMNRIIYKKTAIDPNAKTLAGFLNRRYPDGNYKAVYEAGFSGFQAARQLKELGVNCIVTHPADIPTKQKERINKNDRTDARKLSRSLSNRELQGIYIPQIVSEEYRYLARYRYNLIKDQTRIKNRIKSTLHQFGFKVPLSFEDRRWSGQFIDWLCSLRFETEYAQYAFNDQIRQLKQMRQQLTQTLKKMKKMVKEVRPMSSVYPYLLSVPGIGAITAVALLTEIMNIRRFEKTDQLVSFVGLAPCVTSSDEKQTQYGITPRRNKHLRSMMVEAAWKAAAIDPALTMKFGKLCRRMHRNKAIIRIAKMLICRVHYVWKNQKTYVKGVVK

SEQ ID NO: 488249 - protein, 344 aa, unidentified
MTSNDYIGLDIHKKTISFCAKAQDGTILDQGTIVARRDTLLAWAKARPRPWIGAMEATLFTGWIYDLLKPLAQELKVAHPAMLKAITAAKKKNDKVDARTIADLLRCNLLPECYMAPSAIRDLRRVLRYRNLVVRQATRMKNRIAGLLMETGTPYNKERLHGRAYFSELLGSLREVPRSVVELLQLSRGQLEFFATIQRRLLKGLCQNPDLSERVARLQTIPGVGEIMALSWALEVGEVKRLPSIAQAASYCGLTSAQHNSAGKEQRGPISKQRNKHLQTILIEAAKLAPRHNPQLAVVHERELQRGDRNQATLAVARKLVAYLMAVDKSGKPFAMRASGEEAA

SEQ ID NO: 488250 - protein, 394 aa, unidentified
MKLVGIDVGKNSHHFCVMDKENGEFNVTPTSFSNNKEGFDFLINSLKPYSKKSILLGMEDTGHYHVALLKFLLSNGYTVALINPKTTDLTRKMEGGITKNDKLDTITICDVLDTPERKKQYRITKVDRFDLYEQRQLTRHHHNLKEELNVYCNRLQKSIDLVFPEFNTLFSSKYGVVYMNLLKTFGSAEAIASTDIRTIRKCFEIKGKGNRISLTPEKLKECAKNSIGISSEVETIQIKHLVSQIMLIKEQIAEIDKKIEEFSITNNSPILSIPGISHFSGTSILAELGDIGNYSKPSQIIKFAGVAPYHYESSQYNAQHTGITKKGSKYLRKTLYQIILPVINNNPLFKKYYRLKISQGKGHRCAQGHCIRKLLRIIYHLLETGQSFDPALLR

SEQ ID NO: 488251 - protein, 347 aa, unidentified
MPVMIGVDPHKASHTAAVLDEHGQLIGQHRIAASVDGYQELRQWAGRWPQRCWAVEGAHGIGRALAQRLVGDGEQVLDVPAKLAARVRVLSVGHGRKSDPDDAVSVAVAARNAGGLRQVGVEDQAVVLHLLTKRRQDLVAARTQTINRLHRLLMDLVPGGARRNLTAKRAAALLDQVAPTSAPAVTRWQLATELVADVRQLEQRIAAVEARIKAGVAQANTSLLQLFGVGPVLAARFLGEVGDVRRFPTKHHFAAHTGTAPLEASSGQVIRHRLSRSGDRKLNHALYMMAMVQVRRPSAGQAYYRRKLAEGKSPKEALRCLKRRLSDAVYRCLVTDQQRHAAVAPSA

SEQ ID NO: 488252 - protein, 326 aa, unidentified
MQGKEASEQETKAKSNVGIDVSKCWLDVHVLPTDERRRVANSCAGIRQLKRWLLRLDIALVVIEATGKWHRHVHRSLVASAIPVAVVDPYRVRMFAKAQGVLAKTDRLDARVLALFAAVMEPSVRAPAPQDMAELAELVTARASAVEAQAALKNQLCTAESKFLKRQLGQRIVRAAKDITALDGEIRKRIQASEALARRYAILTSIPSFGFAVAATLIACLTEIGSLTAKQIGMLAGLAPIADQSGEREGVRVIWGGRPAVRRMLYLAALSAASANADMKVFYKRIRASGKPAKVALIAVARKLAVLANTLIREDRLWQHRAPKYA

SEQ ID NO: 488253 - protein, 318 aa, unidentified
MPESIVVGIDIAKKTFDAAIGVAGHTETFSNDDAGHDALLAQLAQRPVELVVMEATGGLERDLACALDAAGFAVAIINPRQARSFARAMGYLAKTDRIDAKALAELAQVISRHAERERFITPLPSPDQQALQALVARRRQLVAMHVAEHQRLSVCHAAAQKSIEAIILAIRAQIDDVEAALARHIRTHHADLANRLESVRGVGPATVASLIADLPELGHLSRRQISALVGVAPFNRDSGQMRGKRAIFGGRGQVRRNLYMAALAAIRFNEVIKCFYNRLVAVGKPKKVAIVACMRKLLTILNAMVRTGKSWDGSYHLA

SEQ ID NO: 488254 - protein, 408 aa, unidentified
MNPLYVGIDVSSKNNVIYLMLPNGDKHSSFSLANSHDGSTQLVKRIFTAMTSNNIDSVLIGLEATSVYGDNLVYFLKEDTTLASFDRKIHVLNPKQVNKFKESYNDLPKNDYVDAFVIADCLRFGRINKEVYMDDYRYKALQNLTRARYFAVTNLTKEKQRFINVLFKKYSTMTQEKVFSDTFSTTALAVYEKFESAETLAKMDLQELTAFIMEKGKNRFPDPDAVAKALQKAARSSYRLPKTVNDSVNQVLAISITSIRALESQIKAFDKAITKQMELLPNVLISIPGIGPVLSAGIMAEIGDINRFQNQAALAKYAGLAWQQHQSGNFEAQTTRMIHSGNRFLKYYLCEAAFSLVRCDKEYSRFYHLKYKEVNRFQHKRALALTARKFVRLVFRLLKDNRLYTSAE

SEQ ID NO: 488255 - protein, 337 aa, unidentified
MGSVQQFVGLDYHDEVVQVCVMDSAGKMLENRACQNDASEIIAIVTPHGQKVRGAIEACCGAANLAEELILRAGWSIDLAHPGYVARLKQSPDKHDFGDARLLADLVRVGYLPKVWLAPENIRELRRVVRYRQQLTKERRNCKLQIRGLLRDGRVPKPGVQAWTMKWRRWLEVAPQIHGKMRWVIDRQLRRLQFLEKEIRIVERQLAQMIKEDPAAQKLLTVQGIGLVTAATLRAEIGHFARFRTGKQLSRFCGLSPRNASSGQRQADAGLIRAGNPELRAVLIEAAHRLKRFDPRWRQLALEMRLRGKPANVITAAVANRWLRGLYHVMCALETAC

SEQ ID NO: 488256 - protein, 402 aa, unidentified
MIFINCLGIDISKSESVVAHYKDEVFVKELVIQNNQNGYRYLKNYIKHLDSLFILFESTGVYSRGMKHFCEIHKINYLEMNPLEAKFKTNSLRSWKTDKSDAHKLALLAFRMKDSKVQRHPEEIYFELRERARFHLEMEINQNCLKVELVETLHQTFPGLEKLFTNRYSKIALNIAKAFPHPDYVSILTHDELVEKVLHSTDKGISIKKAHKYAKKLIEIKNNSFPNVRKSSFLLQKVQYLCDKLLIGIEEMKAFNQEMIDLAKNTTEFENIISIPGIGELTATLLIGELGDIREFKTNKQLNAFVGIDIKRYQSGTSKSRDTINKRGNKKARRLLYLITMNILRGRNHYQSHIVDYYYKLREQPHGKPHKTAVIASINRLLKTIHYLIVNDKLYDYQKAPH

SEQ ID NO: 488257 - protein, 341 aa, unidentified
MNHYAGIDVSLECSSVCVVDANGKILREAKVASEPEALIAWFRSSGFDLERIGLEAGPLSQWLFAAMREAGLAVELLETRHVRKAFEAMPVKSDRNDARGIAQLMRLGWFRPVHCKSMSAQEARTLLTARKLVQSKLHDVENSLRGILRGFGLKVGKTTELKFAGRIEELVAGHPHLQVIAKALLAVRAVLRTEFEVFEKQVRKLARSDMRTRLLMSTPAVGPIVALTYASAIDDPARFKSSKQAGAHFGLTPKKYQSGETDYTGRISKIGDSSVRTVLYEAAHVMLTKPVKGCSQLKSWAMRIARRAGMSKAKVALARRLAVIMHRMLADATPFNAAAAA

SEQ ID NO: 488258 - protein, 433 aa, unidentified
MNIEPRYDLIIGLDRSDSKADLHLIDTRTGQRRSQTTATSPEALWEWLTQLRQEHPDTRVAICLEQPAVHLLPFLETYNWITLYPINPLTLLKFREAFVTSRAKDDAKDALYLAELLLAHPDKLKAWAPQDAPTRALQQLVFHRRCVIDERTGLTNRLQALLKQYFPQALVLCGEDLWRPLATRFLLKWSSLGAVKKAKAEILTQFYHLNGSRSAKLLEQRLALVDKAVPVTDETALIQSFVLRVQLICRELQLVVQTIKQYDRQIASGFAQHPDREIFASLPGAGPVLAPRLLATMGSDRERFSSAQNLQRYTGIAPVTKQSGAKRYIHRRYLCPKYHRQSFHEYAKESVLWCRWAAACYLDQRTKGKPHHIAVRALAYKWQRIIFRCWLSGKSYNDQTYEQALRKSKSHLVPILEKVQVGKNPFKNPTVKN

SEQ ID NO: 488259 - protein, 314 aa, unidentified
METKETDLVSFLYVGVDVHKDQHTAVATNCFGQTLFEKEINNSKEEFSELVSKIKILAENKKLKPVFGLEDTSAYGQRLALHLCRDFPVKVVSPVLVVRERKRLTHPEKSDSQDALGVARALISRISTLPDFSISKTSEISKGLKDLTVDREFLVKEQTRIKNQLHRLLHRAYNSEYRVKFKNPFAVRALAYWSKHPVPAELSGNILLKNQIRRKVKRLKNIKKEVVEIEEEMEILLDQTGQKLDTLNGCGLVSASAVLAEIKDIDRFNSPNALARYGGFSPGEKSSGKKYGTLRANQGIGNLIWLSTGLSCLN

SEQ ID NO: 488260 - protein, 307 aa, unidentified
MNPTATPYVGADVAQDTIAFCGPTAATIKNEPAALRAYLATLPKDAHLVCEATGRHHYALHQACAVVGRPLTVLNPAHARAFAHSLGKLEKTDALDAAILRRFGYERRPVATPPPSAAQQTLRDLLMVRSALVENIADHRRRDCLLVPAAQRQLRMIIRTLQTRQRAVEHQLAAWLETAPADCQDRVQTLCLVVGVGVLSALQLTAYLPELGTCNRGQIAKLAGLAPLPWDSGTGHGVRRIQQGRAPARRVLYQCAVVAARWNETLRPHYQQLRARGLPAKSAYVAVARKLLIYLNALLRPTPAPGA

SEQ ID NO: 488261 - protein, 325 aa, unidentified
MKYIGIDVSKATFVVAYSSEKSSKTCVFANTAVGIKKFMKTIDPSVHHCVMEATGNYSMLLVYLLSKAGYVVSMENPLKVKNFARTILSVIKTDEVDARLIAMFGERMQPAPYKIKDDALLKLKQKRTILRQLKKQLTANKNILESFDVLPVKDRSCERALKRTIEFLEKQIKAMTTELEAFSNEKFKEQLDLLTSIKGVGVTIATALIVATGAFTYFNSAKQLTRYLGLSPTYQQSGTSVKFRGHINRNGDPYLRSNLYLAACSSLRCNKECMAFYNRMKAKGKPAKLAVVAVANKLVRQAFAVVTNNTPYEDGFISKNNKSSC

SEQ ID NO: 488262 - protein, 355 aa, unidentified
MKRTAKYAGLDVHQATTVAVVREETGRVIARAILPTDATALPAFFRAMRGRVVVAYEEGTQAQWLYDLLVPLVARVVVCNRREIRRRGNKGDWQDAEELAALLHRGALRAVYHGGGARGAELKELARTYVTLVEDATRVMTRVKALYRARAIPTKGRAVYHARERATWLAKLPAGGVGFRADVLYRELEVLQALRAQAKTALVRAAHEDPAWAVLRTIPFLGPVRVALLLGILKTPWRFRTKRHLWAYAGLAVVTRTTAEYTLEGRTPVRRHRAPVTRGLNRNHHPLIKMLFKSAATAATARPGALQEFYQRLLGRGMREELARLTLTRKLAALTLRLWKTGEAYDPVQLTRSAG

SEQ ID NO: 488263 - protein, 437 aa, unidentified
MSEKKSVEIRVSVDVGYRRHSVAIGLPSGEVLEEFEIAHRPEGFAEFFSRIEKHQKVRDCEVAVAMEGFNGCARPLDAMVRRRGYRLYNINNLKLARFKEIFPGAAKSDRIDARKGLELFQLSDHLPLAKEVLQEVKGTPRENEVLKRLTRRRRRLVDERVRVISNLQTDLQAVCPGLLEITKNAGNQWFLNFLVSAPTLPQLARLRPATLRKIPAVGRKYAGLIEDWQKRAHFSEEVEWVGEMIQEDAQRCLELDEKIKALRAKIKEVAKDSKIAKTLLSIPGFGTICTAELAGEIGTIERFSKEGSLALYLGMSTLDNSSGKYQGSKQPKHVNTRAKAAMMVALDRHRKYVPESQRYYEKKRSEGKKHNQAIRALGRHLCRIIYKLLTEEREYEIRPEKGNTKGKVSPRSLIKTQIRKPKVSAKGKNNKIYQQST

SEQ ID NO: 488264 - protein, 390 aa, unidentified
MIYAGIDVAKDKHDCLITDSDGTVLYEPFSFSNNLIGFEGLCEKLLEYSGDLQTVKIGLEATGHFSDNLLEFLISKGLHTTVINPLHTSLYRKSLSFRKTKTDRVDAHSIVTMLRTERLKPYSQSSYHVRELKSLTRYRFSLVQDCAKLKSSYSRLCVILFPELEKIVPSLHMVSVYALLSELPNAKAIANCHLTRLTNLLSSASKGRYAKDKAVQIRDAAKDSIGTYSEVKSLEIQQTIQMIQVMQSQIAQVEAKINPIVDSLQSPIMSIPGISYRMAAIIVAETENFTNFGSAEQVLAFAGLEPSVYQSGQLVSTHAKMVKRGSKYLRYALFNAAKYVCHWDPVFGVYLAKKRSEGKAYNVAVSHAAKKLTRVIFHLVKSGQSFQRQA

SEQ ID NO: 488265 - protein, 330 aa, unidentified
MRKMTDAGIDVSKAVLDVAVRRDERVLETARFDNDAAGHKKLGRWLTKSGRTARVVLESTGTYSLDVALALQRTRGIAVMVANPRAIKQFMGALMQRSKTDLTAAVALRDYAIRMPFVAWVPPAAHVLELRGMARRIAALVVERTRERNRLHALQATAEASLVVCNDIEVNIRHLERRMALLADQAVALIGEHEAVQTAFELLVSIPGIAAHSAVQLLPELLVLPETMTVRQWVAHAGLDPRAHQSGTSVAKPARISKVGNAHVRRALYMPALVAVQHNAHVRAFFDKLIARGKTPLQAYVAVMRKLLHAIYGMLATRTAFVPAKFHAAA

SEQ ID NO: 488266 - protein, 428 aa, unidentified
MNTTSIKDFAATIGLDWADRKHDLWLCPAGQAKAEHLRLEQTPEALHQWVAKLRERFPNRRVAVAIETSRGPVISALIAYDFIVLFPVNPKGLKDYRAAFCVSGAKDDRTDAMLLEELVRLHRDKLNALEPDTGLTRKLAGLVENRRHLVDERTRLVNQQHSTLKTYFPLALDLLEDQMNTLLAAEFLVRWPSLAALQNEKPKVLRAFFYKHNSRNAPRIEQRIQDVPTAQLLTTDAAIIETAGALVSARAGMLRPLLKAIHHLDQAIAQAMDQHPDAAIFRSFPGAGPALAPRLLVAFGTNRERFGSAAEVAQFYGIAPVIQQSGNSKTVHVRYRCPKFGRQSFHENAACAFKKEPWARAYYDQHKHKHDDKHHPACRALAFKLIRIYFACWRDKRTYQTDLYVQALQNNGSPLHKALKTQPAPSCE

SEQ ID NO: 488267 - protein, 486 aa, unidentified
MTNQPKKQAGKLAEEKTQTVQGKRGRKRKGMCLEDRPILEPNAAGIDIGAREIFVAGPPDRDENPVRVFATFTEDLQEMARWLVSCRITTVAMESTGVYWIPLYDVLEQQGVKPCLVNARNMKNVPGRRTDWHECQWLQYLHSVGLLRAAYRPDGEVCAVRSLMRHRSDLVQMAGQHIQHMQKALTQMNLQIQHVINDITGVTGLAIVDAILKGERDPAELAKLRDRRIKASEETIRKSLVGNWLPEHLFTLKQSRQMFQYYQEQMAACDQEMEKLFSAFQPRLDPVERPLPPDRKKNQRGRKTGRRKKDVNPQTGFDIRTESYKLFGVDLTQIPGLMTMVLLLFSEVGRDMSRWATAAHFVSWLGLCPDNDISGGRVLWRGKRKVQNRAGQLFRLAAHSLHADQTPMGYYLRRMKSKIGPKAATTATAHKIAIIFYTMVKNQVEYDATLWAQRNAQREKRFEAQLKRQAERLGYKLVPLEKKPAA

SEQ ID NO: 488268 - protein, 431 aa, unidentified
MNYNQNEKIAQITSQTLIIGIDIAKFKHVARAQDYRGMEFGSPCYFDNTKPGFQMFLDWINQLKLEQHMEKVIVGMEPTGHYWLNLAHILKENHIKFVVVNPLHVKKSKELDDNSPTKNDVKDAKVIAQLVKDGRYAEPTIPQGVYAELRVAKKIRDLLTEDLQTVQGQIHNWLDRYFPEFLTVFKSWEGKAALQFLRLGALPHELNHFTDQYLLDHLRKAVSRSVGLNKIIELKQAAVETIGLRQGADMAKLELATLLDKYDLIHEKFVELDSEIDNLIEHIPGVQQMLAIKGVGRDTVAGFFAEVGNLQDYSHPRQIIKLAGLSLKENTSGKHKGQTKITKRGRKKLRALLFRVCMIMVAKNSAFKALHAYYTQRRDNPLKKMQSLIALCNKLIRIFFAIGKKQFEFSEERMLKDIPHMRVNIEVEKVA

SEQ ID NO: 488269 - protein, 345 aa, unidentified
MAYYTGIDVSLRSVSICVVDDKGEVCLEAKVAAEIDAIVERLRRFSSDVKLVGFEAGTLTQYLTYGLQAAGFEVICLEARQVSVTLAAMRNKTDRNDARGLAQILRTGWYSRVHVKSLHSHQVRALLASRKAILTKCVDLENELRGLLKVFGIRLPSRVGHGSFDAELRETVSSDEMLACALVPLLDARTVLYKTYLKVDNAVKGLVRVDPICRRLMSIPGVGPVTALTFKAAIDDPNRFKSSRTVAAHFGLTPRRFQSGEVDNPGHISRAGDADVRSALYIAAHSLLTRNAQWSTLKAWGVRLAKIRGHRRAVVAVARKLAVILHRMWVDGSEFRWGSPAPTAA

SEQ ID NO: 488270 - protein, 369 aa, unidentified
MKDTLKFVGLDVSKDKIAVAIADEGRELPRYYGMIPHTPEAIKKLIKSIGDPHTLRMCYEAGPTGYSLQRLLQSLDIQCEVIAPSLIPQKPGERIKTDRRDSIRLAQLYRAGELTPVYIPNSDDEALRDLVRAREDAKEDELRAKHRLSKFLLRNDIKPPKGVNKWTKKYRDWLDKLTFERSSLRVVFQEYYHQIKELEQRILRYEEEVKVQANEGVHAPMIQSLQALRGIALITATSLVAEVGSFRRFPTAGHFMSYVGLIPSEYSSGDRRQQGEITKTGNRHVRRLLVESAWSYRYKPAVKGELKKRQNGLSPAIQGISWKAQNRLHNKYFRLLSRGKESGKAITAVARELAGFIWAVTQEDKNALK

SEQ ID NO: 488271 - protein, 420 aa, unidentified
MELEALRPSVFCGIDWAEDHHDVALVDVGGAVLARLRIGDDAAGYTRLLTLLAAHGDTTGRPVPVAIETPRGLLVACLRAGDRKVFAVNPMAVARYRERYSVARKKSDALDAAVLAHVLRTDMDAHRPLPADTELAQAIAVLARAQQDAVWDRTQAHNKLRSVLREFYPAILAAFVDKRDGIMRPEARAVMTAAPTPAAAARLTKTQLVALLKRAGRKRGIEAEAARLRVVLRAGYLHQPQLVEDAYGRQTLALLRLLDAACTNADELETAATASFARHPDAAIITSLPGLAALTGARILAEIGDDRSRFADARSLKAYSGAAPVTRASGKSRYVMTRKVKNQRLAAVGYLWAFSALSNSPGARAHYDRRRKTNERHTAAQRNLFNRLIGILYHCLQTGQAYDEQKAFQISPTAAVAAAA

SEQ ID NO: 488272 - protein, 438 aa, unidentified
MFHPSDDYYPGRSWRNKCMEQLTPFAALIGIDWSDAKHDICLVETATGTQELSVVKHTPESLNEWARALRSRFGGAPVAVCLEQSRGSLIYALLKYDFLTLYPINPQMLSRFREAFTPSRAKDDPTDAEYLVELLIHHRERLKAWMPDDERTRTLQLLVEHRRRLVGDQTRISNRLTALLKGYFPQVLQWFPDIRTPMVCDFLLRWSSLDALHGVRRTTLEKFFREHKSQRTETIEKRLAAIKSAVGLTTDVAVINSSVVMVKALASQMKTTLVAIKEFDREIEALCCAHEDFELFSSLPGAGKVYASRLLTAMGANRERWATASELLCFSGVAPVIERSGKSSWTRWRYFCPKFTRQAFVEYAGESIRHSEWAQAFYLSQKAKGKSHQAAVRALAYKWIRIIWKCWQTREKYSEARYVECLRKKGSKLVAESIDAET

SEQ ID NO: 488273 - protein, 453 aa, unidentified
MKKQELSFQVINGHAAGIDIGSRFHMVAIDQLRENVRQFGVYTKDHEQLIDYLRNAGVTFIAMESTGSWQTLFNALQEAGFEVLLVGGSQTKNVKGRKTDVIDCMWIQKLHSLGLLSGSFLLSNAIQELQTYYHHRLHLIEQASMYVQKMQKSLRLMNIRLDNIIRDVVGKSGLNIVEAILAGNRDPKHLSTLVDIRVKKSQQEIADALQGSWRDELLFELRTSMEFYKVYEQALLDCDKEIEKKLISYIQQTTLDPQEEKMIKENSKKNIKHAPALNISRLAYQYFRTDLFAISGISHTTVLCLMTNMGHDLLKFASAKSFASWLRLVPNNKISGGHIISNKTPSGKNLIAAALRLAANSIGNQKDHELTPFFRRIAFRKGRIAAITATARKLAVIVWNMITKAQPYKKNPPLNSEKHKSSQLKNIEKRIGLLQLTQDELKKLFLRTSLLTT

SEQ ID NO: 488274 - protein, 459 aa, unidentified
MAQRTQKTSQSTPPLPPQLAAVNLHATGIDSGAEGHFVAVPPSDDPQPVRGFGAYTGDLEALADWLTTCGITTIAMASTGVSWIPLFELLETRGFAVLLVDPQQVQQSTGRPKSDGHDGQWIQRLHTLGLLAGAFRPDDQVCGRRRDRRQRAMLLTSAAQHIQHMPKALTQMHRKLQHVVSAITGVTGLAILRALLAGARDPATLAQLRDSRCQHDEATIARALQGPWRDEPLFAVAQAVALYDVSHQKITACDRHSEAYLQTFADRSEGPPLPPPPRPRKRGGNQPAFAVREPLYRISGVDLTQSEGMDETTSLIILSESGLDMTRWPTVKHCTSWLGLCPHHRGSGGKVLSRRTKPCANRAATALRLAAAALPHSQSALGAFFRRMKARLGAPKAITATAHKLARLLSTMLKCGTASVRQGMDEYEQQYHDRTVKNLTRRAKILGYTLVKAPEGAPG

SEQ ID NO: 488275 - protein, 334 aa, unidentified
MQNITLIGIDLGKHSFHIHCQDKSGKALLRKKFTRTKLMQFLATCPPSVVVMEACAGAHFMARCISDFGHETKLISPQFVRPFVKSNKNDFVDAEAICEAASRPSMRFVQPRTETQQAMRALHRVRESLIRDKVKTTNQNHGFLLEFGISLPIGDAVIKRLSLVLAEHEIPEYLSRLLVRLHTHYFYLVEQIAELESELSQSINADDTAQRIMTIPGVGPITASLLSSQLGDGKQFSCSRDFAASTGLVPRQYSTGGKSTLLGISKRGDKNLRRLLVQCARSFIMRLERKHGKLAEWVREQLNKKHSNVVTCALANKLARIAWAITTQKKEYQA

SEQ ID NO: 488276 - protein, 369 aa, unidentified
MEDYNAFVGLDVHKDSISVAIANAGRDGEIRMYGMIVNTPDAVSRLMRKLVQRHGKIEVTYEAGPCGYGIYRQLAEMGIICRIVAPSHTPKRPGDRVKNDTRDALMLARLLRAGELTYVWVPDATHEAMRDLVRARQVASQDVRAARAQIQMFLLKHSLRCKSKAWCLRYRKWLTSLPLEHAAQKFALQSYINRLDQAEARKVEIEDQMVHLIPGWALAPVVHALQVFKGIGMVIAATLAAEIGDFSRFASPRQLMAYLGLVPSEYSSGSKLRPGGITKAGNKIARVMLVEAAWSYKWPPKVGVLLMLKRDNYSQALKDIGWKAQVRLNQRFRRLESRGKRSTVAATAVARELVGFIWATAISAMPKAA

SEQ ID NO: 488277 - protein, 367 aa, unidentified
MGWMAPLRHLGAKMPVGQKPPANREPSMNEITTVGLDLAKNVFQVHGVDAEGTTVLRKQLRRAQVLAFFSRLPRCLVGMEACATAHYWARELRTLGHEVRLMPAQYVKAYVKRNKNDAADAEAICEAVARPTMRFVPAKTAEQQAAVLLHRGRERLVRQRTMLVNALRGHLAEFGVIAPQGLRNVGRLIAIIRDEKDARLPGLARQVLQVLAVQIEQLEAAIAALEKQLMGWHKSNPVSQRLATIPGIGPIIATAIAAMVAEPSGFRSGREFAAWLGLVPRQNSTGGKNRLGGISKRGNQYLRRLLINGASANLLRSKATNADPWVIGLRRRRPSLVVAVALANKTARIAWAVMHRQENYQRMATAA

SEQ ID NO: 488278 - protein, 340 aa, unidentified
MEHIVGIDLHSDNGYYGIIEPDGKRVFKKRLPNDLPTVLSTLEPYEETITCIVVESTYNWYWLVDGLMDNGYHNRVQLANPAGFKPYEGLKHGDDKTDAFFLTELKRLGILPVGYIYPKEERPVRDLLRRRMMLVQQRTSHILSFQSLITRQTGTKMSCNTIKGLQEDYIEELLDEEYLILAGQTNISVVGFLTEKIRRLERAVLKRIKLRAEYEKLLTVPGIGKILGLTIMLETGDTGRFAGAGNYTSYSRCVKSKRMSNNKKKGEGNRKNGNKYLEWAYVEAANFARRFCPEAKRYYQRKMAKTNQIVATKALAGKISKACYFIMRDQEVFKTEKLFG

SEQ ID NO: 488279 - protein, 429 aa, unidentified
MTRISAGVDVSKNRSTVCIIDQDGKVIMRPFLVWHSTEELDFLADTLKRLNGEVRVIMESTSIYQYPIAFHLKERGLFISIVNAYEMKQFANTDFRGGKTDKKDSRTIASYGISYWYKLVEWQIPKDTYFNLDLLNRTYMNAKKHRQIILQELQHYIDCAMPGMDKELHSLNLSTKKDFMLDFVEKFWHRDEIVNMTEAEFTEVFTAWAKKKGYRPVEGKAAKIYAIAKSCIPYYPANPTVKTILQCIVDKLSGVNRTLVTIVTQMIEEAKKLPEYQIVREMPGVGDPLAARFFGSVGDIRRFKNSKALVAYAGIDSPPDESGDFSSTHRHITKKGSKVFRDTGYEIMMALRAQKRTWEKVRKNPDVYDYMLRKEAEGKPPKVAKIAALNKFLRIIYARIKELYDNMALAERAKTKTRSKTRAKTKVTA

SEQ ID NO: 488280 - protein, 344 aa, unidentified
MEITTVGLDLAKNVFQVHAISCTGEVLVRRALRRAQVMPFFRKLPPCLIGMEACGASHHWARELTALGHEVRLMPPAYVKPYVKRGKTDAADAEAICEAVTRPTMRFVPIKSVEQQSALSLHRTRDLLVRQRTQLVNMVRGLLAEFGIDIPKGLTHALAFVRRAIAGEAHEVPKLAAKVIGALAAQAIAVQDSIHRLERDLLAWYRSNDLARRIATVPGVGLLGATALAATVTDPSHFRSGRQFAAWLGLTPLNNSSGGKERLGRISKMGDQYLRRLLVTGMTSLVRRNKHHPSAADPRLNALLARKPVRLATVAMANRAARAIWAIMVRGEVYRTPALGIAAV

SEQ ID NO: 488281 - protein, 354 aa, unidentified
MNTTQNSTKSKIVKVIGVNLAKDHCDVIGYDENGKICLRLDGCSYAKLREILANLPQAVVLMEACKGSMFHARSIADLGHEVRLVKGTDVKALRNVNHKNDLRDAAYIANLYFVPGIKYVYIKSQQQQSLQFLQNEYKSLQELRIQVGNQIHAGLEEFGCPVRKSSKFIKTRMVAHLEKHAELIPEDVMASFKRRREIWLNLLQQEEEAKRRLEQVAATDDNAKRIMTVPCVGPQTAVGLLVHVGVDFGRFKNSRQFAASLGLVPKQNSTGGNNTLNHITKCGPKSLRSNLVQCAQLVLMYAEKWKGNFGDWVRKMRDSGKKHGVIVCAIAAKLARIIYRLMKDKVDYTPILSC

SEQ ID NO: 488282 - protein, 412 aa, unidentified
MLPPEIRYVVGIDVAKSAHVVCALEAPGGALRLKSTPLPATAVGYAQLLAWLGAWGEPAALLIGLESTGSLWEPLYDALSQAGYTVLLLNPHQTASWATSLGLRAKTDGIDAHTLARGLLAGWARASSVPDETVQALRTLTRTRRDLVESQSAARQRLHDELVPVFPELVGHLPNHADLGAPAILRLLAVYSSAHALAHASLDDLCRVLAEGSAGRWGRAHAQALQEVARTSAASTRAVAARAVVVRTLALHLLDLHARVAELEAALTELLRRDPPSQQLQAEVPGLGPTWTATIRAELGDVSRFSRVDQAVAYAGLEPRTHESGRYAGQRRLSKRGPGALRHALYMATLVAVRFRPEWQAPYQRLLDRGRAKKEALTILSRRLLKVIYHLLRTGASSDPACLCPAPRAGQA

SEQ ID NO: 488283 - protein, 338 aa, unidentified
MDHYVGIDLHSNNSYLGIIDTDNKRIFKKKARNDLSTIIKLLAPFSTQTKGIVVESTYNWYWLVDGLIDNGYRLHLANPSAIKQYEGLKHSDDITDAFHLANLLRLGILPEGYIYPKEQRPVRDLLRKRMQLVHQRTAQILSFQNLAARNLGRQMHVRTINKINEEDLENLFEEQHLILSAKACIATIHFLRTRIIQLEKAIQRAAKLKNEFKLLKTAPGIWNILALTIMLETGPIERFEKVGNYASYCRCVQSNRFSNSKSKGKGNRKNGNKYLSWAYVEAANHALWNYEYVKRYYQRKAAKTNNVVAIKAIAHKLARACYYIMRDQKEFDPGKAFA

SEQ ID NO: 488284 - protein, 348 aa, unidentified
MQVTTVGIDLAKNVFCLHGCDVNGKAVVRKQLLRGQLLNFVASLPPCLVAMEACASAHYWAREIEKLGHQVRLIAPKFVRPYVKANKNDASDAEAICEAATRPSMRFVAIKSVAQQDVQAVHRVRQQLVKTRTGLANQVRGLLAEHGIVIGRGFAPLRRTLPLLLEDRGNGLSAVMRELLGEIGERLRFVDDRLRKYDLTIHRLFRQDERCQRVAAVEGVGPVTATALVAAVGNATEFRSGRELAAYLGLVPRHRASGGRTVLLGISKRGDRYLRTLLIHGARAALFRIERHRGARAIWAARLKLRRGANVAAVALANKNARLLWALLSRGQSYRPAPFPARVPQAGG

SEQ ID NO: 488285 - protein, 387 aa, unidentified
MYYIGIDISKFKHDCAVIDDFGEIVTPSWSFTNDSEGFAQLKILLDSLDTETRIGLESTGHYGMNLKLFLESNNFSFMEFNPLLINRFVKSKSLRKTKSDSIDCMMIAHYLMTVEYKPYPSSFYHTEKLKSLTRFRDSLIRLRSRQLVELTNILDKVFPEFKPFFGSRFSVTALYILSNYSSPEKIANMNSKSYEALRKLSRGRFSTVDFAKLKQLAKNTIGTTEDYLLLQMQIVLDIYRQLDSKVDETEVSIKECVSDMNPPMLSVPGIGIESAAVILAEFGDFSKFKNASQMLSFAGLEPGYFQSGTSETTGKMVKHGSSYLRYALMNCAQTVVNYEPTFAMFYSKKRAEGKPHRVALSHVVKKLLRVIYTLQTKNIAYDADFVR

SEQ ID NO: 488286 - protein, 418 aa, unidentified
MDIVHERAAGMDISKRDAKVCIRIPGARAGTSSRTVTTYGATTNEIVRLRRDLEAATVTVVVMEATGDYWKPFYFLLSESLNVQLVNAKAARNIPGRKSDVSDATWLAELAAHNLLRASFVPPEPIRQLRDLTRTRSNLTHERTREFSRLEKGLEDSNIKLSSVVSTLGTRSARSILDALISGERDPQTLASLAHVSMRRKSAALVEALTGRFTDHHGFMVQLHLDRIDQIEATLAALDARIDTVMGPFSLARELLMTVPGISKNVANVIIAEAGVDMNVFDTAGHLASWAGVCPGQNEWAGRIKSTQTRPGDHYLKAALGIAALAVSRSKTTYLAVKYRRIQSHAGALRAVVALQHTLLVIVWNILHDGVAYDELGVDHFDKTNPERARKRLQRRMVSLGFEPNLIPISAGGSPSFS

SEQ ID NO: 488287 - protein, 367 aa, unidentified
MKKVSTAAAKATKNFSQPKLTIGLDLGDRSSWYCLLDEVGEVLREQKVSTTPKAMRGVFGAMPRCRIALETGMHSPWVSRVLSEFGHEVIVAHARNVRLIGESRKKDDRLDAQTLARLARIDSQLLCPVKHRSAKAQADLTVIRARAGLVRARTALVNTARGLAKSYGERLRGCNVRNMNPEKAQGLSSELQRALEPLLAGIESVSEQIREYNERIEKLAQDSYPQVALLKQVKGVGTLIALTFLLTLEDAHRFRKSRDVGCYLGLQPGRRNSGQSEPQMHISKEGDPYLRTLLVQGAHHILGPFGVDSDLRRWGLKLAERGGKNGKKRAIIATARKLAVLLHRLWVSGEAYEPLHNSHQAAMPAAA

SEQ ID NO: 488288 - protein, 305 aa, unidentified
MSISTTAPRIIGCDVGKARIEIFVSRDQSRKSIANDPVALAEWTATLDPDCLVVCEATGGYEAALLAALLAAGVPAHRADARKVKAFIRSLGVHGKTDALDARALARYGQERHLQLARWQAPDKTRGKLQALALTRRDLVVQRTAFSNRAQAPGAEPVQSYLKALLDCLDAQIAAIDADIAALIEAHDELRRSEKALRRVAGLGAKTAAALLALMPELGSCDRRRAASLAGLAPHPRQSGEKDAYRRMTGGRPEVKRVLFMAAMSAARHNPALRDVYKRLLANGKNPLSPFPQLCEKSSSSPTQS

SEQ ID NO: 488289 - protein, 357 aa, unidentified
MTSVALSGRSGKIVVGVDTHKHVHVAVAIDMLGARLGHTSIPVDSGGYRQLEEWAVSLGPVEAFGIEGTGSYGAGLTSYLRRRGHRIVEVNRGDRRARRANGKSDSVDAEAAARAVLNGTATAVPKTADGAAEMIRQIKVARDTAVKARTSAIITLKQIVVNAPACLREQLDGCADKALIDRCASFRPGPITDPVASAKHSLRATARRWLELAAEIRSHDTILDDLTQKAAPTLREGFGIGPDTAAEMLIIFGDNPDRVRSEAAFAKLCGTCPIPASSGMTTRHRLYWGGHRQANAAVYRTVIVRMQHHQPTIDYVNRRTAEGLSKRDIIRCLKRFVAREVYQRVMTDHRHRQQAAA

SEQ ID NO: 488290 - protein, 414 aa, unidentified
MKKLSNSAKKSESTPNRAKRRAPVQRDTKEVLAELVEKLKERLGPQAVSPIVGKENSRGGLRPNLDRLTIGVDLGDQWSNYCILGLEGETLGEGQLRTTPQDVTEFFQALNAARVVFEVGTHSAWVQEVICGCGHEVLVANPRLMEGSKRRRRKNDRIDANKLARLGRVDPQSLHPMRHRSKEVRQDLVMLRARDALVSARTELINATRGLVKSMGARLPKCSSPSFARKIEEEIPVEIRETLLPLVRLVAALGDSIEEYDEKIEKLCSEKYGHTTLLRQVKGVGSLTSLAYVLTLENPKRFVKSRDVGPYLGLVPKQEDSGDSQPQLEISKAGDTMVRKLLVGSAHYILGPFGPDTDLRRYGQRLCERGGKNAKKRAVVAVARKLAVLLHRLWVSGEVYRPLRQSAPTMKVAA

SEQ ID NO: 488291 - protein, 461 aa, unidentified
MFSLMQFLSDKLFDSMWALPLVPLPGSLTEASVASRSQRSRQGDVRNFGPSCPQTFSTAKIIQPCSSFPFLIFLPAQETETAAPAHGAAVPCASSFNPRTVVHQSAAQLEPHAACAPNSNRCQSAGFGWQLVFVRMSQNTINYMKPNTAVVYVGVDVAKATLQVHVQGRQAELKNALAARAKLCQKLQIVAGAHVVCEATGGYEQDLVRALHKAKVPVSVVNPAQVRAAAQAQGQRAKTDRIDAAMLTDYGQRYQPQPTPPASPVQRQLVALTQWLKQLIEGKATAKTQAEHHHDLFVRKQHQALLDYYQSQIKAVEEKLQALLKKDQALQQRVETLDTIEGVGSRTALLVLAHMPELGQLNRQQVAALAGLAPWTRDSGTMKGMRCIGGGRPEVRLALYMSTLSAVRLNPVFRAFYQRLIAKGKLPKVALTAVMRKLLIYMNHKLKALAAQTLSTGQVQN

SEQ ID NO: 488292 - protein, 318 aa, unidentified
MSQPNQQCIGIDVAKLSLDIAGTTEFSPLSASNDEDGFMSILNVLKEWEISLVLMEATGGLEASVACCLQAAGYEVVVINPRKARDFARSIGYLAKTDKLDAAMLAQLAQIIDRHPDRSRYIRALPDEARAVLTAMVVRRRQLNNMLVAERNRRYPSHPQSRKSIDNIINALESELDHISQEMKQHVKVFFMKQAELIGSVKGVGEVTVASLIAELPELGKLNRREISALTGVAPLNRDSGKMRGRRTTFGGRAGVRATLYMAALVATQFNPAIKMFYQRLLTVGKPKKLALVACMRKLITILNTMVRKGEKWDASFR

SEQ ID NO: 488293 - protein, 400 aa, unidentified
MRVVFGIDVSKASSEVAILVNGEKVHDYTIPNDAIGFNRLLGDLGTVYQPEIVFEATGVYSRRLQAFFEDNSYTYTRLNPLESKKQLDSLRVRKTDKIDAEKLAMSQFILNRKPSYVQEALYQELRDLSRFYQNLTEDIVCSKNRLHKVLQVTFPELENILSSPTGKQYWNLVMAFPCNSFVLELDDAALRAIIRQSTSKRISEKRVTYLVDKLTKLANHSYCAVKKTSPVMEEVKYYAGELLRLSEYRQSVLEEMITLAQPLPEYEILLSIPGIAETTATSIIGELGDIRRFHSANQINAFIGIDLRHYESGNFLAKEHITKRGNPYARKILFKCIHNIASASHTNPCHIADFYEKRKRQSQVTSTKPHTIASIHRLIRTMYYLITHNKLYDYSLTQNR

SEQ ID NO: 488294 - protein, 529 aa, unidentified
MTGRTGARRGNRSASHSGAKSRHRQTLQKPSGVIGPRVKQVGGEKFAIVCVDPAKHRSEWMMADYFGNLLIQHQTLPHQAAYFKLAVTQIRQAQEQHGIEDLIVVVERTGNYHLAPKRAFASAGFETRVVHPFATKQYRMPADPSNKTDENDLYAQHRAAVAGFGLCEQELESPYRELQLRVRHRRNLVEKATAIACQVRENLHLAMPGFALLFDHLLEHQSAMAIARRCVSPAIVLQLGRVGLSQHLHERKIRHQPRTIDKILAWASQAASEDIHDGALHHAIWTDLDELYQHVQRQILALERQLASDLVQTPYVRLLAIPGINVVSAAELAGEMGPMTRYANANAITGRAGLYPSRHQSDQTDQSGPLIQRANRRLRCVLMRIAETLVCHCAYYRGQADADRAIGVDTRASRVKTAKRFSRLAFACVAGDEPLKHPCMQKPDSILEKLRAFHQEHETPLDRILADLRTTVEQLPYNTRNHEAEVVAEVLRQQTERRRGPTPIGALLPAVLARLEIKTEEHNENRDRS

SEQ ID NO: 488295 - protein, 379 aa, unidentified
MMPSENRVLIAIELSVSSWFVAVRLPGSEKSRLHRVEGGNTTALLALVSDLRSRAETKLRQAVNVACCFEAGRDGFWLHRLLTAHGAIAYVLEPTSILVNRRARRAKTDRLDAEGMLRVLAAWLGGDRQVCSIVSVPTPEDEDAKRPHREREHLVQERQRLENRMEALLFTQGIRGRPSLRSWERDIVKLRTGDGRALPCLMQAELNRLRRRLVLILELIHEMEAERAKALAAKVDDAMTRKIADLQRIRGIGANFSTVLVREVLYRSFANRRQLASYVGIAPMPYQSGGMDRDRSISRAGNPRARTTLIQLAWLWLRYQPGSALSDWFRGRVGTLQGRTRRIAIVAMARKLLIALWRYVETGVLPDGVELRAMEEATA

SEQ ID NO: 488296 - protein, 314 aa, unidentified
MYHYIGIDVSKKVLNIFDCKKDLIFDNKENLSSFKKYLKKRYPDFSSLVILFEATGIYSYHLKAFCAENNIKACIINPQASHNFAKSLGTRSKTDTTDARTIWAYHRLIVDKDIRIPKVDPIVTTLSSYLVSYRLTLKQRLSLANHLEGIKDKTLYRLLKKEQEQLCKLEHELLIKMDTYIKKYPKLNEDYQRLLSISGIGQKTAISLLTLFQTYPDTNRNQITALIGLDPIQRQSGTSVHGKSRISKHGNQMMRKCLYMPTLVSIQYNHKIKAFYDRLVLKHKPKKVAIIAAMRKLLLIAHAVYKNKTVYVPG

SEQ ID NO: 488297 - protein, 353 aa, unidentified
MIVIGVDPHKTTHTAAAVDPVTNTGLGSLRIDATLAGYRRMLVWAKQWPQRQWAVENAEGLGHHLAQWLLARGEVVLDVPATATARVRELSRGARRKNDRIDAASAACVAAAQGDARPVVAEDHVDALALLDERRNNLSQNRTRTINQLHRLLRELLAGGVPTDLTAAKATAALRTFRSRSTPERVRVQLCRDLIADVRRLDQQLAENQAEATRLLDEHGTRLREIDGVGPVLAARILGRTGHVSRFATAAAYATYNGTAPVEVASAEYQCHRLNRYGDRQLNCAIHTIAIVQLRRHGSAGRRYYDRKITDGKTPRAALRCLKRHLSNQLWRTMLADEQRDQDRCHDQSTKAS

SEQ ID NO: 488298 - protein, 336 aa, unidentified
MIVIGVDVHKHSLTAVAVDEAGRMLDEKTVASADAELIGWASGLGSERLWALEDCRQLTRALEHELLAVGEQLVRVPPKLMAPERRAGRSRGKSDPIDALAVARAALREPRLSRPRPDEQPFRELKLLVDHREDLVDERRRAQQRLRWHLHQLDPSFVVPLRRLDRPLHLDRVGRWLARREQDVQVGIARELVTRCRSLTRTILELDRELEQRTAQTAPALLELPGCGALTAAKLLAEIGPIGRFQSDAQLARHSGVAPLEASSGRVQRHRLDRGGNRQLNAAFYRIAITQARVHPPAHAYLDRNKPKARADAKPFAASNDNSPASSSTHSKPVPP

SEQ ID NO: 488299 - protein, 368 aa, unidentified
MSASIIAYERSTLVDREKYIGLDVHQATISVAVMDETGRVVMECILETKAATILEFFAGLRGVVSVTFEEGTCAAWLYDLLKPHVARLLVCNPRKNALLKVGNKSDRIDARKLAELLRGNQLRAVYHGETGVRMLRELCRSYLTIVKDLSRVMNRLKALYRSWAIPCAGRDVYYSRHRAEWLEKIREAGVRRRAEHLYQQLDMLQHMRQQARRELLAESRKHPVTAQLRQIPYLGPIRSALAVALIQTPHRFRTKRQLWAYSGLALETRISAEYNYDRGQLRRSKKTISIRGLNKDHNHDLKGLFKGTATMASVRPGPFRDFYERALAKGMKPTMARLTLARKIAAITLTIWKKGEPFNADKLKLQAA

SEQ ID NO: 488300 - protein, 357 aa, unidentified
MSSSNVKYIGLDVHKEAITVAVRNGAGKLEMESIVETKARTLLDFLGGVRGELHVTLEEGTWAAWLYDVLKPHVQELVVCNTRRNALLKEGSKNDKMDARKLSELLRGGLLRAVYHGENGLRTLRELARSYQVISKDLQRVMNRIKALYRSWGIPCTGTQVYGRRHREQWLQKINEAGVRRRAELFYQQLDGLQVLRRTVRGELLAESRKHAGVKLLRQIPFIGPLRAAQLVALMQTPHRFRSKRQLWTYSGLAVVTHDSAQYRYVDGQLQRSKKPQQLRGLNQNHNHVMKEIFKSAALSATVRPGPFQDFYAGLLARGMKPEMARLALARKIAAITLTLWKKGECFDAGCVKQQAA

SEQ ID NO: 488301 - protein, 432 aa, unidentified
MQRTIGLDISRDTAEVAVLRPGSDKPQRTRFPARPDAIRSFARKLGPEDQVVLESCTNALAFHRLLCQHAGRVVISNPLKTRVIAEAKVKTDKVDAEVLARLLAADFLPAVWVPDPLTDELRHLVFHRQGLVTQRTQAKNRIHAVLHRNLIAPEMSDLFGKAGRAFLATVTLPAFERQLLDADLRTIDFLDGEIATVERSMAKVVQDDPDVRRLLSVPGIALTAAVGLRAAIGDISRFKSPGNLVSYFGLNPSVYQSGLKAYTGHISRRGRSHARSVCIEVAHQLAMVPGPLRAFFVRLRRRKPYNVAITAVARKLVVLVWHMLTRQEDYHYAPPALTREKRGKLRRLATGERAARTSQPVPDRTLDREPGRSAEADYVNFISERFGPNGPTGVEHPNRHPLARGGKPTSSSEEEKKPSPRRTKSPGQHPEA

SEQ ID NO: 488302 - protein, 336 aa, unidentified
MEFKFFIGIDVSKDTLDIGLLDAENSETVNHQQVSNNDSGIAAMLRWLEEHNGFSIENSLFCLEHTGMYNYPLLQFFSKQGASVWVENPIQIKKSLGLQRGKNDKVDAMRIAQYAYRSRAQVKLWQPAREVVDRLRHLAALRERLVETRKRLLTPVKELFEIGNDAMAKVLEKAMRKTMKALDKDLEAIETQMKDVIDKDDDLKNLYGLITSVVGIGFVTAVSLIVCTNEFKLFSSHRQFACYSGIAPFEYRSGSSIRGRTKVSHMANKKMKRYLHMASLTGIKLDEGLKSYYNRKVEEGKNKMSVLNAIRNKLVARVFAVVNRGFAYQKKYLVLS

SEQ ID NO: 488303 - protein, 454 aa, unidentified
MAQRKPKLVRSKPALPPQLAAVNLYAAGIDVGAEAHYVAVPPSDDPQPVRCFGAYTVDLAALADWLALCCITTVALESTGVYWIPLFELLESRGFEVLLVDPQQVRKIRGRPKSDVHDCQWLQRLHTFGLLASAFRPPDDVCILRSYLRQRAMLLTYAGQHIHHMQKALKLQHVVSDLTGETGMAIIRAILAGERDPVQLAHLRNYRCQHDEATIAKALHGHWREEHLFALAQAVALYDMYHQQISACDRQIEAHLATFAERRASEALPPVARPRKRTRNRPRFDVRGALHRMTGVDLTAIEGIDEPTALTIISEIGLDMGRWPTVKHFTSWLGLCPHHQVSGGKVLSRSTKPCANRAATALRLAASCLQRSQSALGAFFRRMKARLGTPKAITATAHKLARLIYMLLKHGTAYVRQNMADYERQYHNRMVQNLTRRAKVFGYALVQLPEGTSA

SEQ ID NO: 488304 - protein, 407 aa, unidentified
MKKKNIIEFEQVVERGCGMDVHKDLIVATIQGKGIKMQTKSFNAFTSSLIKLKEWLLKNGITHVAMESTGIYWKPVFNILGDDFTILLVNARHVKNVTGHKTDKKDSRWLSKLLLSGLLKSSFIPERPIRELRDLTRYKTKLTNQVSSEKNRFMKILEDANIKLSSVLKDVFGATGTKIINHILVHESYRPEELLQYVHGKVKSSREDIKEALTGYITPHHRFMLKTILGNIARIESTIAEVDTQIGSCIVPYKDKRELLESIPGVGKDGATCIIAEVGVDMGQFPDQNHLASWAGICPGSNETAGKNKSGRITYGNKYLRSILVECGWAASRTKNTYLSAKYKSLVGRRGKKKTIIALAHKILIATYFILKDKIEFKELGPDHLSNFKKDRLIAYHRQQLERLMVA

SEQ ID NO: 488305 - protein, 386 aa, unidentified
MPQLNDLSRSLVILEQDATLIAVIEMGQSSWLVAGIVPGVERSPLKKLAVDESALLKLLNRWREEAEKAGHRIERIAIAFEAGRDGFWLARWLRARGIEAHVIHASSVAVSREHRRAKTDRLDTELLKRAFLGWLRGERDHCKMVAIPTLAQEDAKRPNRERESLVGEQSRIVNRMKAALARLGIRGFNPKLKKAVERLDGLRTPEGEPIPPNTLAELKHDMERRRLVRSQIRDIEGTRLERLKQAPGDGPHVTVRLLARVIGVGVETADMLVQEVLSRNLRDRRAVARYGGLTGSPDESGKKRREKGLARSGNARVRRGMIQLAWRFLMFQKDSALAHWFYARTKNAPQTRKTMIVALARKLLIALWRLAREGAIPEGIVLRPAL

SEQ ID NO: 488306 - protein, 368 aa, unidentified
MADYREVFVGIDVAKLKNAIAVAESGREGEIRFWGEVDASDSSMRRIIQRIAAKFDRVYFCYEAGPTGYGLHRLIRSLGHECVVVAPSLIPRKPGDRVKTNRRDALALARLLRAGELTAVWVPDEGHEAMRDLVRARAAAVETLRVHRQQISAFMLKHGRIYPRKKAWTMRYLCWLQEQQFDHPAHQIALQEMVEAVRVSKERVGTVIEEFVPNWSLAPVIRALQTLRGVDLIVAVTFATEVGDVSRFESPRQLMGYLGLVPGERSTGETVRRGSITKGGNGRVRHMLVESAWTYRHPPKVGARKLYRLEQAPPKVREIAWKAQSRLTARYRMLAGRGKRTTVVCTAIARELAGFMWAVAREAQSIRA

SEQ ID NO: 488307 - protein, 409 aa, unidentified
MYFIGIDIAKNFHVAAVLGIDSDKVLHTLKFNNDEEGFEKLFLLLSSLDEISNFTVAMEATGLFFENLYLYLKAKGFKVILLNPYQTNRFREMDTMKKVKNDNIDALMIAALIKSGRYSKAYVSEDSYQSIKSLYRHKSSLQDELKKHKRQVSTLLAVVFPEMEKVIKDPFNITGLALLEKYPTAKHYHHASVDRILKTFRGIKGNNFNEPKATKLLELAKSSIYQGNGVDERSFVILSHIRQIRFINNEIEQCESQMLALFNQQPKLDDTEEQEIMNIIDNLRTIPGVSDKTIFALMSECGDLSRFTNQNSFIGYLGLYPTLEQSGNKTVHGPIAKRGARLAKKALYQAAIASVRHNKELNKLFHDKVSLGRAKKEAIVIVARKLAHIILAIYKNNVAYNPNRVFVAS

SEQ ID NO: 488308 - protein, 404 aa, unidentified
MELKPLYRCVAALDVHQAKLTVCVLYEDGEGELHVELREFGGFKRDRRAMAEWVASFQPEEVVMESTGIYWKSPYAALERCGIQALVVNARHVKQVPGRKTDIGDAQWLAILARSGLLRGGFVPPANFRELRLTSRQMQKLTGILAAEKNRLHKVLTDAGIRLPVVVSDIHGQSARAMIKGLIAGESPQQVLTYANKRLKATEEELLDALDGELSEEHRFVLSELMDHIEDLEQRIARFSQHLLDGLAPQQGLLQALQTIPGLDERGAAMLLVEIGDDMDAFGAGEKLASWAGVCPGNHESAGKRKAGKKRKGNPYVRRILCEAANAAARTRSALAELFKSLLIRRGRKRAIFALAHKILKIVFVLISRGDYYRDATVDYEGMSVERNAPRWIRMLRKYGYITA

SEQ ID NO: 488309 - protein, 347 aa, unidentified
MNSVTLGIDLGKRWFHVVGCDAAGKVVLREKLGRNQLLQLMAQHPPCLVGIETCCGSQYLARKFQDFGHDVKLLPAQYVKPFVKSQKNDFNDAQAIAEAVRLPTMRFVPLKSEEQMDVQALHRARERMLQQRLALTNQIRGLLLDRGIEIAQGFYALRTVLPALLEKEDSGLTPMMRDLGRMLLDMWNRTEATIEQMNERLKCLARESDLCRRLQTIPGVGVLLSTAIVSAVGNASTFRRARDLAAWVGLVPQQHTTGGKPRLLGITKRGNSYLRRLFVQGARALWVWKDKHPNDPIQRWLLQLAERRHAHVAVCALANKLVRIAWAVMRSGAEFNLNYRTGTIADR

SEQ ID NO: 488310 - protein, 324 aa, unidentified
MSDAFVGIDIGKFKFDVAVLSPQIRTKHRAFSNDQEGFEKLVAWLESLGVDKPHFCMEATGRYGEQLAYHLHDQGNKVSVVNPNCIKNYGRSKLKRTKNDKIDAALIATYCERESPLLWHPLPAEAKELQEMTRELNRAKDLLAQEKTRLKAGAHSPAVLSSIESRINFLEGQIETLEAQIDDHIQSSTKLKKQRKLLVTIPGIGESTANALLAEIPDIHRFEGIRQLVAFAGLAPSERSSGTFRGQTRMSKVGSTRIRKLLYFPAVSSKRYNPVIIDFCDRIEAQGKSKMVALGGAMRKLLHIIYGVLKSGKPFNAKLHLQKA

SEQ ID NO: 488311 - protein, 368 aa, unidentified
MINKFHGIDRHKQYSTIAVLNRKGEEIDFQLRCSDLKGYVDRLGPEDAVIIEACTGAFYWADRVESKGALCYVIDPHKFRIIRDSWNKTDRQDSRNMVKALWVYILTGEFGIPTVYKPDAVIRELRKLFSQHQLLNRQIRMLKNNIQAILADSGIHLTQEGKNHFLSSKNGIEKVKEHGLSAASEISVRSSLELLWRIEEEKEKIHQEILLAGEPLKDAVKLLITIKGIAPLVALAFLTDVGDSKRFRTLRKMNAYLGLVPRVKNSGGKTKPGHITRESRKLTRTLLTQSIYHVSNASPSFRKFYVDLVEKRGAGRARIALIRKLCGVMRRMLLTGECYRWMDGKLFEKKLRHYEKDLEIIKMERKAA

SEQ ID NO: 488312 - protein, 316 aa, unidentified
MENPQTFVGIDVSSQRLDVDTVPVSQPFSELNTEDGIASLVGRLLPLNPQIVLLEATGGYEIPVAYALYEAGLPVVITNPKNVRHFAKALGRLAKTDKLDAQVLALYAQRVQPPVQPLREPEQLELANLMTRRRQLQGMIVMEENRRRTCTPRVRGNIDLSLAHLRQLLKDLDRDIHDAIRRTPLWQENSEILQSFTGVGPKVSASLIADLPELGLLPGNKVSSLAGLAPMNQDSGKHRGKRMIKGGRPAVRRALYMAALVASRYNPVIKEFYQRLRLAGKPPKVALTACMRKLLVILNAMLKNRTYWNPQLPLAA

SEQ ID NO: 488313 - protein, 432 aa, unidentified
MKNDNRKYLSVGIDVGADFSLMAIALPSQELLGKSYRIFHNSKRSLDGAIDRIYSVMEQYDLPARIFMESTGIYHFPVYHKMREAGLDAYVLNPLVTHASKDINVRNIHNDKFDAQKIALLGLRPDLKTSIVPSDDVAAMKAILREYYAMKKETSMYICRLKDQLRQVFPQFIPVFSKVNGVAAMAVLYEYLTPDSILAAGADELERFMKTVISKGPLHIRKKAEALVEAARDAQNFGHGNTGVFYLIRHYIEMIRLLDAQTKQILTQVKVLLKEQKNSQMAKQVRLLQSIPGIGFLSAVTLVCEIGDFSAFKRPKQLFAYFGLDPAVRQSGNFSGVDLKMSKRGSPYARRCIYVLAIQSVSLRVDGTAKNPVLRSFYEEKCKSKSKMTALGAVMHKVCNIIFAVLRDERPFVLITPEEHRTAYFSASVKAA

SEQ ID NO: 488314 - protein, 440 aa, unidentified
MILIREVADAPVITGISKPADLKFHCKGGENVNQLFVGIDVSSKNNVAYLMNPDGSKHSSFSVQNNLGGAKILSERVVSALDTMQLSDVVIGLEATSIYGDSLVYALREDGRLGRFHRKIHVLNPKQVKKFKDSYSDLPKNDFVDAFVIADHLRFGRISSEVYMDDYRYKALQTLTRARFYAVQNLTREKQRFANYLFLKCSGLAQEKILSQNTSATTIALMEQFESVDELAYIGLDELTGFIAKSGRGRFTDPKATAKAVRTAAKGSYRLPKTVNDSVNQAMSVAITGMRAMESQIKTLDKAIEQQFEIITNTLTSIPGIGKVYSAGIIAEIGDINRFQTHASVAKFAGLVWSQHQSGDFEAQHSHLIKSGNRFLRYYLLEAANSVRRCDSEFRRYYNLKFKEVNKFQHKRALALTARKLVRLVFRLLKDNRLYIPPEG

SEQ ID NO: 488315 - protein, 344 aa, unidentified
MTYYAGLDVSLRSVNICVIDDQGELIAETKLASDVQDIVAYLDALELDIRSVGFEAGTLTQYLTYGLQSAGFEVICMEARQVKGALSAMRNKTDKHDARGIAQILRSGWYSRVHVKSMESHHIRMLLSSRRAVLSKCIDLENEVRGLFKIFGLKLPPKLGHGPFDDTVRDIIEADAALSLALLPLLEARLALYWSFRELDNRTRKMAHADPVCQRLMTVPGVGFITALTFKAGVDDPSRFKHSRTVGAHFGLTPRRSQSGEMDNSGHISRAGDADVRSALYTAANAMLTRSGRWSSLKAWGMKIAKTRGHRRAVIAVARKLAVILHRVWIDDTQFRWGTEGARS

SEQ ID NO: 488316 - protein, 395 aa, unidentified
MLTSVMVKGSIVKAARGETSVASRAASCRRREIERVQTHEVVTERDPRRHCGTSPNSRKSRRQPTRSTSSHLQDWECTINEQIFIGIDVAKDTFCVCSSPAAINLSLPNSSSGIKQLVKALKPHNVKLAVLEATGGYERPIVAGLLEADFKVVVASPRQVRQFARGIGELAKTDPIDARVLARFAQVVQPKPRPQFSRKIDELADLVTRRHQLTDLRTQELNREQTVRHRQVLKSVHKIIKTLDAQIIDLDQIIAKHIQSDDQLSDKDKILRSTPGVGPQTSAMLLSQLPELGLLNRQQIAALVGVAPYDFRSGRFAGRSRIWGGRKEIRNMLYMAALSAMRYNPAIKHFSERLTSQGKKFKVVITACMRKLLIILNTMMRNETSWKSEKIPKNN

SEQ ID NO: 488317 - protein, 341 aa, unidentified
MNHYAGIDVSVEYSSVCVVDGCGKVVREGKVASEPEALIGWFGSLGLSLARIGLEAGPLSQWLFAAMRDAGLAMELLETRHVRNAFKTMPVKTDRKDARGIAELIRLGWFRPVHCKSMAAQETRAILTARKQMQSKLHDVEMSLRGILRGFGLKVGKTTPKQFDGRIRELVGGHPTLEVIAEEMLGARAALLRAFNGFEKRVRAMARHDAKARLLMTTPSVGAIVALTFASAIDDPARFRSSKSVGAHFGMTPKKYQSGETDYSGRISKIGDSCVRTGLYEAAHVMLTRPVKGSALKSWAMRLAKRAGMQKAKVALARKLAVIMHRMLVEGKPFNLATPAA

SEQ ID NO: 488318 - protein, 335 aa, unidentified
MHYLYYVGLDVSKETFDASLVAFEDANEMAHRKFANSRKGICSCLHWVEKRHGILLDDVIFCAEDMGSYISEMAVCASDRTLNFNFSLISPLVIKYSMGIARGKTDRVDARRIAEYAITHYRKIALYLPAEKELCQLRTWLILRAHLAKQRVAKLVLLEKLDYKEKFADVSIQRSMLQEEIAYAETHMKTIEREMKELITADSNICRNYKLLTSIKGVGPITAIVMLCSTLNFTKITDHRKFACYCGLAPFEHSSGTSVCGGCHTSSMANRDIKVQLNRSALIAIRCDPQLKAYYERKVAEGKHKFSVLNAVRAKIAARCFAVVRRGTPYVALQI

SEQ ID NO: 488319 - protein, 410 aa, unidentified
MNIAGIDVHKKLLVVVIADKAQPDRPLQSRRFGTGSAELCHLSAWLKHYEVGEAVMESTAQYWKPVWMELEPHMRLHLAQAQSNKAAKGRKSDLADCKRLVRRFAAGELMLSFVPEAGQRSWRMVTRGRLQLIRERVQLQNQIESLLEEGRIKLSSVISDLLGVSGRRILRAMGGGETNPEKLAALGDEHLKCGRERLVDALTGSLNNILCKLLAWQLDRIELIDSQIVDLDKLAAAQMQQHQAAVIRLIEVPGIGAAAAQEIIAEIGPDAAAFPSSAQLASWIGVCPGSNESAGENHSGRSAKGNRFMRRLLCQSAQAAVRTKGSHLQSVFKKLVVRLGYVKAVWAIAHRICIIVWNILHKGAQFVERGEAINPKAVTRAINHHLKALRRLGYQIPIAPPLATPVTAVP

SEQ ID NO: 488320 - protein, 334 aa, unidentified
MQNITLIGIDLGKHSFHIHCQDKFGKALLRKKFTRTKLMHFLATCPPSVVVMEACAGAHFMARRISDFGHETKLISPQFVRPFVKSNKNDFVDAEAICEAASRPSMRFVQPRTEPLQAMRALHRVRESLIRDKVKTTNQIHGFLLEFGISLPTGDAVIKRLSLVLAEHEIPEYLSRLLVRLHTHYLYLVEQIAELESELSQSINADDTAQRIMTIPGVGPITASLLSSQPGDGKQFSCSRDFAASTGLVPRQYSTGGKSTLLGISKRGDKNLRRLLVQCARSFMMRLERQHGKLAEWVREQLNKKHSNVVACALANKLARIAWVITTQQKEYQA

SEQ ID NO: 488321 - protein, 394 aa, unidentified
MKLVGIDVGKNSHHFCVMDKETGEFNVTPSSFSNNKEGFDFLINSLKPYSKKSILLGMEDTGHYHVALLKFLLSNGYTVALINPKTTDLTRKMEGGITKNDKLDTITICDVLDTPERKKQYRITKVDRFDLYEQRQLTRHHHNLKEELNIYCNRLQKSIDLVFPEFNTLFGSKYGVVYMNLLKTFGSAEAIASTDIRTIRKCFEIKGRGGRISLTAEKLKECAKNSIGISSEVETIQIKHLVSQIMLIKEQIAEIDKKIEEFSIKNNSPILSIPGISHFSGTSILAELGDIGNYSKPSRIIKFAGVAPYHYESSQYNAQHTAITKKGSKYLRKTLYQVIPPVINNNPVFKKYYRLKISQGKGHRCAQGHCIRKLLRVIYHLLETGQSFDPALLR

SEQ ID NO: 488322 - protein, 390 aa, unidentified
MSQSFDASRSLTAFEQDSTLVAVIEMSQSKWLVAAVIPGIARQPLKKLDADAGALLKLLQRWREEARKAGREVTRIVCAYEAGRDGFWLARWLQANAIEAYVIHATSIAVSREHRRAKSDRIDTELLMRSFLGWLRGEKRHCSMVAIPTMAEEDARRPSRERENLVGEQTRIVNRVKAVLALFGIGGFNPRLRKAVQKLETLHTAEGTPLPENAHAELRHDLERLRLVHDQICTIESERLRRLAQAPAAATGPHAMVRLIARVLGVGIETADMLVNEVLTRNLRDRRAVARYAGLTGAPDESGKRRREKGLARAGNGRVRRGLIQLAWRFLIFQKDSRLVQWFRERTADGRSTTRKTMIVALARKLLIALWRLVTTGEMTEGLKLRPAGT

SEQ ID NO: 488323 - protein, 401 aa, unidentified
MVSDFRKGRYNLMKIFVGIDIAKLNHFAAAISSDGEILIEPFKFTNDADGFQLLVSKLESFDKNSIIIGLESTAHYGDNLVRYLVAEFYQVCVLNPIKTCQMRKNNVRKTKTDKVDTFVIAKTLMMQDDLRFITFFDLDMIDLKALGRFRQKTIKQRTRLKIQLTTYVDQVFPKIQYFFKSGLHQHAVYALLKEAPSPKEIASMHMTHLANLLKVNSHGHFTKEQAKELRVLAQKSVGANDSAISIQITQTIQQIELLDSQSEKIEAEMTDIMRFNDSVIMTIPGIGYINGGMILGEIGDIHRFSNPNKLLAFAGLDPSVYQSGDFQAKTTRMSKRGSRVLRYALVNAAWNVVRNNATFEAYYNAKRAEGRSHYNALGHCAGKLVRVIWKMLTDEIEFNLE

SEQ ID NO: 488324 - protein, 416 aa, unidentified
MNELKCWFVGVDWASENHRVRITDGCGKRLGERDFAHGGAGLAEMAAWLTSVTGAEPSAIYIAIEIPHGPIVETLLERGFNVYSINPKQLDRFRDRFSPAGAKDDSRDAEVLADALRTDMRAFRRLALAEPLVVELREWSRMTDDLNGERNRLCNRLREQLWRYFPAMLELEQDLGAEWFLDLWELVPTPDKAMRIRDTSIARILKSRRIRRLTAAEVSAVLRKPPVTVAPGTIEAASAHIRVLTERLRVVNRQLKDAHRQLDRLCGLLAEPTESEPGQANERRDAAILASLPGNGRIVLATLLAEGWEALQRRDYHALRTLCGAAPVTKRSGKTCIVTRRLACNPRLRNALYHWARVAVQHDPRSRAKYAALRLRGHGHARALRSVGDRLLNVACAMLRNGTQFNPSLESQKNAC

SEQ ID NO: 488325 - protein, 399 aa, unidentified
MNPVIGLDVSKGESHAQAFTDRGVTYGKVLRFEHNLEGLVTFLNLLQDIESFTGQRPAVVLEATGHYHSPVIQFLDEHQYLYIVINPLISHQAKKTNLRKVKTDIADAYQLGELFYKEELEPYKKRGQFMMNLRYLTRQHDSLTDMYVQAKLQFQAVLDQVFPEYRGVFGDLYSKVSLRFLALHPTSSSVLSKSLNDVTATIQSISGRINSDWALERALKLVAAAKRNPFKETAFSSHLISLELLINLLLQYQEHLANLEQSIDALATELHEYELIQSIPGIGTRIAATILAEVGEIDRFDHAKKLVAFAGVDPSVFSSGKFTATRNKITKRGSRRLRTTLYLAVRCGLRSSRNRKLRAYYDKKRAEGKPFKVAVIACVNKLIHWIYAILTKKEAFQLS

SEQ ID NO: 488326 - protein, 385 aa, unidentified
MQKDDLSRSLVAFDQNSTLVAVVELSLKTWLVGGLVPGLTRQPLKKQGADPDALAVLLHRWRDEAIKAGCKITRIVVAFEAGRDGFWLARWLLARGIEAYVIHPTSIPVSREHRRAKTDRLDTQLLMRAVLGWLRGEIKHCSMAAIPSLAEEDARRPNRAHEMLVGERTRVVNRMKAILIRFGIRNFNVKLSKAAQRIQTLRGPEGELPPNTLAELRREMARLAFIKEQIKEIEKARLAELKQAPREGTHPMLLMLARVTGIGVETADMLVHEVLSRKLRDQRAVARYGGITGAPDESGSKRREKGLARAGNARVRRGMIQLAWRWLMFQKASTLTQWFQARTEGAKSGVRKTMIVALARKLLIALWRFVTTGEVPAGAVLRPAT

SEQ ID NO: 488327 - protein, 344 aa, unidentified
MPSIVGGLDIHRKQVTFDYLDLVTGEVSCGQVAPADRAHLRAWLARFENPAEVAFAVEACTGWRYVTGELQRAGIEAHLAEPADTAAARGRKRRAKTDRADARLQRDLLIQGRLPECWIPPEHVLECRALMELYHDLRAEHTAWLQRVHAVLFHQGAPVFHDLSRADAPAELAALAREHLSPAGQLQVTLCLRMLEVTAGELDGLRRQLTAAARHLRGAKVLAESIYGVGPLTALALTCWLGGAGRFSSARKAVRFAGLDITVYSSDGKRSPGHLSRQGPPVLRWAVYEAGKTHARSSAPDHAYYAAVKDRKDGKRAALAEARKIIRRACHILSELGDDALAMV

SEQ ID NO: 488328 - protein, 371 aa, unidentified
MNQFTKFVGMDVHKATIAVSVAEAGGGEVRYLGEIANTAEALAKLVRQLRKGEATLAFCYEAGPCGYGIHRQLTELGWDCQVVAPSLIPKKAGDRVKTDRRDSMMLARLHRAGELTAVWVPDDAQEGLRDLTRAREDMKGLQLKAKQRLSAFLLRYGKSYGGKSNWTQAHFRWLEEVKFTQPIQQIVCQEYVDTVKAMGKRVDGLDRQLEVVAGESMLWPVIEALMALRGVSLLAATTVVAEIGDLHRFASAPQLMAYLGLVPSEHSSGATKSRGGITKTGNGHVRRVLVEAAWTYRHPARKTAHLQRRAERAPEAIQDIAWNAQKRLCARYRLMEGKGKLKVQACTAVARELAGFIWAIGQAQPPVAAKA

SEQ ID NO: 488329 - protein, 404 aa, unidentified
MFFFGIDWSDDHHNLCIRNAQGSIISLVEFKHTMKGFLRLDDERRKLGVTPSECLVAIETAHNLIVDFLMDRGYLIYLIPPQATASYRNRHRSSGAHTDVSDAALLSSILLTDLDSHRRLKPNSALTQQILAQIRLIETLRGSIQRQTNQLRALLSRIYPQALNLFGKLKAQINLQFLIAYPTAQEAQALSRAEFEAFCRQHKYRRHDLISRRYAHLMEPAPQANPIAVTAYREPIRVLAELTLSHVRHRATALSCLAQIFAQHPDAFLFDSLPGAGQILAPALLAKFGDHRDRFPTANSVQALAGTCPVTQQSGKRKIVFFRRGCDREFRRIVQQFARASINQSGWALAYWHQVRPRCRSDSDAYRRLGNRWLAIIWKMWQDRKAYDETYHLQQRAQRRRPKA

SEQ ID NO: 488330 - protein, 394 aa, unidentified
MRRQSRIREEPVVSANGITFVGMDVHKKAINVAMLLPDARQPVEWLVANEPAAIRRLGKKLVREAPGELRCCYEAGPCGYALQRELEAAGGIVCEVVAPSLIPVKPGDRIKTDRRDARKLAELLRADLLTAVHAPTADEESVRDLSRCREDAQEDLSRARQRMGKFLLRRALVFRMGKKAWGKLHRQWLRGLTFEHAAAGAVFGDYLLAIEQLEERVRTLEEKLSEMTQRDPYREPVGWLRCFHGIDTVTAITLVAELHDFRRFHSARELMAYLGLVPSEYSSGDSRARGSITKSGNRHARRALVESSWHYRHRVKSGENLRKRRRGQPARVIALADRAQERLSRRYRHLLERGKPPQKVVVAVARELVGFLWAALVPITVVECPDRQAQHQDS

SEQ ID NO: 488331 - protein, 355 aa, unidentified
MTSVKYIGMDVHKEAISIALMNGAGKLLMESIIETKAGTILQFFAGLRGDLRVTFEEGTWAAWLYDLLKAHVTEIVVCNPRKNALLKDGSKSDRIDARKLADLLRGNYLKPVYHGEHGLRMLKELSRTYLAISKDLVRVMNRLKALYRGWGIACSGRSVYAPNQRAVWLKKITEPGVRLRAEYFYQQLDTLQRLRREARRHLLSESRKHSATKILSQIPTIGPIRAALLVALIQTPHRFRTKRQLWAYSGLAVETHDSAQYRYLDGQLLRSRKPQQLRGLNEDHNHDLKNIFKGAAQKAIGATGPFHEFYERLLTKGIKPSMSRLTLARKIAAITLTIWKKGARFDPQQLKPQAA

SEQ ID NO: 488332 - protein, 340 aa, unidentified
MTVIIGIDPHKASHAAFAIDDNEVELAQLSVRAGQCQLERLLCWARPFRTRTWAIESAGGLGYLLAQQLVGAGECVVDVPATLSSRVRVLGTGRANKNDPNDARAVAIAALRAPALAFVRPEDHVTVLRLLAKAHLDAGRARSRACCRLHALVAELVAGGIRKEVVVSQAESLLETIAPVGVAHQQRLELAHELLDEIRVLDAKMKRSKDRIATAVGASATTLTDLYGVGPIIAAIVIGYSGDIRRFPTAGHYAAYNGTAPIELSSGGRTVHRLSRRGNRTLNHAIHMIAVTQIRNRDSEGRTYYDAKVAAGKTSREALRALKRKISDRVYRQRMNDLRR

SEQ ID NO: 488333 - protein, 354 aa, unidentified
MKRGKYIGMDVHAATIVVAVLDSEGQLILETVIATASAAVIRFIEGLNGSLYVTFEETTQAAWLHQVIRHHVTEVIVCDPRRNKLLTEGSKGDKPDARKLAELLRAGMLRSVYHGHEATRTLKELVRAYETLAEDTERTMVRIKALYRGRGIRTPGRGVYQASQREQWLKQLTESGLRQRVGWLYEELDQLQPLRKRAKQAMLAESRKHRAVTLLRQIPELGPVRSALIVATVDTPYRFRTKHQFWSYVGLAVVTHMSSEYEIRDGRAIRRRKPLATRGLNRNCNRRLKAVFISAAVRGRRHAAYRSYVERLQQTGMRAEMARLTLARKIAAIALSIWKKGETFDPKKLNSTTP

SEQ ID NO: 488334 - protein, 413 aa, unidentified
MTNNIITAVGIDVSKGKSMIAIRRPGGEVLRMPFEVKHNTTELKSLIKLLKQIGGEMRIVMEHTGAYWYPIARTLHEAGFFVSVVNAILIHNFSDNSLRKVKTDKADALKIANYALAFWETLCQYTPEEETRLILKTQSRLYERTIDSSVVLRNGLISLLDQTFPGINKLFTTAYRNASGHYKWVDFVRRFWHRDCVAGMSEHTFSESYAKWCAHEGYQYSAVCAARIYQAAKQTVAVFPKNDSVKALIVQAVDTLNSVYDSLQVMREEMQRLAEQLPEYEVVMEMYGVGAVTGPQLIAEIGDVRRFTNKAALVAFAGVDAPPYQSGTFDSKSRHISKRGSPHLRRIAFMICSTILQKSNLNNQIYAFMDKKRAEGKHFYVYMVAGTAKFLRIYYARVVEHLNSLELISRIPT

SEQ ID NO: 488335 - protein, 475 aa, unidentified
MITVAVVERSRPWGYDPVRKTVRPLLVETCLRLVGTMISYNKRSYDTARRIRGTGNYIWRRRFIMNPVIGLDVAKGESQVQAYLERKKPYKKSFKIKHDLDGLGSLLDFIKEIEDISGERPPLVMESTGHYHSPVVQYFEDKGYLIIIVNPLISYKAKSSSLRKVKTDIIDANHLCELFYKEDLEPYKKRGIQLMNLRHLTRQHDNITGMFVQTKLQFQAVLDQVFPEYSKVFGDLYSDVSLKTLQAFPTSEEVLIVDTETLATKIKEFCNTRSLKWANQQAEKLMIAAAQNPFQKVLYSSLALSLDMYINMLFEYKKHLSMLENEIDALAKSIEESKIIRSIPGIGEKIAATIVSEIGEIERFNHPKKLVAFAGLDPSVFESGTFKGTYNRITKRGSSRLRQALYMGVKCAIRDCRKQKTTDEILPRNKKLRAFYDKKREEGKPFRVAVIACANKLLHWIYALLKNKTSFQDLA

SEQ ID NO: 488336 - protein, 359 aa, unidentified
MERKVKPARHVVGGVDTHKDLHVAAVVDDYDRVLETRSFPTTRNGYRLMLAWMRTFGELQRVGVECTGSYGAGLLRYMQAAGVEVLEVTTPDRHDRRRRGKNDDLDAQAAAHAAFAERRTVTPRRRDGMVESLRVLKACRKTAVNARRIALQLIQNTIIAAPDTLRDQLRRMTRMQLVRLLAAWRPDLTAYRDVEAAYRITLKSLGRRYLELHDEIADLDMMIAAIAEDLAPDLIERNSIGHNSAAQLLLTAGDNPERLRSEASFAALCGVGPVPASSGKTIRHRLNRGGDRLANSALHIIAIGRLRTDEKTKLYVARRVAAGHSKLDAIRALNRYIAREVFGIITRRQKQINQTRIVA

SEQ ID NO: 488337 - protein, 335 aa, unidentified
MEVTKQSVGIDVSKDSLEVKFKEKSTKGIKIKGSSKFDNTSNGFNNLLEWCTKREKVENVVYVLEATGVYHEDVLYFLFNQGKKVSVELPQRIKYFAKSKGVKTKNDLIDSGVIADYGLERELKVWQSPGEEFKTLRDLSREHNTLTNSKSVVKNRLHAAKHAHDKNARVIERLQSTIKFYTSQLDEIEKDIKTTVNADKELSGKIKKVATIKGVGVMTVVKIIAETGGFYLFQNINQLISYAGLDVVENQSGNHNGKTWISKKGNADLRTALYMPALSAIRFNEKMKSFNDRIMETHSYKKQGIVAVMRKLLILIYTLWKKNEEYSSDYKWGQA

SEQ ID NO: 488338 - protein, 348 aa, unidentified
MNLLAMDLGKYKTVFCNYNVADGEHTFGAVKTTPQNIHDLIVDKEPDRVVLEVCSIAGWVVDIAEAVGKETQTACTMHDAWRWKNVKKKTDKDDALKLAKLSAMGQLPTVHMPGKDVREKRALIKHRQRLVKYRTSLKNAIRAIFARQGIIITTGAATWSQEGLQWLKGEAREFAKISDGAELWRGQLQVELGLLQAVTDSVKVVESKLDKMGASDKQIKRLQTINGVGPRLAEAVVAFLDDPKRFKSGKEVGSYTGLVPRQYQSGEMERQGRTGGRGNKMLRNLLIEVCWASLASNAWARDTYKRLLRGSSSRKKIAITALARKLVVRCWAMLRDEQNWREPISTST

SEQ ID NO: 488339 - protein, 407 aa, unidentified
MDRLFVGIDVGSRDNAVYIMLPDGSKHSSFGVQNNLGGAQEISQRVASALAGKGISAVAIGIEATSVYGDSLMCYLREDGALGRFDRKLFILNPKQVSKFKAMYSDLPKNDPVDAFVIADSLRFGRIGSPIYMDDYRYKALQNLTRARFHAVQSLTREKQRFMNYLFMKCSGLAQEKIFSDNYGAAALAVFEEFETPDDIADMDVEQLAAFIAEKGKNRSPRPDEIAREVQAAARGSYRLPKTVSDSVNQVLSISISSMRAMQGQIKALDKEIERQFANIPNTLISVRGIGPVYSAGIIAEVGDINRFDSQARLAKYAGLAWTQHQSGQFEGQHTRLIKSGNRFLKYYLCEAANSLVRCDTEYRRYYGLKYKEVNKYQHKRALALTARKLVRLVFRLLKDNRLYIPA

SEQ ID NO: 488340 - protein, 356 aa, unidentified
MYYLGIDHHKRFSQVAVMDEKGKIRINSSMVNEKASFESLKEILKEPCKAVVEAGRNWGVMYDLLEELGIETVVAHPLKVRAIAEAKIKFDSIDASTLAHLLRANLIPPVHVPPKEIREQKNLLRHRVWLIRLQTMTENRIHQLIDRNHVKAPKVKNLFGVAGRKLLQALNLSGIDQKLLSDHLQLLDTLQEHIKKAEAWIEKELKDNPLIAVLNTLPGFGKVLSALAALEIDDINGFATKAKFASYCSLIPSTFASGGKLYHGDLIPTGNRWLKYVFIEASWVAIRTSPYCRAYFDRIKRGKGPNVAIVALARRLSEIAYRCLKGERYYVEHPYIPYTRQTPCGCPPKFLASQGL

SEQ ID NO: 488341 - protein, 412 aa, unidentified
MQTLVERGCGLDVHQATVVACLLTVQKDGRVQKQIRTFATTTRELVGLRDWLLAEGCTHLAMESTGVYWKPVYAVLEGELEIVVANAQHVKKVPGRKTDVKDAEWLADLLCHGLLRPSFVPPKAIRELRDLTRYRRKLVQSQAAERNRLLKLLESANIKLASVATDVFGVSGRLMLRALIEGKASPREVAELAKRKLRSKIPELELALEGRLEEHHRFLLKLQLDRLELVEKDLEVLEQRIQQKLEPYAAQLALLDEIPGVDWTLAAVLIAELGVDMSVFHNVSQMASWAGVCPGNNESAGKRKSSRIPKGNVYLKTALVEAAHSAAKAKGTYLRDKFYRLKARRGYKRAAVAIAHKILVAIYHMLSQQVSYNDLGDLYLDKLNKHHLTRNLVHRLERLGYTVTLSLQEEAA

SEQ ID NO: 488342 - protein, 344 aa, unidentified
MNEVITIGVDLAKNVFQVHGVGAEGEVAFRRQLRRSQMLPFFKKQPPCLVGMEACGTAHHWARQLIELGHQVKLMPPHYVKPYVKRSKNDAADAAAICEAVTRPTMRFVSIKSIEQQSVLVLHRTRELLIRQRTMLVNAIRGHMAEFGIVAPTGVPQVKKLLAVIADPGDTRLPSLARTCLESLARQFLALHQEIRAIELNINAWHRSNEASRRLETVPGIGPIIASALTASISDPEVFKNGRELAAWIGLVPRQNSTGGKQRLGKISKQGDQYLRWLLVVGAMTVVLHAKRRGTTNMPWLANIIDRKPTMVVAVALANRNARVVWALLRHGGTYQQSATVPAK

SEQ ID NO: 488343 - protein, 473 aa, unidentified
MSSDRKAGLCYKPFAVATSPPLKEYALKETNSKMDAGNAERLTEPDWAAFIAIDWADQKHDWAMEVPGQSKRERGQMAHTPEAIDTWVTQLRQRFADRPIAVTLEQSRGALLFVLSKYANLVLYPLHPGTVSSFRQAMYPSGSKNDPLDADVQIELLVKHRDRLQVWKPDTQETRLLQFLVEDRRRRVDQRTGLLNQLTGRLKLYFPQILGWFPTSDSILMWQFLEHWPDLLSAQKASRQKLKAFLVKDARSGPADVDEFIRQVREGIPATNDRAVVTSAGIFVQELVRQLQVLRATIQKYDKQIEAITRQHPDFPIVSSFPGIGKALAPRLIAALGTRRERFPDARSLQSYSGIAPVREASGRREWVHARWACPKFLKQTFQEWAQHSIARCAWARAHYDAQRARGKGHQAAIRSIAFKWIRILVRCWHDHKPYDEVRYTQSLTRRSSSPSSAVTIVCKSVAGFSKLTGLSA

SEQ ID NO: 488344 - protein, 348 aa, unidentified
MYPFYLGLDLHNRKTYAVLMDQHGELVDQREFPNEETTAYLEDVVPRQTYAVLEATRNWPFMYDLLTEHVARVELAHPKELKAISTAAVKTDQIDARVLAHLARLNFLPTAYAAPAETRDLRLYVRHREKRVQDRTQSKNRIHAVLASYNLRSPFTNPFGKAGRQWLQEILDSDLLRPAAKRVIRDHLAQIDQLDEQIASLENDLVLTPEQHAAVKLLKSMPGVGPIIATTIVAEIGDVRRFNSPKALCNWAGLTPRIRSSAGITRHGHISKAGSPFLRTAMTQATMIASRISPRWRLVYENLSKRCGKKGARVAVARRLLTVAYYMLKRNQPYQEDYSQPSTGDRGA

SEQ ID NO: 488345 - protein, 408 aa, unidentified
MELMHRRCAGLDVHKDTVVACKRIVEAGEVRREVRTFGTTTDALYELFDWLGFDEVTHVVMESTGVYWKPVWHIMEEGFVLVLANAKHVKNVPGRKTDVKDAEWLAELLAHGLVRGSFVPLEPIQQLRDLTRTRKQFVRERVRNVQRLQKTLEDANIKLDSVVSDIMGKSARSMIEAICRGEENPDVLAKLAHPRLTATPESLRAALKGRVTDHHRIMLRLFLDHIAATDRAIASIEQYVEAALEPFRQAVDLIVTVPGVGPDVATAIVSEIGTDMTRFATEGHLISWAGLCPRADESAGKRRSNRIRQGAPWLKPMLVQAAWSSVRVKGSYSRGQFYRLKSRRGPGKAIIAVAASMLGAIYHMLRKGVPYKDLGADHFEKKGKERIIQGCLRRLKHLGCEVELKQAA

SEQ ID NO: 488346 - protein, 351 aa, unidentified
MSHKSTLSTAVRTIGIDLGKNSFHLVGLDQRGAIVLQLKCSRAQLERRLANIPSCLIGMEACSGAHYIGRQLAALGHDVRLIPAQYVKPFLKGHKNDYRDAEAIAEAVQRPTMHFVAIKTPEQMDLLALHRVRSRLVSQRTGVINQIRGFLIERGITVRQGVVPLRKALPDILSSNTPALSPRMVNLIAELVQDWRRLDERIAAVSAEIESLAEQDEGCQRVMTVPGVGPIISSAVVAAIGNGAGFTQGRDFGAWLGLVPRQESTGDRTILGKISKRGNKYLRTLFVQAAHVVLARRPSAAMRGLWPWIEQASKRLHRNMLAIALANKLARIAWAVLARGHEYQPRITAHA

SEQ ID NO: 488347 - protein, 412 aa, unidentified
MRRVIGMDLHRTFAEVVIWEEGRLRHHGRIDMTRTALEGFGQSLRLTDEVVIEATGNCMAVSRVLSPFVARVIIANPLQVKAIAYAHVKTDKIDAGVLASLQAAGFLPQIWTPAPEVERRRRLVARRDQVVRHRTRIKNEVHSILHAHLIPRCPHADLFSRVGRAWLQRQPLPSDEILAIERHVRELDRLGEDLEVLDREIAQDALGDPAVKRLMTITGVNLTVAVGLIAAIGDIHRFSSPQKLVSYVGLNPRVRQSGLGLAQHGRISKAGRSHARAMLVEAAWAAAKSPGPLHAFFVRIRARRGHQIAAVAVARKLVILCWHVLTKQVDYLWARPALVATKVRAMELQAGQPARKGNKRGPAYSYNVKELRDREMKAAEQAERAYERFVAHWQPRPPKGKVRERLNPTRLE

SEQ ID NO: 488348 - protein, 453 aa, unidentified
MSRKRKNNKTKIGAPVLHCLNPNAAGVDVGATEIYLAVPADRDPQPVRHFSTFTEDLHAAADWLKACNIATVAMESTGVYWIPLFQILEARGFTVFLVNARHVKNVPGRKSDVSDCQWLQYLHSVGLLSGSFRPEQAVCTVRSILRHRDSLVQMASSHVQHMQKALDQMNLQLHHVISDITGVTGLTIIEAILAGERNPHTLAALRDGRVKATVDTIAKSLVGDYRREHLFTLRQSLAAFRHYQELIRACDREIAQYLEAFESKLDPPEGSLPESQDRQKSDDGEPRFDLGSHLHRIFGVDLTLIPGINVLTTQTLLGEIGPDLSRFANAPAFTSWLGLCPDNRVSGGKVLSVKTRKVKNRAATALRMAAQALHRSQSYLGHFYRRMRAKLGAPKAITATAHKLARIIYHMVTTRQDYDETICVQNEVRNRECLEARLRKQARQLGFQLVAAS

SEQ ID NO: 488349 - protein, 321 aa, unidentified
MAKRITICAGIDTGKRKLDVAIDGTSLQLQVENTAEGYKMLLEWLRRHKVKRIGIEASGGYEQAVVIELRRKRFVVVVFQPAQVRAYAKFHLQRAKNDRIDAALIGACTAAVKKIHPAPDPRLQPFAERLTLIEQVGEDIKLYKNRLETCRDPRIQKLWKEEIARLAKRARVELKALVAAIREHRDLAQRLDLIYSVSGAGMPTAVEILVRMPEIGQLSREQAAALAGLAPYDDDSGEQVGARHIDGGRKRLRRALYTAALPASFRWNPQLIALYQRLKAAGKEHKRCLIACARKLLIFVNTVVARGTPWQDQPPPAAATG

SEQ ID NO: 488350 - protein, 349 aa, unidentified
MVTFGIDAHKRTHTVVAVDDVGCQLGVRTTTGTGSEDHLSLIRWAEQFDGERRWAVEDCRHLSRRLEADFLRAGEVIVRVPPKLMAHARDAGRTYGKSDPIDALAVARAALSNPDLPMARLDGPTRELRLLVDHREDLVAERTRCVNRLRWHLHELDPAWDPPARKLVRLVHLDGVADRLATMEGPVVRIAAEIVVHARQLTVRETELEREITVLVRQLAPNLLGLVGVGPLTAAKIVAETADVTRFKSKDAYARHNGTAPLPVWSGNRERHRLSRTGNRQLNAAVHRIAITQMRCHPDARAYLERRVANHNTKTEALRALKRRLSDVVYRSLLADAQTTAATSIATAA

SEQ ID NO: 488351 - protein, 403 aa, unidentified
MSTFFAGLDWASQTHAVCVIDAQGSVRERLEVAHSAAGLTELLRRLKAWHCPPVAIERPSGLLVDTLVEAGITVVPIHPNAVKATRPRYRSHGAKSDASDACLLADLLRTDGHRFKPLSPQGDEIRALRALVRGRDDLVAARVQLANQLRSLLQAFWPGAAAVFADVDSPIALAFIERYPTPESAARLGPKRMTAFCAQHAYCGRRSPEELLARLHAAPAPVNGELEMDAKGELVRCLARTLAPLVEQIRLLSSRIEHHVASSEDGRILMSFPRAGRICAAQILAELGSVRERFDSDAQLAAEAGVAPVTYASGKSKAVAFRWACNHRLRAALTCLADNSRHANAWAADVYARARARGCDHPHAVRILCRAWVRVIWRAWTERTPYDPARHGAFQSLLKTAGG

SEQ ID NO: 488352 - protein, 384 aa, unidentified
MPIRVLRHGRRAVEQNTTYVAFDTSKETIAVALAEGRRRGEVRFFGTVANRPEAVRKLVDKLAGRHSRLAFCYEAGPTGYGLYRQIRALGHDCQVVAPSMVPVRPGGHIKTDRRDATTLAALFRAGELTAIWVPDAAHEAMRDLVRVRQTATEGVRRARQQLLSFLLRHGRIYPTKRHWTRAHRRWLAEQRFEHPAQQIVFEELIQAVEQAIARRDRLQQQMIALVPSWSLQPVVAALQALRGVAMVAAIILVAEIGDFRRFATPRQLMAWLGLVPREHSSGGSTSRGAITKAGNGRARRLLIESAWTYRLPARIAAELLARSAALPEAVKAIAWKAQVRLCARYRRLRCTGKPTNVVTVAIARELAAFAWAIAITVMPAPQTA

SEQ ID NO: 488353 - protein, 409 aa, unidentified
MLLVGDDWAEDHHDVELMDSAGRVLARARLPEGAAGMARLHAMIGEQLGEDAEAGGVRVGIETGRGLWVMALAAAGYAVFGINPLQVARYRERHGVSGAKSDAADAHTLADMMRTDAHQLRPVAADSPAAQAVKVVARAHKTLIWERTRQVQRLRHQLRDYFPAALEAYPDLAAPGTLELLAKAPDPASAAQLTTAQVSAALKRARRRDITARAAAIRAALRGEQLAQPPAVTAACAAVARALAAVITALNTQIKVMEGQVEAHFLQHPDAEIILSQPGLGPILGARVLGEFGDDPHRYASGKARKNYAATSPITRASGKRKTVMARYVHNDRLRDALDGQAFAALSASPGARAYYDRQRARGLSHRPALRQLANRLVGILHGCLKTRTLYDEATAWPHHASQEIKPAA

SEQ ID NO: 488354 - protein, 365 aa, unidentified
MAVHTLFGVPPLNQGSIAMAYIGVDLHTNSFTICRLEDDGSEQFETFQLCAADLERFCLDLSADDEIAIEATGNSAYFRDEVISCVGRVVVVNPGQFQVIRKSVSKTDKNDARALAFYLSKDMLPETRLKSKKHSELASLTQTRDLLVKQRTRLLNKIHALFNRHGIKLKKEKFTSKRSLEHLDMGIFSELERIELGLIRDQALSLTQAIKEADLQIEQFATSLEGFDGLTSIKGIGPRAAAIFLSAIGDVNDFESENKLAAYFGIVPRVSQSNETDHRGRITKRGNKLVRTALVQCSLIAIRYSGYLNSHYRRIRERRGAGKAIIATARKLLKIIYDTLKNGWIFKDFTTFTLAEMKTTTGQTS

SEQ ID NO: 488355 - protein, 400 aa, unidentified
MLSIGIDVSKGKSTVCGMKPGGEIVYTPFEVQHTREGMSELVSLLRSSGEEVRAVLESTGSYHCPVVAALLENGIFVSVVNSLRMKRFCSQSIRKVKTDRIDAMQIALYGLAYWQELQPARLPEDTYRELQLLARQYYQMTSMLIKAKVDFNALCDQVLPGMQELMSDHAGRHKLSDFVLRYHHTAHILKMGETRFRKDYCKWAEKKGYRNCERMAAHIFATAQNGIPVLPNAPSTQIVITEAIRVLHTVEASRDAILTQMQALAKTLPEYSLVREMPCIGDTLAPRLIAEIGDVRRFHSKRALIAYAGIDAPPYQSGKFCANNRHISKRGNRYLRKTGYEVMQSYVMHKPANDPIFTFIEKKRGEGKSGKLAMVAGLNKFLRIYYGKVTELYRSLPAIE

SEQ ID NO: 488356 - protein, 409 aa, unidentified
MPELWAGTDAGKAAHHCTVIDADGKRRLSRRVANDETELLKLIADVLELSEGESVTWAIDLNSGGAALLIALLIALLIALLTDNGQQVLYIPGRTVHHASGSYRGDGKSDAKDAFIIADQARMRRDLEAMHRGGDIAVDLRILTSRRLDLTADRTRAINRMRAQMLEYFPALERAFDYSTSKAALVLLGGYQTPAELRRIGKNRLATWLKNRKVRNYKQVAATAVEAAQAQHTAVAGERLASVMVAKLAREVTAIDEEIAETDALIEGRFRDHPAAEIVLSMPGIGPVLGAEFIAHTGGDMSVFGSPDRLAGVAGLAPVPKDSGRVSGNMRRPRRYCRRLMRVFYMSAMVAARSCPVSQAFYERKRAEGKSHKQAIIALARRRLNVLWALIRDGRTFETTAPAPASALA

SEQ ID NO: 488357 - protein, 363 aa, unidentified
MSDGICFVGLDVHARKTAAAAVQLGSGEVWKAQLPGSSAAAIEWLQSLPGEVRAVYEAGPTGFQLARAAREAGVEVMVCAPGAIPRQPGDRVKTDTRDALKLARLHAAGQLRPVLVPAPELEALRDLVRAREDLRGDLMSARHRVSKLLLRHGLIWAGPGATWAQRHLQWLSKVRFGQPLLEVVFGEYLAHHEVLLARRDRLDALIAEESVKGPWAPIIARLRCLRGIDTLTAVGLIAEIGDTTAFSHPKQLASYLGLVPSEHSSGERRTQGSITKAGSSHARRLLVEAAWHYRRRPNLSLELKRRQQGQPPAAVDAAWRAQMRLHRRWSHLDGQRGKKRTTVAVAVARELACFVWEISNQPG

SEQ ID NO: 488358 - protein, 353 aa, unidentified
MRAVFGIDVSKASSEVVILVNGEKGHGYPITKDVIGFNQLLGDLKTVHHTKTTGVYSRRPQAFLDDHGYAYTRLNPLEAKKQLDSLRVRKTDKIDAEKLAQPQFVLNRKTTYVQEEVYQNLRDLSRFYQNLTEDIVCTKNRLHKVLQVTFPELENILSASTGEQYWSLVMAFLFKELVLRLTQSELMAIIFRFTSKRISDKRATYLADKLRELAKQSYCAVKKTSPILEEVRYYAQELLRLSERRQAVLNEMVFLAQPLPEYNILLSIPGIAETTATSLIGELGDIRRFQSANQINAFIGIDLRHYESGNFLAKERISKRGNPYARKILFKCIHNIASASHTKPCHIADFYEK

SEQ ID NO: 488359 - protein, 394 aa, unidentified
MRFAGVDIASETHVVALVDEDGKVLVKPTAFAEDAAGYEKLFAQLGASAELLVAMEATGHYWKNLFAALAARGFSVALLNPLRTHRFAEEDLQRTKTDAIDALGIARFAAQKRPPATRLPDPATEELRELVRLRERLLQDFGDRVRQLHRLVDLGFPEFTRYVKGLDSELASAILHDYPTAAAFRGVSAKRLAALRYDGRHQVGAELAGLLIAAAKRSVGHHHGEAYRVQVRYACEDLDILRRRLRQLDRDIAGTLGAHEVGTLLTSIEGIGPTTAARLIAELGDPADFRAPGALAAYVGVVPALSQSGKRKNTRAATTPIGNARLRAALWMPTLTAVRRNPWLRAHYQRLLARGKLPKVALVACMHKLLFAVYSVAKHRRPFVARLATAETTP

SEQ ID NO: 488360 - protein, 344 aa, unidentified
MKIVGCDFHPSFQQVAILDVVSGEVREMKLTHANGEAERFYRELEAPVLVGMESVGNSLWFERLMEQLGHELWIGDAAQIRASYVRRQKTDKRDAGHILRLLVENRFPRIWVPCQRERDQRQLLLHRHRLVEMRTRVKTELQHLALNQGMQQKRHLWSVRGRADFEKLPMEGWTARRRTDLLKVLAMLEGQVADLDEAVGLVASSNAQARLLMSQPGVGPITALAFVVTMGDVRRFKRGKQVASYLGLIPTERSSGSKRRLGAISKQGNVFLRTMLVEAAQSAVRHDEQFKKEYAHRCHQKPKGVAKVAAARKLAIRLYWMLRTQTPYRAAVHNEGSPSHPVVG

SEQ ID NO: 488361 - protein, 402 aa, unidentified
MNCVGIDVSKGKSMIAVMRPFGEVVISPFEVLHTDSELSKLAGLLKSLDGETRVVMESTGNYHAPVAWLLHDAGLYVSVVNAMLVHDYGNNSLRRAKTDKKDAVKLANYGLDHWLTLPRYVPDEDTRLMLKTCYRQYQQYSKVQTMLKNNLISLLDTAFPDANRLFTSPPRADGSEKWVDFVAAFWHCECVCGLSEKAFTAKYQKWCKKHGYNFSKDKALDIYASSCGHFGVMPKTDTAKLLVEQAVSQLRATSAALAALKQEMQSLAASLPEYPVVMGMFGVGPTLGPQLMAEIGDVRRFHSKKALVAFAGIDAPPYQSGQMDVRSRSISKRGSASLRRTLFLVMGVILQHAPMNEPVYQFMNKKRSEGKPYRVYMIASANKFLRIYYASVKAYLDSLEHD

SEQ ID NO: 488362 - protein, 336 aa, unidentified
MNEHTGRWVGIDISKSKIDVALVDERGKVKNHVFANDAKGHAALAHWLTQRGCLPEHTGLCMESTGPYSEAPAVALTDAGWSVSVVNPARVKGFAQGELLRNKTDRADAALLARFGLAMHPGVWIAPPVAVRHLRALVDRLQSLKEMLQQEANRLEAALNQPLMQTSIHSHMAWLQASIKELQKQINDHIDANPELKSDAQLITSIPGVGSTTAAKVLAYLGDVRRFKNAKALAAFIGVTPRQKQSGTSVRGRSTISRNGHTGIRHSLYMPAMVALKHNPIIKQFGERMKQGGLAPKAVISASMHKLVHLIYGILKSGKPFDATFNRIGLDFQDGI

SEQ ID NO: 488363 - protein, 339 aa, unidentified
MELTVTAIDIAKKVFQLHWVDPDTGAIERLKLKRAQLLPWFANHQPTLVIMEACAGAHEWGRQLRNLGHDVRLLAAKTVRPFVQRNKTDAADAQAIWTAGQQPGAKFVAVKSDAQQVVLSLHRLRAQLMKMRIMQTNEVRGLLYEFGIVLPEGHRPLLKELPTALLEAQSRLPAMLIDSLNEQVRRIHSLEADIGLVERRLSQQLRDTPACKTLADIPGVGLLTATAIVASMGSPTAFKDAREFAAWIGLVPRQTGTGGRVRQLGISKRGDAYLRTLLMHGARAIVRPDRRTSWPWLAELLKRRPYNVAVAAVANKLARTIWAVLAKDQQWRPHAWQPA

SEQ ID NO: 488364 - protein, 321 aa, unidentified
MDHFAGLDVSVKDTSVCIVDDTGKITREVKVASEPDALLTVLKNPAYHFKRIALEAGPLSQWLFSALAEADLPVICVETRHMRAVLKAQINKTDRNDARGIAQMIRVGLYRPVHVKTLRSQKLRMLLTHRKLLQSKAIAVDNDLRGTLRNFGLKVGVVGAARFEARIRKLVEGFPDLAILIEPLLVVRRVLREQVGILHRRLLAVVRDDEVCRRLMTVPGVGPVVALTYRATVDVPARFRKSKSVGAVFGLTCSRDQSGERDHPGAISRCGDEMMRTALYEAAQVMLMHSVKWSWLKAWALNIAKRLGQQKAFVALARRLT

SEQ ID NO: 488365 - protein, 352 aa, unidentified
MSLLPHPGMCAGIDVSLKELSIAWKNRKGERQEFSAPNTAVGHKKLADMFGRTSRPSRIVIEATGSFHIDLAIRLAEEPGIEVMIVNPLAARRFAQAQMRRAKTDRVDALMLLEFAERMEFVAWTPPRAVILEFRAVGRHLSRLVEERTALQNQIAAASATSTTPAFVLSDVRAGLTAIEARIGACQAEALRVVASDEPLTAGHRALVTVKGIADRSAILIASELAVLDPTMTADEVVAQAGLDPRPYQSGTLKGARRTSKVGNARLRGAMFMPAMVAARYNPPVREWYESLIQRGKGATVAFTAVARRLLRTLWVIYKTKTAWDDALFRPKAPRVPPAPSEKNSVTAPAAP

SEQ ID NO: 488366 - protein, 324 aa, unidentified
MIDAVLGIDVSKNTFDTNLGAGTKARSKSFANSPDGWHHLIAWLGEYKIGQVHACLEATGRHGLGIALALHEAGHVVSIVNPAQIRDFARTKLGRNKTDQVDAVHIREYAELFKPRPWTPPSPAMRRLCELQTIRAGTVAGLTEWKNRRGSGITDDLARSLTETTIQHFTSQLEAVDQAIAETIDNDVELSAKRDLLVSINGVGKALAGIVLAELPGPDILGSSAAAAAYAGLNPQQHQSGISVNRPVRISKIGNAVLRTALYMPALSAMRYNPAVAALVDRLKAQGRLKGKQIVIAAMRKLLVLCFGVLKTGKKFDPAMAMGK

SEQ ID NO: 488367 - protein, 399 aa, unidentified
MKNEIVVGIDPHSDSLGGVIMHEHNILSEFSIPNCSKVHTDRLISEAENFAKQFSAQTVFAIETTNVFWRPVFSYLKRLGKTVFTVNSLQTKNARGTKMRKTKTDIIDAKNIVAVYQQDNAHKTNFPEGVLFDLREITRLYSWLVNIQARFLDRIHCYLFQVFPEIFSVFKKKSVNSNTVLTLLEQELLHPENLKNTRIDKLTNVLVSASSGHFNRETALKLKELAKTSFGIPEGKQGFTTCLKTLSKLYQHFDNLLKTLEVETIEPLLSTVSHPFSSLKGLGTMQTASFVSELGNPKNFQNADDVVAFFGYDPSISQSGKRSGQGKHISKCGTKYGRETMYLAAGSCMLNNPVLKKKYKKLKTKRFWKDAKSILAADLIKICYVMYRDNVPFDPNKIH

SEQ ID NO: 488368 - protein, 342 aa, unidentified
MNHYAGIDVSLECSSVCVVDANGKIWREARVASEPEALIAWFHSLGFGLERIGLEAGPLSQWLFAGMKAAGLAVELLETRHVRDAFKAMPVKSDRNDARGIAQLMRLGWFRPVHCKSLSAQETRATLTARKLVQSKLRDVENSLRGILRGFGLKVGKTTERKFAERIRELAADHPHLQRIADALLAVREVLRTEFAAFQKQTRKMAQSDSRTRLLMSTPAVGPIVALTYASAIDDPGRFKSSKQVGAHFGMTPKKHQSGETDYTGRISKIGDGSVRTALYEAAHIMLTKPVKGCSQLKSWAMRIARRAGMSKAKVALARRLAVIMHRMLADGTPFNAAAAAA

SEQ ID NO: 488369 - protein, 364 aa, unidentified
MQDSITYVGLDVHSDSIAMAILFPGVSKPEIRLIDNTPKTLRKTFKRLQKGARLMCCYEAGPTGFDTFRQLTELGVHCDVIAPSMIPRRPGDRIKTDRRDATKLAQLYRAQELTAINVPTAEQEADRDLVRAREQIRRDLMVARHRLAKFLIRHGHMFRAGRRWTDRFWRWLKGISFEHPSAQATFEHYQLQVQLLMERKNDLMQMIEQLAQTEPYRDAVARLTCIRGIGVLAAMVLLTEIRDFRRFGHPRQLMSFVGLVPCEYSSGHKQKRGHITKAGNSHVRRILVEAAWHHRNPASIGAPTLRRLPDQPPEVEVIVKKSQWRLVKRYRKLLGWGKKPQVAVTAVAREMCGFLWALMTLEAA

SEQ ID NO: 488370 - protein, 461 aa, unidentified
MSKKKPPGKQQGSARNKVDWKALDIVHPEAAGIDVGGSEHWVAVSPDRDPEPVRRFGCFTADLREMARWLIDTGVRSVAMQSTGVYWMPVLEVLEQNGLEVYLVNARHTKNLPGRKSDVQECQWLLKLHAFGLLNNSFQPSNEIRIARTLWRHRGNLVAEAGSAIQRMQKVLTEMNIQLGNVLSDLSGVSGMKIIGAILEGEHDPWRLAGLARPEVKATPEEMAKSLEGNWREELLFLLEQEVELYHFYQKKIVDCDLQLRKHLKSFASTADVQAQPLGPKPKGKKGSRNAPQFDLRTELYRITGIDWVQINGIDVLTAQTVMAEAGADLSAFPSEKQFASWLGLCPTNEQSGGKILNRRTRKVVNRATVAFRNAAATLLRSQSYLGAQYRRLRTRLGAPKAITAMARKLACLYYRLIKHGQQYVDKGTEYYETRYREQQIRSLAKRAQKLGLQLVIPKPA

SEQ ID NO: 488371 - protein, 475 aa, unidentified
MEKLSNKREEVIKLLERQRIRDVKDLESYKLSECHPASAGMNLGSKELYVALHPAIAAELDIAIVHRFATFTGDLLACKDLLVHCGIKTVAMESTSVYWTTIYFILEEAGIEVCLVNPKKFRMVPGRKTDIADCQWLQTLHLYGLLRGSFHPSQDISMLRSYMRERDSIIKERSTFVQRMQKALVRMNLLLHNVIDDITGKTGMKIITSILDGKRDPKLLASFRDPHCKKSEEEIAEALTGYYKEDQLYLLKINFQSFSFFDKQLCDLDKEITKLLKYFPHKKEKKEKRPANGKSKSRGKNDIRTTENLEEVLYHVLGTDLSALPGIRANAILQIIAEVGTDMSKFPDAHHFASYLGFVPHNKITGGHVISAKTDRIKSSAAQAFRKLIPSISQTKTALGAFYRRLAPRIGKAQAIIATCRKLAILFYNTLAFGKAYLEQGEVKYQQKQEEWERRKLANLAKKYNCTLVNQTVKQ

SEQ ID NO: 488372 - protein, 355 aa, unidentified
MTGTKYIGMDVHKESISIAVMNASGKIVMECVIETKASMILQFFDGLRGDLQVTFEEGTSAAWLYDLLKPHVTKLVVCDPRKNASMREGNQSDKIDARRLAELLRLNHLNPVYHGEHGLRSLKELVRSYLTITKDLGRVMSRVKAIYRSWAIPCTGKQVYAPRHRAEWLGKIGEPGVRRRAEFYYQQLDALRTVRQQVRRELLVESKKHQAWKRLCQIPSIGPIRSAVLLGILQTPHRFRTKRQLWTYSGFGIETQSSADHRSVDGQLQRVKKQSSIRGLNRNCNHDLKNLFKGAAIVASSKPGPFQEFYTALLTKGIRPEMARLTLARKIATIVLIMWKRGACFDAQHLKPQTA

SEQ ID NO: 488373 - protein, 414 aa, unidentified
MEKNGRIAGIDVHKKMLAVVAAEGSSEGPLRFERAKFGTMESELRRMANWLKERNVGEVVMESTAQYWKPVWQQLEGQCQLYLAQAQSNRGPRGRKRDFVDAERLVRRQMAGELILSFVPDGEQRLWRIMSRTKYQLRRDRVRLHNQLEAFLEEARIKLSGCVSDLLGISSRRILEALSQGESDLQKLAAMVEANLRATPEQLQDALQGAKHLSEPHRQVLGLFLARLKLIEEQIEALNSNLGQSLRQYNDAVVRLAEMPGLGVDSAQQVIAEVGPTAATFPSPQELCSWVGTCPGKEESAEVSKSNRSPKGNRMMRRLLNQAANAAVKTKGSIFQNLYRRWVPRLGHNKAIWAVANRLCRLVWKILHQGDRYIEYGNRPNPKTVKARAKRMIRELQALGYQVQIVPPAEPLLS

SEQ ID NO: 488374 - protein, 374 aa, unidentified
METIYIGVDFHARQQTICYLKTETGELVTCELKHQDKQKVRAFYAQFRGQVIVGLEASGYSPWFERLLEELGCEVWLGHATEIRRRARWRQKNDRRDAELILDLMLHDEFPRLHRPAVQSREVLRMLRYRQKLIKIRTMSKNSLQALALQSGLAKGSRLFTQAGQQELSAAVMSPVMHWQREHWLQLMEPLNQQLLETMVWFKAQSKDDVCIKRLRTHPGIGLLTSLCIVHSLQPVSRFRNTRKVAAYAGFDPVERSSAERKCFLGISKAGSRVLRFLLVEAAHTAIRKDEDLKRFYKRLAERRGRPKAKVAAARKLLIRAFIMMRDEIDYAEFRRRAVAARLARRGQGPKEPEVLIGQPASADHRDELTSENQ

SEQ ID NO: 488375 - protein, 448 aa, unidentified
MPGSSSPSRRRRARLRVVNPRSAGIDIGSRFHVVAVPAELDDDPVRKFSSFTNDLKSIAEWLLAIDIKTVAMESTGIYWVPLYEILVGRGIEVFLVNARHAKNVPGRKTDINDAQWLQQLHSYGLVRASFQPDPCIAKLRAYFRQRDVLVRYRSSHQQHIQKALMQMNLQLHHVVKDITGLTARRIIDAILSGERDPQRLATLRDRRCKESVETIAAALEGNYQEEHLFELKIAIEMFDAYSAKIQECELAGQAVLQELAGDGYVEPERQTSDSRIRGNGFSFNPQALITSVAGHDLLSLPGLGPATVITLISECGLDMTRWPSAKHFVSWLGLSPQNKISGGRVLSSRTRQGTTRAGSAFWMAAVPLSRTSSALGAFQRRLSARVGKSKALIATARKLAILYYKTIRYGMEFQELGDLAYQQASRDRQIHGLERRARSLGYQLVATG

SEQ ID NO: 488376 - protein, 409 aa, unidentified
MMKQNIIFGIDVSSKSSTVCVVIDRIKQGETFKITNDSFGYQDLLDRLNQYLITPLVVFEATGVYSLSLQAFLEDYHIKYLKLNPLKAKKLMDNNLRHNKTDKVDAYRLALIQFNAPQKLRAPQPKEYHELQNASRYYEELTQALIINKNQLHRNLQSTFPQIESILSTSSGRVYWTIVSLFPHAQYVLNHNENQVFQSLLAISGIGRQRAHYLTTRLYALARQAYPYDNESSITIRAIQRNIANLLSLSAERDNVINYMEKLAMQANARSLNIYESIPGIAKTTAVRLVAELGDLSRFDTSAQIDAFVGIDPGRYQSGEKDSHLGITKHGNHLARKILYRTITQMETVKATQPCHITDYYDKKKRSSNSRGYKKIAIASVHKLIRTMFALIKHDQLYDYNVATHNQRL

SEQ ID NO: 488377 - protein, 346 aa, unidentified
MEQVIRIGMDTSKNLFQLHGVDASERPVLRRKVRRNDLLAFFVQQAPTVVGMEACGAAHYWARELSKLGHKVKLIAPQHVKAYVKRNKNDGRDAEALCEAMSRPTMQFVPVKSEEQQAALMLIGVRQQLMTRRTQLSNAIRGYAAEFGVITVKGLVKVEPLLAQIARDESLPALAREMFALQGRDYARLQVELKAVEARLMAWHRANADSCRLAKIPSIGLIGATALVMKAPDPRLYPSGRHFAAWIGLTPKDHSTAGKTRIGKITRAGDEMLRSVLVAGATSVIQQAMKGRGRPSPWLVALLARKPPKLAAVALANKTARIAWKLLTTGESYDGERMPVASKRAA

SEQ ID NO: 488378 - protein, 342 aa, unidentified
MYYIGLDVHKKTISYCVKDARGRVQQEGKVGSTRRELDCWMAGLPQPWTVGMEATIFSGWIYDHLLPHAVEIKVAHPLMLRAIAAAKKKNDTIDAAKIADCLRCDFLPECHMMPREIRDRRRTLRYRHLLVKQMVQMKNRVSGLLMETGVEHTKSRLHKVGYFHEMLSKNAEIDASIRPLLKLSRETIERCQKTEYALVSSLQRDPLLADRIRRLRTVPGVGPITALTWALEMGDVSRFRTIRQAISYCGLCGDERSSADKVMRMPLSKQRNKHIQRVLVEAAKLAPRLSPELAMVHEKEKQKGNSNRATLAVARKMVAYLLAVDRQQREFIPAEQRGSRAA

SEQ ID NO: 488379 - protein, 313 aa, unidentified
MQNIIVAGIDVSKSKADICILPDGIVATFSLDPDGITGLIEAIKASGVGLAVMEATGGYEAKLAAAIFHADILVAVVNPRQIRNYARAIGRTAKTDSIDAEVIALFARDVKPSPRALPDAEAAQLKELVDRRVQLVKTKTAESNRLQQTSNSKVMGSIKRTIRHLEKELAAIDSDIDKRIKDSPLWLEKKELLESTKGIGDATTRILIADLPELGKLSRYQIAALVGVAPMNRDSGKYKGYRKISGGRSHVRHALYMATLSAIRYNPKIKAFHDRLERKGKKGLVIMVACMRKLLLVLNAMARDNTTWNPKNA

SEQ ID NO: 488380 - protein, 410 aa, unidentified
MIHQSVGGLDVHKKMVMACRRRLLGDGQVESEVLEFGTTTLQLRSLSKWLSEWGCSHVAMESTGVLWIPVWNVLEGDFKLLLTNARQLKKVPGRKKDVTDAEWVGQLMQCGLLKGSFVPSREVRHWRTLTRQRMKLIDQRTGVVNRMHKILQQGNIKLSSVATDVMGVSGRAMIQAMIEGESDPETLASLAKGRLKSKHEQLVESLEGRLNQDDRWVMKELWEQMEYLEEEIARYDDQIKEKMSPYEESLERLMTIDLIERRSAENILAEIGPDMSFFPSDDNLVSWAGLCPGSEESAKKNRSGKTPKGDQWLRRALVEPAWGAARRKDGYLGAMYRGIAVRRGEKRAVIAVARTILQAAWHVLSKGEKYKERGGDYFDRINSEQTKIKLIRRLERLGFEVELKPKQATV

SEQ ID NO: 488381 - protein, 373 aa, unidentified
MAGNSQKLNEGELSLYSMLISQGYVPVGVDLAARVFQVCYLTDKQKIKNKALSREAFLDFLNNPPFSQPLMVGFEACGGCNYWARFIESLGHKYRIMPAASIRAFLGLQKTDKIDALGIFKGTICPSVRTISARDEENQTLMNLLAAREQLIKQQTQSLNAQRAMLYELGEICGEGAAKIDAATDKLKLSLEENHSEAICNFRMIAEPFKANRDALETQIKQIDLYLKQYAKNNKTVQNLMTIPAIGVLSAVTLYAVIGNPDDFPNSRHFASFAGFAPRVSGSGGIVQVGMIPHTGNRQLKKILYMCAISRFAQQSRKASTETEASKLTQLIDNPEISNKKIVCSIANRLARVAWTIAKSGQPFDANKCRLLG

SEQ ID NO: 488382 - protein, 431 aa, unidentified
MQTSTKMSRCERQYRADEALRFGRTSPRRSLLETHSFLAFGGIDWGTQTHEACLLDANGKRHGRRFPHSALGLAALVSWLTEALPVDTLAVSIELPHGPVVEALQAAGIAVFAINPKQLDRFRDRHTVAGAKDDRLDAFVLADALRTDLPKFTHLPPPDPFTCELREVSRAYDDLTDDLRVQANRLWQQLTFFAPHLLDFCGGADEPWFWEFCERALVAQQRPDRRWLRPLLERHHKRAVSADDLLAALRTPLLLGPSATAARFRIGTLLPLLRVIATGRQAARRRLRQLLRAAGRTAQIIDSHKGVDLIITATLLAEAPHAIATADLAALRTLAGTAPVTRRSGKSCFVVMRRSCNPRLRNAVRNWAFSAMTWNPHGSHLYHAARARGLPHERALRCGADRLLASLVATLRDDSLYDPARFNRDRSSPVP

SEQ ID NO: 488383 - protein, 393 aa, unidentified
MQNVLAIDVAKGKSMVTLISSSGEVLINPYEINHSINDFSILLNRINNLKLENISVIMESTGIYHKPIERFFLENNFKVYTINALYSKIYKRNLRKTKTDKLDCISLSELFFTNDFKQYVRPDEIYLNMNALSRQYFALDELCSNLKNRYRNLVYLCFPEYENLFKGEAIYSDIALSFISNYPHADIISNTRIDCLQNYFKNNNFRYWRRKATLIKETAKLSYPSVSKNDELVNDLSQMATLIKTYQSEINKIKFKLIEYGKQTKYFNKINSIFGIGEFTTSIIIAELGDINRFNNIKEITAYCGLDPSIKQSGKSINIHGPISKSGNKYIRKLLFISCLNIVRLSSKCHIENDIEIYYRKKRNEGKHHYAAIIACTTKLLRQILALCKQLDN

SEQ ID NO: 488384 - protein, 348 aa, unidentified
MALTIVETRAVTGGVDTHADVHVAAALDPVGGLLGVQEFPATPAGYARLLDWLGGFGTVCLVGIEGTGSYGAGLSRHVTGAGVRVVEVDRSDRQDRRRQGKSDPLDAVSAARAAQSGRARGAPKGRDGTVEAVRALMVAKRSARSERTQTINQARALVLTGPADLRTRFAQHTVAALVAQTAALRPRPGDVVGYATRIALRELGRRAEFLDGQLERLDELIVPLVAGHAPGLLALYGIGPDTAALLLIAAGDHPERLRSEAAWAHLCAAAPIPASSGKVTRHRLNPGGDREANHALWRIVITRMSSHPPTRAYVERRSKEGLSKKEIIRCLKRYVAREVYPCLRPPAG

SEQ ID NO: 488385 - protein, 408 aa, unidentified
MKSNTQNAKIEAITEKTLVLGIDVGSEMHYARAFDYRGIEYSKKPFKFSNTEAGFATFKEWILDLKERHEKDKVVPGMEPTGHYWFNLGKFLQDNEMKPVLVNPHHVKKSKELDDNNPTKNDRKDPKVIAGLVREGRYMIPYLPEGVYADLRTASNIRFQLQAELTRIQNKSGMLILKAAPLPEDILTLGIDGVNQIWRDAKLRAVGKARAKTLIEAAEHSVGSKEGAVSARMEIRMLLEDYESRNIRLQEVMALIEGLVKQIPMAEKLLEIKGVGIRTVSGFLAEVGDISRFNNPKELQKLAGLALVENSSGKHKGETTISRRGRKRLRYLLFEVAMSLVAKNPEFRELHNYYTTRRLNPLKKMQSLMAIAAKLIRVFYAMLTKGVDYDPKKMVSDIKRPAVYLQAA

SEQ ID NO: 488386 - protein, 512 aa, unidentified
MKTTTNTGTNQGNVEGMVKLKRADYRREKKEQEKKAEKRRKAAKDQKSPVAIRTQEQEELIKKSEEILKNLKAQTWRELETKGKFGKNDKLSFISDDMLIVGCDIGSELHYIRAIDTRGREISKKAFSFENNEDGFVQAKEWMAGLAARCGKRQIVLGLEPTGHYWFDLGVWMIANGISVVQVNPYAVKQTKELEDNSQDKNDRKDPKLIANLVKDGNFGMPYLPEGVYADLRRLSMFRDQLTEDRGRAANRLHRELKIYFPEYKDAFGKMDGAFTVTLLKEAPLPADLLKIGEDGIKEIWKKNHLRGCGYNRAPKIIEFARKSVGMRDGTDSSRQAVIWFTEELEKLNKRLSEVQDQMEQKMKEVPHAKNILEISGIGDGILSGIIAEMGDIDRFDDVKEIQKLSGLGLVACSSGKHKGETKISHRGRKRLRYWLFQGARSVVVHDEAFKKLHAYYTTRDVNPLKKMQSLVVIACKLLRIIYKILKTGVKYDHDKMQSDIVYVTHTLPAVG

SEQ ID NO: 488387 - protein, 341 aa, unidentified
MLYVGLDVHQKRSSICILNQDGKTVKQELVNGRWPQVIDRLRRIDQPFGICYEASCGYGYLYDQICALPMASGVSVAHPGQLRLIFKSKKKHDRVDAQKIAKLLYLGEVPAVHVPGVDVRSWRKLIEFRQKLLAKRTAAKNQIRAILRGNALTAPRGLCTKKSLATLATLELPAGEKLAMEMALEEIAELTARIKRVEKELKKIADSHPGVTLLRTIPGIGIRTAEAFCAYVDDIKRFSRSRQVGAYFGLIPCLDSSAGKDRFGHITKDGPSTVRKLLCEASWVAVNQDPAIKERFDRIVNGDKDRRKIAIVAIAHHLCRVMAAMLRSGEVWRGHADKQEH

SEQ ID NO: 488388 - protein, 433 aa, unidentified
MKVLYERVAGIDVHKDMIKVAIRSPGDKPWTRKTEILEYRTFYGVLQQMARELRKRGVTHVVMEASGVYTEPVYYALCEQDFIQVAVINPAHAKALRGHKTDAKDCARLAELFECGLLRGSYIPAPELKEVRDLTRYRMKTVQARTSEIQRLGKALESAGIKLGSVASSITGTSSTAMIEALIDGERRGPVLADLAIGRMRTAGKLADLSMALAGRFTEHHALLCRLHLDRIAGFDDAADGLDKQIAGKAARWQRETGLLTSVPGFGDVVAQAWLGEIGPAPHRHFSSHEKLASWVTLCPGNNISARKRKHGRTGDAGTYIKPMLVQAAWNAIRVRGRLQARYNRLVRRFGGDKNPAAKKKAITAIAHTLLKIAYQVLKSGTPYQDLGADFYTRRESPEQKQAWLQRQLQRLHPGCTITITISPPEAALPPAA

SEQ ID NO: 488389 - protein, 339 aa, unidentified
MEQITTVGVDLAKSIFQVHCNDSNGRMVLNKKVRRRDLLMFMSTIRPCLVGMESCCGSHYWARKFTECGHTVKLIPAQYVKPYVKTNKNDAADAEAIAEAVTKPNMRFVPIKEPYQQNIQMLHRIRSRLVGNRTALCNSARGFLMERGIIMSKGIQKLRKDLPNIISDAGNELTDMAREEMHNLYSELCSIDVLVTEYDRKIQLIYDNDEACKRIGKINGVGIITATYVRAVMGDPRTFKNGRQFAAWLGLVPRQHSSGGRNNLLGLSKRGDIYLRMLLIHGARTVVMYSEGKKDRLNRWAQDKIATRGFNKACVAVANKNARIIWAMLAHGEEYKMAA

SEQ ID NO: 488390 - protein, 347 aa, unidentified
MRFYNRQHRHYCGIDLHVKTMYLCILDAGGQMLMHRNVKSTPEAFLETVAPYREDLVVAAECLFTWYWRADVCAAEGIAFVLGHALAMKAIHGGKAENDKIDSHKIASLLRGGLLPQAYVYPAGMRSTRDLLRRRLHLVRKRGELRAHIQNTRAQYNLPAFERRLAYPANRDGVSAHVADPSVRKRVDVDLALIEQYDALIVDLERTIVREAKRHDADAFHRLRSVPGIGNVLSLTILYEIHDITRFDRVQEFASYARLVTCKKESGGKKLGTSGAKMGHVHLKWAFSEAAVLCLRHTTHGKTRLAGIEKKHGKGKARSILAHKIGRAVFYMLSRGTVFSMEKFLAA

SEQ ID NO: 488391 - protein, 347 aa, unidentified
MNFYTQQHKHYCGIDLHARAMYVCILDQNGTKLVHKNLPTTPEAFLRVLAPYREDVVVGVECMFTWYWVADLCAKEGIAFVLGHALYMKAIHGGKAKNDKIDAHKIAVLLRGGMIPQAYVYPAEMRATRDLLRRRCHLVRKRAELLAHIHNTNSQYNLPEIGKRLAYKSNREDVAAHFPDPSVRKTIELDVSLIDHYDKLLGEVELYITRSAKTHDVQTFARLQSVPGIGQILALVILYEIQEIARFPRVQDFVSYCRLVKCAKESNGKRLGTSGKKIGNVHLRWAFAEAAVLFIRQSQPGKEYFAKLEHKHGKAKALTVLAHKLGRAVYYMLTREHAFDLNRFVTA

SEQ ID NO: 488392 - protein, 319 aa, unidentified
MAQNDLVVAGIDVAKDKVDVCIRSLSSKRTFASTAEDRCKLASWLRRNKVGKAVMEASGGYEREWAKALRDAKIEVRIVDPKRVRSFARSAGRLAKNDTIDAEMIAWFAETFDQARGQAYDATREQLYQMVHARQALKDMQSKLTSQGEHAVPAAVQRSHAEISKTIVVELVKIEDEITALIEATPYFAELAEIIESVPGLGRTTAAALIAAMPELGQANNKIVASLLGVAPYDDDSGRRRGERHIKGGRRRTRNIFYMACLGAATQHNPMLKAFYDRLVTKGKLKKVALTACMRKLISILNIMIERRQKWDAKRYSVS

SEQ ID NO: 488393 - protein, 266 aa, unidentified
MTRFVGLDVSQKLTAICVVNETGRRLWRGQCATDPGQIERMVKGHAGEDARVGIETGPMTPWLVHELRGREFDVVCLDARHASAALKMQMNKTDQNDAEGLAQIMRTRWYRPVHVKSLDAHRARALLGARAQLVGMTTRLSNHIRGVLKTFGMLPGAMRGLPFDRRVEELLVGRDDLAPVVRPMLAAWRQLREQIAAFDKAVRALAKASPTCGLLMSVPGIGVLSVLAYVSTVEDPARFARSRSVGAHMGLTPRQYQSRAFKIVGC

SEQ ID NO: 488394 - protein, 352 aa, unidentified
MQRFIGLDAHGQSCTLCVMGPSGRRLAHYVVETNGKALVEQMRSIAGERHVCMEEGTHCEWLHEVLQPHTKRIVVTQPLKRKGAKSDAIDGWQLADLLRRDAVEHSVFKSPQSFTALRQAARGYVAMQSDMVRAKCRLHALYRSRAVTPTAEIDDEAERGAWVKKLPVSHQPLAELLSEQLDGLIQAHQVAEAWLLEEAKRVPVTRRLATVPGIGPIRAALLVAIVVTPARFRTTRQFWSYSGLAIVTRSSSDSVRENGHWVRKPTAQTRGLNRNRQPLLKALFKGAATTVIHHLPKHPLHQDFQRMVSEAGVKPNLAKLTLARRIAAATLAIWKHQEDYDPSKQRRAPLSQ

SEQ ID NO: 488395 - protein, 460 aa, unidentified
MKRKHEKKRQEMRSGDRGPLPLITPDAAGIDIGSGEHWVAVPEDRDENPVRSFGCFTADLHAMARWLKECGITTVAMESTGVYWIPCYQVLEAHGFEVKLVNARHVKNVPGRKSDVSDCQWLQRLHTYGLLSASFRPENEICVLRSYWRHRDNLVRYASSHILHMQKALTEMNVQLHKVIADITGVTGMRIIRAILEGERDREKLALMRTPGVKSTPEDIAKALEGDYREEHLFVLKQALELYDFYQDQIEACDREIEACLSRFGTKVDLESHPLPPVKKGKKKPKGGPLVDLRAHLYRMTGVDFTQVDGLDVLTVQTIVSETGLSPEAFPTMKHFTSWLALCPDNRITGGKVKSTRTKKAANRAAMAFRIAAQSLANSNTALGGFYRRIRARLGAPKAIVATAHKLARIFYTLWKTGKQYVDLGARHYEERYKDRIVRSMKKRLHDLGYAVTIEPMAEL

SEQ ID NO: 488396 - protein, 327 aa, unidentified
MGSGSLYVGIDGHKNFSFLCAMTKEGEIIEEKKVRNEEIEKIIEELGLDNLIVIIEPTTTTYPLVRGLRKKTEIKLAHPQKTKLIAESKKKTDKVDARVLADLARTNFLPTAYLPPDEIIELRDIVRERVRLKKLSTSIKNRIHSILMIEGIKYSNPFTSEGIKFLKSLNDGRINRYLRILNTINEEIKEIDKEIREKCIENEEIMILTTIPGIGYFSALLIYAEIGDINRFPNSKKLCSYAGLVPTVRQSGNRVIRGRITKEGNKLLRWVLVQCAYVAVRKDERFKEFYNRIKQRKGSQKAIVATARKLLTVVYACWKNRAPYGRG

SEQ ID NO: 488397 - protein, 343 aa, unidentified
MGTQITGGVDTHLDVHVAAALDAHGALVGTASFATTPTGYHELLSWLASLGEVVLVGVEGTGSYGAGLARYLETVGVGVVEVDRPNRQRRRRAGKSDTHDAISAARAAFAGDALGVPKTRDGNVEAIRVLRLARGSARRDRTRALNQMRALITTAPDELRAQLRGLSIPRLVRTAARFRPGGRTDVANANRLALKTLARRVLELDHEIETLDELLTPLVAETAPEMLERVGVGTDTAGALLVAAGENTSRIRNERSFARLCGAAPLDASSGKQQRHRLSRGGDRQANSALWRIVITRLSYDRATRDYLQRRCDEGKTKTEAIRCLKRYVARELYACLPPETLA

SEQ ID NO: 488398 - protein, 455 aa, unidentified
MPRKRTEDRPELKPVNVGAAAIDIGSRMHMAAVNPVCTDVPVRSFGTFTQDLHDLADWFKACGVTSVAMESTGVYWIPVYEILEQCGFEVILVNARYAKNVPGRKTDVSDAAWLRQLHSYGLLRGSFRPDAEIATLRAYLRQRERLVEYAAAHIQHMQKALMEMNLQLHHVVSDITGATGMRIIRAIVAGERNPDVLATYRDVRCHSSIETIRAALVGNDRDEHVFALSQSLELYDVYQAKMLDCDRKLEVLIAALSNKGAKPVGKLSKPRIKTKQVNTPTFDVRTALYGVLGVDLTEIHGLGPSLALKLVGECGTDLRAWPSAKHFTSWLCLAPGNKISGGKVLSSRTRRSSSRAAALLRLAATTVGRSDTALGAFYRRLSSRAGKSKAVTATARKIAVLFYNTLRHGMSYRDPGADHYEQQYRNRVLANLQRRAKSLGFVLQAIPGDADPAVS

SEQ ID NO: 488399 - protein, 353 aa, unidentified
MKDLTVIGIDIAKNVFQIHGANSHGKKLLKKRVSREGFLQFMVGLPTCLVGMEACGSAHYWAKELIKLGFDVKLMSPQKVKKYADHQKNDANDAAACAVAVTRADMRFVPIKTDVQLAIQGLHRVRSLYIKQRTARMNMMRGLLAECGIVMAKGQAHLMKKLAALLDEACEQLSPVEKNLFKRLKEDWDKEEQEIIYHTSQLEKLAKEDDASRRLQTIEGIGPLTATAIVAKIGNGSEFQKGRDLSAFLGLVPQQYSSGDKQVLGSITKHGDRYIRQLMVHGGRACVHAASRVNKITGAFCKNDPHSIWIRELAERVGVNKACVAVANKNARMVVAILKNKTTFQPEMAHHGN

SEQ ID NO: 488400 - protein, 386 aa, unidentified
MQTVADRSEAPTAIRTDLGAIFVSLELSRSTWLITSLSPAGGEKMSKHVVRGGDVAGLLERFAQLREKTRARTGKVFPFVVIQEAGLDGFWIDRVLQNEAIESHVVDPASIATSRRRRRAKTDRIDGEALVRALLAYKRGEPRVCAMVKAPTSKEEDRRRLCRERKVLIAERVRHVNRVKGLLFSQGISGYEPLRRDRRERLDTLQTGDGRLLPDHLKAQVRRELDRLELLLDQIKAVEAERDVLLAAQQAPAPAAMLLDIKGIGPEFAAILWSEGLFRHFDNRRQVASYAGLAPTPWQSGSVDREQGVSKAGNPRLRTTLIQLAWLWLRHQPQSALALWFEERVRRNGGRLKKTTIVALARKLLVALWKYVTAGVVIEGAVMKRT

SEQ ID NO: 488401 - protein, 317 aa, unidentified
MSEPATFVGVDVSKAHLDVATRPGGATFRVPNDPAGVADLVGRLAPLAPALVVLEATGGYEAPALAALQVAGIPAAAVNPRQARDFAKATGRLAKTDRIDAEALAHFAEAIRPEPRPPAAPERLGLDALLSRRGQLVEMRTMESNRLGTCRDAAVRAGIERHLAWLDAELADAERRLDAAVKASPAWRERDELLRGIPGIGPVTSRTLLASLPELGVTDGGRLAALVGLAPYAHDSGTMKGVRHIRGGRADVRRALYMAALSAARREGPLKLFADRLRSRGKKAKVVLIAVARKLLTIANAVIRSGEPWRPELAMTR

SEQ ID NO: 488402 - protein, 523 aa, unidentified
MSATRSRRPGRKARPDVLQKPRGIVHPRVQAVGPEHFGIVAVDCAKARSKWMLADFYGNVLLPPAVVEHNRPGFGAAVAALREAVAARDIRDLLVAVERTGRYHHPVRRAFAAAGFEVRTVHPFTTKQFRQPADPGNKTDDTDLAAISRAAINGFALAEPSSPDESWRQLQLLTRHRRDLVRKASILCCQIKEHLDAALPGYAARFPTLWEHPAAMTLALRVGGADELLRASRAALAGVLDAAGVGFQQRTITRVLEWCASAGAPDVAASHVRRLAAGLEADRQGKELEIGAFEREIAALLCATPYVLLMSIPGVNVVSAAEYAAEMGPIGNYANARCITGRAGLYPSRYQSDAVDRAGPMIRCANRRLRSAIMQVADNLVTCNHYFALLAARWRARGDDPRLVRVRVAQRFARISFQMVAGGRVFDHPAARERDYVPQKLVAFHHRHQTPAVQVQHDLQQASKQLPPGEHAAEAKPLQEELTKIVEKRRRGPQPLGEILPAVLAALGAGVIQSPPSGSSDLT

SEQ ID NO: 488403 - protein, 390 aa, unidentified
MEARTVNNLPPAASHDDDAVRCVLAIELSKKSWIVAVNTPLSDKISRLTLKPCDGKELLDLCERIRTRVARETKQRVEIVSCYEAGYDGFWLHRLLEAHGIRNYVIDPASLQVDRRARRAKTDRVDAERLLRSLMAYLRGEPKVWSVVRVPSVAEEDDRRLHRERGRLINERIQHVNRIKGLLAIHGIYDYQPLRRDRMQPLDRLRTADGRTLPPRLKAEILRELQRLELVIGMIKAIEAERDAIASAKAQTEHTSAKKIQGLAKIKCIGPEFASTLVGEVFYRSFDNRKQLASYVGLTPAHFQSGATCHDQGISKAGNAKARTVMIELAWLWLRHQPDSPLSVWFRGRVGKLKGRIRRITIVAVARKLLIALWRYLETGLVPDGAALKL

SEQ ID NO: 488404 - protein, 342 aa, unidentified
MQIASIGIDLGKTTFHLVALDPHGSIVIRRKFSRKALLAYTAKLASSLIGMETCGGAHYLARVIREQGHEVRLIPGQFVKSYRKSNKNDYLDGEAIAEAVTRGNVRFVPIKTDDQLDLQSVHRVRERLVRNRTEVINQMRGLLLERGISFRRGPENLRHELPLLLEDAEQQLTPRFRALLAHLWQQWQYLDNQVEGMDRDIKAVAESDAACRRLRKIPGVGPLVATAVVASVGNGAAFQRGRDFAAWLGLVPGQYSTGGKAKLLGISKRGNSYLRRMFVHGARAVLRVKRDTGGFGQWVQRLAARAPRNKVIVAIANKLARIAWAVLSSGNDYQHPPLAAAA

SEQ ID NO: 488405 - protein, 452 aa, unidentified
MAKHREKKKAHGLVAAPVMEPNAAGVDIGASEIYIAVPPDRDMQPVRRFAAFTEDLKAAADWLEHCRIETVAMESTGVYWIPLFQILEARGMKVCLVNARHVKNVPGRKTDVSDCQWLQYLHAVGLLRASFRPSGQVCAVRSLMRHRESLVGMAAVHLQHMQKALDQMNLQLHHVISDLSGTTGMAILDAILGGERNPLKLAQLRDPRIKASPETIAKSLVGDYRREHLFTLRQSVTAYRSYRQLLACCDAEIEQMLGEFSDGAGPDTPVLADPKDRHRPRRNEMKFDLRGHLYRIFGVDLTEVPGLNALTAHTLLTEVGPDLSAFPNVGAFASWMGLCPDNRVSGGKVLSSHTRKVNNRAARALRMAAQSLFRSQSWLGQYYRRMRAKLGAPKAITAAAHKLARIVFHMLTNRHAYDETVFAQQEIQNQHRLQQKLMQQAKKYGFQLIPIT

SEQ ID NO: 488406 - protein, 419 aa, unidentified
MQSQAPAAFAAFVGLDWADAKHEVCLQAAGTAQREFLSLEYSPEEINAWVQTLRTRFNGQPVAVCLELTKGPIVSALRTYDFLVLFPVNPLTVAKYREAFTPSRAKDDPTDAELQVEILLKHRDKLTPLRPQSPTMRALAQLVEHRRRLVGDKVRLTNRLTSALKNYFPQVLHWFPEKDTAIFCDFLSRWPTLKAAQLARRTTLEGFFRAHHVRSTDLIATRIEAIKSARALTTDDGVIAPNVLLVHALVAQLRVTLQAIADFDQAIAQRAQDHPDFPLFDALPGAGAVFAPRLLVAFGEQRERFTSADALQKYAGIAPVTERSGKKSWVHWRLQCPKFLRQTFVEWAAESTRHSFWAQVYYQQQRDKGKAHQAAVRALAFKWIRILSRCWQNRTPYDESIYLQALNRRSAPLLHNLAK

SEQ ID NO: 488407 - protein, 395 aa, unidentified
MIDIDATGVFLGLDAGKSSHHGHGLAPAGKKVFDKALPNDEPQLRAVFDKLKAKFGTVLVVVDQPASIGALPLTVARDAGCQVAYLPGLAMRRIADLYPGEAKTDARDATVIADAARTMPHTLRSLELADEITAELTMLVGFDQDLAGEANRTSNRIRGLLTQFHPSLERVLGPRLDHPAITWLLERYGSPQALRKAGRRKLIEVIRPKAPRMAERLVEDIFTALDEQTVVVPDTSTLDLIVPSPAKSLAAVHEQRRALEAQIEALLEAHPLSQVLTSMPGIGVRTAAVLLTTVGDGSSFPSAAHLASYAGLAPTTRQSGSSIHGEHVPRGGNRQLKRAMFLSVFAALHDPASRTYYDRCRARGKTHTQALLRISILFATLRDGTFYEPRTPRIA

SEQ ID NO: 488408 - protein, 456 aa, unidentified
MAASKSTRARSSGQLTTINPNAAGLDVGATFHVVAVPADRDEQPIRTFRTFSGDLHRLADWLEATGIRTVAMESTSVYWIPVFELLEARGFEVLLVNARDVKHVPGRKSDVQDAQWLQQLHQHGLLRGSFRPRDGVVQLRAYLRHRERLIEYAASHIQHMQKALMQMNVQLHHVVSDITGATGMRIIRAIVEGNHAPEQLAEFRDVRCAASEATIRAALTGNYRAEHVFALRHALELYDFHQAKIAECDAEIEQVLRTLNEARTTPTQPLPPARHAKAKNEPEFDARPELYTLLGADLTQIHGFGAYTVLRLVAECGDDMRKWPTAKHFTSWLSLAPRNKVSGGRLLSSKTRRSSNRAATLLRIAAVNVGRTQTALGAFYRRLAARAGKAKAVTATARKLAILFYKALRFGMTYVDPGASYYEERYRQRVIQHLQRRARHFGFTLVADPAATAGVS

SEQ ID NO: 488409 - protein, 323 aa, unidentified
MGMDVSKKTLDCHLFVQQKTLSVVSNDVKGFRAINRWLKKEVKNLNGLLVVMEYTGIYTYQVERFLEKQKIKFVKRPALDIKRSLGMVRGKSDKIDAKFISKYGWMRKEELQPMCVLSDTQLELQQLMSHRDKLVADHASYQSKLKELTTQMGKKINKLMVASMKEVMKMLTEQINETEKAIKELIKSDESLQVNYKLACSVMGIGFATAVHLLIATENFTRFSNVRKLICYCGVAPFEHSSGTSIKGKVRVSHLANKKLKSLLTMAAISAIQHDPELKAKYEQKIKEGKAKMCVINIIRAKLIERVFAVIKKQKPYELRLAA

SEQ ID NO: 488410 - protein, 375 aa, unidentified
MIAYVGIDAHTTNYTLATRMEGSKQAVNVNTYSPAVSNITKYCKAIRKEYGKDTEIIIGYEAGCLGFKLRRDLEKNDLKCIILAPTSIPGTEQNRKRKKKTDKRDAEAIAKALHNSDYSEVYMPDEEDEAVRDYIRMREDHKKQLRVIKQQICALTHRHGLKFTDSKNYWTQKHLKWLKELPLEGVLKETFDAYLLSYETVSERIAQMDKKIEEIAEQDKYREAVHKLICFKGVKTLTALAVIVEIGDFTRFVKAKNFAAFLGLVSGELSSSDDQNRLGITKQGNRFIRKLLVECSQSFSRATSSKSATLKKRQEGNTAEVIAYADKANERLRNRYLTLVLRNKKVHNKAVTAVARELACFIWGMMTGNIHTVLA

SEQ ID NO: 488411 - protein, 422 aa, unidentified
MAYSKPQKVRKIKSGTMIVAVDIGKGFHMGYFRAPSGEECKPFPFANSMVSFDEFWRKAQDFFQRHALEEIVVGFESSGPYAEPFFHYLRKKPVKLVQVNPLHTKRVKELTGNSPNKTDRKDPRVIADVMSLGHALTLVVPKGAAAQLRRLTQARERAIKRRTAALNQLQDLIFIIFPEFCSIIKNISTKTAFYLIKKYPDPRNIVALGLEGLTTVIKTISRGKLGRQKGEALFSAARQCAGVQEGKGSILLEIEYLTTQIGADHRFIANLEKEMEKHLEDIPYSHSILSIKGIGKVTAAGLIGEVGDFRAFGTISEITKLAGLDLFEISSGKHKGQRRISKRGRGLLRKLLYFGAINMVKTNGVLHEPYQQMVGRGMLKMKALVAMARKLLRIIFALARDNAVYIENHGCVCNQQPLKLAA

SEQ ID NO: 488412 - protein, 338 aa, unidentified
MKELYAGIDIHKDKYVGCIVDAAGKVVREHTFSPTPEGVQSFIAGMPLQGIAIEACAMWRYAHVLLRELGYTVRLSSAKKTHDIACGKKTDKVDAKILADLLRTGYLPEVYIPSDEILALRDLCRGRATLTRMRVEVQMKIKSRLLTLGVAYPPNLWNKKNLALLLEWNDPLLNNMLKIRECMVLEEKEMESRVESKARSHRVANLLKTIPGVGYFGALMILSEIADINRFKTPKELVMYAGLCPGIYQTGNTEISVKNNAVNKWLKWILTECSGRASTLPENRFQLHYAQIKLRKNAKVARRSNARKMLTIIWHMLKNGQPFHASTWKKVGMGTPPT

SEQ ID NO: 488413 - protein, 351 aa, unidentified
MMILAIDLAKARSLFCWYDVVKGTHQMKTIASTPKAFHDALTSQKVERVIIEVCDMAGWIKDLCDSLQIPLQIANGNTEGWRWRNVKKKTDKEDVLKLVSLSLTKQLPTVTLPDRPVRQWKSLILYRQKLIERRTRIKNKIHAILVSEGKAISGGRKVWSEESLAELCRLARPLSDCPIEELWRGQLHMELEGLDDLDRLIATLDKKLDALGEKNAEVIRLQTIPGVGPRLSELVVAVIDDPKRFKNVRQVGSYAGLVPRRYQSGSMDRSGRISKAGCSKLRKLLLEIAWGMLRHNAHGQSVFKRISKGQKTRRKQAAVALARRILGWCWAMLRDGSNWRDPAAFGSPVAT

SEQ ID NO: 488414 - protein, 412 aa, unidentified
MGSLLQRSLPTATLVVAIDPGKARNRVWLSTDASGLVVEPLSVPVLRSGLDELDALVRRHSPDGGPIFAVEATGALHRAWVAELNRRFPQAVRVFAPSETAAARAQLGSRRFKTDDRDCAALTYLARQGQGRSVPADDHEALLAAVRHRRGLVAERKAAQQRLHDQVNALCPGLSAPTGQGRSLDLAGVTGQAFLQCLIDFGGRPVGARSLRARAPGRLSAANAAFWAARWKDCLPPPAHVAAGVDRLARSVRRWRNLNDDITAVETDLETLLAGTDGQILTSLPGVKTVRAASFAAFSLPVTRFPDAEHLYSATGLAPASYQSSSIDRPGRISRQGLPEHRDALMNMAWGLAQHCPPFTDREEQLRARGMKPMQVRVALARHTCRLAYRMLTTQDAFDEQRYRRNRHQVRR

SEQ ID NO: 488415 - protein, 434 aa, unidentified
MEEVTDEPLYRDRVCGIDIGKAELYATIRVPSDKDPARRMSETRSFATTRRGVLALADWMRSWQVPALVMEATSDYWKGPFYRLEAEGFECVLADAKQVKNLPGRPKRDPSDSSWLAQCFERGSVRPCFVATPEFRVIRLHTRYRRDLTEDRTREKNRAEKLLESAGIKLSSVVTDLHGVTGRDIMDHLIAGERNPKVLAQLARGRARRKISDLEQALDGAEFFTPEHAALLQAMLARIDQINAKISELDAVIEQLLAPWEEQLQQAESMPGWGRRSAQDVLAETGPDMTRFATGGHLASWGGRIPLDKQSGKRHGQGRHKKGNKYIGAATGETAVAAGKTQTREGARYRKLARTRGKNKACVALGNTQLKVYHKLLSSPGMRYLDLGPDYYENRAATRRKIDYHVRQIEALGLEVTLCRPGPAQDGPEPTQAA

SEQ ID NO: 488416 - protein, 357 aa, unidentified
MTTAQKQNCMFVGIDVHKDTHTAVGISPYGEKLFEITVGNYKKDFENLKEKVEGHKGLLSPYIGLEDVRGYGERLSEYLYQRYPVYHVPSILVDRARQNATHPEKSDSLDALGVAKVMIQSIDTLLPYTISEDGQKAKQLKEISIDREDLVLERTRLKNQVHTLLYRIYNTEYEQKFKDPFSLKALRFWRNAKPKCDPFLLKTMKRKVRRLLDIHVEVLELEKDMRILLDAGGYTIQTASGCGVVLASTIVGEIGDINRFHSPGALSKYAGCSPRERSSGKKVRHVKSRSGNRRLNCAFHRMALSQISRSGNEKAKVYFKRKVSEGKSKSQALICLRRQIVNIVWMMLKHKTVYRNA

SEQ ID NO: 488417 - protein, 433 aa, unidentified
MKVKYEDRLKQKLLAITTDTLVVGVDIAKNYQWARFVDFRGIEHDRALKFKNSKGGFETILARIREICKKENFAKVVIGMEPTGHYWKAFANWLKKQEGIKVVLVNPYATKQAKELDDNSQTKSDKKDALTIAKLVKDGRYFELYLPHDVYAELRGLSTTRTGLNKRKNALKNTITAVMDEYFPEYGEVFKCPLSGKASRHILKTCPFPKLILGLGEDGVTDEIKRAVKKTVGRKKAVQLVEAAKDSIGVDYGEEAARLKLRLMLEELELLEKQTEELEGQMSAALQETDYAEFLLSIKGIGIVTLATCLGELGDPTRFDDPRQMSRMAGYNLVEDSSGKNKSGTKISKRGRKNLRGVLYQMALIMVATNDEMKQLYHYLKTREKAPLRKMQALVVVSKKILTLIHTLAKKKESYDPEKVFGHVRREQLKAAA

SEQ ID NO: 488418 - protein, 351 aa, unidentified
MNTQQTVIPKLFIGIDIHKRSWKVHCSSDICSGKTFSMEPDPVKLKAYVEQHFKKHEITAAYEAGCCGYYAHRAFESYGWQSLVVNPADIHRKGKEKYTKTDHIDAQVIARELKDGRLQGIHVPHMEREQLRSLFRRRNNLVKNYRKIKSLIKGQLLNQGISIPCEFDNSHWSHSFRDWLDNLEFAYLTARMTLDSHMRYFRFVDQELRDVSTELRRYCKGHYKKDYMLLRSIPGIGGIVACGIICELGDLRRFKSIKHLSGYVGLVPGIHQSGDNLRNTGITRRAHRLIRSYFIEASWQAIRTDPIMQAYYRKHLGKNVKAVIVKIARKLLSRTLAVIKTEIPYEIGVVS

SEQ ID NO: 488419 - protein, 344 aa, unidentified
MPIVGGLDIHRKQISFDCVDTETGELERGRIAPADRAHLADWLARHLAGRAEVHLAFEGCTGWRYVAEELARAGVSAHLAEPADTAALRGRKRHAKTDRADSQHLRQLLTDGRLPECWIPPAQVLEHRALLETYRALRVERTAWVQRIHAVLFHQGARLPCDGFRSAQGRAELAAITAALSSAGQLQVATALGMIAALDEHLETLRRQLINTARHLTGAKVLTARLYGVGPITALALTCWLGGAGRFSSARQAVRFAGLDVTVHSSDGKRSPGHLSRQGPEVLRWCLFEAGKTHARISAPDHDYYAQAQQRLDGKRAALSEARKIVRQACHILTELGDDALTST

SEQ ID NO: 488420 - protein, 357 aa, unidentified
MFVAGLDAHTRYVMVVVVDRMGELVLKATRVRMGDAERLLTVLAPYRPLDAVMETSSAWPWLHEVLTGAGIQFVLAHARRLRAIAEANYKSDDVDAELLARMRLARLIPEVFPTPFAQREWATLLRHRATLVAHRTALVNRLHGQLHTRGLHLERGRLLTQAGRQWLRTEAWPHLSPEQRAVARTHLRVIVGLRPLLRAVDHHIAQVATAIPEARLLMTIPGIGPQRALVVCAAALPVSRFRTPGHLASYAGLVPRTKQSGERPVRHGGLPAGANRWLRGALVRAVVSHVQHQPASRLTAYYQTQKARVGWPVARVATARKLARVIHAMLRTRAPWTPPAPEPCGESSLNRMPHPPA

SEQ ID NO: 488421 - protein, 308 aa, unidentified
MIVQNYVGCDISKQWLDFFDETSSRCQRIDNQADAIAAYVAGLDPSRDFVVMEATGVHDRLLRHALAKAGVPFSRHNPAHTHHYAKSTRRRAKTDPLDARMLSGYGRRYQPEAEPAPSEEVEQLQSLARHRDHLVDTRATLKKHLAEAFEAIVIADLEETIAYLDSRIKALESLIAEVIRQNQDTARDHALMVSVPGVSKTTALCLLALLPELGQRSPKAIAALAGLAPFDNKSGKLNRRSQIQGGRSRVRRALYMAALTAIRTCGRFKSFYSALAARSGSKKLAIIAVARKLLVVLNAVIRDKIAFA

SEQ ID NO: 488422 - protein, 407 aa, unidentified
MIFVGVDWAEAHNDVLVMDEGGVVLGRGRFSTGVTGLAQLHALVADCAEEPGEVIVGIEIDRGLLVDSLVGAGYQVYGVNPLAASRYRDRHTTSGAKSDAGDAKLLADLVRTDRHNHRLVAGDTEEAGAIRVLARAHQGLVWARQRQVNALRSALRDYFPAALEAFGTDLAQTDALAILTIAPTPERARGLSRTKIAAALRRAGRQRNIEQRAIELQSALRTEQPEGPSQIAEAFGAATAARVVVLVSLNRQITELEHAMAEHFDRHPDAEILRSLPGLGLVLGARVLGEFGDDPSRFTDPRGRKAYAGTAPITKASGHSLVVLARVARNRRLADACEWWAFCSLGASPGARRYYDALRARGKTHSQATRQLANRWVGILHACLERREFYREDVAWPERREVLPLAA

SEQ ID NO: 488423 - protein, 442 aa, unidentified
MAKNLTTRFVGLDVHKRQITACFVDGEGRKLETRTFELTRAKLMHFAKHVLRPTDQVALEATTNCWAVARVLQDHVTRVVVSNPLVTKAIAQAKVKTDKVDAHVLAQLLRCDFLPEVWHPDTTTQQLRELTGRRAALVQQRTALRNRIHSVLAMRLIETPESLFDSAGQDWLAKLLPTLDAQGQLLISSDLRLLSAVQQEIDTLGQQLANQGWQDQRVRLLMTLPGVDLTVAESVLAALGDIERFPTPERAAAYLGLVPSTRQSANKCYHGPITKRGNNQARWMLVQAAQHVGRHPGPLGHFFRRLKQRKNHNVAVVATARKLVMIAWHMLRKNEPYRYANSRTTETKLAKLRVQATGQSRKKCPAKRTKLAAKLPGGSRIIKSLDRVYASEGLPARQPLTAGEERTIAATQSVKFVADLAHDHVVPRKQNTPRVAEPLSTD

SEQ ID NO: 488424 - protein, 412 aa, unidentified
MQVLYPCCCGLDIHKKFVVACVLRTAPDGQVQKETRTFSTMTGELLALGDWLRAVGCTHVAMESTSSYWRPVYNLLEGQFDLLVANAYHIKTVPGRKTDVKDAEWIADLLRHGLLRGSFIPAPEQRHLRDLTRYRTHLVEERARLTNRLQAVLEDANIKLAAVVTDVRGVSARAILDALVAGETDAVLLADLARGRLRAKRDQLAQAVVGRFATHHAFMITEQLSHLDYLDEAMERVSTEIEQRLQDEWEAVKLLDSVPGISQRAAEIVVAELGVDLHRFPSAKHLASWAGMCPGNKESGGKRLSGKTRKGNVWLRQVLIEIAHVASKTKETYLAAQYRRIAARRGKKRALIALGHTILVIIYHILTERKPYHELGGTYFDQREREQVERRLVRRLERLGYSVSLQPADSIS

SEQ ID NO: 488425 - protein, 344 aa, unidentified
MPQLHHVGLDVSVKETNISVVDALGHVAHRAVVASDPAILVEHLLRLGFTYGRIGLEAGPLSAWIYGGLIDAGLPAICVETRHMHAALSARINKTDRNDALGIAQMMRVGLFKAVHVKTPASQQRRLLLTARKLLQRKVSDIENDLRGQLRNFGLKVGTVRSSAFEQRVRELVADMPFVAAVVIPLLDARSALRAQLAKLHKMLLDIVRSDPVCRRLMTAPGVGAIAALTFRTCVDNPARFSRSKCIGAHYGLTPRLYQSGETARIGRVSKCGDAMMRVALYEAAFVALTRSGARWNPLKAWGMAIAKRRGIQKAVVAVARKLAIILHRMWRDETDFRWTAAKV

SEQ ID NO: 488426 - protein, 379 aa, unidentified
MQSVKTKAGVDVSAKTLTAIRRRENEEEGKEFANDPSGHRELLKWVGKRARVCVEATGVYHLQLALTLRAAGVEVMVLNPRVAKNFAKALSNRSKTDPVDAWTLVEYVERMEFIAWRAPSDAVLELRELGRRMSELVQTAVDEKNRLHAKTVSGISKAVVADVKAHVGQLEKRIKQIETAAVEVLESDTDLREQFEILKRIRGVGRRSAIHLLAELAVLDPTMTVKQLVAYAGLDPRVYESGTSVAKPARISKVGNARLRAILYMNALSAVRHDRGARLFFAGLVARGKKKMQSLVAVMRKLLHGIWTVLQRRETFDSSVLFAVSLAKAESSDSAVPANQPQPSQDHPKGRSKAKELRKQLDPGLAEATRSRMMKPNFA

SEQ ID NO: 488427 - protein, 364 aa, unidentified
MQEPTHIGLDVHKETIAVAVLRPGVGECDERVIANTPEALRKLLRRFDDPAALRVCYEAGPTGYDTHRFVTSLGIDCEMIAPSLVPRRSGVRVKTDRLDARNLARLHRAGELTSVRVPSPAEEALRDLVRARECLKDDRRIARQRLRSFILRYGVRYPHGPDRWSHRFEVWLRALRFGEPACQEAFAHLLGAYFVRDTQLGALTAQIEELADLEPLTGPVAHLRTLRGIDTLTAVTLLSEVCDFHRFGSAASFMAFTGLVPSEHSSGASRRQGAIVKTGNRHVRRVLVESAWAYRHAPAVRGTLRARLEGQSPEVVAYSWAAQCRLHQTYRRIAARKGSRIAVVAVARELSGFVWGAMTDNMAA

SEQ ID NO: 488428 - protein, 310 aa, unidentified
MEQISVVGIDVSKDRLDVHVLPAGETWSVSRDGEGLGELCRRLGGTARLVALEATGGYETIVAATLSSEGVPVVVVNPAQVRAFANALGQRAKTDPIDARVIARFAEATQPEIRPLPDRATRLLADLVARRRQIVEMIVAERQRLHRTEPARVRTSIERLLKALEKELASVDHDIDGSVRRSPVWREKEDLMTSVPSVGPIIARTILAELPELGTLDHKRIAALVGLAPFTRQSGVWKGKASIGGGRRAVRTALFMGAQTAKRWNPALKAFYDRLIAAGKPKMVATIAVARKLLIILNAILRDKTPWQNA

SEQ ID NO: 488429 - protein, 331 aa, unidentified
MEQFIGCDAHKKYSVFVALNERGEASRAVRVDHERQPYRQFLERLPAGSQIALEAGGHYYWMVDEMEYAGHNPRLVHPLEAKKRMGKTGKKTDKVDAKGLGILLRNGTLPEVWIPPAELRDQRELLRLRMFLVQQRTRFKNRIHAALARYNIQLGVRDVFSVEGRGRLGIQLTELPQHTRASVELELVTLDFIDMQIEEAEKQLEAVLRVSAEADLLKTLPYVGPILSMLMALEIGKVERFPSAAHLASYAGLVPRVHSSGGHTRLGQICGDVNQYLKWAFVEAGNLVVIHQKHLAGRHVVRLYQRVKRKRNYQKAVVAVARHLAEAAYWI

SEQ ID NO: 488430 - protein, 348 aa, unidentified
MEHYAGIDVSLELSSVCIVDAKGKIVKEAKVPSDPDALVAFFRDLGFPVARIGLEAGPLSQWLHAGLSAAGLETVLLETRHVKAALSAMTVKTDRKDARGIAQLIRMGWFRPVHCKSSGSQEVRALLVARKQLLGKLLDVEFSIRGILRGFGLKMGAVTRNCFDARVRELCAGQAMLERIAGAMLAARATLRTEYSNLHKAMLAIVRTDAVCRRLMTVPGVGALVAITFKTAIDDPARIRKSKAVGALFGLTPRKYQSGETDITGGVSLVGDEMVRTALYEAANALLSRVTRFSALKRWGIDVAKRRGMKRAKVALARKIGVILHRMWVDGTSFRWTKEGRAPQLVHA

SEQ ID NO: 488431 - protein, 482 aa, unidentified
MGHVGDIGESVATDIPFERVSTTTYLNQRDIPIEIMEDVMAKFKRSKLELIHPNAAGIDIGSASHFVAVPPDRDNKPVREFKSFTADLNGLADWLEACEIDTVAMESTGVYWIPLYELLESRGLTVYLVNARHVRNVSGRKSDVLDCQWLQQLMSFGLLSGAFRPKDEICALRAISRQRDMLIRYQARHVQHMQKALAQMNIQLANVISDIVGETGQKIVRAIITGERDGHILANLKSNRIRAGKDEIEKSLVGNWREEHLFALKQAMSLYDAYSERLTECDRQLETMLAALQVHKVEICQKKRRSNVKNAPKFDLRAHLIGMCGVDLTRIDGIEVTTAMKVLSEVGADMSRFKSAKQFASWLGLCPGTKISGGKVLSGASKRTANRAAQALRMAAVSLKSSQSALGAYYRRLCGRLDKAKAITATAHKLARLIYTMLTKGTEYVDKGQEYYEERYRQRVLHHLTVRARKLGFNLTPVPEAT

SEQ ID NO: 488432 - protein, 437 aa, unidentified
MPDLRVLPLGRGVSLHWLLHHLCSRRTYLKIFCGIDWAEDHHDVALVNERGDLVAKQRISDDLAGLETLQHLLAEAGDGPEDPIPVAIETSRGLLVACLRATGRAVYAINPMAVARYRERRSVARAKSDHADALALANVLRTDADHHRPLPADSELIQAIAVLARAQQDAVWNRQQLANQLRSLLREFFPSALAAFQVKNVGLAHPEARAVLAAAPTPAAAAALSKARLRSLLRKAGRQRRIETRAEHLAGVLREPHMRQLPRVEEALGQQVRALVLQLDAAAQAADDLAAACAERFTEHDDAEIITSFPGLGELTGARILAEIGDDRSRFADGRALKAYAGSAPITRASGKSLIVHHRKVKNQRLAAVGYVWSFAALSGSRGARGHYDRRRSIGDRHTAALRNLFNRLLGQLHHCLITRQNYDENTAFPTPLPAAA

SEQ ID NO: 488433 - protein, 334 aa, unidentified
MQNITLIGIDLGKHSFHIHCQDKFGKALLRKKFTRTKLMQFLATCPPSVVVMEACAGAHFMARRISDFGHETKLISPQFVRPFVKSNKNDFVDAEAICEAASRPSMRFVQPRTEPLQAMRALHRVRESLIRDKVKTTNQIHGFLLEFGISLPTGDAVIKRLSLVLAEHEIPEYQSRLLVRLHTHYLYLVEQIAELESELSQSINADDTAQRIMTIPGVGPITASLLSSQPGDGKQFSCSRDFAASTGLVPRQYSTGGKLTLLGISKRGDKNLRRLLVQCARSFMMRLERQHGKLAEWVREQLNKKHSNVVACALANKLARIAWVITTQQKEYQA

SEQ ID NO: 488434 - protein, 452 aa, unidentified
MPSKKGFPEFSIVHPHAAGIDIGAKFHVVAVSPDCDPTPVRQFQSFTTDLHKLSQWLQEVGVKSVAMESTGIYWIPVFEILEADGFEVILVNAREVKQVPGRKTDYNDAQWLQKLHQFGLLRASFRPSEHIASLRAYLRHRERLIEYSAAHIQHMQKALMQMNLQLHHVVSDITGVTGMKIIRDIIKGERCPARLATHRDIRCKKSEGTIAAALTGNYRNEHAFMLKQAVELYDFYQERIGDCDKQIEQAMAKLNQRKVIPDAPLPKARHRTKQHNEPDFAVRSALYTLTGLDLTQINGIGPYTALRLIGECGDDMSKWATEKHFVSWLSLSPGNKISGGKILSSKTRRTKNRATTLLRIAAVNIGKTETALGAFYRRLAGRVGKAKAVTATARKLAILFYSIMKHGKAYVEPGAAYYETQYRNRVLSNLKKRAKRWGYELVANPASQNAAY

SEQ ID NO: 488435 - protein, 325 aa, unidentified
MDEAILGIDVSKKELSIALLFNTSYKKCKISNNIEGFTNLSKWLQAQGMTKVKACMEATGSYGEKLAEYLYEQGHQVHIVNPVCIKAFAKSKLSRHKTDEVDAHLIAEYASKNELRAYKPKEPMLKELRFLYRCLQNLKEQHTQVENFLETKACLPKSVKKVYQNLIKHIEKQINVVNVAIDQVVSSKESLSQDCKNLQSIPGIGKITAIAILAEILELSSLESARQLAAYAGLTPSHRTSGTSVKGRSYLSKIGSSSLRKALYFPAIAAKNHNPLLQPFVKKLEKKGKHTMVIIAAIMRKLLHICFGVLKYKTVFNPQILKNNP

SEQ ID NO: 488436 - protein, 361 aa, unidentified
MRNVKVSSVSRQVVGGVDTHKDLHVAAVVDEQDRILASESFATTRQGYKQMLTWMRSFGEVLRVGIECTGTYGAGLLRYLEQAGIAVLEVTAPDKSDRRKRGKDDTLDAGNAAHAAFAGIRTVTPKKRDGMVESLRVLKVCRKTAIQARRITLQLIQNTIVSAPDELRESLRTLTRMQLIRTLAAWRPDLSSYRQVASAYRIALKSLGRRYLELHDEVADLDVMIAALVDDLAPELVSRNAIGYESAAQLLLTAGDNSDRFRSESSFAALCGVSPVQASSGKVTRHRLNRGGDRAANSALHIIAIGRLRTDARTQAYVSRRLAEGHSKLEAIRCLKRYIAREVYGIIQRRNSIINQSAVST

SEQ ID NO: 488437 - protein, 436 aa, unidentified
MRGCRCSMIMGFTKPIEHFILQRKKVITMNTLYVGIDVSSKSNVVYLMLPNGDKHSNFSVANSHEGSTQLVKRILSALTSHSLDTVLIGLEATSVYGDNLVYFLREDATLAPFNRKIHVLNPKQVKKFHDAYNDLPKNDYVDSFVIADCLRFGRINKEVYMGDYRYKALQNLTRARFFAVQNLVKEKQRFMNVLFKKYSTMTQEKVFSDTFSTTALAVYDEFDSAEALANMDLHELTDFIIEKGKNRFPDPDAVAKAIQKAARSSYRLPKTVNDSVNQVLSISITSMKALESQIKEFDKAIKAQMELLPNVLISIPGIGPVYSAGIMAEIGDINRFDNQAALAKYAGLAWKQHQSGSFEAEVTRLIPSGNRFLKYYLYEAAFSLVRCDKEYSDFYHLKYKEVNRCQHKRALALTARKFVRLVFRLLKDNRLYVPAK

SEQ ID NO: 488438 - protein, 345 aa, unidentified
MYYIGLDVHKKTISYCTKRVDGTVHGEGKLDSTRLALDTWLPGLPQPWTGALEATLFTGWIYDYLKPHAHALKVAHPAMLRAIAVAKKKNDQVDARMIADLLRCNLLPVCYMAPSEFRERRRTLRYRNLLVRQNVQMKNRTAGLLMETGVPYNKQKLHGKAYFAQLQKSPEVPDCIQPLLKIGRESIERIAKLDRALRKALKGDPLLVARVQRLLTIPCVGEVTALTWVLEVGEVSRFSSVKDAVSYCGLCSAERSSAGVAKRSPISKQRNKHLQTVLVEAAKLSQHFNDDLTRVHEKALEKGNANRATIAVARKIVAYLLAVDRREEPFSEKPFLEGEESAEAA

SEQ ID NO: 488439 - protein, 331 aa, unidentified
MKFAEVIGIDVSKSTLDVWIYTNDAYKVFDNTRKGYHSLLSWVRKNTECLLDQVLFCFEHTGIYSYALSKYMSEKQFHFAIISGLEIKRSMGIRRGKDDKIDARQIALYGYRRKAEIKCSQLPEEEITQLRQLFSLRERLVRQKAGYQATMKEQVRFLKRSDNTLLFSVPSHLIKELDKEINRIELQMETIVEESSELNRLYKLITSITGIGSQTALYLIIITNGFLLFDDPRKLASYAGVAPFPYRSGSSVRGRTRVSKMANKKLKSLLNSCARSAIQYDPELRLYYERRTKAGKDKMNTLNAVRNKLLYRVFAVVKRGTPFVNKHAYAA

SEQ ID NO: 488440 - protein, 399 aa, unidentified
MIRLAGIDVHKDFLEVAFRELSGSVKVIRIEYTPKGLNKLIKLLRKYGITDAYMESTGDYYLPLYYALKGAGIRPHVMNAYKIRRPEANKTDERDAVWLLEVGESDLFSDSYVPNEDIQALRFLTRKRMKLVDRISNIKREINNILWRLGLQASQLAKKLRSKKKRKLLLDLLEGRLKPNSISDSDVRALYDVLSKPEFRAYIFVLKSRLAELAYLESQLEEFDREIEALARKFKDIIRILMSVPGISFILAVGILSEIGDINRFPSPGHLASYAGLIPIAKNSGGKRRVGRPSKKTNKYLRRYMFLAGMAAVRSRSCVVREFFQRLLGRGKHYKVAVVAVARKLLCVIWYLLRRGEFWREDNYFKGSRRLSKRGRVRISVREAIAILVRAGYVVRKRT

SEQ ID NO: 488441 - protein, 362 aa, unidentified
MAESTTFVAFDQHAATTMAAVLLPGQRTPALHPMTSDLGELRRFVRRLRASGGLRCCYEAGPCGFELQRALATDGVPCDVIAPALIPRRPGDRIKTDRRDASQLAVLSRAGALTTIHIPTEQEEAARDLLRCREDIRADLLRARHRLSKFLLRHGRRFTGTKKAWSKRHETWLRAQTWAIPALDQTHWAYLRAVDEAVARLRAVEADLQALLTLEPLRARVARLRCFRGIDDLTALTIAAEFGDPRRFPTAPSTMAFVGLVPSEHSSGGKRAQGAITKTGNAHLRRVLVEAAWHYRHHPFVGRALQRRQTDAPPDVVARAWTAQQRLHRKYARLAARGKRKQHVVTAVARELTGFVWAVLTQ

SEQ ID NO: 488442 - protein, 350 aa, unidentified
MEDCYLGIDLGNTKSVFYLMSNSGQKRDAGSLPTLSEFAWRTLLEPLRGERLHACFEASPHYDWLYDLLAQFCSEVVMVNPADFAVISRSQRKTDKIDAQKLAEGLRRGDLPAVYVPEKRVREDRRLVSFVHWHSQQLASVKHKIRSLLLGARLKCPAADVMSIKGQAWLEREALSRLAKQESMLLRMLLNQARQLAAQRKELDEEVRKRVPRYKQADVVESIPGFGPLVSLAVLSAVAEITRFRQPGQLASYFGTCGSVHQSGESLRLGALTKRGNVHVRWLLSQALRTLHCKDPRVRQRYLKLKRKKPRGVARAAQVRWLSNLVWWLMTKNEPYRRGGMQRKPDAVAA

SEQ ID NO: 488443 - protein, 425 aa, unidentified
MKVTYQTCCGVDVHKSFLVATIIKTSGGIEPDYQKKRFSTFNNSILEFKRWLLNNDCRYVCMESTGKYWVPVFNLLEDEIHVTIANPKWVKAVKGNKDDTKDSKWIGDLFRLGLVKGSYIPCKKIRVLREFTRYRYKLVSCRSSEKNRYQNALTVCNIALDSVVSDIFGKSSTSIVDYLLEQSGNSIDHEEIASKLLRSLKSKEDAVIESIEGYQMTDSQKYRMRLVRAHMDYITAEINDVDSEIESIISSDPDYENAIQLLMTIPGVKRDSAITIISEIGIDMSQSCTSKRLCCWAGLVPGSNESGGKKKSVRITRAGVYLKPALVQCAHAAVKSDQSPYYKKKYESLMKRRGKKRAIVAIARMILTAIFQMLSTGEAWNPSDLYKIDMPEALVEKQKAKAIKQAMKLLEREGLYPPPQEPVAS

SEQ ID NO: 488444 - protein, 414 aa, unidentified
MLARRARAWVGVDAGKFSHSLVVRYELEDSKPCTVPTSREGFETAVRFIQQAAPVAAPGEVLVGIEFAGSYGFTFAHFLSQRGFQVVSVLPLHTKRWKDVVHRQSLKTDAADALGIVDLTAQGHFVGFPFLKPEYARLRTLVAGRERLSVLRRRAITQSRSLLQLLFPEYEALFRSFTKKTPFGLLRAFPGPQALLDAPKRRVLKVLGELSRGQHGVEMYDRLLAAARGTLALPGLADELARELQLTLARLELYDQQITTVEAAMVEVLREVPEAAFLQTIPGVGPLTAAIFLGSVGDPRAYASSKEILKVAGLSLVERSSGILKGRQRISKRGRPLLRQAAYMLAVRSVRVDGIYRAKFERLVAQNGGRKIPALVAVSRSALKAMHQVARERRPWVPDRVPDGVPAGAAARVR

SEQ ID NO: 488445 - protein, 371 aa, unidentified
MKVDSTTKFIGLDVHKSTISVAIADAGQEGEVRFYGKIDNTTEAIVKVIKKLTTPEVELRFIYEAGSCGFALYRYLSGNGFKCIVTAPSMIPRRSSDRIKNDRRDAITLARLYRAGELTAIYVPSPEDEAVRDLTRARRDAREADRKAKQRLNSFLLRNNFIFSGKKKWTKTHYNWLAQLRMKYPAQKITLQEYIDTVEECTQRIARLTEQIRQVVEEWRMAPVVKALQSLKGVSMLTAVTTVAEIGDLTRFQKPKELMAYLGLVPSEHSSGESNKRGGITKTGNTHARKALVESAWTYRYPARLSLHLLKRQEGLPKNIRQIAWKAQLRLCARYRRLMARKKPIQVVVIAIARELSAYMWAIAREVEAAT

SEQ ID NO: 488446 - protein, 342 aa, unidentified
MDTIGLDLHKRESQLCELTEAGEIVERRIVTSRERFAAVLGDRPRARILLEASTESEWVARHLESLGHEVVVADPNFAPMYATRRRGVKTDRRDARTLAEACRLGAYRAIHRASAAQRHVRAQLAVRDALIRTRTRYVSVVRALTRRDGLRLASGGPQHLEAKLAPQPLAPALQAEIAPLRVVLEPLNAQIDYADAQLAATAAGDPLFARLRTVPGIGPVTAVAFVATLDDVHRFRTAHQVEGYLGLTPREYSSGERQQRGRISKTGSPRMRALLVEAGWRVLRAKDPAAAPLRAWAERITLRRGAKVAVVALARRLAGILYALWRDGTTYRAPAPRDATAA

SEQ ID NO: 488447 - protein, 464 aa, unidentified
MKTTLQNPKRAKVKINLDSLPQIEPNAAGLDIGHREHWCAVPSDRCIKPVRSFNTFTADLEKMADWLHQCGIKTVAMESTGVYWIPAFQVLERRGFHVCLVNARHVKNVSGRKSDVLDCQWIQRLHSYGLLNASFRPEDQMCVLRAFLRYRDELVCARSVQCQHMQKALQQMNVQLHQVLSDVTGVSGLRIIEAILTGERDVKKLAGLADRRVRARPATIEMALRGDYRAEQLFLLQSAFDLYHTYEGKIHLCDQQIIAQLASLPSRVDLKAQPVPPRKPGRSRLLDMVAGTDLREELYRCAGVDLTAIEGIGVLTAQVVISEIGLDMSRWRSEKHFASWLGLCPDNRISGGKVLSSHTRYVINPVADALRMAATTLQNSRTALGAFYRRMRARLGAASAITATAHKLARLIYRLLKHGELYVQQGMEAYEKKYRERLLHNLKKTAASFGLELTQKQQAEPSVS

SEQ ID NO: 488448 - protein, 283 aa, unidentified
MTEVSTIGLDLAKNVFQAHGASSAGAVIFRRKLRRDQVLAFFAAQPPCLVAREACPGAHHWGREIGKLGHTVRLIAPAYVKPFVKRQKNDMSDAEAICEAAQRPTMRFVAVKSEAKQASAVIFRTRDILVGQRTQLINAIRGHLSEYGLIAPQGPFHIGRLIAQIEDPTSSVPEASRSCLALLAEGLRHLQNQIAALDTEISARAKADDATRRLMSVPGIGPLIATAIEALAPPAETFRSGRDFAAWVGLTPVQRSTGGKERLGRTSRMGERTLRRLPINYRN

SEQ ID NO: 488449 - protein, 328 aa, unidentified
MFYLGMDVAKAKLDCCLLLDETTGRRKTKVVNNTRSGIADLLDWLAKQQVSSQQLHVVMEATGVYHEQAALTLADAGVAVSIVNPAQAKDFGRGLAVRTKTDGVDSFVLARYGALLKPAAWTPPAPEGRILQALLARREAVAQDLQRERNRQEKAESTDTPERIRQSLANSIEFLVKQLAELQQDIDEHIKRHPNLKDVMALLQSIPAVGPQVGGNLLSVMHCHDFDSAEQLAAYLGLVPVERQSGSSVLGRARLSKAGPARIRALLYMAAIVATRYNPHVKAVYERLLARGKSKMSALGAAMRKLVHLCFGVLKTRRPYQHDYAKIA

SEQ ID NO: 488450 - protein, 352 aa, unidentified
MNNPIVVFNPCGIEVSYLTLVVALRGHDHDEPLREFPNTRAGHQAVLRWLERSARPVRVVLESTGLYGLDLALTLHQAGVAVMVANPRAVRHFAQALLQRSKNDQLDAVVLCEFAARLPFQAWRPPSAAALKLVAVARRLEALTDMMAAEKNRAHAASLSEVLPVIIRRDIQRSIQTQQRALDRLSRAAQEFILADPELARRYELLLSIPGFGVTSAVHILAELTLLPADLDVRQWVAYAGLDPREYASGTSVHKKVRISKAGNKHLRRALYMPALVAVQHQPQVRAFYEHLLARGKTKMQALVATMRKLLHAVYGMFKHDQLFDGQKVYASTSTTLAPPPSIPEEVACSQT

SEQ ID NO: 488451 - protein, 416 aa, unidentified
MNAVGIDVSSRKSTVAVLRPLGEVVCLPFDVTHDIAGLASLAEKLKALDGETRVVMEHTGRYYEAVAKALHEAGLFVCAVNPLLIKEYGANSLRRVKTDKADAVKIARYALDNWADLRDFTPMDAIRYDLKTLNRQFQLASKQRTASANNLIALLEQSFPGIRKCFDSPVRSDGTQKWVDFAHSFWHVDCVRKQPFAAFCERYRKWCKRHAYLFKLSNAEEVYALAKRAVVLTPKSKVVKVLVQEAANQLISISRSVEVYRAEMDRLAAMLPEYPVVMAMYGVGKSYGPQLMAEIGDVRRFERKQALVAFAGIDPMPNQSGDKNVRSNKSSKRGSPYLRKTLFNVIRTYLQCAPQDEPVFQFLNRKRAEGKPFYVYMLAAANKFLRRYYAKLRDYFASLDTLQPVAPIPTILKATL

SEQ ID NO: 488452 - protein, 348 aa, unidentified
MLADQLDFIVGVDPHRDSHAIAVVHVVSGAVVFEANVAANSDGYADALRLVEGHASDRRAFAVEGTGSFGAGLTRFLTGRGERVLEVGRLRRERRSGGKTDALDAVRAARSVLAQERPATPRAGGERQALQALVATREGAVNAKRAGLCQLRDLLITTPEPLRSELRPLTRARLLQRLAATRPDGRRDPELRGSMLALRSIARRVLLLTAEERELAREIETITRRLAPQLLDQPGVGPHAAAQLVLSWSHRGRIGSEAAFARLAGAAPIPASSGQTVRYRLDRSGDRKLNRALHMILVTRKRSHPATIAYIERRLQEGKTRREANRCLKRYLARNLYRLLEHGAPLTT

SEQ ID NO: 488453 - protein, 453 aa, unidentified
MSRRKMNVSIKSGKARAALTITHPNAAGIDVGSASHFVAVPPDRDETPVREFPSFTADLNALADWLDACKVDTVAMESTGVYWIPLFELLESRGFTVLLVNARHVKNVSGRKSDVLDCQWLQQLMSYGLLSGAFRPTEQVCVLRSLWRQRAMLLRGQGRAVQHMQKALTQMNVQLANVISDVVGETGQKILRAIVAGERDGQVLGAMKNARIHASIDEIAKSLQGNWRAEHLFALKQALGTFDFAGTQLVECDCEIEQQLQCLKAHEGEPAKGKQRGRSRNAPQFDLRVQLFKMCGVDLTRIDGIDVTTAMAVISETGTDMSRFPTVGHFASWLGLCPGTKITGGKVMSGKTKRCANHAAQALRLAAAALRPSQSALGAYFRRMCSRMDKPKAITAAAHKLARLIYTMLTKGEEYTDKGQEYYEERYRQRVMHHLAKRAEKLGMHLVPIPHPA

SEQ ID NO: 488454 - protein, 357 aa, unidentified
MSRVLKKCLGIDVSKLSLSQCLGCLTDDLIKEFESHEDVSNDSKGYKTLLEWLRQRIDSKENFIIVMEATGVYHQRVAHYFYEHGFDVCVMHSGRVKRYAQSLVQRSKTDALDSRMLSMLGLERTIELWHPPSLSLQQLKALSRERSTLLKDRTVETNRQGAIKSSVTNNVKASRRHKARLKLIDLQIESIEEEMRCLISKDQVLEGKIQYLESIPGVSFITAATVVGETLGFESIRSGKQLASYAGYDVVLRESGNFRGKTRISKKGNSYIRAALHMPSMTCVRCNPTLKTFYNRLKPNKAKPLVALIAVQRKLLILMYTLWKNEVNYDAEFESKKQQKQDALAAQDNSLINQLAS

SEQ ID NO: 488455 - protein, 424 aa, unidentified
MDVMHDRVAGLDVHKDSVVACVRAMSGMRATRYCRTFATTTEGLEALLEWLNLSRCSVAAMEATGVYWLPVFKILSEGEFELVLANAAHIKAVPGRKTDMNDAMWIADLAAHGLIKASFVPDEETHELRTLTRTRKQLVREQTRHVQRIQKTLTEANIRLDSVLSDIMGASGRRMIEAMIQGQRDPRKLAALAGRGIKATPKELYDALHGRLTDHHRFLLRLHLGQWGALGASIKVVDDEVDARVGRMDPGGERADKARFSDLIRQLESIPGVSKVSALAILCEIGADMGRFATAGHLIAWSGLCPGQNESAGKRKRTRLRKGAPWLKTMLVQCAWAAKRANNSYYKAQFFRLQARRGPQKAICAVAASILTAVYHMLKDGTFHQDLGAGYFDRRSPETKVKRLARQIAKLGYEVTLQPIAKAA

SEQ ID NO: 488456 - protein, 337 aa, unidentified
MLHYGLDVHRKYTSICVMDDGGLILAEGKAITQELTSHPAFSLEGEKRVVLEAGGNWHYLYELLEPAVNEVLLAHPLRVRAIAAARVKTDAIDARTLAHLLRADLIPAAYIPPPAVRESRELFRFRYDLVKQRSALKNRVHALLAQEGLNSPFTDLFGRHGREWMAQLALADSKRTRLESFLRVLDTFTGEIQAADKMILERVKTDENAKLLMTIPGVGFRTALVILAEVGEVSRFPDANHLVSYAGLAPRVRSSGGRTKLGNITKQGSSALRWALVEATHLAVRKPGYLQEMHRRLRRGKSAAVAIMACARQLLVAIYFMLLRGEAFQPTATRTMS

SEQ ID NO: 488457 - protein, 350 aa, unidentified
MKITRVGVDLAKKVFQVHGVDAAGRRVWQRQLKRSSWLSVLTETVEPGCEIGMEACGGAHHWARELKSRGFKVKLISPQFVKPYLKSLKNDVNDAEAICEAMARHHMRFVAVKTVEQQDIQAMHRVREGLMNHRKAKANQIRGLVAEYGLVAPRQMGPLRKAIPCWLEDAENGLRSAFRALLHGLWEDLQNLDIRLKVLDKEILMLSENHADAKRLKQLRGIGPLTATAMVAQFGDGRHFKRGRQASASVGITPRHAGTGGKNYLFGITKKGNPYLRSILIHGARSVVSKAKHKDDRLSRWVTELAERKHPNVAAVALANKTVRIAWAMLRNGTDYDPELAMARLPLEFS

SEQ ID NO: 488458 - protein, 370 aa, unidentified
MATTVRYVGLDVHKASITIAVAEPDRAPAQLYTTVPNDWPQLRKALTRLSPTLSALRCCYEAGSIGYHLYRRMNKAGIDCMVVAPSLVPTQSGNRIKTDRRDAKKLAHFLRSGDLVGVYVPDDECEALRDLERAREDAVRAQRVARQHLQNFLLRQGRPYHSTQWTWDHLDWIRKQKFDNPMRRQVLCDYIKVTEDAGARLKQVTADLEQHAQQTRLWPLIKALQAFRGIRLVTAASVVAEIADFRRFESARKFMAYLGLVPSEHSSGDSNRRGRITRCGNRWVRTLLVESAWHYRFAPKMSRQLRARNQGVAPGVQRIAWKAQHRLHRRFYRLTARGKRPQQAIVAVARELAGFLWAVGQEKEFLIDAT

SEQ ID NO: 488459 - protein, 317 aa, unidentified
MTQAITTTAGIDTSKLKLDIAVHGHAELWQVANALPGWRTLAANLAKAGVTRVGIEATGGYERGVVEHLRAMGFTVLVLQPIQVKAYARMHLRRAKNDALDAALIAACAAAIEQPRIAPDPRLAELAGYLTFLEQIEEDIARFKTRLEHIDEPRLRRLVTNDIARLKARRAAQMLLIESQLRVHHDLARRLDLVLSIPGLAVRTVLAIIIRMPELGQVSREEVAALAGLAPFDDDSGKHKGERHIAGGRGRLRRSLYAAALPAAFRWNKALIVLYARLTASGKAHNVALIACARKLLIYANIVVQRGTPWTERSVAT

SEQ ID NO: 488460 - protein, 369 aa, unidentified
MADRITYIGLDVHKESIVVAVAEGGLRGEVREYGRIANTAAALDRLLRKLGGNGMTLRFCYEAGPCGYGIQRRMSAQGHECIVVAPSLIPKRAGDRVKTDRRDAASLAKLHRAGELTAVWVPDARHEAMRDLVRARLDAVHSLRRTRQQLSGFLLRQGCHYGRPAWTKLHRRWLAGLKFEQAVHHLVLEDYIQAVDTAEVRRNLLTAQIEAMLPDWTLAPVVAALQTMRGMALVNAATLIAELGDLSRFANPRQLMAYLGLVPSEHSSGTSIKRGGLTKAGNSAARRLLIEAAWCYRFPARVSRELLLRQERQPRPIRDIAWKGQVRLCARYRRLTRTGKPANVVTTAIARELSGFVWAIARHVTIPAG

SEQ ID NO: 488461 - protein, 438 aa, unidentified
MSNKVIFNLDELFISVGIDVGADFSWMSIALPNQQFVGKPYKILHNSIDSLTTAVSKIKEAEELYSLESRIFLESTGIYHYPLFCYLRDKGFNCSVINPIITKNSTNINIRKVHNDRFDSKKAALVGLKPDLKVSLMPSDLALNCRNLCREYYDLMDNRSAYVNKLQGELRIAFPQYLGIFSKVTINTSLTLLETYTSPSAFLKADKQEIIDIIKSTARFGLTYAQNKYNAIIQAATDANQFGYIIDSNIKRIRLYISFIRKYDEEINNILESLHELVDANEDSDFVKQIHLIETFKGAGFLSAVSIMGEIGDFSAFSKPKQLFAYFGLDPAVKQSGKFEGTKVQMSKRGSAIARRVIHTLTLQSISISRNREAKNPVLREYYLKKCDSKPKLVAMGAVSHKVCNMIFAILRDNKPFKIIAPQEHIKQYNSAKCDIAA

SEQ ID NO: 488462 - protein, 388 aa, unidentified
MIYVGIDIAKLNHFASAISSGGEELIKPFKFTNDNDGFQLLISKLDPLDKDSLIIGLESTAHYGDNLVRYLVAKNYKVCVLNPIKTSTMRKNNIRKTKSDKVDTYIICKTLMMQESLRFVAFYDLDLMDLKALGRFRQKTIKQRTRLKIQLTSYVDEIFPELQYFFKSGLHQKSVYALLKEAPTPEAIASMHMTHLAHLLKVNSHGRFDKEMAQQLRVLAQKSVGASDSSLSIQLSHTIQQIELLDSQLERVEAEMTEIIKFNDSVIMTIPGIGYINGGMILGEIGDIHRFSSPNKLLAYAGLDPSVYQSGNFQAKKTRMSKRGSKVLRYALVNAAHNVVKNNTTFKAYYDAKMAEGRTHYNALGHCAGKLVRIIWKMMTDNLEFNLD

SEQ ID NO: 488463 - protein, 343 aa, unidentified
MYYIGLDVHKKTISYCVKDAAGKIHREGKIGSTRRELDAWIKTLPQPRMIAMEATIFTGWIYDHLLPHAGKVKVAHPLMLRAIASAKRKNDKIDAGKIADCLRCDFLPECYMTSTEIRDRRRTLRYRGLLVKQMVQMKNRISGLLMETGVSYNKQRLHKVGYFADLLSGNEEIDDSIRPLLKLSRETITRSQKLDYALVSSLEHDPLLAERLERLRTVPGVGPITALTWVLEIGDVARFQSIKQAISYCGLCGAEKSSADKVMRTPISKQRNKHIQQVLVEAAKLAPRQSHELALIYEKEKQRGNRNRATLAVARKMVAWMVAVERRKQDFVPAEERGGTVAA

SEQ ID NO: 488464 - protein, 428 aa, unidentified
MNYNQNHKIAQITSQTLIIGVDIAKYKHVARAQNFRGLEFGKAFHFENTNSSFKHFLDWIQQLMHQQGMDKVTVGMEPTGHYWLNLAHFLKEQCINFVVVNPMHVKKSKELDDNSPTKNDVKDARVIAQLVKDGRYAVPNIPQGVYAELRVARKIRDLLSVDLQAVQGQIHNWLDRFFPEFLTVFKDWEGKSALQLLKLNLLPHELSKLTDQEILMHFRKVVTRAVGLSKITELKEAASHSIGIREGSAMAKLELRTLIDKYELINEKFEELESNIDDLLEQIPGVEQMLAITGIGKDTVAGFFSEVGDLSSYSHPRQIIKLAGLSLRENTSGKHRGQTKITKRGRKTLRALLFRVAMPLVAKNSAFKALHQYFTKRSDNPLKKMQSLIAICNKLIRILFTIGKKQCEFSEERMLRDIPHMAELPKVA

SEQ ID NO: 488465 - protein, 391 aa, unidentified
MDARTVNSLPPAATHDGALRCAMAIELSKTSWIVAVNTPMSEKISRYTLKGCDRNGLLDLIKKIRARAGREFERPVEVVSCYEAGYDGFWLHRFLEAHGVRNYVIDPASVQVDRRARRAKTDSIDVAQLLRSLMAYLRGDPRVWSVVRVPTVAEEDDRRLHRERDRLLNERVQHVNRIKGLCAVHGIYDYEPLRSNRMLRLEQLRTGDGRELPARVKAEILRELQRLELVLQMTKTIEKERNAIASGKASAHANARRIRDLVQIKSIGPEIATVLVGEVFYRQFDNRQQLGSYVGLTPSHFQSGSMSRDQGISKAGNPKARTTMIELAWMWLRFQPNSALSLWFRERVGSAKGRIRRIAIVAVARKLLISLWRYLETGQVPTGAVLYTSKR

SEQ ID NO: 488466 - protein, 325 aa, unidentified
MVSRAGAELETLTVPADAFGHKKLLAFADRVGNKPRLWAIEGTGSFGRGLTTFLLESGETVGEIDRPARPARRNGAKADDLDAVRAAREAMARPHLSQPRRRGLREALRVLVRTRTTTVRAKSVAICHLKSLIVTAPTGLRDQLRNLSDVRLAPKCARLRTTINHSPEHRATIAAIRATARRILWLEAEAEDHASAIELLVQEIAPQLLKEVGVGPLTAAELVIAWSHPGRVRSEAAFAQMAGVAPIPASSGQVTRHRLNRCGDRHVNCALHQIVLSRLFHHDETKAYYERRKAEGRSPKEIKRCLKRYLARRIFRLLEVSSMAT

SEQ ID NO: 488467 - protein, 347 aa, unidentified
MLHAGLDLSRRKIDVCLLSDHGEHLDQLAVAPDVDSLRTLARRIDEVHREPVCAVVESMTGARLVHDMLEQEGWDVEIADAQKVKGLAPLACKTDKIDSMVLAVLSQRDLVPAIWLPDPSVREERELARFRLHLVKHRSMLKHRIHSTLINFGRPCPVTDLFGAEGRRLLERLDVPEPWRGNVSASIELIDDLERQIAEINRRLREGHADHPYVPLLLSVPGIGWVLAFTIAAEIGRIERFASPEKLTGYTGLCPRVNQSGDADRRGPLTKHGPAYLRWALIEATMHALRHPAYAERYQRTKRRLGKQRGAKVAQIDIARRLAHAIWHMLSRNEKFAPRGAALRLAA

SEQ ID NO: 488468 - protein, 368 aa, unidentified
MKQALFAGIDLHSNNVMIGIVDQSGRRLKHQKLGCDLNEITSFLEPWKPQLKSVAVESTYNWYWLVDGLRALSYPTKLADPAQIEQYSGIKHADDKNDAYFLADLQRLNILPTGYIYDPALRPVRDLLRRRLGLVHQRTALLLSFKSLYARTTGQAMSLSRLKAMEPNDTKTLYRHPANCLIALLQKEHIDKLCQSIELIEKSVLAQARELPCYQKLLSLPGVGRVLGLTITMEVGEISRFKTPGQFASYCRTVNSQRLSNNKKKGANNRKCGNKYLAWAFVEAANFAKQHHQHCRRWFDRKAARTSKVIATKALACKLAKAAWYLMSQGSDYDPERMCPEGAMKEEKLKFVRAAASQKIGVGKNPFD

SEQ ID NO: 488469 - protein, 331 aa, unidentified
MMNASEMIFVGIDVSKDTLELALGDKSKTQCFNNNELGIKGVIACLKTEKTRRTPVSVGAIVLEATGGFERQAAIALCEAGWPVMVLNPRQTRDFAKAMGYLSKTDSIDARVLSHFAKTLHQSDNRERLLMKLPDAQQVALQALLTRRSQLITMRVAEDNRLEISHKSQHKSIMTVRKVINKQLSMIDSDIDDLLRTHFAEKLSLLKDFKGIGVGTQASLMAGLPELGTLSHEQISKLVGVAPLNCDSGKHKGKRITWGGRSGVRSMLYMAALSAARYNPVIKAFYDRLISKGKPKKVALVACMHKLLVILNAIIKSGKQWNPLYSATKNT

SEQ ID NO: 488470 - protein, 366 aa, unidentified
MKKTSTVQTLKNELFKGRKLTIGLDLGDRWSFYCVLDEAGQIILEQTLPTTPEAMKQTFGKIPRSLLALETGTHSPWVSRLLSELGQEVIVAHAQKMQLITKSNRKDDRHDARTLARLARVDPELLGPVRHGSAQAQLHLTVIRARAELVRARTALVNAARGLVKSYGQRLPKCGTYQVSEKLGEGLSAELREVLVPLFQEIESLNGHIKEYDERMEKLAKEVYPEVSLLKQVKGVGTQIALTYVLTIEDPHRFPKSREVGCFLGLRPGRRNSGESEPQKGISKEGDRYLRTMLVQGAHYILGPFGEDSDLRRWGHKLAERGGKNAKKRAVVAVARKLAVLLHRLWVGGEVYEPLRNSQKAMREVA

SEQ ID NO: 488471 - protein, 423 aa, unidentified
MTQFAAYLGIDWADKKHDLCLVDAATGHKTKLVLAHTPQAIAAYFTNLRAQYPGQLIAVALEQSRGPLLFALLQYDFLVLYPLNPTTLAKYREAFTPSRAKDDPTDAAYAAELLMKHNDRLKAWHPDDPQTRTLRYLVEHRRRLGGDRTRLTNRMTSLLKCYFPQVLSWFPDLATVLVADFLLRWPALEQLRGVKRTTLLNFFRAHHSVRTDTLEKRLAAIKESVPLTTDRAIIDSSVLMISALAAQLKTTIAALQQFDDEIAKLCVAHPDFPLFASLPGAGAVYASRLLAVMGTQRDRWTTAAELACLSGIAPVMERSGQSVWIRWRYFCPKFMRQSFHEYAGESVKHSFWARAYYEQQIGKGKSRQAAVRALAYKWIRIIWKCWQTRSPYNEVKYLEALRRKGSPLLAHAVKNTACVNKSS

SEQ ID NO: 488472 - protein, 408 aa, unidentified
MKTLHQRCAGLDVHKQEVVACLRLGRRGRVEREVRRFPTTTRGLLELADWLEAARCTIVAMEATGVYWKPVWHLLEGRFELVLANAAHIKGVPGRKSDVNDATWIADLLAYGLIRASFVPPQPIHDLRDLTRTRKQLSREIVRHEQRLQTVLEEANVKLTSVITDILGASGRRILKAMIAGETDPSRLAELGSRRLGCSRETLVEALDGHVRDHHRFLLDQHLKTIEQLEETMAAFDARLEAALAPFRDTVECLTQVPGLSTTAAEVVIAEIGLDMRRFPTAGHLLSWAGLVPGLDESAGKRRSTRVTKGAPWLKPVLVQCAWAAARKKGSYFEAQFLRLKGRRGPKKAAIAVAASILTTVYHMLRDGTCYQDLGPNHFIRRDPARTAHKLADRIRSLGYVVEIRSAA

SEQ ID NO: 488473 - protein, 351 aa, unidentified
MPHKTAATVAHTIGIDAGKNTLHLIGLDDKGAIVLREKVARDRITVRLANVPQCLIGIEAGMATHYVARELSALGHDVKQVPPAYAKPFRQGHKNDFRDAYAIAEAVQRPSTRCVPVKTDDQLDLQALHRVRSRLVGQRTAVINQIRSFLLEPGIAIRQGLRFLRQQLPDILAKRSDVLSPRMIRIIEDLSGDWRRLDERIEHITAEIEVLAQGSESCRQLMTVPGVGPIIASAMVAAIGNGTAFAKGRDFAAWLGLIPKQMSTGDRTILGRITKRGNRYLRTLFMQGARVILLRPANWMKHSFGPWLTAAANRLHHNVLATALANKLARIAWTVLMQARSYEARVEPRTA

SEQ ID NO: 488474 - protein, 397 aa, unidentified
MYIVGIDIAKRKHEAAVIDGDGAVIIKPFSFTNNCSGYNRLLAMLAKAKLPLDEVSFAMEATGHYWLALFTRLQKEGFRVQVINPVQTNSIRSFYIRQAKTDPRDALLIAEVIRFGHFSESTLHPENIYELRELCRGRHAIVSMQADVKRKVVALLDQVFPEYETAFTNLFGDTSMTILQTCPTPKELSEMPLEELCHLIEVSSRKRFRMSKARELQELARNSFGFAMAGGVFSTMIRLYAKHLDFLKQQVREMDRKIAEIMDTLDTPITTITGIGPTLGAYILSEIGDISRFSSAAKLAAYAGIDPTMRQSGEYNGVRNHMSKRGSPYLRHAIWLAASSAVLHDPALKLYFQKKREEGKPYMASVGHACRKMVSIIYAVMRDNKAYTPHIPNEISA

SEQ ID NO: 488475 - protein, 461 aa, unidentified
MVRQKGNKKVTKLVEGEGLRKSGAIMGVDVHKDLLAYCILTEKRILEELTVKNDLQGIQSLISLCQTYQVSSVAVESTAQYHFKLVYRLLEAGIPPLVANPQQTKTTQGKKTDKFDARRIAIAHRDGRLKPSVISSQEILSLRKANRMLFKQINDATKIKQRLNQLFHQKDFTHPNLVKTQFGVQLLQLVAEGLIPETTWNSQVPEKLQALVTPDLLKARQEFQDRLDEIERMTLGNEVLQLQLLRITMDRQRMAYYAVAKRNPHFQTLMKLLLRIPGIGPDTAATVLAEIADISYFPSPKHLAKWAGLAPRVYQSGHHQHITGHIHKGGNKYLRRAVVLACQNIYAKGEPNNPLRQFLRSKKKEKDSYWLAICAGARKLLVLIWYVLKKQFEWGTRTASPEVIEPIKQALTAKIKLFQSKVNRYQRIWEMLSGDCKEVFERIQGPQQSPKVLLKALLNSV

SEQ ID NO: 488476 - protein, 276 aa, unidentified
MRTVAEEYDRVVGVDTHTMTLLTATGGVVEHLTFPSSAAGLHRALAWIRDRTQTRTCLVVVEGTGSYGAQLTEHFTQGGILVAEAPTVPAARRRGKDDVLDSARIARAVLGLRLDQLCWPRAGGTRTAIRVLVSARDQMSTERTKIINSLTALVRGVDLGVEARKALTSAQITTIAGWRTRDEDPATAACRREAIRLASRIRTLGRDLAANMAELRRFTAAEVPELLNLPGVGPVVAGTILLAWSHPGRVRSEAAFAALAGTSPIPASSGHTIRIG

SEQ ID NO: 488477 - protein, 406 aa, unidentified
MEVVHERCCGLDVHKKTVVACVITPKARQVRTFGTMTQDLLELGEWLVAEGVTHVAMESTGVYWKPVFNLLEGCELELLVVNARHIKAVPGRKTDVKDAEWIADLLRHGLLQASFVPNREQRELRELVRYRRTLIEQRSHEVQRVQKVLEGANVKLSDVATDIMGVSGRAMLRAMIEGEQSPQALAEMAHGRLKRKRGSLEKALRSSVGAHQRYMLRHLLEHIEFMEREIAALDRAIEERMRPFEVGIGMIDEIWGIGRRTAEEILAEIGLDVSRWPTHKHLASWAKICPGNNESAGKRKSGRTGKGNRWLHSTLVEAANNVSRNRASYYGAQYHRIARRRGRQRALVAVAHSLLTAIYHMLRDGTVHQDLGAEYFDRLDRERATHRAVQRLRRLGYEVTLQPVAA

SEQ ID NO: 488478 - protein, 429 aa, unidentified
MSPSFVGVSSNFAPYSLILLKRRYWYSSHLLIEGSIFIMINIGIDVGKFKHCAAVLDDKTGEVLIKPFFFNNDQEGFELFYSKTKRYIHRKHSVGMEDTGHYMINLTNYLLEKKFSVKYINPRSTSLRRRELGISAKNDKKDSLLIAEMLSEKKFWRSVSVSSLETDKLREITRLYHQLQEQQNQDMNRFQRALDIVFPEVNNLSWTRYSKAYMQFLTAYSSASSIVREDIRNLRKALKTEGRGRQCKVSAEEIKDLAKSSVGDDNIAVELEVKSIIAIINARAEQIRILEKKIEEFSRQLNSPIISIPGISHITGMTILAEIGDIKDFPEAAKLISYAGMDPLVYQSGNYDAAHMPISKHGSRYLRKALYQAVFTVCKYNPVFQDYYTKKRNQGKSHRCAQGHCVRKLLRVIYKLLSTGSSYNPDLLH

SEQ ID NO: 488479 - protein, 393 aa, unidentified
MVYVGIDVAKDKHDCFIANSDGEVLYDVFTIQNDMDGFEDLLFKIKTASRDLSKVKVGLEATGHYNCNLLGFLKSKGLPTIVINPLHTNAYRKSLSLRKTKTDKADARAIASMIMSDVSLKPYSDTLYHNEDLKSLSRYRFDKVSERAKLKQSVSRLVNILFPELEKLVSIIHAKAVYVLLSEFPGAHQIASANLKHLTALLSTASKGHFGRDKANEIREAARRSISTYLPAKSLELKHTINLIRELSSEIDEIETEIKKIMDSIDSPILSIPGISYGIGAMIVSEIGDFSRFDSPDKILAYAGCSPTTYQSGQLYSSHAVMEKRGSRYLRWALINAARYVCNWEPTFTAYLEKKRSEGKHYYVALSHAAKKLVRLLYHLETTGEKYIPQTLS

SEQ ID NO: 488480 - protein, 394 aa, unidentified
MKLIGIDIGKNKHFFCIMDKDSGEIVSQPASFSNDKEGFDFLLQKIKSYPKNSVLIGMEDTGHYHFALLKYLLDLQYTVALINPKTTDFNRKMQGGITKNDKLDTINICDVLDTPERKKQYRITKVNKFDLYEQKQLTRQHHNLKEELNVYKNRLQKSIDIVFPEFNSLFKSKYGTVYMNILKTFGSAENIANTDIRTIRKCFEIDGRGNRISLTPERLKERARSSIGISSLAEVIQIKHLSAQIELIEEQLSEIDKKIEEFSIQNNSPILSIPGISHFSGTSILAELGDISNYSKPSQIIKFAGVAPLHYESSQFNAQHTAITKKGSKYLRKTLYQIILPVIRHNPVFNKYYQLKISQGKGHRCAQGHCVRKLLRIIYHLLKTNQQFDPQLLR

SEQ ID NO: 488481 - protein, 356 aa, unidentified
MQTIAPADIIVGVDTHKHIHAAVALNGLGARLGTTSIPVSPKGYRALEVWARAFGSVRAFGIEGTGSYGAGLSRALVARGHTVVEVNLPNRQLRHQHGKSDPLDAEGAARSVLAGQATAHPKSGTSAVEMIRQLKVVRDTAVKSRTRAMITLKTLIVNAPAALREQLDRLTGRMALVRHLAALRPGPLTSTTASTKAALKALARRWLMLDAEIKEHDTALDALTDTCAPGLKAAFGIATGTVAEMLILVGDNPERIRSEAAFAKLCGACPVPASSGQTNRHRLNRGGNRQANAALYRVVIVRMRSHPPTLAYLSKRLAEGLTKREIIRCLKRFVAREIYSHLCGRLRGGVEGTATA

SEQ ID NO: 488482 - protein, 320 aa, unidentified
MRNAVGLDISKLTFDASAMVGNAEYSAKFDNDSKGLDQFSDRLKSLGCQNLHICMEATGNYYEEVADYFAQYYSVYVVNPLKISKYAESRFKRTKTDKQDAKLIAQYCRSAQESELVKRQKPTDEQYRLLRMTAAYAQIKSECAAMKNRHHAAKDEEAAKAYAEIIKAMNEQLEVLKEKIKEQTEKPNCKEGVKRLETIPAIGRMTAAVLFHHLTSSKFETSNKFAAFAGLSPQQKESGTSVRGKGKLTKFGNRKLRAVLFMPAMVAYRIRAFPGFIKRLEEKKKPKKVIIAALMRKLAVIAYHVHKKGGDYDPSRYKSA

SEQ ID NO: 488483 - protein, 368 aa, unidentified
MSKLANVERFFKNVNLTIDDEVFVGVDVHKKSYHVALFLNDIPAIDFRMCAEPKQLNMKLQPMACSIKDIVYETGPTGYGLVRHLRKNKLPANVVATSRIPRSAGPSDKTDKLDSRKLAEYSAKGLLRPITIPTRRQEADRQLYRMRHRQALQFAKVKVQIKSFLLMHGIKEPDGLANWTIAGVGDLRNMRLIDTLRLSLDELLSDYDYFNNRIKVLNKVLAGNLDKGVLGRRMDLLKTHPGVGPVVACQFATELFHYRDFSSTRQLYKYLGLSPRVSQSGERSNTGSINKAANGRLRNNLIQGAWSWVRTDVEAKKSFWRIYDNCGGIKQKAIVAMARKLAGHLWAMLMNDQPYDKNLAKSRNNKER

SEQ ID NO: 488484 - protein, 359 aa, unidentified
MEKAHIIVYSVQKKGFHTMTNNLFFIGLDIAAADLAASIYQSPDQPIRTKEAIPNNPEGFRILVSWLTGHHINKTNSRICMEATGVYSKAVAYYLTSWGFPVSVEPPLKVKRAFDPVGHKTDPVDSKQIAEYAYRYQDELRLWQPKKEIIEKIRQLLVTREQFTKQKIALNNIMHAYSKEIVQVDLINKTHQETLALIKKQIVRIDKELNKVIKQDPDISQKVKILKTMPGCKMLLAANLIVMTDNFTRLQNPKQLAAFIGIVPYQHQSGSSVFKKPRIRHFGPQYIRKLLRLGSQSVATHNKTFRPYYLRKLAQGKAKALVLNNIANKLLKLACAIARDNTVYIKEHKSIHPMYLKSA

SEQ ID NO: 488485 - protein, 347 aa, unidentified
MNFYTQQHKHYCGIDLHAKAMYLCILDQQGTKLVHKNLPTTPEAFLRVITPYREDLVVGVECMFTWYWLADLCQKEGMAFVLGHALYMKAIHGGKAKNDKIDAHKIAVLLRGGMFPQAYVYPAEMRATRDLLRRRCHLARKRAELLAHIHNTNSQYNLPEIGKRLANKANREDVAEHFPDPSVRKTIEVDVSLMDHYDQLLGEVELYLTRSAKAHEVQTFARLQSVPGIGEILALVILYEIQDIARFPRVQDFVSSCRLVKCAKESSGKKLGTSGKKIGNVHLRWAFAEAAVLFLRQSKPGKEYFVKLEHKHGKAKALTVLAHKLGRAVYYMLSREQAFDLKRFVTA

SEQ ID NO: 488486 - protein, 358 aa, unidentified
MKKYVALDVDSANIVAGVYDYLGRLIMKTHLRLEAKVIKEFFKMLSGTVHVTFEEGTQAAWLYELIEPLVAEVVVCNPRENKLLKAGNKSDHIDVGKLAKLLRLGDLKSVYQGPRCSQGLKQLVHSYDALVADTTRTKNRLKAVYRGRGVSTKGEGIYGRGQREQWLDKLATREQRTRAQSLFAQLDYEEQLGKRAATVMCQEARKNPGYQWIISAPGLGRIRTAQILATAITPHRFRGKRQFWPYCGLAVVTRSSGDYEWDENGTRRKRKPIQTRGLNPNHNRTMKAVFKGAAASAILQHAEVKEYYQRLIGTGMRAEMAQLTVARKLAAIVLTLWKKGELYDPKRLNQAAPGAGPQ

SEQ ID NO: 488487 - protein, 344 aa, unidentified
MNNPDTCGIEISAKNLVVRLRRGGDLEPMRKFTNTPEGREVVVRCLRRPGRVARVCLEASGLYGLDLALALSGAEGVEVMVANPRAVRHFAHALMKRSKTDPIDATVLEEFAARMPFQVWRRPAPNALALHALARRLRDLVIMQTAEKNRQHAAGLSKTIPAAVRRDLRRSLRAQELAIQRLTREALKLIGKDPELRERFTLLDTVPGIGETSAVQILGELVVLAPDLDARQWVAAAGLDPREYTSGSSVYKKPRISKAGNPHLRHALFMPALVAVQHDPYLRGFYLHLQAQGKVKMQALVAVMRKLLHAIHAMFKNHAAYDGSKLFHLPNPIDPEVSRASLTA

SEQ ID NO: 488488 - protein, 396 aa, unidentified
MWTLGIDVGKRRHHATLLDEDGKPVFRNVAFAQSRTGVDGLLARLAETGQSPAGLRIGMEATGHYWMVLFQELTQAGYDVVVINPLVTAARRNVAIRGTKTDSVDSHLIAKVLREESPRVSAIPEKDVAALRNLTRLRFECSQTARAEKLRLVALLDLVFPEYTEYFSDVFGAASRQVLAAFPTAAELAKVDVRRLTSLLRKASRGRLGRERAKQLKAAAKNSFALTGNNDALALEVRFVVERINLLVAQIADLDRRLGAFLPDQQELLRSVPGLGPVWAPTILAEVLPVFHPEEKQGAKKLVAAAGLDVRLHESGDHIGHGKMSKRGSKYLRTAAIQAAEAAVFLNGDPLLKPVYDRHREHGKHHLVALSHAANKLLHVIFSVLKNQRPYVPILN

SEQ ID NO: 488489 - protein, 423 aa, unidentified
MVASIWEVVEVSGVSVGAAVVFVGDDWSSEHHDIELQDAAGRVLARRRLLEGVEGWAALHGLVGEHVGVAAGVVVGIETERGPWVAALVAAGYQVYAINPLSVARYRERHSTSGAKSDRADAHLLCELVRVDRDHHRAVAADTELAEAVKVLARAHQTLIWQRLRQAAQLRSQLREYYPAALEAFGTLLFQQEALAVLGRAPTPAQGRALSQRQIEALLRGAGRRRRLSARTIEIQQALRAAQLAAPDLVADAFATAARSNIALLSELNRQIATLETSLADAYQHHPDAEIIDSLPGLGLVLGARVLGEFGDAPNRYKDAKARKNAAGTSPITRQSGKRHGVQARYARNRRLFDALFLWAFTSLRASPGARTYYDRMRGRGHTHNQALRQLANRLVGILHGCLHHRRHYDEKTAWGHLLATAT

SEQ ID NO: 488490 - protein, 411 aa, unidentified
MEQNGVVDESTRFVGLDVHRRYATVAAVDSQQHVVLTARRIDFNDFDEWVRKHLRRTDVVTLEATSNAWHLYDMLVPLVASVTVANPIQVALIAKARVKTDPRDALTLARLLAVGMLPSVWVPPVEVRELRALGGHRRRLIKQRTQARNRLRAVLFTHNLFPPAGEAFGPANRPWWEGLDLPASEKLRVRHDLSILDCLEPLVKGVDAELVRQSSLAPWAEQTAFLVQLPGIGVHSAMQLLAAIGDIERFDGPHKLVGYAGLGARVHSSGEEHYGGRITKQGRRDIRTTMVESAWVAVESHTYWKALFERLAVRVGRPKAIVAIARKLLVVVWHVLAKQVADREAVAEQVAGKFLEWSWKLGRVNRDGLTSGAFIRRELCRLQLGDKVTAISRGKRKFPIPLSERADQAVG

SEQ ID NO: 488491 - protein, 417 aa, unidentified
MKNWNEITHYLGFDWAKDHHQVVIVDRQARIVAEFQFEHSLEGWNTWRERMRDYPALAVAIETNQGAAVEQLLQSSVTIYPINPRSARAYRQRKVPTTNKTDRLDAWSLAEALRTDGQSWRPLQPLDPLIQELRLLCRDELNLIAQRTSLINQLQQALMEYYPSALEAFDDWTVPATWKFLERFPTPDALTAAGLQKWNAFLHCHKLYRQNTHERRIAAFSKASEWHIAPALQRAKSFLVLSLVQCLIVLEKQLQQYRKRIEELFATHPDHDLFGSLPGAGPKMAPRLLSELGEDRTLFPDADSLRCYAGTAPVSYQSGQVHKVYLRRQCNKPLRCAIHLWADLSRRWCQWAQTYYQQLRKRGKSHAQALRCLGHRWLKIIWKMWQTRTTYDEALHTRNQTEHGSWVLQLMDQKPSE

SEQ ID NO: 488492 - protein, 330 aa, unidentified
MKFNHVIGIDVSKYTLDCVCHRNGAYLQVDNHRKGYLQLLKWAQKQCGVDLKQILFCFEHTGIYSLVLAIFLDKQQIPCVAQSALAIKRSMGLARGKNDKADARQIARYAYLHCEELHLYKLPSENLLKLKSLLTLRDRMVQQRAGYKASQKEYATFFVKKDNTELFNIHQSLIVALDKQISKVEQQLEHIIESDEKLKECYKLMQSIRGIGKVISCYMIVHTQAFTSFDNWRQFAAFCGIAPYENRSGTFIGKTTVNPLANRKVKSLFHLIAMSSIQCNQEMKMYYERRVKEGKSKMSSLNMVRNKMLSRIFAVVKRGTPYKHMELQTA

SEQ ID NO: 488493 - protein, 367 aa, unidentified
MEKSSKVYVGMDVHKESIEVTLAEQGGELRRLGQIGGDRGSLLKMARRLQSRGGERVFVYEAGPCGFWIYRELAALGERCMVVSPALVPKRAGDHVKTDRRDSERLASLARAGELEAIHVPDIRDEAIRDLVRGRDDAVIAQRRVRQQLKALLLRNDVRYVGKTSWTGAHRRWLSELKLPEPAQQIVFEEYVDAIAVATGRIERLTQAIQTEVLTWRFAPVVGSLQAMRGIQFVHAVTLIAELGDLTRFASARQLMGYLGLVPREASSGEQRRQGSITKAGNSYARRALIEAAWAYRHPARVTRIIATRQTGLPKAACDIAWRAQLRLSAKYRRMNARHLHHNKIVVALARELSGFVWAIGQCVRPQ

SEQ ID NO: 488494 - protein, 358 aa, unidentified
MSATTRFFDPVLPDPPALYLALDISNRSWKLAFSSGLGQKARIRTIPARDLQALTAEIASARTRFRLPDSAPLISCFEAGRDGFWLHRFLSTQPRTVNLVVDSSSIEVNRRRRHLKTDRIDAIKLLSMLIRYHNGETSVWSVTNVPSPQDEDARNLHRELVTLKSDRTRITNRIKGLLAAQGLTAPSMTKRFPDELGDLRLWNGQPLCPELRQRLEREWLHRSDVSDRIRLIEKIQTERPESSSDPALALVRQLMTIKGVGLQSAWLFTFEFFAWRDIQNRRQLAALCGFTPTPYQSGDESLDQGISKAGSSLVRAMTIQIAPGVWAIYFGPVPLGWLHIDRGTILDHDGSSSRNPKL

SEQ ID NO: 488495 - protein, 423 aa, unidentified
MKVVYTICCGVDVHKTFFVATIITTEGIQPKYQKRRFSTFNNQILAFKSWLLENNCRDVCMESTGKYYVPVYNLLEDSINVTVANPKWVRAVKGCKDDVKDSKWIGDLFRLGLVPGSFIPKKDVRILREYTRYRFKLVSCKSSEKNRYQNVFTVCNVALDAVVSDMFGKSASSITDYIVNSDTFDPDYCVSLLQKSLKKKADEVVDSITGFQMTLSQKHRAKLVREHYDYLENQIQKLDDAIDELAKPFEPSVNLLCTNPGIRRLSAIMVLSEIGDDMSQFGSSKRLCSWAGLTPGNNQSAGKKKSVRINRAGVYLKPTLVQIAHAAVKDTKNTYYRTKYERLSKRRGKKRAIIAIARMILTAIYHMLSTGEVWNPRDLDQIDMPLEMREKEMQKSIRRAAKLLVAQGVVDPNAIMIPLSDTA

SEQ ID NO: 488496 - protein, 483 aa, unidentified
MKPKQLEKNRKAIYRTTQNNWHEMNRKQRREMTRKIQSEDLSLEVVHPDAAGIDIGNESHYVAVPPTRDSQPVRRFGCTTPELKEMAVWLKQCAIRTIALQSTGVYWIAVYDILEEAGFEVYLVNARETKNLPGRKSDVQEGQWLMKLHTYGLLRNSFRPSQEIRTMRTYWRQRNDLVRSAGRHIQRMQKALTQMNIQLANVLSDVSGMTGQAIVKAILAGEHDPYQLAALRNWRVKASEEEIARSLEGNWQEDLLFVLQQEQDGYEFCQRQMAECDQRLQQYLQQLEDRSHGAGLPEEKRKERLRKKKKGNAPQFDMRAELFRVTGTDLTQIDGIDVTTTMTILSEAGWDMSKWKTEHHFVSWLRLCPDNRISGDKIIGKGRLPTNNRVTNALRMAASTLRLSNTYLGAQFRRLRTKLGAPVAIKAMAAKLARLVYRMLRYGMTFIDRGAEFYDAQHRKLQINYLKRKAANLGFQIIEAPAA

SEQ ID NO: 488497 - protein, 372 aa, unidentified
MRDDSEVYVGLDTSKLKISVALAEAGRDGEVRFFGDIDSTPGAVERLVRRLAKRHQRLCFAYEAGPTGYGLQRQVAALGHGCVVVAPSLIPKRPGERVKTNRRDAPTLAKLHRAGELTPVWVPDPGHEAIRDLVRAREAAMEDLRAKRQHLQSFLLRHGRVFTGRSAWSRAHTRWLCELHFEHPAQYLVLAEYRQAIADAETRLERLSEQLAELVPSWSMAPVIAAYQAMRGVAFLTAVTFVAEIGDVRRFESPRQLMAYLGLVPSESSTGERVRRGGITKAGNSRARRVLIEGAWTYRFPARKGRLLQGRQAGLPKAVCDIAWKAQLRLCGRYRKLIARGKRQGVVVAAIAREMAAFLWAIGREVEPQRAS

SEQ ID NO: 488498 - protein, 343 aa, unidentified
MESIHYIGLDVHKKTIAYCIKTVAGKTVRHGTVRSERQALREWQSEIPGPWMGAMEATLFTGWIYDFLKPYAVELKVAHPEMLKAITAAKKKNDRADAEKLADLLRVDLLPECTMMSEELRELRRILRYRNMVVRTSVKMKNKISGLLMEVGAPYEKRRLHSRSYFNQLLECVEDVPESVKELLKLSRSNLELFETVQKKLIKTLRQELQIKERVECLMSIAGVGEITALTWVLEVGDPARFRNSRQAISYCGLCSAQKESAGKEHRGPISKKRNKHLQTILVEAAKLAPSWNPHLAAVHEKELARGNRNRATLAVARKLVEYMLAVDRRGTPFVSEEPPQVA

SEQ ID NO: 488499 - protein, 347 aa, unidentified
MEYYAGMDVSEEATSVCVIDGGGKVVSEAKVATDPSELARHLMQFGVAFSLVGLEAGALTPWLAREMAALGLPVVVIETRRMKAYAKASAVKTDRRDAKMIAQALRAGLYQGVHVKDEEAHKRRLVLSARSMLLGQARRLQVKIRGDLKPFGIRLGKVGAGGFAGRVKERLRERPDLMALVAPLLVMRAALLQQVRIYDREIRRSVAADPVCRRLMTAPGVGPITAFGCRATVDDPQRFARSSDVPALFGLVPRIDQSGEHEHIGAISKAGDTMMRSLLFEAANALLTRTRKSFALKRWGLKVARRRGMNRARVAVARRLAVILHRMWIDGTDFRLQDAQKPATVGA

SEQ ID NO: 488500 - protein, 314 aa, unidentified
MGERTVVGVDVSKGLLDCALTPGRAEFQVTNDASGITQLLERLALLKPDLVVLEASGGYETTAASALAGAGFRVAVVNPRQVRDFAKATGKLAKTDRIDARVLAEFGSAIDPQVRRLPDEETRALQALLARRSQLVAMRTQELNRLAQARAPVRAQIKGHIEWLNKAIRECDIDLTAKLRASAVWKAKDDLFRSMPGIGPVNSRMLMAGLPELGQLNRQRISALVGVAPFNRDSGKFKGQRKIWGGRAQVREALYMAALTATRCNPVIRTVYERLTARGKPHKVAMVACMRKMLTILNTMARNNLHWNPNLKTA

SEQ ID NO: 488501 - protein, 422 aa, unidentified
MENRDAVMYWVGVDWGGKEHAVCVLDSQGVVVSRLRVKHSPQGLATLVEWLRNFGPIGGVAVESTRNLVVHALSAANFTVYPINPKLSCQWRKAWSVSEAKDDERDAEVLADGLMHRYEHLQPLLPDTEIARELALLCEDEVRLINDRTCLVQKLEDTLKQYYPAALEWFGDWATPNAWAFVLKFSTPAALAKASRQKVYGFIKAHRLKYTPARRTLIESRSNATDWPCDEATIRAKSLLAVTLAKQLEGLERSLKKYRKRIEALFNKHADSPIFESLPGTGPKLAPRLSASFGSNRSRFDSAQAVQQLSGTAPVTHQSGKRKHVTIRRACQKGFRATLYHFAWHSKRRSAWAKACYDLAKERGQSHSQALRVLANKWNKIIYRMWQTGETYDEQRYIDQLIRKRSPIAQKMGLLKTGTQCG

SEQ ID NO: 488502 - protein, 418 aa, unidentified
MSRAIARKLACIEPGTLFAGVDMALDRNDALIIDGQAHRLDRFRFPNDADGYDYHYRRLMTVKEREGAPAILVGMEPTNYFWKLLASDLEQRGAPYRMVNPFTVKKHREGDQLSRSKDDSRDAFMVADLLRTGKFTETQLLQGQYAVLRQYVVLRDRLKGDTRRQKTLIRNIAGQLFPELAHEFKDFFGLTALALFRRHAVPDVIKDMSQSALITAVREDFTGERLPVSKLRRAHALAKRSVGVRHGTEALQEALRVHLDNLELLQEQVENVEELLLSVFFGLPEAPYLISVPSVGMVTAAIILAEIGDPGRYSNGNQLIKLAGTQPVRNVSGRKTRSKTPMSKKGRPRLRTALYFATMRMIQEDDNFARVYRRFLTREKNPLTKMQALGALMNKLLRILWALMKHRTFYDPTYELNK

SEQ ID NO: 488503 - protein, 462 aa, unidentified
MSKRSKRHEKSRFRKIPDLESLKQLNLNAGGIDIGSAEIWVCVPKDCDEESVKMFSTFTIDLHEIATWLLRCDVDTVAMESTGLYWMPLYDILEQNGIDVYLVNAKEAKNVPGRKTDILDCQWLQQLQTYGLLRKSFIPDKEIRKLRDLGRHRDNLIRHRATQIQYMQKALHLMNLQLDNVITDITGKTGISIIRDIVAGRTNPKDLAEHRDPNCKNSKDVIEKSLQGNYSEEHIFLLKQALELYDIFSSKIVDCEKEIEKQYQRFSPKVEPYDKPLPRSSKKPTRTKNKMSFDLRTALYRTCGVDLTQVDGLSAITVHTVISNAGVDMSRWPTYKHFTSWLRLSPNNQTSGGKVLSTKTGKTKNRANMALRQAAQSLHHSNSYLGAYYRRMRTKLGAPKAITAAAHKLARIIYTLLIEQKEYLDLGADYFLQNNREREIKKLFKKANSLGFYITPVAQGVS

SEQ ID NO: 488504 - protein, 387 aa, unidentified
MMQTVAALIPAAMDYERTLVLAIEVSNKSWVLAAQVPGLPHTKAKRTINPDAESLMTAIAGYRARAAATGHSVERVITVYEAGWSGFWLARWIMRQGMEAYVIQPSSVPVDRRMRRAKSDGIDAELLLRTLLAWLRGEPRVCSMVPIPDEADEDARRCVRERTELISERVGLTNRIGAVLATLGVSDYNPLLRNRHRRLTELRTGLGEPLPRNAQAKIERLLARLELVLAQIAELERERDAVVEAEASDKASKMIQQLTNLRGIGVQRATVLVREAFVRRFANGKTLGSYAGLASSPYSSGGIDREQGIGKAGNRRVRTVMVELAWLWTRYQPGAAQVRWFCERVGSTGRRARKIMVVALARKLLIALWRFVIDGVMPEGAILKPAA

SEQ ID NO: 488505 - protein, 346 aa, unidentified
MTIVEAARAVTGGIDTHGEVHVAVALDEVGGLPGTKSFSATPEGNSALLSWLSGFGTVGKVGVEGTGSYGAGLARCLARAGVEAIEVDRHNRQNRRRQGKSDPIDAVEAARAALSGSATGKAKSRDGSVEAVRVLVVAKRSAREARVKALTQMRQLTFTAPDQLQSRIKGLPSAQFIAAAKGLRPTRSTDPVTVATKAALSSLAHRIGELDEEICQLDARITPRLESHAPELLNVYGVGIDTAATLLTTPGDNPERLRSEAAWAHLCGVSPLEASSGKVTRHRLNRGGDRQANRALWIIVVSRLASDPETQAYMERRVKEGRSKREIIRMLKRYVAREVYHYLPRG

SEQ ID NO: 488506 - protein, 453 aa, unidentified
MRFYTTPHRYYCGIDLHARRMYMCVLDADGQIRVHRNGPATPEHFLATITPYREDLVVAVECIFTWYSLADLCAQEGIAFVLGHALYMKAIHGGKAKNDKIDAHKIAVLLRGGMLPMAYVYPREMRATRDLLRRRCHFTRKRAELLTHIQNTASQYLLPALGKIAFHGNRVGLADHFTDPAVRKSIESNLALVDHYDRLLRELELHLAQTAKVHDVNAYYRLRSVPGIGKILALVLLYEIHDIHRFPRVQEFVSYCRLVKCAKQSDGKYYGYAGTKIGNAHLKWAFSEAAVLCLRRNAVAQRYVARLAQKHGKGKALTLMAHKLARAVYYMLRRGQAFDATKFFAPTRSGEPAAPAAMPPLAVSDHHDASRAASPRPDLEGGRYLAPSPKSRDASRSRASMNNGACPPAAEVGGATERGARACAPERARGARESRPSNWTREGTEPDRSRCSA

SEQ ID NO: 488507 - protein, 349 aa, unidentified
MASCHVGVNVTSPLARLSELNQKAFARTGKSFHVIAIQEAGLDGFWIHRLLQGEGVESHVVDPASIATSRRRRPAKTDKIDGEALVRALLAYKRGEPRVCAMVRAPTPEDEDRRRLCRERKRLANERVQHVNRIKGLLFCQGIFGYEPLRRNRRQRLDELKTGDARSLPPHLKAQIARELDRIELLLEQIQAVETERDALISAIKPDGMNADAMRSPPAILINLNGIGPEFAAVLWSEGFYRSFANRRQVAAYAGLAPTPWQSGSVAHEQGVSKAGNPRLRTTMLQLAWLWLRHQPQSALACWFHERVTRNGGRLRKTTIVALARKLLVALWKYVTAGVVIDGAVVQAV

SEQ ID NO: 488508 - protein, 318 aa, unidentified
MNTKINQSINVGVDTGKTQLDIHIRPLDLFFSVENNDKGIKKALKTIKSHSPERIVIEATGRLEMPFVLACAEAQLPIVRANPVHIKRFAGAIGRRAKNDRLDAKLIAHYGEAIKPALTVIKPKNIRLMSDLVIRRNQLLSMQTMEKNRIQILPASLHPTIKPMLTTIKNQITKLEEKLVKLIEDSPEYQAKNTILQSVPGIGNIAAASIISNVPELGYITNKQAASLIGVAPITRESGRYKGKRVIQGGRAQVRTVLYMAMMSAMQCNPVFKATYARLVAAGKPKKVAIIACVRKMVVTLNSMLRDGAMWDENTAKN

SEQ ID NO: 488509 - protein, 336 aa, unidentified
MERLYYIGLDIHKKTISYCVKKVDGTVVQQGKIAAEREALLKWMEGLPGPWYGAMEATIFTGWIYDFLKPHAVDLKVAHPEMLKAITAAKKKNDRADAEKIADLLRVNLLPECYMLSEEIRELRRILRYRNMIVRTATKMKNKISGLLMETGTPYNKNKLHGKKYFGNLLERVEDVSDSVKDMLKLSRSSLEMFEAIQKKLVHTLRKDNLIRERVRRLMSIKGVGEVMALTWTLEIGDPSRFHSSRQAISYCGLCSAQRESAGKEQRGPISKKRNKYLQTMLIEAAKLAPHWNPQLAALHEKELTRGNRNRATISVARKLVVERQQKDFVPSELAA

SEQ ID NO: 488510 - protein, 294 aa, unidentified
MNENQGKRIIGLDMHPDVYAAAALSVDPKTHHAAWVQDRMPTAELEAWAAKRLIPDDVVVLEASGNSFEVAARLHAIGFSAVVLESAQAGKIRDNFCNDDRHSAVKLAKVYRSGLAKEVWQPTATTREHREVFFAHRNAVKDATRCRNRIHCFLNEHCVRLKRGVRLTTPSGEAAAQAAKPWSALQADLIAEAFEQLRQVEARRKKLERIMVRELVANPGWARLWRLMGIRHRVAFGLMAMVGDVHRFPTAKKLVGYLGLAPRKTQSGNDAKGRDGGMGKFGRGDVRGLLIQSA

SEQ ID NO: 488511 - protein, 356 aa, unidentified
MRWSLPPSRYYAEDRLSFGELSWKTLRSLVSIWVKTLSIFIARIVAGRLFTVKKFTRPKLIEFLATCPATTIAMEACGGSHFMARKLEELGHSPKLISPQFVRPFVKSNKNDFVDAEAICEAASRPSMRFVQPRTESQQAMRALHRVRESLVQDKVKTTNQMHAFLLEFGISVPRGAAVISRLSTLLEDNSLPLYLSQLLLKLQQHYHYLVEQIKDLESQLKRKLDEDEVGQRLLSIPCVGTLTASTISTEIGDGKQYASSRDFAAATGLVPRQYSTGGRTTLLGISKRGNKKIRTLLVQCARVFIQKLEHQSGKLADWVRDLLCRKSNFVVTCALANKLARIAWALTARQQTYVA

SEQ ID NO: 488512 - protein, 326 aa, unidentified
MTLNLGIDVSKAKLDAALLTLNGKYRSKVFVNDAAGFKSLLVWIKENVPAGMAGVHVCMEATGAYHEGLALFLSDQGIAVSVVNPLLVKRFMEVDRVRNKTDQGDAKCLARFCQTTQPELWEAPSVGVRTLQALVLRLDTLQEMRQSELNRLGVAHASVQQSIHDVIADLEHSIDAVRKQIQKAIDDDPDLKQRQGLLATIPGLGEKTIPQLLAYIGRPERFKTVKALTAYAALAPLIRQSGTSLNKHKGTHPQGHRALRSALYFPAMVAGRYNPLIAAFWHRLKAQNKPGKVIVVACMHKLLAIAYGVLKSGKPFNPDLHKQVIA

SEQ ID NO: 488513 - protein, 354 aa, unidentified
MIIIGCDFHTRYQQIAMAREETGELLVERRLDHESGEAHAFYRNLQSSHEPVLVGIEATGPIHWFERLLAELGHELWIGDSAKIRASEVRKQKTDERDAALILDLLLAKRFPKIWVPTPAERDLRQLLWHRHKLVRMRTMLGNQLHFLAMSQGLCRKQKLFTKKGRAELGSLTLGPWASRRREELLKLLDQLDAPIAELDRAVLEEAQRRDDAVRLMTHPGIGPVNALAFALTIGPVTRFPCSRKITSYLGLNPTEESSGGRRRLGGISKQGNTMVRWLLIEAVHHAVRQDPALRQDYQRLKFRRGHAVAKVAIARKLAVRMYWMLRSGADYAQLVRRQGSPGATLVNASSSLG

SEQ ID NO: 488514 - protein, 397 aa, unidentified
MIAVGIDISKAKSTVAVIDSDGTVLASPFTMAHTQPEMEAFVTYLKGLGEPTTILMEYTGHYHYPVLKKLQDEGFPVCIVNPYQMKKYGDVEIHKAKTDKKDALRIAAYALEKSYKLVPYSSMEQKYEDLKFLSRQYSQRITYVAKLKVQLIALLDQTMPGITRILPLNSRNPEKCALLLFIKRFKSFDEIHRIGKARFLASYDVLAKKASERSASSKGLSIYELAVDSITTRGEDPYIWLSQNQCVDLLSTTQNAADEIISQMRNIAETIPEYKVLRAMRGVGDRLGPIILAEIGDVHRFHSGKALNSYAGNDAPPYQSGQFERRNRHISKRGSSALRKACYEVMQALKLTKPQDDPVYLFMLKKEQEGKPFNVAKMAGVNKFLRIYYARAMELYK

SEQ ID NO: 488515 - protein, 343 aa, unidentified
MSISMIGLDTAKSIFQIHGVNETGKAELKRKVRRSELIAFFEKQERCTVVMEACGAAHHWARILMGLGHTVKLIAPAAVKPFVKKGKKNDAADAAAICEAAARPDVKFVPVKTVAQQGVLALHTARALLVKQQTMLANAIRGLATEFGHVVPKGLHNLEPLVALVAADDAMPAQARQAIAELYKRFGELAKGIQSCEAEIVKHARNDAMARRLATIPGIGPITASLIAATVVDISLFKTARQFAAWLGLVPRQNSTGGKTRLGRITKAGNKEIRKLLVLGATSMLGHAEGWHSVLGGWLRNILQRRPVRLATVALANKMARIAWSVMTRNEVYRPAGGIAAKA

SEQ ID NO: 488516 - protein, 317 aa, unidentified
MEHFAGLDVSVKETSVCIVDEAGRITREVKVASTPEALMQVLRAPAYHLKRVGLEAGPLSQWLFSALAEANVPVICVETRHMRAVLKAQINKTDRNDARGIAQMMRAGLYRPVHVKTLRSQKLRMLLTHRKLLQSKAIAIENDLRATLRNFGLKVGMVGTAKFEARIKELVGDDSDLVLMVEPMLIVRRVLREQLAILHRHLLALARDDGVCRRLMTVPGVGPVVALTFRATVDVPARFQNSRAVGAVFGLTPCKHQSGESDYTGGISKCGDEMMRMMLYEAAQIVLIRATKWSWQDRALGSLATRRVTQGDWAGVW

SEQ ID NO: 488517 - protein, 346 aa, unidentified
MMIIGCDFHPSWQQVSWLDTETGETGEQKLVQASGDAERFYRQVAAPALIGMEATGNCHWLVDLLSELGHELWVGDAAQIRASYVRQQKTDKRDAAHILKLLVEGRFPRIWMPSSEVRDLRQLLLHRYKLVIMRARVKNELQHLCLNKGVQRKHKLWSQAGQQILRELPLQPWAGRRRDDLLKLMAMLDQQIEPLDQAVKAEAQRDKMALLLQTQPGVGAITALAYVLTLGDVSRFPRGKQVASYLGLIPREHSSGGRQKLGAITKQGNRMLRMLLVEAAQAAVRYDPQFHKEYLHRCHSKPKAVAKVAAARKLAVRLYWMLRTQRPYPDIVRIESSPRVPLVGAS

SEQ ID NO: 488518 - protein, 343 aa, unidentified
MKLSRVGIDLAKNVYQCHGVDRSGKTVWKRRLKRHQWLKVLLENTEPGCVIGMEACASAHHWGRQLQSRGYTVKLIPPQFVKPYVKSNKSDAKDAEAICEAMSRPNMRFVTVKTVEQQDIQATHRIRAELITQRTAKANQIRGLVAEYGLVAPKRLSSLRAAIPCWLEDAENGLTADFRSLLHGVWDDLLALDDRVGEMDKLIKRLAENHEECVRLQQLRGVGPMISTAMIATVGDARQYHKSRQMAAAIGITPKQHSSADRDRLLGISKRGDVYLRTLMIHGARAVVARAKDKDDRLSRWVTGIATKRHPNVAAVALANKTARMAWAMLRHETDYDPDFAIS

SEQ ID NO: 488519 - protein, 322 aa, unidentified
MSAPILGIDIAKQRVAVALLVEGKVRNRSFKNAPDGFESLALWLRKWGIDQVHACMEATGNYGEALAIYLHGAGHTVSIVNPARIKGFAQSELIRTKTDKVDAGIIARFCLAMKPVSWTPPSPEIRSLRALVRWVDSLTGMLTQEKNRLGSAHESVIPLIKGHINYLDKEIEEVREQIADLIDRDPDLSQKKDLLTSIPGIGTATIPVILAELDNLERFKHVRELVAFIGLAPRERLSGSSIKGKPRLCKTGNARLRKALYMPALVSIQCNPLMIVFYNRLKEKGKNGKVIVCAIMRKLVHLIFGILKSGKKYDPNYKPAFA

SEQ ID NO: 488520 - protein, 451 aa, unidentified
MSARKLSQEKRMKLPKHLKHINLHAAGIDVGSRSHFVAVPEGATEEPVREFSSFTDDLHLMADWLIACDITTVAMESTGIYWIPVFEILENHGLDVKLVNARHVKNVPGRKSDVLDCQWLQQLHSYGLLAGAFRPAEQICTLRAYVRQRMNLVRYAASHIQHMQKALAQMNLQLANVVSDITGMTGMRIINAILNGERDPLVLARMRDPRCKNSTETIARSLFGNYRPEHLFSLKQAVDLYAFYQRQIDECDHQILAQLSSFDADDSGSDPKSELPVTIGEALQQMTGVDLTRIDGIDSNSALKIIAEIGTDMSRWKSAKHFASWLGLCPGTKISGGKVLSSKTKLVANRAAMTFRMAAFTLFRSKSALGAYLRRQRSRLGAPKAITATAHKLARLVYAMLKYGTDYVDAGQEYYEERYRTRVVQNLKRKAQEFGFELIEISGLEPKTATT

SEQ ID NO: 488521 - protein, 481 aa, unidentified
MQATTEGTMQTTIPGVIACGMDVHKDKIDACVRMGDGSADGNVIIRTFSTMRKSLFELRDWLISLNCYKVLMESTGVFWMPIYWILEEVAGMNVGVGNARDLKNSPGRPKTDREDAKWLSRLCMFGLVLKSFVVGKPFRELREYTRYHKKLVQERVRHKNRIERLLQMNGFKLSTVLSDITGVSGRRILQKLVSEGKLSVFEIRAAMNRHCNKTPEEVECAINGVMKTTSRLLLGLQLKKLESCDKEIDEVYSLMLALSKEHERAVRIIESIPGMGTESAIYIVAEIGNDLSSFRTANHLAAWAGLAPKDNQSADKVRPSKTKKANQYVKSLLVQCAWAATRTRGTRLSLWYWQNTKRLGDKKAIIGMARKILCYIYAMLKSGTTYDKSLDVAYAENMRAKKLDAAQKIVGSRKSDAPSSKQHDNDEEASLAHSQDGFHNGIGLTDKQVGSGNQHDKSGIESPNETVTPKKRGRPKKVVSV

SEQ ID NO: 488522 - protein, 363 aa, unidentified
MSVTPSSIPKLTIGLDLGDRTSRTYEVDDEGRRQAEAAVATTRHGMQRYFGERTPCRVVLEASTHSPWVSQELTALGHEVIVANPAAMFKRARRRRRRNDAIDAELLARQGRADPTLLHPVTHRQPTAQQHLEILKARDQLVRTRTQLINHVRCVGKVSGTRLRATSAAAFVARGAPDIPPEMRVALEPLAQIIADLNQQIREADHEISRLIHDRYPVAERLQQISGVGPLTALAFVLLVDEPARFDNSRDVGAYFGLVPRLDESSDSQPQLRISKCGDALGRRLLVTAAHYILGPFGPDCDLRRHGQRIAERGGKNAKKRGVVAVARKLAVLLHRLWVSDRPYDPDYIQQRQPHAAGASMPH

SEQ ID NO: 488523 - protein, 355 aa, unidentified
MNQEKYIGMDVHQATISVAVMDGRGKLIMECILETKAATILEFIQGLHGSLSVTFEEGTSAAWLHDLLKPHVAYLVVCDPRKNALLKDGSKSDRIDARKLADLLRLNQLNPVYHGEHGVRTLKELGRSYLTITQDLTRVMSRIKALYRSWAIPCSGTTVYAPLHRAEWLAKIVEPGVRRRAERLYQQLDLLQPVRQQARHDLLVESHRHEAVKLLRQIPAIGPIRAALLVALLQTPHRFRTKRQLWAYCGFALETRDSGEYRIVRGKVRRNRERLTVLGLNDNHNHDLKNLFKGAAISASTCPGPLYDFYAGLLQKGMRPTMARLTLARKIATITLTIWKKGVDFDAQQLNRQAA

SEQ ID NO: 488524 - protein, 373 aa, unidentified
MPKYSTAFGMDVHLRSTTVCALDADTGEAVTRRFPGNPWGEIAGWMDGFPGPSLAAYESGYLGFAPQRELAGLGVECVVAAVSKIPRSAADSASKNDRNDAARMAKAILAHDISPVWIPSPEVEGIRDLAGAYDGATARLATAKQRLLAFLAKRGFVYGGTAPAGNPRKYWTYDFLRWLDKVRPEDDGGVRTLAALRNEVEAAAEARADLLSEYRAAADASPIAAEVAALQSIKGCAFALAAAFSAEVGDFTRFRSGRQVTAYFGLAPSQRSSGDSVRLGGISGAGNALVRKLAVEGSWCYAAARHQPKLMPRDTGVPLEIRMHGRKGSERLLRRREEMLARGMPAAKANAATAAELVRWLWALGMMCREGAE

SEQ ID NO: 488525 - protein, 343 aa, unidentified
MKLSRVGVDLAKNVYQLHGVDRTGKTVWKRRLRRSQWLQALMDKAEPGCVIGMEACTGAHHWARELQSRGYEVRLIAPQFVKPYVKSNKNDANDAEAICEAMGRPHMRFVTVKSVEQQDIQATHRVRTELKDHRNAKANQIRGLVAEYGLVAPQTLLALRKALPCWLEDAENGLTDHFRSLLHGLWDDLLTLEDRLKELDKEIEKIARSNEVAMRLQQLRGVGPIVATALVATVGDGAQYKKGRQMAAALGLTPRQFSSGDKHRLYGISKRGDVYLRTQMIHGARAVVSQAKHRDDPLSRWVTDIARRRHPNVAAVALANKTARMAWAMLQNETDYDPTLAIG

SEQ ID NO: 488526 - protein, 350 aa, unidentified
MSEIIRIGMDTSKYIFVLHGVDAEERTVLRKRLSRKAMLEFFAKLPPTLVAIEACGASHYWARELAKLGHEVRQIAPQLVKPYVARNKNDGRDAEGLCEAVSRPRMRFVPTKTAEQQAAVMLLGVREQLVTRRTQLANAIRGHATEFGLIAAQGLDKLASLLERIAQDEGLPELARGLFTMLGRQYEQVQVELKAIEAKLMAWHRADATCRRLAEIPGIGPVTAAALVMKAPDPHAFRSGRMFAAWLGLTPKDHSTAGKTRLGKITRAGDERLRQFLVVGATSVVKQATGKHHRGPRWLLELVKRKTPKLAAVALANKTARIAWKLMTTGESYDSARIDAQRAAQGAAAA

SEQ ID NO: 488527 - protein, 431 aa, unidentified
MKNKTDKRLEEITPETLIVGVDIAKTEQWARFVDYRGVEIGKAYRFKNNLQGFESIITRISEIRNKKELKYPIGQVIIGVEPTGHYWKPFADYLNKLGYRVVGVNPYHTKRAKELDDNSPTKSDRKDAITIARLVKEGRFFSPYLPEGIYGELRGLANTRNSANKRLSSIKNMITAILDEYFPEICEIFKKPLEGKASRQILKSCPFPVFLLEMGESNVLLEIRKAVNKTVGMKKVQQLIATAKESVGVRYGLEAARMRLRMLLEELELIERHLREIEESMKTALYKTGYAEQLLGIKGIGIITAASFLGEVGDPLRFQNARQIANYAGYNLTEDSSGKSKSGTCISKRGRKQLRSILYQMAFTMVGHNAEMKTLYQYLTIKKTNPLKKKQALVVISKKIITVIHSLLKKQETYNPEQVLGVAIKEMMLAA

SEQ ID NO: 488528 - protein, 318 aa, unidentified
MKKAFFCGVDVSKDKIDVCFLTSMTSEKAKFETLPNNYELIKVYFDSFKNDEILVVFEATSNYHLALQKALSDLGIKYCVTNPYKSSLFLKHLSTIKTDTSDSYGLAVYARTFKSEIAPDKYNAEYLEIKSYNSTLNLLQKINTQLKNFKSSQKTLNNKVIDDVIANLIKEIAKLQAMLQKLAFDLVKKAIPETEEIIKENKGFGIDLALNLFPQLHFNRDKSEKQFISFIGLSPRIFQSGSSVHKSQKINKMGNSNIRRILFMTALCAIRFNAKFKLRYEHLLANGKKKMTAIVAVMCAIVRYLKSLFPFNPEIKAI

SEQ ID NO: 488529 - protein, 334 aa, unidentified
MAKKYYIGLDVHKEQTTYAVKDWDGATVASGKTATQFADLQNAIGEYMREAIVAMEACTSYYSLYKKMKEGKINVHVANVLQLRKVIGKNDKLDSERLADMLRLKMMPESYIPEDKVQNLRILIHLYHNAVEENVRYQNQIHAVLDRNGTQIQCREIFSKKGLIRIKQYLQMNNDFALRNLVAAFDYSEQRKENLQCEITAYLNISFKEEYELLKSIPGIGETIAGYLIAEICPLGRFEDKRKLRRYAGVVPISEQSDKKVYATYLPKHASRSLLRYALVLAANCAVRTSCRLQKYYQKKKKGSTHGQAIMCVASSMSDIVYNVLKSKKPYQRS

SEQ ID NO: 488530 - protein, 332 aa, unidentified
MLINTYVGIDVSKLTLDVFIRESKLHKQVKNNLSGFNSLLKWLETQTLQSLDTVLVCFEHTGLYSLPLALFLEERNMHYSMISPLEIKRSMGITRGKNDLIDSKRIAEFAFRFKDKVSETKLPAKDIRKVHSLLTLRDKLVTNMKGYAMTYNETLRTMRKEDFPELFSTYENMVTSLKAEIKKVENAIKTILKNNLQLWTSYKLVTSVKGIGFIVASYLIVYTYNFTRFDTWRKFACYSGIAPFDYQSGTSVRGKTQVSSIANKQIKTMLHLASICAIHTDAELREYYHRRQTEGKTKMAVINIIRNKLVSRVFAVIKRGTPFVDIKKYAMS

SEQ ID NO: 488531 - protein, 345 aa, unidentified
MPIVGGLDIHRKQITFDYLDTMTGQVCRGQVSPADRVHLRAWLARFGGRDDVAFAVEGCTGWRYVAGELAAAGVAAHLAEPADTAFARGRKRHAKTGKTDCRHLRMLLAEGRLPQCWIPPSRILECRALLELYHDLRAEHTAWVQRIHAVLFHHGAPALGGGTLRTGQGLAALQAVTASSLSPAGQLQVATALELLEALEARMGVVRQQLLDAARHLAGAKVLAERLYGVGPFAALAITCWLGGKDRFSSSRQAVRFAGLDVTVWSPDRKGPPGRLSRQGPPVLRWAVYEAGKTHARAPAPDHAYYAQVKDRCNGKRAALSEARKILRQAHHILAGLGDDALAAA

SEQ ID NO: 488532 - protein, 423 aa, unidentified
MEVVAARCAGLDVHKATIVACALIAQEGRARPRKEYATFPTTAAGLASLAAWLKGLGVEQVGMEATGVYWRPVYAVLEAQGGFELIVANAQHIKTVPGRKTDIKDAEWLAMLVRHGLMRKSFIPDQPFRDLRDLTRYRRALVETQASERHRLIQVLESADIKLSGLVSDVFGLSGRLMLRALIAGEQDPAVLADLARGQLRKKRDALREALAARLGEHQRRMLAIQLSRVEAAEADIAVLDQEIDQRLEPYAEEMALLITIPGVDRVVAAAVVAELGTDLSSFPSAEHLAAWSGTCPGNRESAGKAKPARARKGNPHLKTALCNAAIAATRKKGSYLRAKYYKLKARIGGGKAALAIAHKLVVVIYHVLSKRVAYRDLGEDYLDQINAKRTAQRYVQKLNALGYGVSLSLLTRPAPAPQAEPL

SEQ ID NO: 488533 - protein, 348 aa, unidentified
MTVYIGVDFHARKQTISYLTTEDGEIRHLELDHQKDDIRGFYSRFSVAENVIVGFESSGYAAWFEELLEELGCEIWIGHAGRIRQQARRRQKNDRRDADLILELMVAGGFPRLYRYSRMSREVLQQLRYRHRLVKMQTIVINSLLFMASSRGVSLRGRLGGKRGQARLLTLSLPDPLAEQRNELCQLLQEIQQKIATVEKWLEKKAASSAQVERLRTHPGIGLLTALGLVATLEGVKRFANGRKVTAYVGFDPVEDSTGDRRRMGSISKQGSRLLRLLLVEAGQVAARHEAELGQVYKRTAVRRGHATAKVAVGRRLLVRAFIMLRDEIDYAEFLRRGVAARSSRGSA

SEQ ID NO: 488534 - protein, 348 aa, unidentified
MSTATLPIACWYLGIDISKDSLELVWLHPQEDQTHSQTLPNSPEGIQGLLELCQQRPCERIILEASGGYEQRLVTSLALANLPGVVINPKQARDFARATGRLAKTDRIDALVLARFGKTIRPPIRPLPNEQLLLLKELTTRRDQLVETQTQEKLRLLQDPPLPVRKSIQRMLQNLQRNIARVEAEIRHLIRQSPIWQAKEQLLRSVPGVGEQTAACLLAHLPELGQLNRRQIAALVGVAPLNRDSGRFHGHRAIWGGRIRVRTILYMATLTATRCNPLIRQFYQRLCQAGKPAKVALVACMRKLLIILNALLRTGQPWKPTSSENPTAPENPNCPENHPNHSEHHPNP

SEQ ID NO: 488535 - protein, 377 aa, unidentified
MKRILKIGMDVHSTNYTLCAMEPVIGAEDRVFANIQVTPDYKNILMFIENLKLKLGLEDTYDIECGYEAGCLGYSLYNQLTASGVKCVILAPTTMLTQQGQRIKTDARDAHMIAQCLSYGGYHPVYIPTEKDDSVKEYLRMRDDHKKALKKVKQQVNAFCLRHGYHYEGTKWTLAHLKWLKKLELSALYQETLDEYMASYDEQTAKIERFDARIEEIASQAGYADKVKKLGCFLGIRIHTALSLVVETGDFRRFAKGNVYAAYLGLAPGEHSSAEKINRLGITKAGNSHLRLLLVEAAGGICKGAIGHKSKELRHRQQGNSAEVISYADRANARMRSKYYRLIRHGKKRNIAVAAIARELACFVWGMVTENIEEKAA

SEQ ID NO: 488536 - protein, 406 aa, unidentified
MTGVRVVYERCAGCDVHKKTVVVHLVVPGRSEARTFGTTTRDLLTLVEWLETSQITHVAMESTGVYWKPLYNLLETTGMTVYVVNAAHMKAVPGRKTDVQDAEWICDLMRHGLLKPSLIPSRPQRELRELVRYRLSLVSERTAEANRIQKVLEGGNIKLGSVVSEMLGKSGRAMLEALAAGRQPEDIAALAHPQLQATREELTEALRGRLTPHQHLMLRLQLDHVGYLDQQIEAVEAEVERRLAPFAVQMTQLDTIPGVSERVAAVMVAEVGVDMTRFPSAAHLASWGGMCPGSNESAGKRRSGRTRKGSPTLRQTLTEAGQAAGRTKHSYLGAVYRRIAARRGKKRAALAVGRRILEIAYYVLHDGVAYEELGANFYDAHRKDAVVRNAVKRLERLGYKVNVEAA

SEQ ID NO: 488537 - protein, 347 aa, unidentified
MRYYTKQHQYYCGVDLHARTMYLCIVNQRDEMLYHREIPAKAEVFLEKLAPYREDVVVCVECMFTWYWVADLCAVEEIPFVLGHALYMKAISGAKTKNDRLDSQKLAKLLRAGMIPMAYVYPKAMRSTRDLLRRRMLFVRHRADLLTHIQQTNYQYNLPKIGKTLKYTSNRDGVADRFEDESARKTVDVDLELIGFYDKIIGKLERYLVRSAKAHDPIALHLLRTIPGIGKILSLVLLYEIQNITRFPTVQQFASYARLIRPVKESAGKRTGTANGKMGNAYLKWAFSEAVVLFLRETREAHPYIRRLERKYGKDKAKGILAHRLGRTVYYMLKTQQVFDIKKFVNQ

SEQ ID NO: 488538 - protein, 405 aa, unidentified
MDLIIERACGLDVHKDNITACIMTSEGKEVQTFSTKTVFLLKLLDWIKENNCTHVAMESTSVYWKPIVNLLESEGIEFLVVNAQHMKALPGRKTDVKDAEWIAQLLRHGLLKASFIPDRNQRELRELVRYRRSIIEERARQHNRIQKVLEGANIKLGSVVSDIMGVSSKDMLRAIADGEDDPEKLANFARRTMKKKKEELELALQGYVNPHQRLMLKTILTHIDFLTEQIEMLDQEIAQRVSTYQEDIERLDSIPGIATRMAEQILAEIGTDVGNQFPTAAHLCSWAALVPGHNESAGKRKSSRSKKGNKYLRSALTEAAQSVRGSKNYLGALYRRTAGRKGKKKAAIVVAHAMLRIAYYLLTRKEMYVDLGEDYFDKQRQVSIVRHSVRRLENLGYNVTITEAS

SEQ ID NO: 488539 - protein, 386 aa, unidentified
MPQLSDLSRSLVILEQDATLIAVIEMGQSNWLVAGIVPGVERSPLKKLAVDESALLKLLNRWREEAEKAGHMIERIAIAFEAGRDGFWLARWLRARGIEAHVIHASSVAVSREHRRAKTDRLDTELLKRAFLGWLRGERDHCKMVAIPTLAQEDAKRPNRERESLVGEQSRIVNRMKAALARLGIRGFNPKLKKAVERLDGLRTPEGEPIPPNTLAELKHDMERRRLVRSQIRDIEGTRLERLKQTPGDGPHVTVRLLARVIGVGVDTADMLVQEVLSRNLRDRRAVARYGGLTGSPDESGKKRREKGLARSGNARVRRGMIQLAWRFLMFQKDSALAHWFYARTKNAPQTRKTMIVALARKLLIALWRLAQEGAIPEGIVLRPAL

SEQ ID NO: 488540 - protein, 346 aa, unidentified
MKDITVLGIDLAKNVFQLHGADSHGRKLFSKQVTRQGLFKFVGNLKPCVIAMEACGGSHHFARLFRDYGHEVRLMSPQFVKLYVKGNKNDSADAEAIAEAVTRPTMRYVGIKEVEDQDIQGLHRYRERLVKNRTQLMNQIRGLLQEYGIVVRQGKSHLLKTLVALRENEVNKELTPMNKELFWDAYEELMDLDQRIEKYTVKLEILSKKDERSQDLLTIPGIGSITATAILAAVGDPHVFKSGRELSAYFGLTPKHQGSGQKTRILGISKRGDRYVRSLLIHGARSLVKVVGEKTDPRSQWIKQLIDRCGINKAVVAVANKNVRIVWALLTKQMCYQENYGLNEVA

SEQ ID NO: 488541 - protein, 365 aa, unidentified
MEKLYIGVDFHARQQTLCYLKTETGELVITELKHTDKESVRAFYQQFPRPVVVGLEASGYSPWFEALLEQLGCEIWLGHATEIRRRARWRQKNDRRDAQLIWELMVHDEFPRLHRPVLPSREVLRMLRYRQKLTQLRTMAKNSLQAIALQAGLAKGPQLFTGAGQQQFRAVSLSPVLHWQREHWFALLQPLNQQLLETTIWFKAQSKDDPDVTRLRTHPGLGLLTALCLVHTLQPVRRFSNARKVAAYAGFDPVERSSAERQRFLGISKAGSRLLRYLLVEAAHTAVRYDEDLKRFYKRLAQRRGRPKAKVAAARKLLIRAYIMLRDEIDYAEFRRRAVAARLARNRQRPNVPEVLIGQPASSRH

SEQ ID NO: 488542 - protein, 428 aa, unidentified
MLKQNTEPDPAPDFAAFLAIDWADEEHAFHLQVVGQSKIETGTLEQKPHVLGPWVAKLRERFGGRPIAVGLEQSRGALIHGLMSYDFLVLYPIHPTTVAKYREAFKSSGAKSDPLDAGQILEILTKHQDRLHRLNPDTVETRLLGRLVEDRRKAVDLRTTHVQALGANLKEYYPQALELTNDNLSSRLAGDLLIKWPTFEDFQQAKPSTLKRFYYGHNVRSPEVIERVLTLAQKSQALTTDPAIVESGRRLTQMYARLIQALHPAIADYDQRIQQVFNAHPEAKLFRDLPGAGPALAPRLLAFFGTDRSRYAAAFNVQSFTGIAPVTKSSGKSKVVYARAACPKFDRQTFHEFSRLSVTRCQWARNYVQYYTDKGKKYHTIVRALAYKWIRILFKCWQERTPYNEDKYMETLKLRGSIFATWHLQKKT

SEQ ID NO: 488543 - protein, 421 aa, unidentified
MAADIFAWYVGVDWGSAEHALCVMDATGTIVGRRTVLHNARDVQEALQWLRTRTGAEPAAVAIAIETPRGVLVETLLEQGFAVFALNPKQLDRFRDRFTVAGAKDDDRDAEVLSDSLRTDRRAFRRVRADDPVLIQLRELCRIVDDLQTEEGRLTNRLRDQLYRVDAAWLTWSPAADAPWLWAILADAPDPAAWAALSRRRLTAVLRAHRIRRVTADEIRPLLQQPRLTAAPGVSDAVALRIGSLVPQLRLVHEQRLAHERRIEGVLAQLAAPEATTDTEPREYRDVEILRSLPGVGRMVAATMLTEAAVPLADRDYATLRAYGGAAPVTHRSGKRLWIVRMRYACKAPIREALYHWSRVSICHDEGARRYYDALRARGHHHARALRSVADRWLRILVAMLKTGKLYEAARFTHTEAAVPA

SEQ ID NO: 488544 - protein, 404 aa, unidentified
MGAICGIDWASEWHDVRIADGDSGETLLQRRFAHDERGIGALVDELIARRVERVAIERPDGLLVGRLLAAGIPVVAIHPNQVKAARDRFRAAAGKTDTFDSMVLCELARTDHHRFAALAPSGDETTALRALVRTREDLVDARVALANQLRAHLDCFWPGAAAIFADIDSPIALAFLERYPAPADARGLGPKRLQAFLARHAYCGRRSVDDLLDRLRSAPTAVCGELESDARRAAVLGLVAALRPIVSQISELTSHIRGAIRAHPDGPIFLSVFRDPNSVITAAGLLAEIGDNRARYPHRDALAADAGQAPVAIQSRKHKSAAFRWACDKHLRDHFSVLADSSRHHSPWARNLYQSARDRGADHPHACRILGRAWTRVLWRCWQDRVPYDPTKHRTATRLNRHEG

SEQ ID NO: 488545 - protein, 342 aa, unidentified
MEEISRIFVDTSKQLFQLHGVDAVERVVVRRKLRREQFLAFFAGRAPLVVGLEACAASHHWARELMALGHEVRLIAPQHVKSYVKRNKNDLRDAEGGCEAMSRPTMRYVPVKTVEQQAGLMLLTRRERLVAERTALGNAIRGHAAEFGWTVAKGLDKIALLLTQLAAAADVPDLAKRLFARDGTRFSQLQEEIAELDREVAAWRRNDEVGRRLAQLPGIGELGSMMLPLKTPDPSGFKSGRDFAAWLGLTARDHSTAGKLRLGVITKAGDEPLRAVLVAGAMAVIQQAVRGKGPAWPWLAELLKRKPRKLAAVALANKLARIAWRLMVSGQAFDPQRIALAA

SEQ ID NO: 488546 - protein, 355 aa, unidentified
MFESWDADSRLHKLIYKGMINFFIGIDFAKTKFDVVILHKDDLVGKGEHNQFSNTKDGVKQLEKWLRQVCGKGVSMESVICGENTGVYSVLAAKTLSHDGYTVCLESALRIKRSMGISRGKNDKKDARDIAEYSARHYDKLVVYQEPSQTSEALKTLFTQRRLLVKQRCDLQRRNKELNGLYKDNPLLKRMLASDTRIINTINTEIDKIEAHMMQIIEGDPEVLRVYGILTSMKGIALVNAVALIVYTDNFKRFDYDARRICSYWGIAPFANQSGTSINGKPHVSHFADHYLKSLLSQAVICAIRFCPAISNYAQRLIAKKKHISIVHNNCKNKMIHILVAMVKNGTYYGEIQKK

SEQ ID NO: 488547 - protein, 417 aa, unidentified
MKTTDYAALVALDWGDEEHAFALGVGAETETGHIVGSAEALHDWLHQLGERFAAQPVALAIEAGRSAVMHALVDYPWLTIYPVHPATSERFRKAFVPSGAKDDLPDAVVLLRILAQNREQLRALRLDTAATRELAALNEVRRGAVDRRTQLSCELRSTLKTMFPQALELCGDDLWTPLALDFLERWPELALLQRAKPASLRAFYTEHRSRRPGVIAQRLDRIAVACALTTDRAVLDPAVMQIRLLVAVLRPLQSHIEQVEQRITACFAAHPEAELFVRLPGAGPVLAPRLLVAFGTDRERYPSAASLQKYGGVAPVREKSGRQIWTHWRWNAPKFLRQTFVEWAGQTIPKCAWAKAYYLQQKRAGKHHQTILRGLAFKWIRVLWRCWHDRVPYDEARYVAALAQRNSPLATLLRSAA

SEQ ID NO: 488548 - protein, 435 aa, unidentified
MKKVRENAAGIDIGARKLFVSIENQEVKIYDTFTQDMEQLALYLLTHNITCVAMEATGVYWVVLYDILVAKGLDVWLVDGRSTRQVPGRKTDVKDCQWIQQLHSYGLLNRCFIAEELVQELRTYQRLREDHIRSAAMHINHMQKALTLMNIRLTEVLSQVHGVSGMKIIRAILAGERDEEILTNMCHISILNTKKDKIQKSLKGHYTASGLFSLAQAVSCYDFYQKQISLCDEKIANVLKKMSSGKEPLKEKPSKRKPIRHHKPNVENIDQHLLRIFGGKDATVLPGITDYSWLQLLAEVGTDLEKWKTEKHFTSWLGLAPKQNNSGKMRKNYRAKGSPKASLIFKQAAVSLINSKNIALGSFGRKIRAKKGGLVAIKAVARKLASLYWKLFVKGLDYVEKGIKDYEEKIILNKQRAVSKMAKDLGLVINYNTTS

SEQ ID NO: 488549 - protein, 399 aa, unidentified
MLYVGIDQHKAQLTINLRNEQGNVIQQGQVSTDHAKVDDFFAALKKQSARTKGFMAIIEVCGFNNWLIKKLNDYGCKEIVLMQPDKTSNKKTDRRDANALCELLWNNRKRLQNGERPNGIRRVVLPKPEENAVRQASHLRQHLVRQRTKCINKIRSVLRKHNMEQDCPSKQYKTKKVKQWLKTLELQEQIDRMEIDVHLKIWETLDEQIIKLEHELLKQAETNKNVMLLVSISGITAMGAIMLLSRIGNIERFKTPDSLANYFGLTPGCRNSGETNRPGSITKAGSQIARHVLNFAVIHVVRKNKAMRDWHKAIKKRRGSKIARVAVMRKLTTIIWHILKRQTMFQFRFDPMTNKPTVKSKKKTTSGFLRHGNNAVRVVKNKITKTPSSPKRQTKAKSP

SEQ ID NO: 488550 - protein, 426 aa, unidentified
MSERDYSKQVAKRQRIGSRTLVVGVDIGCASNAVGFMSKEGKVLGSYPNMLNSREGFEQFVKVTEGLKAKHGLSDVLIGLEPTGHYWRKFAYFAKAKGCEVRFVRTTALKHHREIDESASAKSDPRDALTITNITREGKYIDTVIEDGRMRPLRTLVKVREKIQKRNVSAKNSLHAVLDDYFPELKEVFWSMHSRGLWALLERCPFPADVLPFKVSVLKEIIGRASRRRAEASRKAVAVYQAAKKSIGLKQIGSADRYRLKMCLEEVKRTQFMIKDMEREIKRMLKEIPQAEYLLSIPGIGPLSAAVFLGELGNPSYFQGARQIVKYAGYDPQESDSGYRVSRKFISKKGRWLLRKHLFLMSMRVVVLSRYFQQYYQRKLQTKNRFGQLPRKKEILCAVAIKLIKVIFALLRDQRNFEDTVTFSVQ

SEQ ID NO: 488551 - protein, 428 aa, unidentified
MNEGDRSRLEEFRQFRKEVRGSAEYLLVGIDVAKDKHYAFFGTATGKTLLRRLVFENNLEGFRKLLAQAEAMKVQNGLKRVVFGMEPTANYHKPLGEHLLQCGRQVVLVSGVAAHENRKTLDGRWDSNDTRDAANVADLVSQGKCLFYEFPVGAIQDLRNLLSLKRRFKRVEHGYRVRIRNHLVAKYFPELDRYYDQSPSTSLAIVRWCLDPSEIAGLEYKEFVQRVGSGQRRLSQERRLQAIWKMAVDSVGYEAGPAVEFEAQVMVEGLKQIQKAIEEIEEKIHEVCLQFPEYEFLLSIPGFGPDVSSKVLGAIGDPFRFENGRQVLKMAGLDLSAERSGKSSASAVPVISKKGKADLRYALYQAAMIASIKNHAFIVYFTNQLRGREKEPGIKTKMRVKLSAKLLIIAWTLMKKKEPFNPDYLAVE

SEQ ID NO: 488552 - protein, 451 aa, unidentified
MTTMKPQVIDDQEHERVHERVAAVDVAKDTGMVCTRTPHPSRPGARRSTIWTVKARMGAVRALGRQLKHDGIEIVTLESTSDYWRIWFSVLEACGLAVQLVHAAQAKNLPGRPKTDKLDAQWLARLTEMGLLRASFVPPRAIRDLRDYTRARTRLVQERTRCWQRLEKLLEAALVKVSSVVSKLTTVSAQDMIKAMIAGQRDPHQLAALARGSMKAKHDDLVEALNGMFDDHHGELAQLLLDHIAFLDGRIAQLGTRAAELAAAMPAAWGADADGTTGPGTGTGPDAPVLNAVARLAGIPGISEDLARAIIAETGLDMTRFPTAAHLVSWSGLCPSARQSGPRARAGKKGQGDTWLRGSLGQAAIGAARTATFLGERYARIARRRGKAKAQVAVARSILVIIWHLLADPAARYTDLGYGYYQARTDVDRKLRNHIRQIQALGFAVTLTRAA

SEQ ID NO: 488553 - protein, 337 aa, unidentified
MKLRVLGIDLGKTVFHLVGLDSSGRVVIRKRCSRTQLLAFTANLQVQLIGMEACSGAHFLGRALREQGHEVRLMPAQYVKPYVQTNKSDYLDAEAIAEAVQRPRMRFVPIKTEEQLDLQALHRVRERWVMRRTAVVNQIRSLLLERGLTLPKGRSLDEQLPRILEDAELNLSDSFRVLLAQLKLELEQLAARIEEMDRVIQKTAKGHEACQRLTEIPGVGPVTATALIAAVGNGSTFKKGRNLSAWMGIVPGEYSTGGKQELLGISKRGNKYLRRLFVQGARSVLQQRHKQAPGLSSWLAQLLGRTHQKVVVVALANKLVRVFRLQLCGGPYISSVR

SEQ ID NO: 488554 - protein, 413 aa, unidentified
MRALEIKEVCMYKPVLSIDVSKSKSYAATFLAYGEPYQKPFAFNHSPQGTSLLINRLNELQSKTGIKPDVVLEATGNYSKPISSFFENAGFNVFILNPLQTHLQKKKAVRKVKTDPIDANRIAQVYYLNSPMVNFPLSELITDLRNLCRQYDGFNTMYTEAQIRLRCTLDLTFPNYDTIFNHVCCKSSLNLISAYPSPSSILSADKEHLVDIIKSSARGHSLKWAQEKVEKLLFAARESLPSNEAQQSNTRVLKSYIKTLVTHQNILADIRAQIVEQASLSPAYFLLRSIPGVGELTAATIIGEIGDIDKFPTAKQLVAFSGLDPSVFESGKFKSTNNKITKRGSNYLRKALYQATIAGIANRKDGPCNTLLYEFYSKKIAEGKPNRVAIIATCNKLLRIIYGIWHNQQPFIY

SEQ ID NO: 488555 - protein, 407 aa, unidentified
MQVFLGIDWSHTHHDACWLDERGHVLSRLTVPHTAGGLAQLETGREQLGVSRDECWVGLETAHTLLIDFLWDQGYPHVFVIPPGAIKGARRRYRQTNAHTDQTDAWVIADVLRTDPQTLHPWRPDGLIVRQLRAKVSLLHFLTKEVRRLSNRLGAVLARYYPAALQVFHDPASPIALLFLQAFPTPEAAAALTRQTFGQFARAHRYRQPDLVLSAAYARLQAAYPTAGTLTVAAYREEAVWLAQHLLATIEHKKCEIARLQELFQQHPDHELFASLPGTGDFLAPALLAKFGDDRERFPQPGSVQCLAGTCPVTEQSGKNRRVFFRQACDHEFRQIAQQWVKASISQSSWAATYWGDVRKHSRSTSHAYRCLANRWLAITWKCWQSRQPYDEAVHLQNRARRLATRA

SEQ ID NO: 488556 - protein, 407 aa, unidentified
MNLNVGIDVSKLKLDYCGMDSNKQVCFQGEVTNTPKGAGHIRDEILKRSQQADQIIIGMEATSVYNFHPTLFFEQDDRLNQLNVTVVTLNPKVTHRYSKLFDDDKTDTVDAFHIADFLRIGRYQVPVTRDEKHIALQRLTRERYHLVHQINDCKNHFLNNLYYKVNTIDTVLPTSVFGSTMLSILSDEKYSLDDLVQIPLSALTDELNHLSHGRFGDAKSVAKALKKAIRSSYRLSKTVADSVDQVLAMYANQLRMLNQQLKLLNKSISDLCSVISGADSLQSIPGIGPVYAAGLLAEIGQIDRFPNDASLAGYAGLSWQRSQSGNHERQLTPRTKSGNQYLRYCLVEAANSVRRYDPTYARYYQKKFREVPKYQHRRACVLTARKLVRLIINLLTEHKLYTPPKLV

SEQ ID NO: 488557 - protein, 454 aa, unidentified
MCLEDRPVLEPNAAGIDIGAREIFVAVPPGRDEHPVRACATFTEDLEQLADWLVACGVTTVAMESTGVYWIPLYDILESRNLKVCLVNARHMKNVPGRRTDWHECQWLQYLHSVGLLRGAFRPEADVTAVRTIMRHRTELVQMSSQHVLHMHKALTQMNLQIHHVIDDITGLTGLAIVDAILAGQRDPVELAKLRNWRIKADEETMRKSLVGNWRDEHLFTLRQSRELYRTYQQQMVKCDQQIEKLVGGFEPRVDPEEKPLPPDRKRYRGAKKRAKKNGQPDTGFNLRTEAYKLFGVDVTQIPGLETMALPLFGEVGRDMSKWPTADHFASWQGLCPDNDISGGRVLWKGTRKVRNRAGQMFRQAAYSLHHSLTPMGDYLRRMKTRLGPAAATTATAHKIAVIFYTMVKNQVEYDETIWATRDVKRQQRIEARLKRQANQLGYQLVRLEEKPAA

SEQ ID NO: 488558 - protein, 377 aa, unidentified
MRNVRFIGLDVHAETIAVAVAESNGEVCSLGAIPNRPESVARLVKKLGKPEQLRACYEAGPTGYVLYWQLTQLGVKCEVVAPTLIPVKAGDRVKTDRRDAEKLARCYRGGDLTAVWVPDAAHEALRDLVRARLAAKRDQLRARNRLSKFLLRHGRRAAEGTQAWTAKHLVWIKSQRFEQAAQQATLEDYRHEVEHAAERIARLERSIDAAIETLPVKMRAVVEALQSLRGVAQISAVSIVAELGEVSRFARARQLMGYSGAVPWEDSSGERVHRGSISKAGNAHLRRIVVEAAWSYRHRPALGYSLKVRQRHCSAHVCEIAWKAQHRLHQRYARLTARGKSKQHAVTAVARELLGFIWAIGIEVERNQEIKELRRAA

SEQ ID NO: 488559 - protein, 328 aa, unidentified
MCTLGIDVSKNKIDLCLLTAGPGGKKKHKVLTNEPDVARKVVDWLNAQKCVPESVTVVLEATGIYHENLAYGLHEAGVSVCMANPCRVREFAHGMDILNKNDAVDAFVLACYGELKSPAVWVPPSPEVRKLRALLRQRDALREDVQRTVNRLEKANSTSTPQEVIRSLERMKSWLNEELARIEKLITDHTDNDPGLKADLDLLKSIKGVKDQVGREMLALLKDGTFKSASQVAAYLGLTPVEKTSGSSVRGRPHMSKTGPSGVRAKLYVAELTASRWNKQAKAIYERLVAKGKAKKAALGAVMRKLVHLCFGVLKTRLPWDENYVATA

SEQ ID NO: 488560 - protein, 402 aa, unidentified
MRRCIGLDVHREFAQVAIWEDGVIWQAGRIQTTPEALRLFADSLCATDEVALEATGNTYAIARLLERQVGRVVVSNPQKTRAIAEAKVKTDKVDAAVLAGLLAADYLPSVWLPDDQTHALRRQVTRRAHIVRQRTRLKNQVQSILHRNLIGRCPAADLFGTKGRAWLATQDLPADEHQAVGALLRQLDFHGQELRIVDAELGRVGLERVEVRRLMTIPGVDATVALAIVAAVGDFHRFASPQRLVSYLGLNPRVRQSGGQPAQHGRITKQGRAHARGMLVEAAWAAAKTPGPLRAFYERVRARRGMQVAVVATARKLATLCWHLVVGEQDYAFQRPSLTDKKLRALQLRAGMPPRRGRKGTAAAYSLKEVRRRERALTEQAEVAYRQLVADWQPKRPATKPR

SEQ ID NO: 488561 - protein, 391 aa, unidentified
MINIGIDVGKFKHCASVMDDKTGEIVIKPFFFNNDQKGFNLFYSKTKQYIHRKHSVGMEDTGHYMINLTDFLLDKKFTVKFINPRSTCLRRKELGMSAKNDRKDSILIAEMLSEKKFWRSVTRTTQETDKLREITRLYHQLQEQQNEDMNRLQRALDIVFPEVNKLSWTRYSKAYMQFLAKYPTAASIASEDIRNLRNALKTDGRGRQCKLTAEDIKEAAKCSVGEDNIAVALEVQSIIAIISTRKQQIENLKNKIEEFSLKLNSPIISIPGISHITGMTIIAEIGDIHDFSDAAHLISYAGMEPLVHQSGKYDAAHMPISKHGSRYLRKALYQAVFTVCKYCPTFNAYYTKKRNQGKTYRCAQGHCVRKLLRVIYKLLANNTVFDENLVR

SEQ ID NO: 488562 - protein, 428 aa, unidentified
MQQRKTTRMKNWKEITHYAGFDWAKDHHTVVVVDSAGSLVAGFEFEHSAAGWQSFAEKTSAWPSLAISIETSQGAAVDQLLQREYTVYPVHPVAAQRYRERKAPSGTKTDHLDAWGLADALRSDGHAWKALEPMDPLTQQLRLLCRDEVVLIEQRTALVNQLQQALLEYYPAALEAFDDWTRPSTWGFVLAFPTPQTLVTAGKRRWEKFLHSHRLWRSETAEKRLKVFAQADQFKASAPIVRAKSQLAISLCKLLCTLDNQLAEYRTQIEALFKEHPDHDLFGSLPGAKKVLGPRLLAAVGSDPARYGSQQVLQAMAGTAPVSYESGKLKKVRVRWACDKFLRHTVHLWADCFRKASAWGQTYYEQKRKEGMTHACALRCLGQRLLKIVFRMIADKKPYDAEVHAQNQKKHGSWVLKLTNTPAPKTCG

SEQ ID NO: 488563 - protein, 426 aa, unidentified
MNAIGIDVSKGKSTIAILRPFGEIVAKPFDIMHTHTELDELIDLILSLEGESRVVLEATGKYSEPVVKKLCEVGIFVSVVNAKLIHGYAVDTIRRVKTDKVDSLKIAGFCLDKWSILKRHEPAEQIRQTLKTYNRQLHEYSKIKTMLKNNLISLTDQVFPDINTIFTSVARESDGHEKWVDFLARFWHCECVSKVSLSAFTQSYQKWCKKHGYNFLQTKAEQIHTLATNHFGILPNDDFTKTLITQAILQLNNICEVIATLKVEMNSIAATLPEYETVLAMHGVGKTLAPQLMAEIGDITRYPKRSSLTRFAGIEPPENQSGAYNQHSRRISKQGSPYLRKALFQVMRCVLQLKNADEATWKFIDRKRAEGKPFKVYMIAGANKFLRIYYARVIDSLKNGDNAVTSKQDRAMQECNSSGCAGSQYR

SEQ ID NO: 488564 - protein, 458 aa, unidentified
MVQTKRPRSRREMPAVHLDAAAIDVGATMHVVAVPPDRDPEPVRTFGTFTADLHRLADWLRACRIKSVVMESTGVYWIPIFEILEQKGFDVQLVNARDAKHVPGRKTDVSDAEWLQRLHEHGLLRGSFQPKGEVKALRSYLRQRERLLDSAATYIQHMQKALTQMNVQLHHVVSDITGVTGMRIVRAIVAGERDAATLAAFRDSRCKEPVETIREALIGNYREEHVFALTQALELYDIHQKKVAECDKRIETVLEQLKATRPTTAKPLPAPRHKTKQSNAPNFAARDALYAVLGIDLTQIHGLGPYLALKLVGECGTDLSAWPSAKHFTSWLSLAPRNKISGGKILSSATRRSNNRAASLLRLAAVAVGRTETALGAFFRRLSARIGKAKAITATARKIAVLFYNALRHGMKYTDPGAAYYEERYRQRVLSNLQRRAKAFGYVLQAAAPQAPQAVGVS

SEQ ID NO: 488565 - protein, 347 aa, unidentified
MSTMTEVFCGVDTHADTHTAAVINRLGTVIAIDQFPATDAGYRQLTDWIHDHGSPQLVGVEGTGSYGAGLTRHLLETGCEVREVTRPDRQHRRRHGKSDPADAVAAARAVAAGVATGSPRALTGPVEAARNLRVARTSAVQARTRIINQVHALILTAPNHLREQFRDRPIKQILNSLNGDAPSPTEAATPEGGFIIALHALAAIYHTLCEQITKLTPALDHAVKTAAPPKLFEICGIGTVVAADLIIAAGTNPDRVHSEAAFAALCGVSAVDASSGHNQRHRLNRGGDRQANQALYRAVIVSLRHDQTTRDYMTRRLTEGKTKRETIRCLKRFLARRIYRILTSHTT

SEQ ID NO: 488566 - protein, 360 aa, unidentified
MGKFTLVGADVHDGSILVKVAVDREAAAKRSWSNDRDGRRAMIADLKRRAAETGAKAVWLAYEASGQGFGLYDELTEAGIRCVVLAPTKLVRSAHDRKQKTDEKDAGRLLEVLRGHVLAGSHLPAVWIPDQQTRDDRELVRLRLDVGEKISAVKAQVKSLLKRNGVARGPDTGSSWGWDYRGWLHGLVEGGPELRRGARVALGSLLAQLEFLEEEGGTLDQAIADLAETERYAGSVKELRKLKGVGLLTAMVFLTEVGDLRRFRNRRQVGAYLGLVPCAAESGEDGDRKGHITREGPGRVRKVLCQATWARVRHDPDEKAFYGRLVERNPKHKKKAVVAVMRRLAIRMWHAGLKVVEAAG

SEQ ID NO: 488567 - protein, 417 aa, unidentified
MDTLFAKVAGLDVHLKGIQCAVRCRPESGKLLAQVRSFGTMTRDLRALADYLQALGVTHVAMEATGVLWKPVWNVLEGRFTLLLVNPRHLKKVPGRKTDVSDAEWIAQLLQHGLLRGSFVPPRAVRNLRDLTRHRAQLAGEHTRVANRIHKLLEDANVKLGAVASDVLGKSGRAMLRALLRGESDATKLAELALGVLRKKIPQLQLALEGNCTEHHRYLLGRLLSHIGYLENQIDDLSGRIALRLDELLDAEDRERLDRIHGINRTTIENVIAEIGVDMNVFPDEHHLASWCGICAGNEESAGRRLRSRTRKGNRWLRRALAEAAWAAAKVKKSYLSAQYRRIAARRGKKRALLAVGHSLLVIIYHVLKHQVEYEDLGPNYFDRLEPERLRRYLVKRLERLGYHVSLQVASPDDRAA

SEQ ID NO: 488568 - protein, 324 aa, unidentified
MDERGRAVLKKQLKRDQVASFFANLPPCLIGMEACGSAHHWARKLTELGHTVKLIAPQFVKPYVKTNKNDAADSEAICEAVSRPTMRFVPIKNGGQQAVLALHRARQGFVKARTAQANQIRGLLAEYGIVIAQGIGHIAKRLPEILEDGENNLPGTFRQLLDRLGDHLKELDRQVSALEVQIQSWHRENEASKKLAKIPGIGPITASALVASIGDAKSFENGRQLAAWLGLVPRQHSSGGKQMLLGISKRGDTYLRTLLIHGARAVIRVAERKVGHADSWLARLMDRRNKNVAAVALANKNARTVWALLAHARDYQASYAPTAA

SEQ ID NO: 488569 - protein, 348 aa, unidentified
MNLKRIGLDTSKAVFTLHGVGQDEKAVLRRDMRRAEMEAFFAKLPPTHVVLEACGGSHHWGRRLAAMGHTVQLIPPQYVKPFVRRGKNDRNDAEAISEAAARPDMPSVPVKSAEQQAEAIVLSARELLVRQRTQLVNAVRGHAAEFGIVAAKTISQLPGLLEAVAAAETVPATAKEMLAFLGEQVAQLDERIAELERRMKQQHKANPVSQLLAAVPGIGPVSALTLALTIDPGRFTSGRHFAAWLGLVPKQHSTGGRQRLGGISRAGNERLRQLLVVGAMAVIRYAKPGSKSASAWLLALLERKPRKVAAVALANKMARIVWAMMATGEAYRGSKTVATPAAGAAAAA

SEQ ID NO: 488570 - protein, 344 aa, unidentified
MDHFAGLDVSVKETSICIVDDAGKIVREVKVASEPEALLAVLKNPAYHFKRIGLEAGPLSQWLFSALADAGLPVICVETRHMQAVLKAQINKTDRNDARGIAQMMRAGLYRPVHVKTIRSQKLRMLLTHRKLLQSKAIAIENDLRGTLRNFGLKVGMVGKVKFEARIKELVENLPDLAALVEPMLIVRRTLREQIVILHRRLLAIVRDDEVCRRLMTTPGVGPVVALTYRATVDVPARFRKSKAVGAVFGLTCAKYQSGEVDRNGRISRCGDEMMRVMLYEAAQSMLHSKKWSWLKAWAMQIARRRGMKKAIVALARRLAVIMHRIWVDGTEFRWTREQATAAA

SEQ ID NO: 488571 - protein, 366 aa, unidentified
MKKISTVQVFGNEIFKEQKLTIGVDLGDRWSFYCVLEEAGKIILEQKVPTTPEAMKQTFGKIPRSLIALETGTHSPWVSRLLTELGHEVLVAHAQKVELITKSNRKDDRHDARTLARLARIDPELLGPVRHRSAKAQIHLTVIRARAELVSARTALVNAARGLVKSYGQRLPKRGTYQVSRELATGLSAELRDVLGPLLKEVESLNERIQEYDERMEKIAKEEYPEVSLLKQVKGVGTQISLTYVLTIEDPYRFPKSRAVGCFLGLRPGRRNSGESEPQKGISKEGDRYLRTMMVQGAHYILGPFGEDSDLRRWGLKLAERGGKNAKKRAVVAVARKLAVLLHRLWVSGEVYEPLRNSQKAMRAVA

SEQ ID NO: 488572 - protein, 438 aa, unidentified
MQSNSESNKAIENAPVKPVVWIGLDWADKEHCLVVQAPNAGALSRHFVDQKPASLDAFFLKLHTEHSQAQLGVCIEQARGPVIYALMKYDFVVIYPVNPRSLADFRRAFTISGAKSDPRDADLLCELGAKHHDRLRPLQPEDAITRQLRLEVEARRGFVDERTACMNQLTSTLKSYYPLALDLVGEQLEGPMALEFLRRWPNLASLRRAKPSALRAFFYKHNSRSEEKIQQRLDAIKSAASLTDDPAILNALELKMQCLLRQIAAVQASIAQFDARISNTFQQYSHRTIFETLPGAGAVLAPRVAAFFGTRRENWTEAGQLQCWSGVAPVRKQSGKTQTVHFRRARPIFLHQSIIEFAKCSIRFCDWARLLYEDQLSNGKSKFAAIRMVAFKWLRIIFRCWKENTPYDEARYLRSLQRRGVTLYESLYAALLPHQPAA

SEQ ID NO: 488573 - protein, 348 aa, unidentified
MDHIIRIGMDTSKHVFQLHGVNAAEEPVLRRKLRRNDMVVFFERLAPTIIAIEAAGASHHWARLLRSFGHEVKLIAPQLVKPYVKRGKNDAADAEALCEAMSRPTMRFVPVKTAERQAALMLLGLRDRLVRNRTQLGNAIRGYAAEFGLAAAKGIAHLAPLLDRIQSDESLPGLARELFAAHAKEYAQLQAQIDEVEGKLMAWHKTNPGSRRLAQIPGIGPIGAAMLIMKTPAPEMFRSGRQFAAWIGLTPKDHSTAGKVRLGVITRAGDEGLRSALVVGATAVIRHLRNGKGRSMLSAWVEQLLKRKPPKLAAVALANKLARIAWKLMVTGETYAAKPRPVAFAGVA

SEQ ID NO: 488574 - protein, 365 aa, unidentified
MNFIGADLHKKSITLCVMDERLKILARKTVPCGQPDQIVESFRQFLPFKVVVEATASYLWFVELLEPLAEEIVLANPKKLRVIAESTKKTDRLDAQVLAEFLARDMIPRAYMPTPRQRQHRALVRHRQYLRGRMTSVRCKIHHVLADYNADRKDLFSARCGKSYFKQVALSDADGFVLKQLWSEWEDHQARLLATTRKIKAFIAKAPAREKEARAILKSAPGVGFVTAEVVLSEIGDVSRFGNAKKICAYAGLVPAVRQTGGKKSKDLHITKQGSGLLRWALVESAWRLVKSSPKWSALYSRLRKRCGSKRAIVAVARKLLCVLYAMLKTSTPYKIIPAATPAEPPEPTRKRLVRVSTAAQAVTP

SEQ ID NO: 488575 - protein, 311 aa, unidentified
MNDTIGIDISKDTLDTFWLSKRKHKQFANTKTGLRALTCWIREAEVSLVVFEATGIYHRLLEASLAEHDFPFARVNPRQARRFAEGTGTLAKTDRVDAAMLARMGSLLELQADKPKSEMLYNLKEMTTARQALIKDRTAARARLATATHPLLRKQATMRLRQVERDIVQIDAAIEATISADQALSEKANILISIPGIAKVTAFAMLIEMPELGSLNGKQAASLAGLAPISRQSGKWQGKERIQGGRACLRKAIYLPAVVATRFNPDMKAKYHELIAKGKCKKLAITAVMRKLVVMANALLRDGRKWTETRA

SEQ ID NO: 488576 - protein, 345 aa, unidentified
MKKVIAGMDLHSNNVVIGVMDLDGQRLASRKLPCDLKEVVKFLAPFKRRLERVAVESTYNWYWLVDGLQALKYPVVLANPAGMEQYSGIKHADDTNDAFFLAELLRLKILPTGHIYDAELRPVRDLLRRRLMLVHQRTALMLSFKSLYTRTTGQELTLSKLKELEIKAAQELYEHPANQMIAGMQIKHIEQLTESIEKIEKAVLGSARELPSYAKLATLPGVGRILGMTITMEVGDIKRFAEPGHFASYCRTVEAKRMSNHKKKGENNSKCGNKYLAWAFVEAANFARRYDEQCRKWFDRKVARTSNIIATKALACKLAKAAWYLMAEGTDYDPKRMFGQPPATK

SEQ ID NO: 488577 - protein, 338 aa, unidentified
MYYTGLHLHKFTSYLTTIDSDGCIVKQANIKNVDYNFLQYFSDLGVEHQTTVESTCTWYWLNDLLTSINIPLTLAHAKYVKAIAYAKVKTDKVDSHILAQLLRLNFIPQAHKISNENRTLRDALRARLKIVQRCTSVTNSMALVLAKYNLTEPEGLQNIPKLQYEQLSDHASLLKEQMLTLEKSLYPYLIPNEDIQRLLWIPGIGKMNAFTIVLEADDINRFADVKNFFSYCRLVPSARNSAGKSKQRSSKDGNRYLKIVFTDAATHAVQYYSEIRKYHNSLLRKKNKQIAKTIIAKEIAEIVFHILKNKTNFNNKFKGVELQHKKSLQWPRVVSPDV

SEQ ID NO: 488578 - protein, 373 aa, unidentified
MENSITYVAMDTHKKEHKVALHYPCHEEIVRFVVKNTVRDIKRLVNKIKKQAPADVKFCYEAGVCGFTLKRRIEALGCECAVIAPSLTPQKPGDRIKTDRRDAAKLLAMFKAGLLTEVHAPDKKQEAGRELTRCRQVAQENLKRVRHQLEKFLTRHGYIYADGFHWTQKHLCWLRSLEFEQLLLRDVFDSYFTEMQHCIQRLASLDKEVEKLAESESYKEVVGFLRCFHGIDTLTAITMITEIFDFGRFSSPGELMSYLGLTSSEDSGGQKERKGPITKAGNKRVRRLLVETSWHYRHPCSVSSILRQRRKDQPQWVIDIADRAGQRLRKRYWYLVNKGKMPCKATVAIARELAGFIWSVFREYEARNSKEAA

SEQ ID NO: 488579 - protein, 356 aa, unidentified
MTSLTDLTRLSEVVDVVIGVDTHVHTHSAAVVDARTGAVLDEITAPATAAGYADLVAFAEQHSRLRAWAIEGTGSHGAGLTRVLLDRAELVIELDRPERAHRRNGAKSDPLDAVRAAREALARPRLGTPRRAGDRQALAVLLAARRSAVRAAGDAQRQVFSLVIAAPEPLRARFRDQKLPAMLKTAANLRVHPSWDTETTTTVTVLRSLARRALTLAAEATEHEKSILAIVRSWRPDLLEEPGVGPIVAATVLCAWSHPGRIHSEAAFAMLAGAAPIPANSGQVTTRHRLNRYGDRQLNSALYTVVLSRIRYDDATRDYVARRTSQGKTSREIKRCLKRYIARDLYRLLERGPITA

SEQ ID NO: 488580 - protein, 392 aa, unidentified
MVVSVGIDVSKDKHDCFILSSEGAVLADVFTIPNNMDGFNCLLQRIRNCTTYQDKIKVGLEATGHYSYNILGFLLDNGLATYVLNPLRTNLYRKSLSLRKTKTDRVDARTIAAMLLSDVGLKPYTDTAYHNEELKSLTRYRFDKVKERAKLKSSVSRLVCILFPELEKLVPTLHGASVYALLDEFPGAAQIAEAHLTRLKALLSSASRGRYGRDMAVEIRDAARNSIGSRMPAKSLELQHTIRLIRELDAEIEEIEVEIQSIMDEVHSPITTIPGIGYRMGAMILAEVGDFSRFESPDKLLAYAGLSPSTYQSGQLKNCYPHMEKRGSRYLRYAIYNATKYVCLWDPVFASYLARKRAEGKHYNVAISHAAKKLVRLIFALEKAGQPYRLAV

SEQ ID NO: 488581 - protein, 366 aa, unidentified
MLYLGIDQHHKQITISLRDGEGSVIQRRQVSTRPEKARAFLEDLAHRSGEDGFMAILEVCGFNDWLIELLEEYRCKEIVLIHPDKRSKRKTDRRDAGKLSELLWLNGERLRKGTKPQGLRRVVIPTADDQADRQLTALRKRTAQQRTRTINKIKNILRRHNLTWEQPTKTFQTKLVRVWLAQIDLPPIDRMEMTHLLVQWNMYEQQIEQTQKSIEERFPQNESACQLSTAPGVSAYSALTIASRIGSIDRFASPRSLANYFGITPGCRNSGEATNRLGSITKEGSSMVRFILGQLVLHVLKQDPRMRDWYRRIRRRRGSKIARVAVMRRLVTIFWHMLKHNEGYHVGGPPRLRLKKTRRPEAKMTQ

SEQ ID NO: 488582 - protein, 310 aa, unidentified
MAHAVGIDVSKDWLDIAQLETGARWRLANDAPGWSQLVERLKRHSQALIGLEASGGYEQGVMRALLRAGLQVRRINPLRLRRFAQAAGVKAKNDRLDARMIALFVATLPTRPAKLDPTRERLAELVSARRQLQDDLVRLDNQAAHDRLALTIRLRRRQIALLKAQVALLDKHIAQLVNQAPEMARKAALMRSMPCIGPVVSQTLLALMPELGELTARQAAALVGVAPFDHDSGKLKGQRAIWGGRQSVRNALYMAAMVAGQHNATLRAFRQRLISAGKPPKLALVALMRKIIVTLNAILRTNTPWRAPLP

SEQ ID NO: 488583 - protein, 356 aa, unidentified
MSHVIRFGVDLAKHTFAICGVDEHDHITVKKTLSRKQLLTFFANTPPAMIAMEAGSGAHHWARQLIVLGHDARIIDPALVAPYRQQGRTGKNDDNDAAAICEAAGRPRMRFIPVKTPDQQAVLLVHRLRQSCVAEHTRLVNQLRGFLAEFGVIAPKGVNAFKTQWPRIRQQHDADLPPMAWQTLDALHAKLGELHQQILAYDRQIKAFVRADERASRLAEINGIGVITASALVATIGNGHDFRNGRQFAAWLGLVPRQYSTGGKPRLGRITKRGNTYLRTLLVHGARSELMYTAKRYDHKSAWAESLKLSKSWNKAAVALANSEPDKPDCLEWQSGPANARIAWAMLAHNTTYQPA

SEQ ID NO: 488584 - protein, 371 aa, unidentified
MKQQTKSSNITVGLDLGDRRHRFCALDERGEVVEQDSICNDRVSLRKLAGRYHGALGVMEAGAHSRWISRFLEALGWRVVVSNPRKVRAIYQHERKSDQRDALMLARIGRMDLALLYPVRHGTAEAQQDLLRIKLRDSLVRARVAVINSVRFTLKSLGYTVRNPSSARFHKVVMEEVPESVREIITPSVQALAELTARIKMLELEINTLAQMKYPQSAQLQQIPGVGPITALYFVLKIEDPNRFAHVRDVGAYAGLCPRRDQSGESDPQLRISKRGDAYLRRLLVSAAHYILGPFGPQSALRAYGLMLAADGTARAKKRATVAVARKLAVLLLSLWKSQQPYQPFPGACLNGEQEDRRSGTIALHRMEATD

SEQ ID NO: 488585 - protein, 357 aa, unidentified
MTKLKQNLNFTGVTIYAGIDVHLKSWNITLYCNDLYLKSFSQPPTTKALKEYLQNNYPNAGYKCAYESGFCGYWIERELRENNIECIVVNAADVPQTDKSVKNKTDKNDSKRIAQALQAGLLQPIYIPDQELEADRQLVRCNERFNNDLIRAKNRIKGLLYQLGIKLPECFANSNWSRKFLTWLKELGLKNTSAKVALQHQVLMVEFIREQKLKVLKDIRTLLKKERYAGTVKYLCSVPGIGPITAASLVTEIGEMKRFSCFEQLNCFVGFYPSQFSSGENIHQGNITGRKHNRLRSLLIESAWTAVRTDPAMTKAYNDLKIKIGGKRAIIKTARKLLSRIRYVWIHQTHYQKGLIK

SEQ ID NO: 488586 - protein, 344 aa, unidentified
MEYGAIDLHLRRSQFRIGLRDGTVRQTGKCGTTRAEFTRVFGDRPRMRILLESSTDSEWVAQHLESLGHEVIVADPNYAPMYGSRSRHIKTDTRDTAALFDACRLGIYRAAHRVSAAQRARRQQLRIRRHLVQLRSRSISVLRAVLRQEGWQLPSGSSERVTARLDQVALPTELQTILAPLRTWLSELNQLLETADAAVAALATSTPVARNLMTAPGVGPVVALTFAAVLDDPARFGGDAARASAFLGLVPSENSSAERRLKGHITKAGPGDLRALLVQASWTIWRGRSAAGADLRTWAHALAARRGRRIAIVALARRLSRILFAMWRDQTAFGATRRHVTVAP

SEQ ID NO: 488587 - protein, 324 aa, unidentified
MQPNSSSKCWVGIDISKDWVDVVVLIEERVVERKRWDRTAEQLEELANHLLSLAPQGVGLEPTGGLEAPVMAAAVALGLPMMRINPKRVRDFARAHGLLAKTDALDAYALALFGARMQPPVRPWPEAERQRLMAWVGRQRQLTDMRAGERNRLRRTDDPKLRASIERVIVFLGEELEQLQQQLRSWVVESETWRPQAELLRSAPGVGEKTSQVLLAYLPELGQLNRRQIASLAGLAPFACDSGQWRGRRQIRGGRSVVRSALYLASWTAVRTAPVFRDFYLQLVARGKARQLALLAVARKLLLVLNEMVRTSSPWQPLLSPSGA

SEQ ID NO: 488588 - protein, 343 aa, unidentified
MEHYAGIDVSLEESSVCIVDATGTIVREVKIASEPAVLVRYFDELELPVGCIGLEAGPLSQWLHAGLVAAGRDAVLLETRHVKAALSAMTVKTDRKDARGIAQLLRMGWYRPVHAKSVTCKDSRALLVGRKLLQGKLLDVELSIRGILRGYGLKVGEVSRGKFEARIRELTAGHITLETVIGAMLAARTALWCEFTKLHREMLKIARADKVCRRLMSTPGVGALVALTYRSAVDEPMRFGKSSTVGAYFGLTPKKYQSGETDRDGGVSKVGDAMVRTALFEAAHIMLTRATRFSSLKHWALNVAKPRGMKRAKVALARKLGVVLHRMWVDATDFRWSRTAAMA

SEQ ID NO: 488589 - protein, 355 aa, unidentified
MDKIKYIGLDVHRDTISAAVLNESGRLLQQSVLMTRTAAILDFIGGVRGSLHVTFEEGTHSAWLYDLLSRRVDKLVVCNPRKNALLKSGNKGDAIDARKLADLLRAGLLSPVYHGETSALEVQQLARSYLMLTEDTTRAMGRLKAVFRGQAISCTGRRLYGPKHRGEYLAALGGCALRRRAERLYQQLDALQQLRRDARHDLIVECRKHVEAKWLQTVPFLGPLRAAVLIGRVQTPHRFRTKRQFWTYCGLALETRDSAEYRVTDGQLERKKRPAQVRGLNWNYNHELKNVFKGAANAASTGQGVFREFYLGLLKKGMRPEMARLTLARKIAAIALKIWKRGESFDAEHLKSQAA

SEQ ID NO: 488590 - protein, 457 aa, unidentified
MSKRRSKAKSKNIKVPKLPQHLQHMNLNAAGVDIGSERHLVAVPEGRDTVSVREFGTFTADLQDLAAWLKKCGVSTVAMESTGVYWIPLFELLERQGFEVKLVDARHVKNVSGRKSDVLDCQWLQQLHTYGLLAGAFRPPDEVCVLRSYLRQREMLIQSASMHIQHMQKALQQMNLLLHNVVSDITGVTGMKIIKAILAGERDAQVLARHRDERCHHTVGTIAKSLVGNYREEHLFALRQAVDLYETYQAKISDCNQAIIKQVEKQPDVSDDGPPPAAKQTPSRVRLREGVDVRDLLFKKSGVDLFAVPGLAADTLLILASEVGFDMTPWKTEKHFASWLGLCPGTKKSGGKVLNNKTKRNPNRATQAFRMAAATLYRSQTALGAFYRRLKSRRDGQQAVTATAHKIARIYYAMLSHGTNYVELGQKAYEQRFKERRIDHLKVQAKSLGFQLLPCGT

SEQ ID NO: 488591 - protein, 350 aa, unidentified
MSNIYAGIDLHSNNLVCALVDQEGHRLKHKRLDNRLSPVREFLQPYQSRLQTVAVEGTFNWYWLVDGLIEQDYPVALANAAAIRQYDGLKHGDDESDAYFLAELARLDILPTGHICSKELRPYRDLLRRRMLLVRQRTSQMLSLKSLYARMTGQSLSQGLVKSLTVEEVPNYLSHPADRQIATAQVQWMKQLTQSIRQIEKTVEQVADQLPCYERLQELPGIGRILGLTITMEIDQIERFVSPEDFASYCRCVKAERESNGQRKGFNNQKCGNEYLAWAFVEAVHCAIRTDAACRRFYERKKAKTNAAVATKALACKLAKAAWHVMKKNEPYDPARVFPFLREKNAAVKA

SEQ ID NO: 488592 - protein, 351 aa, unidentified
MERYIGGDVHAASVTFTVRSASAKIIRRDVVETNGEALVGYISQQPGNCHLCIEESEWSGWLHEILSPHLAEFVVYRPKWRPGSKSDRHDADDLSERMRTGKVGVPVYKDLKQFAILREASRSHSMLTRDQVRVKTRIKSFYRSRGIACAGDAVYRPDKRDERLKKLPKALQTTALLLGRELDALVALQKEAEKALLREAHRHPISRILETAPGFGPKRAAQLIPIVVTPWRFRTKKQFWSYCGFGIVMHTSSDWEKGENGWQRAHVAQTRGLSRSYNHQLKWIFKGAATTVIAHSGGNPLREHYDCLLENGTKPNLAKLTIARRIAAIVLAMWKTEEKYDPKKVHVPESC

SEQ ID NO: 488593 - protein, 361 aa, unidentified
MQSTTIIAFDQHAATTVAAVLLPGQRTSALHALASDSPTILRFVERLRRQGPVTCCYEAGPCGFELQRAMTAEGVACDVIAPALIPRRAGDRIKTDRRDAGQLAILYRAGALTAIHVPTDQEEAVRDLLRCREDIRSDLLRARHRLSKFLLRHGRRFTATKSAWSQRHHTWLRAQTWALPALTQTHEAYLRTVDEAVARLQAVDTQLQKLVTIEPLHTRVQRLRCFRGMDDLTALTIAAELGDPRRFPSARGLMAYVGLIPSEHSSGTKRSRGAITKTGNAHVRRVLVEAAWHYRHHPFIGKALGRRQQSAPEPAKSHAWRAQQRLYRRYQRLSARGKPKQHVVTAIARELTGFVWATLTQ

SEQ ID NO: 488594 - protein, 405 aa, unidentified
MLETIVKRVAGLDVHKMVIVATVILTQEDGETLTETKKFGTFRKHRRQLARWLTRCGIELAVMESTGIFWKSIFETLETAAIKTYVVNARFVKNVPGRKTDVMDSEWLATLARAGLLKPSFIPPKDLRELRLIGRHRMKLHGMLAGEKNRLHKILDDAGIRLGGVVSDINGVSAKEMVAGLIENKPVEELVQCARGRLKSKVEELHDSLSESISERHKFLLRKIHGHMCILENEIQEMDDYLFEAMTPYQKQWGILQTLPGVDKFSSAMLLIEIGTDMEQFGSPGRLASWAGMCPGNNESAGKRKSGRTRKGNRSVRRVLCEVANAARKTNSQFKGKYQSLVIRRGHKRTIIALGHKVLRVIYSMLKNKQPYWDPGIDYEALTVKRNAPRWLRALNKYGYLPAEA

SEQ ID NO: 488595 - protein, 371 aa, unidentified
MSTTSITPERMVIAIDPHKASWTAAVVDASQQPVATIRVPVSRDGYRALRRFANRWPDPTWAIEGASGLGAPLTARLRTDGIDVVDVPAKLAARVRMLSTGHGRKNDDADAVSVAIAARSARTLNSAAVDGAVTALRAIVEHRDDLVKTRTQTVNRLHVVLTNLIPAGASRDLTAERAAELLRGIRPRDTAGRTLRSLATDLVAEIRQLDRRIAKAAADIQTAVTDSGTTLTELCGIGALTAGKILGRVGTIDRFRSAAAFATYTGTAPIDVSSGDVVRHRLSRAGDRQLNLCLHVMALTQIRQDTPGRAYYSRKRTQGKSHKEAMRCLKRRLSDVVYQQLRHDANWMEAGPGGHSGAALSSSAASSNPAH

SEQ ID NO: 488596 - protein, 409 aa, unidentified
MEGTYPIAGIDVHKKMLAVVVTDVSQPGEYQFERRTFGTGSAELRQLAEWVTQRGVREAVMESTAQYWRPVWQGLEGLCQLHLAQAHSNRAPKGRKRDFEDAERLVRRHVAGELILSFVPGEQQRLWRIMTRTRQQLTRDRIRLRNQMEGFLEESRIKLSSHVSDLFGVSGKRMLQALAAGATDPVAIAALAGPALRASQEQLADALSAAAAFAPIRRQILQLFLERVQLIDSQREALAKSLAETLQQHQTAVTRLAETPGLGVDSAQQIIAEVGAAAASFDSPGQLASWIGCSPGREESAQVSRSDRSPQGNRQMRRILNQAANAAVKAKGSVFQDLYRRLVPRLGHAKAIWAVAHKLCRVVWKILHDGVPYQERGFRPDPQTIRRRVDKMVRHLRSLGYQVELSTAS

SEQ ID NO: 488597 - protein, 323 aa, unidentified
MSSPTPLINVGIDVSKETLDMAVHETETHWSSKHEFTEFPQLLQTLRSLTPTRIIIEASGGTENLLVSYLATNGLPVIVVNPRQVRDFARAPGQLAKTDRIDAFVLARFGATLEPAVRQLKSAENQELEALVARRAQLVNMLTAERLRLQQAQQRRRKAIVADLRAHISWLQKRLDKCEGDLSQLLRSSAVWRASDERLRSVPGVGPVTALVLIAELPELGQLPDKQIVALCGLAPHARDSGKWHGKRTTRGGRARVRTALYMAALVATKHNLVIKTFYQRLLRAGKEKKVALTACMRKLLVILNAMFRNQTSWQLPRLVPGA

SEQ ID NO: 488598 - protein, 355 aa, unidentified
MLNTKYIGMDIHKETISIAVMSAAGKSVMECVIETKASTILQFIHGLRGDLHLTFEEGTWAAWLYDLLKPHVTEVVVCNPRKNALLKEGSKSDKIDARKLAELLRLNHLKPVYHGEHGVRTLKELARSYLTITQDLTRVRNRLKALYRSWAIPCAGNKEYAPRHRSEWLGKITEAGVRRRAEHYYQQLDALRPLRQEVRRDLLTESQKHKACKLLRQIPGIGAIRAALLIALIQTPHRFRTKRQLWTYSGLGLETYDSAQYCVVEGQLQRSKKPLMLRGLNQNHNHDLKAIFKGAALEASSGAGPFHDFYEDLLAKGRKPTMARLTLARKIAAITLIVWKKEVSFDAKHLKQQAA

SEQ ID NO: 488599 - protein, 364 aa, unidentified
MNIEDIDVFIGIDVGKSEHWATALSRDGRKVFDKSLPNDEERLRALYKKLADHGNLLVVVDQPATIGALAVAVAQDMGITVGYLPGLSMRRIADLTPGSAKTDAKDAAVIAGAARSMPHTLRAINASDEDAAALSMLTGFDLDLARQVNQTANRIRGLYTQIHPALERVLGPWLEHDAVLEVIAAWPTPADLKRAGKARIDARLKKHGCRRHATWAGQIVSALEHQTVVVAGTDAAAVVLPHLARQLIALHAQRADVAAQVETLVQAHPLYQVLTSMPGIGVRTAAVFLAETLGKTFNTGAQLASYAGLAPVTRRSGSSIRGEHVSHGGNKRLKRAMFLSAFASLRSDPVSRAYYPETAKAHRG

SEQ ID NO: 488600 - protein, 345 aa, unidentified
MEPMYYIGLDVHKRKISYCVKDTSGRLHAEGSLPATRFDLDCWMKTLPQPWSAAMEATMFSGWIYDHLKPHAAALKVAHPLMLRAIAAAKKKNDRIDANKICDCLRCDFLPQSYMAPTAIRERRRTLRYRNLLVRQMVQMKIKISTLLMEAGVSYNKSKLHKAGYFRDLLATNPDINESLRSLLRQCRETVVRLSKMETALIHSLQQDRLLVERVERLMSIPGIGPITALTWALEIGEVQRFSSIKKAISYCGLCGDEQRSANSVQRTPISKQRNKHLQTTLIEAAKMAPRYSPTLALLYDREKQKGNANRATLAVARKLVAYLMAVDRGQTHFLVIDQETCTAA

SEQ ID NO: 488601 - protein, 392 aa, unidentified
MKYSTVYVGMDVHKESFSLCCYTNEKEQAEYPQKVDGHYSKVINYIEAMRFHYGDDALFICGYEAGCLGFTLYHQLTDHNVKCVILAPTTMLQQKGRKKVKTDKRDAALIARCLAHHDYSPVHIPTEQDEQTKEFIRMRNDHKLALKKVKQQILSFCLRHNYRFDGTSTHWNQTHLKWLRALKPEGLYMEILQEYLLTYDYLTDKLERLDKRIEELASDGTYQENVRKLSCFIGVKTVTALAVLTEVGDFKRFASAQHFASYIGLTPGEDSSGDDQNRLGITKAGNRHVRSLLVEAAQSYSRGQIGFKSKALKARQAGNSPEVIAYADKANERLRRKYYRMVLRNNKKTNVAKTAVARELACFMWGMIQRTVSIKARLPAAVLRSLDPASPL

SEQ ID NO: 488602 - protein, 399 aa, unidentified
MTNAAGRVAGVDSHKDTIHVAVITGVGQPVADREFPTTVAGYRRAVAWLVEHGPIEAVGIEGTSSYGVGITAAIGALGVRVIEVNRTRPAERRKQGKTDRLDAYRAARSVLSGEASTDPKNASIEPLRALNVARRSAVKAQQAAWRQILALLVNASPHLRDRYRALPGAKLVATLAATRPDQLGDSDAADTLSALRALARRHHALEREIAELEQRMHTRATMANPALMAIKGIGPVIGAQLLITAGDNPDRLRTSASFAALCGTAPIRVSSGRTDRHRLCRGGDRQANAALHHIVKVRLSYDPATRAYRDTHLAKGWTINAVFRALKRAVAREVYRALTGRCALPDYSDLRPARRAKNLTLTAAAEHLGVWPSRIGELELGRRPNDELATRYRAWLTAA

SEQ ID NO: 488603 - protein, 339 aa, unidentified
MTKINVLGVDLAKRIFQLHGNDSTGRTVFTQKVTRGKLLKTVSEIDKCVIAMEACSGANYWANEFSKLGHEVKLISPQFVKPFVKANKTDAADAEAIAEAASRPNMRFVSIKQVWQQDIQSIHRVRERLVKNKTALCNEMRGLLAEYGIALSQGAYKLNKEVLFVLADANNNLSDTIRGVIQDLYSELKGLESKVSEYNIRLENISANNDTCTRIEKIPGIGTVTSTAILSIIGTDVRNFKNGRQFAAYLGLVPRQSSSGGKINILGISKRGDTYIRTLLVHGARAAIRYAHLKDDRVSKWSTRKEKELGYNKAVVALANKNARIIWALIANETEYKVA

SEQ ID NO: 488604 - protein, 374 aa, unidentified
MSKVRFLGLDVHADTIAVAVAEPGGEVRALGIIPNRLERIRKLVKKLGPAGNLRACYEAGPTGYVLYWQLTTLGVNCQVVAPSLIPTKAGDRVNTDRRDAAKLARSHRSGDLTAVWVPDAAHEALRDLVRAREDAKQDQLRARHRLGKFLLRHGKRPDGSMKVWTGKYMEWLQRNVHFAIAALEATFLDYVHEVRHQAERITGLEKAIDSAIAEAPPQMRAVIEALQALRGVAKITAVTIVAEVGSFSRFENPRSLMGYSGMVSSEFSSGNRIRRGGITKTGNAHLRRVIGEAAWAYQRRPWVGGFLRKRQQGLDQEVKDIAWKAQGRLHARYTKLTARGKNKNQTVVAVGRELLGFIWAIATRTEAKYQRPAA

SEQ ID NO: 488605 - protein, 413 aa, unidentified
MAEETFRWFAGIDWGSATHQACLLDEAGTVVGERAFAHGGAGLAALCDWLVSLAGDPGSVAVAIEVPHGPVVDALLDRGFAVYAINPKQLDRLRDRISVAGAKDDRRDARVAAAGLRTDPHLFRRVLAGDPSVIELREWSRLAEEVQQERVRLGNRVRQQLWRYYPQLLALSDDVTAEWVLALWNMAPTPAQAARLREATLARLLRQHRIRKLDAPAVLAILRQPAIPVAPGVTEAAVLHLRSLVARLRLANQEFRQAERKLEELCTALSETQPTAQDSGPGDATILRSLPGVGPVTLATLLTEATGPLARRDYPALRTLSGVAPVTKRSGKSCIVVMRYAAQVRLRNAVFHWARVAVLNDRRCRGRYEALRARGHSYGRALRGVGDRLLGVACVLLRRGMLFDPDYGSSASA

SEQ ID NO: 488606 - protein, 333 aa, unidentified
MDLHSTNTYTAIMDENRKRVIDCKLANQPKVILGFLEPYRTDLEGIVIESTYNWYWLVDMLQENGYRVHLANPSAIQQYSGLKYVDDRHDAYWLADLLRLGLLREGYIYPKEIRPIRDLLRKRAHLGRLRTSLLLSAQNIVLRNHAVKVASEDIKKLTTDLLTPHLQESEGLFLTGKISKDLIDAFTRQIKAIETWVMKRLQPEKLFLNLLTIPGVGEILAMTILLETGCIARFPKVGNYVSYCRLVASQRLSNDKVKGKGNDRNGNKYLAWAFSEAAEHARRHYPMCRSFYNRKLNQKNATVAHCALARKLSRAAYYIQKDQVAFDETRLFS

SEQ ID NO: 488607 - protein, 355 aa, unidentified
MDKIKTNFSGQTIHVGMDVHKDSWNLGIYLNDIFVRNLHQKPNPKMMVDYLHKNFPGAIYRSAYEAGKFGFWIQRQLASLGVECLVVNPADIPKSQKDSLQKTDPRDARNIGLRLQSGFLRGIHIPDEQQEADRVFFRHRKKILKDLNRCKNRIKGLLAFTGIDIPQAYDNANWSHNFINWLKSLDCKQAPRRRALDYKIRNMEFLRKELLSISNDIRKMMREQRYKTNYYLLRTIPGIGPLTAASILVEIGDVKRFNTFCHLNSFIGLLPMEHSSGQSENKMSLTVRKHRQLRSDLVESAWTAKRTDPAMALYFQEQAKRKDPKIVIIKIARKLLNRIRYVLINQQPYEFGVLK

SEQ ID NO: 488608 - protein, 417 aa, unidentified
MTDQRLWYAGVDWASESHHVFLTDGDGRTIGEKIVRHGGEGLAEMATWLMAKSGAAQASQIRVAIEVPHGPVVETLMERGFGVYAINPKQMDRFRDRFTLAGAKDDSRDAQTMASALRTDPRCLRALAVADPVVVELREWSRIADDLGAERNRLTNRMREQLWRYFPALLELDDDLGAEWLLDLWQSVPRPAKAARIRAETVARLLKRHRIRRFDAGHVLDVLRQPPLNVGVGTIEAASAHVAALVARIRLVNRQPKQAHQRLDVLTARLVPTGEESEPGQRKQHDVEILASLPGVGRIVLATLLAEAFDVLQRRDYAALRSLTGVAPVTKSSGKSCIVLRRQACHDRLANAMYHWARVAVQHDPRSRAKYAALRSRGHSHGRALRSVADRLLNVACAMLRSGTSFNPSLTTQKIAC

SEQ ID NO: 488609 - protein, 344 aa, unidentified
MPMYQLGIDVSKNTLDLCLLREGIKGRIKTRKLKNTADAAKVVAEWLKKQSCELGEVHIIMEATGVYHEPLAYGLHFAGARISLANPHRTREFARGMNILTKNDKVDAWMLACYGSLKEPEAWTPPPESVRYLRALLRRRDALVADSTREKNRLEKSVFTDSPDAVRASIEHMLQELNNEIEHLDVLIQEHIETHPELNQDFRLLTSIKSVGYLLGLNMLAILKSHSFESAEQAAAFLGVVPVERRSGTSVKGKPKLSKIGPPEIRTKLYLAALCGLRFNPVMKQMYTKLCQRGKSKMCAIGALMRKLVHWCYGVLKTQLPFDAEHNQQSYYKTTCYSTPSEQY

SEQ ID NO: 488610 - protein, 392 aa, unidentified
MYIVGIDIGKNHHEASIVSPEGKQIGRSLRFATTHKGADSLMRFIFKNIGNSPCVFGMEATGHYWYPIYSFLKAKGYTIYVINPIQSDSLRKMYIRQTKNDSIDSFLIAEVIRFGQFGTTSMADENILAMRQLCRYRDSVISSRTEIKLRIGTIMEQIFPEYEKQFSSLWVSTSMGILEKYLTPENIENAPIDELFEIIKDKSHNRLTKAKAISIKEAAADTFGIKIAQDAFSFQLKQLIDRMNFLDKQIEALDCQILEYYEKFDCYLHTIPGIGMIAAATILAEIGDINRFKSSSALVAFAGIDPTVRQSGEFSSTHNHMSKRGSPYLRHAIFLAATTCSFHNSPLNAYYKKKRDQGKHHLTATGAVARKLTTVIYAVLRDSKPYEPKKFC

SEQ ID NO: 488611 - protein, 331 aa, unidentified
MKFTNAIGIDVSKETLDVRDYVHQLSIQVRNTAAGFKELLRWAKKSNQDLMTVLFCFEHTGMYSLPLAVFLTGSKQPYVMVPGLEIKRSMGISRGKNDQADAQAIAEYAYLRKEKLKAYQLPSEKLLELKSLLSLREKMVNQRAGYKASLKEMKDFLKIIKTSSVVFQAQEQMIKELDKQILKVEKQMIGLINGDEQLKKTYALVTSVDGVGLIVGTTMMVYTNCFTTFDDWRKFACYCGIAPFKYQSGTSIKGKTKVNHFANKKLKTLLSNAACSAIQCNAEMKLYYERRIKEGKTEMSTQNIIRNKIVARVFAVVKRGTEYVDTLKYAA

SEQ ID NO: 488612 - protein, 489 aa, unidentified
MGLNPNLGLGDDGGRTIVPSPSRAKISLSAAAVSRFSHNQMQRFERPSIRLDVTGTGRPNRNKSEVSMSKKSKKKQEEKQYWVGLDWGQEGHAVSVVDDKRTLVQQFKVGAALEDLRQLADCLHGWDAVAGIAIEATCNPALGYLSSQGFTIYPVNPKLSKNWRESNSVAGVKSDERDGLVLAVELARRHESLRTLKQDEPAVAELAGLCEKLRDLIDQRTALLQRLKATLGQYYPGVMGFFNDWSSPVAWRFIKRFPRPETLAHARKDTLIKFLKANRVGLTPIWLERIERGSNVAQWPVPADSLALEAMALATVAQLQALQPHIDKCDRLIAKRTPKMPHAHVIWSLPGAGERLAPALVAITGVTLGEEDGSQALRCVSGIAPVDVQSGKRRRVRIRRRCNKHWRNVMHLFARCSTVSCPWAKAFYDMHREQGDGHATALRKLADKWSKIINRMLDTGEPYDDARYVEALRKHGSPVYSRLCKTTCG

SEQ ID NO: 488613 - protein, 339 aa, unidentified
MNNSVIGLDIAKHIFHMFSLGTDGKTIKKKLKRSELLAFFANYPVSIVGIEACGSAHHWARELTKLGHEVILLNARYVKSFVVGNKNDFNDAAAIYDAVTRPNKRVVAIKTVAQQDIQLVHSMRKELVDKRTALVNQTRGLLSERGIIINKGITQVRQQLPLILEDAENGLSALSREMFAEQYDKIKVLDDEIKAQDLRINRLCNANELSKRFLDVPGIGPLTATIVAADIGDTGKGYESSRDYAASLGVVPRQHSSGDKQVYLGISKRGNRYIRTLLIHGARSVLKNCLKKTDKLSLWLQALVARRGFNKAAVALANKNARILWAMASKNKDYEALVA

SEQ ID NO: 488614 - protein, 426 aa, unidentified
MYIKPIDSNLKADNNLNLAFDIGKDKLDVYTEVDQNSIQNSFNNKTLTIEKELTRLHEIAISKGYEGLRIIAEPTGVYHKKLFRTARKMGHKTAIVNPESVYKFKVIESNDAGKTDSKDCRVIFLLAKYNKTLIDRNLIKGYAALRNLNTHYIEQEKVYVSLRCKIFNLLKELFCDYSFSSKFLYTNSGRQLVKRFKANPYRIIKYGYAHFYKRMKKYAPRMRNSTIQRLWQDAKVSSRHQLDPEYVKVLEFQFISLWEDLATVEKRKEIIENKMIKTYESLREFDPYLPDSVKGFITKFRIAQLLAETGPLSDFASTNQLMRYAGLNIRERKSGKFKGQNKISKKGRANLRRVLGYIVLPLVKKKALLGSRYHRKKDAGMPGTKAMVPMMRKVLSIFYGWYKSGQPFDMDRIFLDESQYKKLKEN

SEQ ID NO: 488615 - protein, 362 aa, unidentified
MDVHSTNYTLASFMFGNEQPFAVTQVDPDYKHILNYLKQVQKNYGGPCEFLCGYEAGCLGFTLYEQLKAHNVPCVILAPSKMPKVKNEIKTDKRDAMKIAKCLAYNDYSAVYVPTKEDHQVKEYIRMRDAHKTALKKVKQQILAFCLRNGFQFTAGKNYWTDKHMKWLRGLQMDEMLREILDEYLATYQASLDKLERFDKRIEELAAGTRYADKVKMLSCFIGIRTHTALSLIVETGDFRRFAKADQYASFLGLVPGEHSSACDKNYLGITKAGNSHLRRLLIESAQCLARGRVGYKSKVLKAKQYGNPAQVIAYADKANERLRRRFYHLTLKLKKKRNIAVAAVARELSCFIWGMMIERIS

SEQ ID NO: 488616 - protein, 405 aa, unidentified
MIEPIVKRIAGLDVHKMVVVGTVLIEEEDGSIKQETREFGTFKRDRRQMCQWLKDHEVELVAMESTGIYWKSIYATLEKAQILAYVVNARHVKNVPGRKTDVSDSQWLAALARVGLLRPSFIPTKDLRELRIISRQRTKINVTLSAEKNRLNKVLDDAGIRLGGVASDIDGVSAQKIIEGIIDGKPIEELIACARGRLKAKTDDLRACLDEELSERHIFLLKALQKHIQFLKSELEDIDAYLFAAMSPYQKQWEILQTLPGVDKVAAMVLIIEIGIEMERFGSADQLSSWAGMCPGNNESAGKRKSGKTRKGNQAIRSILCEIANAARRTKSQFKGKYESLVIRRGHKRTIIALGHKILRVIFVMLKNVKPYFDPGIDYEELIVSRNAPRWLQALKKFGYLPQTV

SEQ ID NO: 488617 - protein, 324 aa, unidentified
MLKKFTQDPSPAALNKFLTNTYPGAEYYSVYEAGFCGFWIHWELQNLGINNIVVNPADVPTMAGERLRKTDAVDSGKLARSLRSGELKGIYVPDSVATEIRSLIRLRDSLTKDQTRHKNRIKAHLRYLGIDIPEEFCRPGRTWTNRFVLWLKGLKLETKYGKKTLDLLIAQYEDLRGQQLKMMKELRVLSRTERFDKPLQFLMSIPGIGQLAGLTILSEVDDISRFKDAAHFASFIGMVPMCYSSGEHDGTGNITVRRHAKLRWLIVEAAWIASRKDPVLSAAYVEYCRTMKPSKAIIKIARRLVNRIYFVMKHQQPYVNCYVS

SEQ ID NO: 488618 - protein, 340 aa, unidentified
MQVTTIGVDLAKNVFQVHGIAENEVVLFNKPLRRAQFLPFFAKLAPCLIGMESCSSAHHWARELTALGHEVRLIPPMYVKPYVKRGKSDAIDAEAICEAVTRPTMRFVAIKTVEQQALLSLHRARDLLVRQRTQLINGLRGLVAEFGIYIPRGLARVIGFAEDITLGEVLDLPDIANEVIRNLSEQLMALHKRIRWYEERLKQVAKEDARVRLLRTIPGIGAVTASAIIASIGDGHQFRNGREFAAWLGLTPANKSSGGKEKLGRITKMGDQYLRSLLVVGMTSLVRQTRSHPERASKWLTSLLERKPARVATVAMANKTARIVWAVLTRDEPYSPRAAV

SEQ ID NO: 488619 - protein, 482 aa, unidentified
MNDVLGKFSIENGGIARPLHDYGVGVDTHRDFIQVCVLVREGSAIKMHESEHRTTWEGLVNAGKWARQTIAGKSLPTIEPEPLRYAIESTSTYHLPVIKAMGGKPSIVNPMLAGSTKRKTDVLDARLLSYQSMTGLWPESFVIMPEIEELRLLMKQRDYSVRACTAITNRINNYIMRFGHTLGSYKSIRSMENRAMVEDMCEEDFVYAHDSPEIGPGQFICPDGLPHETRRMIKDMFNEHDAHDAKSKHFQKLALEHAKKISWETDCGFVKGDALIKKLLTVPSVGELSALVWLSEIVTPLRFGSSPQLAAYCGCDPSLKVSAGKVTSQTRRKGNPKLHSQLLRVAGACINRHAEPFGQWGYAISKKHAKGGYKKACGAVARRIAVSLYYVHKRNEPFSYDKYNFYKIDVPFVQLSDMGFSTRLENILTLNGLTDSKSITNAYIVGKIHEFKGLGKKFAQDVNAWIQTNKNHKSGRRQDNEQ

SEQ ID NO: 488620 - protein, 351 aa, unidentified
MIIIGVDYHPSFQEIASLDKETGEYDERRLNHGEAEADKFYRDLKQRGVGVRVGMEATGQSRWFERLMTELDFELWIGDPAAIKAARVRKKKTDREDARLLLRLLREDRFPRVWVPNPENRDLRQLLWHRHRLVQMRTRVMNQLQAIAMNEGVRLRKALWSKGGRAKLESLELAPWAARRRQDLLELLDRLTPKIEPLSVAIEQEALKRPEVKRLMTHPGVGPITALAFMLIIGTPERFRCGKQLGSYLGLVPSEDSSGGKQRLGHISKQGNSLLRFLLVEAAHAAVRHDPDWKRRYLHLAMRREQGIAKVAMARRLGDRLYWMWRKGWDYQQVLQFGSHAGDLVLVRGVQ

SEQ ID NO: 488621 - protein, 402 aa, unidentified
MPMLSIGIDVSKGKSTVCGMKPGGEIVYTPFEVQHTREGMSELVSLLRGSGEEVRAVLESTGSYHCPVVAALLENGIFVSVVNSLRMKRFCSQSIRKVKTDRIDAMQIALYGLAYWQELQPARLPEDTYRELQLLARQYYQMTSLLIKAKVDFNAICDQVLPGMQELMSDHAGRHKLSDFVLRYCHTTHILEMGETRFRKDYCKWAEKKGYRNCERMAALIFATAQNGIPVLPNAPSTQIVITEAIRVLHTVEASRDAILTQMQALAKTLPEYSLVREMPCIGDTLAPRLIAEIGDVRRFHSKRALIAYAGIDAPPYQSGKFCANNRHISKRGNRYLRKTGYEVMQSYVMHKPANDPIFTFIEKKRGEGKSGKLAMVAGLNKFLRVYYGKVTELYRSLPTIE

SEQ ID NO: 488622 - protein, 407 aa, unidentified
MYYCGIDIAKHRHEMAALDETGESVLSMHFANTQKGLEKLLDALASLKIEPENILFCMEATGHYWLALYCQLKELGYQLHVINPIQSDALRNLYVRKAKTDKKDALLLADLVRLGRAPVTQIASETTLKLQTLSRLRLEFVHQVGGLKNRVLGILDRIFPEYPECFSNVFIRTSRELLKSYPEPELLAEADLSELTAFLSQHSRGRLHKDRAEQIQALAKGTFGIRLALDAFTLELKLLVEQIEFIEEQVFILEEAIEQILEEFRTDPGQPYRHVLETIPGIGSVLAAAIIGEVGDISRFPNAKALVAYAGLDATVKASGQFEGTRNRISKRGSSTLRNSLWLAAVTARRFNPELKAFYEAKQAQGKHSGVATGAVARRLVHLIYSIWKDNRPFEPDYKWSPLSGNE

SEQ ID NO: 488623 - protein, 410 aa, unidentified
MEVLFERVAGLDIGKATLTVCVRTPGPRSRRSEVRTFPTTTRALESMRDWLLTCGVTVAAMESTSTYWKAPFYCLEEVMDVWLANAAHIKAIPRRKTDVRDAEWIAQLLECGLVRPSFVPPPDIRRLRMLTRYRVQLMGDRTREATRLELMLEDASIKLSVVASSLTTVSARAMLNALIAGERDPAVLAELARGKMRAKIPALTEALTGHFDAGHAQLVRSMLHRLELVEDALAELDAVLATAFAPWAHQLELLQTIPGVGEKVAQVIVAETGADMSRFPTAAQLAAWAGVAPGVHESAGKHTAVGTRPGNKWLTAMLVEAAGSVGRMKGKNYLAAQHARLTARRGMSRAQVAVAHSILVSAYYMLQRDEPYRDLGPDWLAQRNDEAHTRRLIAQLEKLGHNVTLDQPAA

SEQ ID NO: 488624 - protein, 356 aa, unidentified
MTEKNNTGSERVQEYYVGMDVHKGKWVITIRRCGFALKTLVVDPSVEVLMKYLERNFPGGKFTCTYEAGFCGFWIARELKKRGVECLVVNPADVPTRDKERVNKKDKVDSRKLARELEKGNLEGIYIPDEWMQRLKSLGRLSISCGRDMTRIKNRIKSHLHLYGIEIPSHSECYHWSGNFIRVLEGMCRKCDPFGDYMNACIEKLKAERVRQVGLLKKLRGYAHSCGWGEILGRLISIPGIGFKTAITLMTEIEDMRRFKDLDSLCSFVGLIPSCGGSGDREMDFGITRRHNTYLRYLLVEAAWVIVRKDKVLLETYNKFLSRMTKQNAIIRIAKKLLGRIRHVWLNNKDYAYCKV

SEQ ID NO: 488625 - protein, 421 aa, unidentified
MSYTIAAIDIHKKVLMVAVATVANEVADATGEAIEFECRRFGTGNSERQHLVGWLRERGVTEVVMESTAQYWKPIWMDLEPHFAKLHLAQAHSNRAPRGRKNDFRDAKRLARRLLADELILSFVPEAEQRMWRTLTRSKHQLIRDRVRLQSQLEALLEEARIKLSSVISDLLGASGRRILAALAQGETDPAKLAELGDDRLKCSKRELTDALTGSPEPLHLEVLKLDLERLQLLDCQILRLDVLVAKELKNHQDAILRIAEMPGFGVDSAQQIIAEIGVDAAAFPTAAQFCSWAGTCPGRHESAEQNHSSRSPKGNRFVRRILTQAAQAAVKKKGSHFRTLFHRLLVKLGYRGAIWAIAHRLGRLVWKILHDDVRYIEQGQETTPKAKKRRTQKLTQALRKLGYQVTLTPIQSPPIQEQQG

SEQ ID NO: 488626 - protein, 466 aa, unidentified
MENNYILYVGMDSSKGKADAAILKVSDRRSVKPKFLRKKLSFKFVKSEVTSFLETVRSYSDDNCTSICFALEVTGIYSTNVYNFIKDNLNDNESIKFLNTDFVNQWRNAHNIAKSDPLDAQTISTIIGTDSDVQYVNDNVFENKNGYQDLKALVHRHYQIKKIYSQEINRLIAQCDCLFPELQYVFEPKSAAFIAVLSSYPTTHDIINASRLEVFNVVYEATKHRCSMDKIDKLFDLCHDTLVPDNISSYGRSIILDLVENIKNIKGQLKMIERYIRDVASLNPAYKLLLTITGCGPLTAATVIAETGDIKRFKNADCFVSYSGTSPRNKRSGTSVETMGKISKRGSRYLRHAIYMIAEFARRHNPVLKQQFERIKNGNKKRHKLANIAIANKIARYIYSIMKNESGFVIFHEHIMRLPEETQNTFFNSISLDFPENTRKQIYQYSDIDGEVHKFVYTKLEETMII

SEQ ID NO: 488627 - protein, 411 aa, unidentified
MEVLVERQSALDVHKAQVTACVRVPNGDGGRLELIEQFQTTVPGLLAMADWLRAHEVTHVVMEATGDYWKPVWHLLEEDFELMLVNARHVKQVPGRKTDVSDAAWLCRLAEAGLLSASFVPPKPIRDLRLLTRYRRTQIAERKREAQRLHKALEDTGIKLDCVATDILGKSGRAMLDALVAGTTDPEVLADLALGKLRKKIPALRDALQGRFEALHALLISSILAHLDFLDEQISGLSDAIEEQIAPFAAARELLQSIPGVGQRTAEVIIAEIGTDMTQFPTAGHLASWAGQCPGNDQSAGKRRSGRTRKGSKNLNIALKDAAMAATRTNGSYLQALYRRKRTALGHGRAVGAVKHSMICACWHMLATGEIYTDLGGDYYQRRDPERQTKRLVAQLQRLGHTVTLHDAKAA

SEQ ID NO: 488628 - protein, 371 aa, unidentified
MKDKSKVVFVGLDVAKDTLAVSVADEGRDGEIRDWGTVSTAPQSVERLPKKLAARFNKVEVCYEAGPTGYGLHRHITAFGFSCSVVAPSSIPVRAGERIKTDRRDAMRLARLLRAGELTPVWVPDETHEAMRDLVRARESAAEDQRHKRQLISAFLLRHGRIYHRTKTWAMRYRRWLQRQSFDHPAQQIALQEMVLTEHHAVERVARLTTGIEELVPDWQLGPVVEALQALRGVALISAVTFMAEISDVRRFENPRKLMAYLGLVPSEYSTGQTIKRGGITKAGNSRVRRTLVEGAWTYRFPARIGEKKLYVLQKLPPEIQDIAWKAQSRLTAQYRRLSQRGKKKTVITTAIARELSAFMWDIARKTMPVP

SEQ ID NO: 488629 - protein, 345 aa, unidentified
MSQHSVQGSDIAGLLKRFAQLKEKARARTGRDFPIIVIQEAGLDGFWIHRVLQSEGIESHVVDAASILTSRRRRRAKTDRIDGETLVRTLMAFKRGEPRVCSMARAPTPQEEDRRRVCRERRTLVGERVRHVNRIKGLLFAQGVFGYEPLRKGRRERLEDLRTGDGRPLPVHLKAQIIRELDRLEVVLEQLKTVEAERDALLKPATDEAASPPAMLARLKGIGPETAAVLWSEGLFRRFDNRRQVAAYAGLAPTPWQSGSIDHEQGVSKAGNPRLRTTMVELAWLWLQNQPTSALSLWFHERVRRLGGRMRKTTIVALARKLLIALWRYTTAGVVIEGAAMKATI

SEQ ID NO: 488630 - protein, 431 aa, unidentified
MLKINPLSTLYVGIDVSSKSNYVCALDFFKNKYINSSFANNQPGAEELALKILECLNQHPDLTMVVAALESTSVYSIHIANYLSSCEELMRFKPYVFVLNPKCTANYKKSYIGLGKSDPIDAFVIADYARAGNIESEPWRGSQFLALKRLTRHRLHLVECMTREKTYLISNLYLKFSELQMLEGDDQPFCDIYGATSSSVLMVYLSPEEILASSEEDLIAFLAEKSCNRLKDITKTADLLKKAARDSYRLDKALYEPLNVSIASSFNCIETFKREIKVIDNAIEKEIKGLNPNAFIILQSIDGIGPVFAGGIIAEIGDITAFHSSDALAKYAGLTWKSNQSGDFDGEDTPMIKAGNRYLRYYLGEAANSMRKHNVEYGAYYRKKYNEVPKHQHKRALALTSRKFVRLVYGLLARNQLYSGVSLDTSIKDSN

SEQ ID NO: 488631 - protein, 322 aa, unidentified
MRYIGIDVSKATFVVAYSSDKGGEIRTFNNTTTGIKQFIGALPKDGSIHCVMEATGNYSAMLLYLLNVAGIAVSMENPLKIKNFARAMLSTVKTDKIDARLIALYGEKMNPQPFKIQGEAILRLRQKRTVIRQLTKQITAMSNLRGSLACLPVPDKGATHTVDETIEFLEKRRDRLQSELTDLVEVEFSRQLALLTTIKGIGITLATALIITTGGFTYFQNAKQVSRYLGICPTYEQSGTSVNIRGHINRNGDVYTRGLLYVAAWTASRFNTKCGETYTRLRQNGKPGKLAMIAVANKLVRQAFAVVTHDKEYVDGFVSNRP

SEQ ID NO: 488632 - protein, 344 aa, unidentified
MKDIKVLGVDLAKDVFQLHGVDGSGKQILKKRIERDKLPEYIGNLPQCTIVMEACGGSNYWARVFQRNGHAVKLISPQFVKPFVKTNKNDANDAAAIVDAASRPSMHFVPVKQVEQQDIQSLHRVRSRLVKNRTALINEIRGLNLEYGIAIPVGALKVKSHLRSIIDDQKNELTTSSRELMEELYDELIEAEARLKNMEKKIKLICKENDQCRRILSIPGIGELTATAIVAAVPNANEFKNGRHMSAWLGLVPRQSSSGNKQVLLGISKRGDRYLRTLLIHGARSALSRCKNTETKYGEWLQDKKAGLSFNKAAVALANKNARIIWALLKTGKEFDLNQQMVAA

SEQ ID NO: 488633 - protein, 432 aa, unidentified
MEKMRTHAAGIDIGSRHVFVGLESGPVRSFETFTGDLVALSKYLLENRVTTVAMEATGVYWYVLHDILSDAGLDVWLVDGRQTRQLPGRKTDVKDCQWIQQLHSYGLLNRCYVSEGLIKELRSYQRLREDHLRSASMHIQHMQKALIEMNIRLPEVLSQIHGASGKALITAILSGERDRYKLLSLCHKKIKDKKSEEVLKALEGHYTPHGLFALEQAYKAYLFYQGQILECDRKIDSTLQQINKDKQLPPGTNTGNRKPIRHNKPQVKDLGGHLLKIFGGRDATKLPGFTDYNWFQLYTEIGADLSQWSTEKRFANWLGVSPGQDRSGKRNKSKSKGKPTAGQIFKEMARSLLNSKYIGWGAFARRLRGRKGPAIAIKATARKLAVQYWRLMVKGNDFVEKGIEAYDNILKEQKQKHLQKLAIEFNMELVPI

SEQ ID NO: 488634 - protein, 322 aa, unidentified
MLEAVVGVDIAKKKCDVALFMNGKFKHKTCLNNRQGFEELSQWLKRQGVERVRVCMEATGTYGDELATYMHDAGHTVSIVNPARIKGFAQGELLRTKNDKVDAALIARFCVAMNPVVWTPPPLEIRRLQSLVKRADALIVMRTQEQNRFGTAHETIESSIKEHIGYLDQEIEKLKRQIAEHINSDPNLRTKRDLLSSIPGIGEATVAFILSALHIFEGVDRVQKTVAFIGLAPREMISGSSIKGKPRICKIGHARLRKALFMPALVAMRYNPVMIDFCNRLRKKGKNGKVIVCAVMRKLVHLIYGVLKSGKPFNPNYKPNFA

SEQ ID NO: 488635 - protein, 389 aa, unidentified
MLHDHPSDGPAAIRTQFGAIFVSLELSRSNWLVTSLSPGKGEKMSKHGVTAGDVPGLLKLFADLKRKAEARTGRSYPIITIQEAGLDGFWLHRVLQQEGIESHVVDPASIATPRRQRRAKTDRLDGETLLRALLAYKRGEPRVCAMVVAPSPEEEDRRRLCRERRTLIAERIVHVNRIKGLLFAQGISDYAPLRRDRRARLEALRTGDGRALPLHLKAQISRELDRLEVLLDQIKTVEVEQDALLAAASKPAGKAAAPDPVTMLLALKGVGANFAAVLWSEAFYRQFANRRQLAAYAGLAPTPWRSGGIAREQGVSKAGNPRLRTTMIQLAWLWLRHQGQSALARWFEAQSKRGRKSAIVALARKLLVALWKYISAGVVIEGAKMKSAA

SEQ ID NO: 488636 - protein, 341 aa, unidentified
MEEVSTIGLDLAKHVFQAHGARVSGAVVFRKKLRREQVLTFFASQPRCLVAMEACASSHHWARAIGELGHEVRLIPPAYVKPFVKRQKNDMADAEAICEAAQRPTMRFVAVKSEAKQAAAVIFRARDLLVGQRTQIINALRGHLAEYGLIAPQGPSHVERLITQVEDPASGIPDAARSCLMRLVEMLRRLQDEIAELDREIAARAKTDDVARRLMTVPGIGPLIATAIEALAPPAETFRSGRDFAAWVGLTPVQRSTGGKERLGRTSRRGERTLRRLLIIAASGVVRWAKRKGVPPGSWLARMLARKPPMLVIVALANKNARVAWALLTKGGMYRAPAVTA

SEQ ID NO: 488637 - protein, 587 aa, unidentified
MSTAKLTEVILGVDTHLDVHVGALINANGQLLGTLAVETQTRGYLKLLTWARSFGRLQRAGVEGTGTYGAGLALELRENGIAVFEVNRPDRSKRRLEGKSDPTDAESAARSVLAGSATVIAKTHSGAAEAMREISVVRRSAVKAKTQAINQIRSLLVSAPQEIRERLWDVKPAICVDNCAHIGSLGHAPFLSALTTSLRLLAKRWQAFAAELQELDDTLDSLTQQYAHRLRSQFGVGPQTAATLISVAGDNPERLKSESALAALCGVKRDGRNFGYGRQMSYAGPQALKDMFRGGHYGTVKAHSDRWQAFVRWCRSDDGPGLNDARQIDRQILSDYAAHLRHLVERGDFTIATAQNRLSSVNRTMAALRGDQRVKVPSPSKALEMQRTTIRTTVPQGQDREHVMLILDALRKQHPRAAAIAQLARSTGMRLREAILADLPRLQREVEHYDKINIQDGTKGGRSGTSAPRWIFANDHIREALNYAEHVSPTGSRNLLAPNESYRDFLREVVRLARGILQTYHLKGFHELRAAYACERYEQITQHPAPINGGHCYQLEQRLDREARVQISYELGHGRIDIVSAYIGGRA

SEQ ID NO: 488638 - protein, 403 aa, unidentified
MNSVGIDISKGRSTIAVMRPFGEVVISTFEVCHTDSELSALARRLKSLNGETRVVMEATGNYHAPVAKLLHDAGLYVSVVNAKLVHGYGNNDLRRVKTDRKDAVKLANYGLDRWLTLPRYVPEEDTRLLLKNCYRQYRQYSKVQTVLKNNLISLLDTVFPNANRLFSSPIRGDGSEKWVDFVAEFWHCRCVSEKSEKAFTNKYQRWCKKHGYNFSEAKAHAIYEEASRHIGVMPKSETTRLLVEQAVSQLRATSAALAALKQEMQSLASTLPEYPVVMDMFGVGPSLGPQLIAEIGDVRRFYSKKALVAFAGIDAPPNDSGDVTGRHKSMSKVGASSLRRTLFLVMSVYLQRAPLDEPVYQFMDKKRAEGKPYRVYMMASANKFLRIYYATVKAYLESLEHAA

SEQ ID NO: 488639 - protein, 338 aa, unidentified
MDRQYVGIDFHRRRSVIVRLDGNGERLGLHRIVNDPGELMAVMALCGEGPEVVIEATYGWYWAVQLLQDLGARVHLANPNALNWGDRRVKNDELDAHDLADMLRLNRLGEAWIAPPAIRELRELVRYRAKLVQLRTGLKAQVHAVMAKEGVLPKHTDMFCIGGNRQLDAMELGAPFAHRVRSLRELIAVYDREIVQLERDIHQHLKHDRGYQAIQAINGVGKISAAVLVAEIGDVTRFPTPQHLSSWCGLTPKHRESDLKTRRGRISKQGSRLVRATLIEGISRYHGGSILDAQYRKLAKRRGRNKARIALARKVLTLVYYGLRDGEIRCLAKAETAA

SEQ ID NO: 488640 - protein, 377 aa, unidentified
MSSSDAHSSPVDASGFAYVVGIDMGSQAYVYSVLQPDKRPVSKPTELANSRVGFEQLHGCLRQLAVPPQRVLIGLEATSRYSENLYQFLKEQGYALCLLHPRQTHQFAQQRGLRAKTDRLDATTMARLLLSGEARRGYVPDELIATYREVERLHSQLTDDSARYQNEIQALLVVLFPEFVQVFADPCRPTALGVLKRYPSAQAIVAAGVEALTTTLRELAPRHYGRPTAQELVRLASQSAASGLATPARALSLRVLCDQLEHTLVNLAQVAQELDQLLDRDQGASGLKSTPEFGRKTVAVLRAELGDVTRFQRVDQVVAYVGLDLQVRQSGQWKGQVKLSKRGSGRVRRVLSMAALRCICLPASAFGASIGVWSLVA

SEQ ID NO: 488641 - protein, 388 aa, unidentified
MQVIADRPEAPSAIRTNLGAIFVSLELSLSTWLITSLSPGSGEKMSKHMVQGGDIAGLLRRFAQLQEKAQARTGRNFPIIVIQEAGLDGFWIDRVLKNEGIESHVVDPASVATSRRRRRAKTDKIDGEALVRTLLAYKRGEPRVCAMVKAPTPEEEDRRRLCRERKVLITERVRHVNRIKGLLFSQGVCGYEPLRRNRRLRLDELRTGDGRPLPKHLKAQISRELDRLELLLEQIKAVETERDALLAAQQIAAPSSAAMLLAIKGIGPDFAAVLWSEGLFRHFDNRRQIASYAGLAPTPWKSGSIDREQGVSKAGNPRLRTTLIQLAWLWLRHQPQSALTLWFKERVVRNGGRLKKATIVALARKLLVALWKYVTAGVVIEGAIMKAV

SEQ ID NO: 488642 - protein, 427 aa, unidentified
MNYTQNKKIKQVKETTLVIGIDVGSEYHYARAFDWRGYEYSKRALKFNNTELGFREFKGWIEQIQKAYGKREVLPGMEPTGHYWFNLGKYLMDQGMNPVLVNPHHVKKSKELDDNNPSKTDRKDPKVIAGLIKDGRYSYPYLPEGVYADLRIASNLRFQIQSEITRMSNRIQKWISIYFPEYMKVYKSFSAISSIMVLKVAALPEDIIRIGVEEINQIWRKAKVRAVGMKRAKALIKAAEQSIGSKDGLIAARMEIAMLIEEYESKKRKLERVMELIEELCQKIPMTENLLGIKGVGIKTVSGFLAEVGDIRRFDNPKQLQKLAGLALVEDSSGKHKGRTKISKRGRKRLRYLLFEVSMSLVSKNPEFRELHNYYTTRKKNSLKKMQSLMAIACKLIRVFYAMLTKGVVYDAKKMMGDIKRPVQQAA

SEQ ID NO: 488643 - protein, 352 aa, unidentified
MRTSQKIAGIIATIGIDIGKNTFHLVCFDQRGVIVLQQKVSRGQLERHLANIPRCLIGMEACSGSHHIGRQLAALGHDARLIPAQYVKPFLKGHKNDYRDAEAIAEAVQRPTMRFVTIKTSEQMDLLALHRVRSRLVSQRTGVINQIRGFLIERGITVRQGAAPLRRVLPDILSSNTGVLSPRMVGLIADLAQDWRRLDERIAAVSAEIEALAQQDENCQRLMTVPGVGPIISSAVVGAIGNGAGFKQGRDFGAWLGLVPKQESTGDRTILGKISKRGNIYLRTLFVQAAHVVLKRRSSAAMRGLWPWIEQASKRLHRNLLAIALANKLARIAWAVLARGRAYQTRIVANAA

SEQ ID NO: 488644 - protein, 450 aa, unidentified
MSPLALDVVTKTDKTPVLGRMLSKYVGRKTSSIENGITKARNHSRQRGNIMRVVFGIDVSKASSEVAILVNGEKVHGYTIPNDAIGFNRLLGDLKTVHQPEIVFEATGVYSRRLQAFFEDNSYTYTRLNPLESKKQLDSLRVRKTDKIDAEKLAMSQFILNRKPSYVQEALYQELRDLSRFYQNLTEDIVCAKNRLHKVLQITFPELENILSAPTGEQYWNLVITFPCNSFVLESDDATLTAIIRQSTAKRISEKRVTYLVDKLTKLANQSYCEVKKTSPMMEEIKYYAGELLRLSEYRQSVLEKMITLAQPLPEYEILLSIPGITETTATSIIGELGDIRQFHSANQINALISIDLSHYESGDFLAKEHITKRGNPYARKILFKCIHNIASASHTNPCHIADFYEKRKRQSQVTSTKPHTIASIHRLIRTMYYLITHNKLYDYTSIQNR

SEQ ID NO: 488645 - protein, 402 aa, unidentified
MNAVGIDVSKGKSMVAIMRPFGEIVSAPFEIKHTASGINSLVELINSVEGESRIVMEHTGRYYEVLAHQLSEANLFVSAINPKLIKDFDNDSLRKVKSDKADAVKIARYTLDKWQNLKQYNVMDELRNQLKTMNRQFGFYMKHKTAMKNNLIGILDQTYPGVNTYFDSPARSDGSQKWVDFASTYWHVDCVRKMSLNAFIDHYQNWCKRKKYNFSQSKAEEIYGKAKELVPVLPKDAITKLIIKQAVDQLNSASTTVESLRTLMNETASKLPEYPVVMAMKGVGTSLGPQLMAEIGNVSRFTHKSAITAFAGVDPGVNESGTYEQKSVPTSKRGSADLRKTLFQVMDVLIKTHPQDDPVYQFLDKKRAQGKPYYVYMTAGANKFLRIYYGRVKEYLSSLPES

SEQ ID NO: 488646 - protein, 392 aa, unidentified
MLYLGVDIGKNTHVASMMDESSKIIFKGFSFSNTTDGGESLIAKLTAYPVSEIEIGLEATGHYWLSVYSFLIEKGYFVHVINPILTDGWRKGTEIRKRKTDTIDSVLIADLIRYGTFVETHLSDETMMSLRNLCRFRGYLVDSVSDLKRKVICVLDQVFPEYQLVFQNVFGTTSKELLLQFTNPMELEELSVESLAELLSKLSRKKIGYDKAEKLSAFAEKSFGVTFCRDSFTFQLKVMLEQMKFIEQQIADTEKEIKALLGKTGSFITTITGIGVVTGATILGEIGNIHKFDSPSKLVAYAGIDASVRQSGEFEGTQNKMSKRGSPYLRKALFQAALVASNGRNPDPELRDFYLKKISEGKHHLTATGAVARKLCYIIYTILKENRPYIKH

SEQ ID NO: 488647 - protein, 491 aa, unidentified
MANRKISTFERLQRGKLSRKQCKELGRRLQSPNPGLEIIHRNAAGIDVGSGSHFVAVPPDRDTQPIREFGSWTAALHEMAAWLKSCAIDTVVVQATGVYWVVLSDVLEGAGLKVWVVNAQGTKNLPGRKSDVQECEWLRKLHTYGLLRNSYRPPEEIRGLRDLWRLRERLVADAGRAVQQMQKALTGMNLQLTNALSDISGVSGMAIIRAIVGGERDPWKLAQLRQPGVRASEAEIAENLRGTWREELLFELRQVVAHYDFLGKQVVELDQLLEKRMAAMPSREVATKGSPVAEKEEVPEGKRRGRKPKTKVKPPPKNAPAFDIGRELTRLLGVDLRTIDGVNIHIAQTVYTEVGPDLSAFPTEGNFTSWLGLTPMRSVSGGKVIKHEKKRVKNRLADALRMGASTLERSQSYLGARFRYLKARLDGRRAVKAMARYLACLIYRLMTKGQAWIDRGEAYFEQKKAERELRTLQNRAQKMGLQLVPLATVNA

SEQ ID NO: 488648 - protein, 469 aa, unidentified
MKRKSHRNKGQKMSPFSGDLQLIEPDAAAVDVGSRSHWVAVNPERDPNPVREFGTFTTDLMSLADWFAQCEVKSVVMEATGVYWVSLYDLLEERGFKVYVVDAHTVRHLPGRSKSDVKDCQWLRRLHSYGLLRGCFRPPAQIRQLRNYQRSRSNIVDAAAQQQLRMQKALTLMNVHLHHVISDISGLTGLAIVRAIVGGERDPKQLARLRDPRIVASKETIQKSLEGNWQEELLFDLKIALESYDHFQGQINAYDEQIRRELKEVPSKVDLLQQALPAGRLRVCRKRPGMSQQDQLELRAELYRISGVDLTRIDGISLQTAQKVFFEIGTNVSAWDDEKKFSSWLGLSPNHRISGGKVLKRSSRKVVNPLSTALRLAARTLRNSHSALGANFRRLIAKIGMPKAITAMARKLAVLIYRMLKYGTQYVDKGMQHYEAKYQATKIKYLRAQAATLGMILLPKHSAGAGATT

SEQ ID NO: 488649 - protein, 332 aa, unidentified
MYLGIDVHKRYAQVAVMDEAGKIVEEVRVENANLDDLAQRYAGAQAVLEATSNYYHIHDTLSEHLDVTVAHPKKINQIADTDKKTDRVDAKELARMLRLNSVPESYVPTEEVREARALVRGRQTLVENRTKYANKVHGLLSDHGITEDVKPLTVEGRESLRGLSIPTPFDTLLESYLDLIESLTEEIQKLDETIEERAGSLKETQLLMTIPGVSYYTALTIYAELGGIDRFDGDKEVVSYVGLNPVIRESGDSRIEGGISKRGSGRVRWLLVQAANTAVHTSNDEYLSRFYDRLASRKNSQKAIVAAARKMLVSIYHMLDRGEAYDPPGVTA

SEQ ID NO: 488650 - protein, 384 aa, unidentified
MYFVGIDISKFKHDCAIIDELCDTVMPSWSFSNDREGFSHFKALLDSLEGEKKIGLESTGHYGQNLKQFLESNGFTFMEFNPLLVSRFVRSKSLRNTKTDSIDALSIAQYVMTVEYKPYPSSFYHLDKLKSLTRFRNSLVRQRSKQLVELTNVLDKLFPEFKPFFKDKFSVTALYILAHYQTPERIANMNARSYEALRKLSRGRFTLSNFIQLKALAKNTVGTQSDYLLDQMNILLELYSQLDSKVDELEAQIKECVRGIDPPCLSIPGVGELSAAMILSEFGDFSKFQNPSKMLAFAGLEPGYFQSGQSEYTGHMVKHGSSRLRYALMNCCLPLISNEPVFAAYYAKKRSEGKPHRVALTHVAKNFCGSFTHCKLKISVMIRP

SEQ ID NO: 488651 - protein, 357 aa, unidentified
MEMFHQPGEATEMKVTTIGIDLAKNVIQVHGVDERGKAVLRKQLKRAQVAAFFANLPPCLIGMEACGSAHHWARKLQSFGHSVKLMAPQFVKPYVKTNKNDVADAEAICEAVSRPNMRFVPIKNGEQQAVLALHRARQGFVKARTAQANQIRGLLAEYGIVIPQGIAHIAKRLPEILEDGENELPGAFRQLLDRLGDHLKELDRQAGELEVQIQSWHRENEASRKLAQIPGIGPITASALVASIGDAKSFENARQLAAWLGLVPRQHSSGGKQVLLGISKRGDTYLRMLLIHGARAVIRVAEGKAGYADSWLARLMGRRNKNVAAVALANKNARTVWALLAHGRDYQADYEPERAAT

SEQ ID NO: 488652 - protein, 348 aa, unidentified
MSIKRILVNTIDTDLEYEVIGIDLAKNCVSAILLTTDGEIFGIDRLDYQELEKSAQELSPTIFAMEPCTEMNYMVQKLEDWGHHCIVISGKNVKDYVESHFSNQKTDLNDAQALAFLTKDTQLRTVKAKDPEQLKYASLTTLREQYVKQYRQTMVSLKGICQVWGLSISKGISGKARLKDMIENHAAFPAELRTALVGMVAHAQAVQKDLKSVTKILEELAKKDKACQLIQTVPGLGTICSCRLRATVGDIQRFKHPKDFPAYYGLVPRSMATGHNEKKGKITHRGDKTMRSLMVQGAGIVINQATKGNLHSKQLTKWILKKQKEKMPWGKLVCAVAAKLLRIVREAL

SEQ ID NO: 488653 - protein, 363 aa, unidentified
MIVIGADIHKSTHALAAVSRDGGTIAGELEIRADEGGHRAALRWARKLDEERLWAIEDCRHLSRRFEQALIAAGERVVRVPPKMMGQARRGEREPGKSDQIDARAVARAVVREGVERFPAAFLDEQAMEIRLLHDHRADLVTERTRQINRLRWHLVDLCPELEAKIPARQLDTEGMLDRIARRLRREERSARTRVALELIASIRSISRQANVLERELRMLIGAYRPTLLAEQGLGVLTAATLIGRTAGVERFPTDAHFARQAGVAPIPVSSGRTDRHRLHRGGDRQLNRALHVIAITKARIDPQTRAYLDRKQAEGKTKKEALRCLKRHLARRVHHLLSMPPTDPDRRTRIQLNAAISVPCLT

SEQ ID NO: 488654 - protein, 494 aa, unidentified
MNGQRVRLRFNRARILLEEGTNMIRSVGIDLHQGQHRARCLDERAQPCDSFSFQTTPEGLATLEEHVFRDGANPIIVLEPAGLPWLMVAVYLRSCHPDCRLVKAKTQKVAALRRYLRGPVKSDRLDALTLAKMPFIDPEQMDEIYLPPAEIHALQRLTRQRKRIEQDITGRKVRISAIVDGYLPGVRRTFNDAWSSPIRAFLRSRLNPFIIVRDGEDALHAFLSKNSYHSKWSKEQTRLVFLACQSVAAVCKLSEPAGTVNEDFFMDLQDEIARELRMLEADEIESEALARRIAELYQKLHSSDNLRTIPGVGEHTAPIFLATVGDPARFPNQSAFANYEGVVPGARQSSNVEAKGLRMTKAGPSIMRMALYQAGDIGRRWDPQLAAVYYREMVYHGKNHKQAMGAVMSHLGARILAVLKEDRPYELRDPEGKLISKDETRKLILSKYHVSEDIRRERRRRNSKISKARETATYRTNEAAEAPQPVPVQAVSRK

SEQ ID NO: 488655 - protein, 407 aa, unidentified
MRVPAALEKAWAGIDVGKGHHWVCVVDQDGRQLLSVKVANDEAEIAAVIGSVTGLAGNVTWAVDIVGAPSALLLALLSQAGQPVRYASGRLVAAMSGAYSGEGKTDPKDAFVIAETTRLRRSLPVIDHKTDLVRNLGLLTARRADLVADRVRMINRLRDVLTSVFPALEREFDYSSCKGALVLLTGYATPARIRRTGQARLAGWLQQRRVRGYAGVAARAVAAARSQQITLPGQDIAADIVAELAVGILALDQRVTELDRQIAAMFAEHPQAEVIQSMPGFGPILGATLLVTAGDLAAFPTAGHLAAAAGLVPVPNDSGRRAGNLHKPRRYSRPLRRVLYLSAQTSMMRDGPSRDYYLKKRQHSRTHNQAVIALARRRSQNLPSRNHAFFVRQSHRLSGKNCSVCCL

SEQ ID NO: 488656 - protein, 373 aa, unidentified
MKEFSKYVGMDVHKETIAIAVAVAEARGGEVRYLGEIANAPEAIQKLVKQLRKEDAQLSFCYEAGPCGYGIHRQLTDLGWDCQVVAPSLIPKKAGDRVKTDRRDSLSLARLHRAGELTAVWVPDEAQEALRDLTRAREDMKHLQRQAKQRLSAFLLRRGQSYGGKSAWTQAHYRWLEGLKFSQSVQQIVFQEYVDTVKLLSQRVAALDEQLSSAAAESILWPVIEALMALRGVSLLTATTIVAEIGDLRRFASAPQLMAYLGLVPSEHSSGGSKSRGGITKTGNGHVRRVLVEAAWTYRHPARKTACLQRRAERTPEAVQDIAWKAQKRLCARYRSMEGRGKLKVQACTAVARELAGFIWAIGQALPPPSVRA

SEQ ID NO: 488657 - protein, 366 aa, unidentified
MKKQTRQVISGEGLVKYVRRVLNLGLDVHYWQVTVAMQEDGGRIKSAGKMGHPEFLNWVLKKLEEGWEIYSCYEAGASGYWLHRKLVELGVKNLVVVPKAMGRGGKKQKTDKRDAGELCDSLDRYLRGQKKALSVVAVPTEEQEEKRALIRYHRQIMKDRGRCEARGKGLLCAQGIEVRGRWWQGDTWLALTSDPRLKDWMKEQLVGWRSKILSTDEEQRALRQRIAALAPALLPKGVGAYSAAVLHYELRGFDHFKNRRQVGSITGLCPGVHLSDGRGKEGSINRCGIGIVRWTLVEMVWRLMIWQPQYPPVRRLASGFVKSKRAKKRLVTQAARRLAIDLWRLSTGQTTPEKLGLVMQYHPPAN

SEQ ID NO: 488658 - protein, 347 aa, unidentified
MVYVGVDVGKSKCRAAMMSQEGKITEEFDFKNDSEGISRLASMLTVDDRVVMESTGAYWLNLYNHLDELHIPVVLANPLQTKAIAHGRIKSDRVDARILAHLLRADLIPECYVPPKEMREIRSLVRHRLSTVKLRTMTKNKIHALVDRNGVKHEFSDLFGKSGVQWLKSLELSSLDRLMLDNHLLLLESLNVQIERVDAEITARATLDGDVRLLLSLTGVGVYTALLIKSEIGTIGRFPNYKKLVSWAGLAPSLHQSGNVEYHGNITRQGSRMLRWIMVESARVASVRDPRLRVFYERVKARRGDQKAVVALACKMLKIVWFMLTKREPYESANEKGYWKKLNSLNS

SEQ ID NO: 488659 - protein, 457 aa, unidentified
MGKNKKHNMHNSEFKQINFNAAGIDIGAESHYVAVPEGRDIKGQDVRNFGTFTSDLYAIADWLSQCQIDTVALESTGIYWIPLFEILESKGFDVRLVNPRFIKNVPGRKTDVVDCQWIRQLHSYGLLKGSFRPEDQICILRSYLRQRALLVSYASHHIQHIQKALEQMNIKLNQVIRDITGTTGMSIIRAILAGERNPKKLAQLRNSRCKNDVKTIAKALHGNWRFEHLFALQQAVELFDFYQKQIADCDLQIEQHLAGFEDRSDGQPLGKSRKATGRNKLSFDARTHLFQMTGVDLTKVDGLDSLTVLKIISEIGLDMSRWPTVKHFASWMGLSPGSKISGGKVLSAKTKKCASRAAHYLRLAAYSLHNSKTAIGAFFRRKKGQLGPAKAITATAHKLARIIYNMLQTGTEYKDMGQDYYEQRYKDRVLQNLKRRAKQFGYELNNVKEQQELIQIV

SEQ ID NO: 488660 - protein, 340 aa, unidentified
MSEAIALVGLDIAKSIFQVHAADQQGKPILRKKLKRDEVEAFFEGLPSCRIGLEACPGSHHWARTLRQLGHDVRLLPAQYVRPYVKTNKNDAADAEAICEAMTRPTMRFVPIKEEGQQEILVLHRVREMLMRQRTQLINGIRGHLTEFGIVGPQRAHRVGLLIEVIRDESDHRLPMAARQALQLLVEQLEQVAVKLAAIDKELIALARENETCRRLMTIPGVGVVIATAMLAATRDPADFKSGRHFSAWLGLVPRQNSTGGVDRLGGISKRGNGYLRRLLIHGSRSIMRWRSKSWVWLAKLRARRPANVATVAVANKTARVIWAMMKFGGVYGAPMRRSA

SEQ ID NO: 488661 - protein, 464 aa, unidentified
MTAGKKLWRNRKERKEWARRLQSEDPGLDVVHPHAAGIDVGNAVHYVAVRPDRDPEPVRRFECFTVELHRLADWLQSCGVKTVAMQSTGVYWIPLYEILEERGFEVYLVNARHTKNLPGRKSDVQESQWLLKLHTYGLLNNSFQPVSEIRVLRTYWRQRGEHVREAATCIQRMQKALTQMNLQLANVISDISGLTGQAIIRAIVAGERNPLKLAALSDPRVRASREEIAKSLEGNWRPELLFVLQQEVDMYDIYQKRIAECDQRLQKHLASLTHPLPLQPPTQKPKTKKPAAKNAPRFDLSSELQRVTGVDLTLIDGIDVMVAQTILSEVGLDMSRWKTESHFASWLGLCPDNRISGDKVLGRGTRRVVNRAATALRQSANTLMRSRSYLGAQYRRLRTKLGAPKAITAMAHRLARLVYRMLKYGQAYVDKGTEYYEERFRQQQIQLLRKRAAKLGLQIAEIQA

SEQ ID NO: 488662 - protein, 352 aa, unidentified
MKVCVGVDVSAASLEVAWRTNGGRLQRGTFDNDAAGHQALIRRVRSTGLPVLVALEATGSYGLDLAMAMERASGIEVMVANPRTIADFGRALLQRSKTDRIDAETILLYVERMPFIAWRAPSQTVLELRAITRRIAALGKIVRAEKTRTHAAEASESVGRILRKSMRSTVTMLGREIAALRRTARKVIAGDSMLERRFELLTSIKGIGQISAIQILAELMLLPADMTDRQWVAHAGLDPRAVESGTSVRAARHISKAGNHYLRAALYMPAVTAGRYQANVQAFREHLLARGKRPKQIHVAIMRKLLHAIHAMFNNNTAFDGSKFYQAAAGAAAATSGIASSAISEASAARLA

SEQ ID NO: 488663 - protein, 312 aa, unidentified
MFVGIDVAKQELVVAVRPSGDQWTVANTPAGLGALVTRVQALAPRSVVLEATGGYERACAAALATAGVPVAVVNPRQVRDFAKATGQRAKTDRLDAAVLALFAERVSPAIRALPDEAQADLAALLLRRRQLTEMLVAEKNRVGLARPAIRRSLHKHIAYLERELHIADSDLGEAIEASPLWRVQDDLLQSVPGIGPVTAQTLLAELPELGQLSRRAIAALVGVAPIAHDSGAMRGKRAIAGGRAAVRTVLYMATLVATRCNPVIRTHYHHLLAVGKAKKVALVACMRKLLTMLNAMLRDQRRWSPPLTPTRT

SEQ ID NO: 488664 - protein, 485 aa, unidentified
MAKRRMSTFERLESGRLNRKQRRELGRQVAVADPGLTIVHANAGGIDVGNESHYVAVPPDRDPNPVREFGCWTAALNQIAEWLQSCRIDTVAMQATGVYWIALYDVLEQHGIQVVLANAQHTKNVPGRKTDVQECQWLMKLHTYGLLRDSFRLAQEMESVRTIWRLRDRHVKEAGRAVQHMQKALTKMNIQLANVISDINGLSGQEIIAAILQGERDPWKLADLKHYRVRASREEVARSLEGNWREDVLFELQQAVDSYHFAHRQMQECDRKLEGYLASLPARMLDIPVQPESTQAATPKKKTKKAKRPRGNQPHLDLKTELKRICGVDLTSIDGIDVMTALTIVSEIGTDVSRFQDETHFASWLGLTPAKDITGGKTIGRGKRKVKNRVAVALRTAATTLLKSDSYLGARYRSLRRKLPSFASAVKAMGRYLAVLIHRLLTKGEAWMDRGATQFERRHTEQELASLSFKARAKGFKLIPITEAS

SEQ ID NO: 488665 - protein, 340 aa, unidentified
MTIMMGLDQHRAQITAEWLDTETGEISRTRVAPADREAVRRFLARFSGQSLEVALEATTGWRFVVEELRAVGARAHLAEPAETSALRGNKKHAKSDRADARHLRELLMTGRLPECWIAPDHILDLRARVRLRHSLVDERGEWQQRIRAVLYHHGFPRRSDLDLLTAAGRDWLTELSLPAAARDQITIALTVIGTLDAQIPAIDKPLRAYARRQTGCRALMGHYGIGELTSIAILAELGDCRRFSSSRYAVRYGGLDITVHASDRRRAPGHLSRQGPPVLRWALYEAAQAATRPSSPDHAYYRQAAQRLGHNRACLAIARNLLKRSYHTLKELGDQALAPA

SEQ ID NO: 488666 - protein, 334 aa, unidentified
MQRNKISFKGQKIFVGIDVHKTTWEVAVLTESGLLKRHPQEASAKVLFDFLRKHYPDGEYHAVYESGFSGFATYYALKEFGIECTIAHAADVPTTQYENVMKTDKKDAEKLARALKNGEIKRPVYIREKDNIDDRAVIRIRKTIQKQLSGYKARIKHMLHCNGVEIPERFSKPTSHWSRAFISWLMQDVKLLSSTRRSLDLLIRQVEVIRGTLQEATRELRKLSQTERYKHRFELLMTIPGIGQHVSMCILTEVWEVSRFPNERAFAHAMGLVPTCHDSGPHKSNGEQTFRGNRYLGPMIIEACWVAIHKDMGLAACWMAFTYSRLRPSIFPFL

SEQ ID NO: 488667 - protein, 351 aa, unidentified
MKTIVKQVAGIDVAQDELVVCLGKMYDDWTPELYAHKTFANTAKGFVSFTEWVNRLADVSVPVRFVMEATGVYHESLAYYLDEQGLEVSIVVPNKISNYARTLTVKTVTDKTASEAIARFGLERKLDQWSRPKGIFKKLRQLTRERGQLVDERTVLKNQLHAEQAEAEPYKKSIERIKKRVVLLDKQEKEILEELRSLIKTDSEMQQLVILLCSLPGIGILTAATVLGETNGFDLIRNKRQLTSYAGLDVKEKQSGTSVKGKPRISKKGNKHLRKAMHMPALAAIRHDERFKAIFARLISKHGIKMKAVVAIQRKLLEMMYILYKTNTPYDKHYLENKNQKAGSINDRVKN

SEQ ID NO: 488668 - protein, 363 aa, unidentified
MSEITRGQAVRVGADLAKRVIQVHAVDAAGHVLTSRALARDKFLLWCAQLPAGCIVAMETSSSAHHWARKLIALGLDARIIAAQLVSPYRKQGASGKNDANDAAAICEAASRPQMHYVPVKSVEQQSMLCVHRLREGFKAERTACINRIRGLLAEFGLVFAQSPARLAPVLADVLEDASNEMNTLARLVLQRAQTHWGELDAHIAWCDERVAAHAKDNVAVKKAATLIGIGPLGASAAVATVGEFKQFRHGAQFGAWIGLVPRQHSSGGKNNLGGITKRGDTYLRSLLIQGAKSAVMTAHKRNDPISQWAAALRDRVGWQKAAVALANKNARILWAVMTKGEAFDARHVSIKPGAPAPASASE

SEQ ID NO: 488669 - protein, 374 aa, unidentified
MTTTTTKHDKETIVMAIEVSNSNWLLGFSNGEKKSIRNVKAWDLEHFEKEVEKAKTKLKVDEKAIIHCCYEAGRDGFGIHRYLESVGIHNNVIDPSSIDRDRRWKHKKTDRIDVKKMIELQEMRYYMDNKKYRVVRVPSVEAEDERRLHREWDRLKKERTGHINRIKSLLVMHGIKVKSVQSLDIVEIRDWANNPLPPMLREEIVREQERLALVEKQIRTIRQKREQRIKHPENRSDEIVCRLLMLKSIGPQISWTLVKEFFGWRTFKNRKQVGSLAGLTGCPYNSGTMNHEQGISKAGNCQVRTLAIELAWLWLRWQPNSKLSKWYNERFGDSGDRLRRIGIVALARKLLVALWKYIEFGIVPDGAVFKTVAK

SEQ ID NO: 488670 - protein, 348 aa, unidentified
MRVKPIGAVVYGIDLGKSSYHVVGTNQEGRIVQRATLSRATIFAFFSNAAHSLIGMEACPGSQWLARRLESIGHSVRIIPAQFVKPYVKSNKNDAIDAAAIAEAVTRPSMRFVRVKPVDQVELQTLHRIRDQLVSSRTSLICQIRAYCLEFGIAMRNGVGVFKKDFPQVLSAESNDLTPTMRRLLGDLWSDMQGLEGRIDQLTKEIDAIASRSDAALRLMSIPGIGRLGATALIAAAGDAKQFAKGRDMAAWLGLVPAQYSTGGKQTLLGISKRGNRYVRWLLIHGARSCLMHLDRSRDRLGRWLDQLQARMHVNKVVVALANKLARIAWTIMTRPGAIYTRDTATAA

SEQ ID NO: 488671 - protein, 394 aa, unidentified
MRFAGVDIASETHVVALVDEDGKVLVKPTAFTEDAAGYEKLFEQLGTSAELLVAMEATGHYWKNLFAALAARGFSVALLNPLRTHRFAEEDLQRTKTDAIDALGIARFAAQKRPPPTRLPDPATEELRELVRLRERLLQDFGDRVRQLHRLVDLGFPEFTRYVKSLDSELASAILHDYPTAAAFRGVSAKRLAALRYDGRHQVGAELAGLLIAAAKHSVGHHHGEAYRVQVRYACEDLDILRRRLRQLDRDIAGTLGAHEVGTLLTTIEGIGPNTAARLIAELGDPAAFRAPGALAAYVGVVPALSQSGKRKNTRAATTPIGNARLRAALWMPTLTAVRRNPWLRAHYLRLLARGKLPKVALVACMHKLLLAVYSVAKNRRPFVAHLATVETTP

SEQ ID NO: 488672 - protein, 339 aa, unidentified
MQLYAGLDLHSRNTYIGIMDKEFKRIFGKRVSNDLPLILKTLDPFQDQLQGLAVESTYNWYWLVDGLMDAGYQCVHLANPSAVKQYEGLKHSDDQHDSFFLAQMLILGILPQGYIYPKKDRPVRDLARKRLFLVRHKTAHILSLQSLIARCCGKRVSANEIRKFNVEDLQQLLEQEYIVLSAQANLDTIVFLKQQILQLEKAIKNKVKLSKQFQQLLTVPGIGLILAMTIMLEVGDIGRFAQVGNFASYSRCVSSQRLSDGKRKGHGNRKNGNRYLSWAFTEAAHLSRRYHEDFRSYYNRKVAQANTSLATKALSNKLARICYYIMRDQVAFQENLLSQ

SEQ ID NO: 488673 - protein, 355 aa, unidentified
MNQQNNTTISFKGQHFFIGLDVHKKNWKVTIRINKTQIKRFSMDPSPQQLSNHLRKNYPEGTYHCVYESGFCGYWIHRQLIDLGIDNIIVNPADIPTSHKEKDRRDDKIDSAKLARELENSSLKGIFIPTPQQQSFRSASRLRYQHRNNVTRIKNRIKMFLHFHGIQIPENYNSSYWSSGFIKWLSRVSFEYDYDKQYLDQYIAQLQYQRKLMTQVLLQMRDQCKNNNVLNCIRSVTGIGVISAFTFYSELIDMKRFKDLDHLASYVGLVPSKDSTGDKKGIKGLTPRYSRYVRYLLVECAWRAIGSDPAMTAAYAEFTTRMTKQQAIIKIAKKLLNRIRFVWLNEKKYVTGVVK

SEQ ID NO: 488674 - protein, 411 aa, unidentified
MDKVYDKCCGIDVHKKLIVACFRKGSKQELRNFGATTRELLELANWLQNGGCEMVAMESTASYWKPLYNILESSELKAMVVNASHMKAVPGRKTDTKDAEWIAELLQHGLLKASYIPDKQQRELRELVRYRKSLVSERTRELNRLQKMLEGANIKLSGTVSDINCMSARNILEYLLTGEFFDEAKYDEMYKQKIIAHNLKASKEQLIDDLNGVMTPLQRRMMKELLSHLDELNVHINNLEDEIDNFMKPEEKQATQAIQDVTGIGKNSSQAIISVIGTDMSRFPTAGHLAAWAGLCPGNNESAQKRKTGKMRKGNALLRSTLVVCAHSATRNKNSYFYAQFMRISSHRGKKRAYVAVAHSMLIAIYHILKDGVVFKDLGADYYNQFNMERKINAYLKKLKALGWEVPVVAA

SEQ ID NO: 488675 - protein, 440 aa, unidentified
MSVTRERSAPRIVAVEHAEQNRQTKAPTDGGATHGRRAMERQLERCCGLDVHKESIAACVRLGGRTGKAEQYVQTFGTTVAELLVLHDWLAAHGVTHVAMESTGVFWKPVFYALESDFTCLLVNAAHIKQVPGRKTDVQDCVWIAQLLEHGLLRGSFVPPAPIRDLRDLTRYRKALIHDRTRVANRLHKALEEAGIKLASVASDILGVSGRAMLAALVQGTTDPAVLADLARASLRRKLPALRQALANRFRPHHAFVLGQLLAHLDYLEEAITTISTEIERVMAPFAEPLRRLDTIPGINQRTAEVILAEMGPDMSAFPSARHLASWAALCPGQHESAGKHKSGKTRKGNRWLRTALIEAAAGASRAKNSALQARFRRVLRHRGPKKAVVAVAHALLRMVYHVWPTERSIAKPALITTIVTTANASRVVPSRRLNARATA

SEQ ID NO: 488676 - protein, 373 aa, unidentified
MPKYSTAFGMDVHLRSTTVCALDADTGEAVTRRFPGNPWGEIAGWMDGFPGPSLAAYESGYLGFAPQRELAGLGVECVVAAVSKIPRSAADSASKNDRNDAARMAKAILAHDISPVWVPSPEVEGIRDLAGAYDGATARLATAKQRLLAFLAKRGFVYGGTTPAGNPRKYWTYDFLRWLDKVGPEDGGGVRTLTALRNEVEAAAEARADLLSEYRAAVDASPIAAEAAALQSIKGCAFALAAAFSAEVGDFTRFRSGRQVTAYFGLAPSQRSSGDSVRLGGISGAGNALVRKLAVEGSWCYAAARHQPKLMPRDTGVPLEIRMHGRKGSERLLRRREEMLARGMPAAKANAATAAELVRWLWALGTMCREGAE

SEQ ID NO: 488677 - protein, 311 aa, unidentified
MENYIGIDISKSTFDVHYTADQRDACFDNTDIHIEAFAKLMSQIDPVLIVMEATGGYERPLAAKLHEKGMPVAVENPRRIRNFARAVGQLAKTDMLDARIIARYAAVIKPAAQTAVDVVSLKIKELNTRRQQLLNIRTAEKCRTEHAEDEGVVRSINTVIATLEYEIETIEKRISTLVSKNVKFKQKAAIIMSVPGIGAKTVGMLIGALPELGCLNRRQIAALVGLAPINRDSGKLRGKRITGGGRVNVRNQLFMPALVAIQHNPVIRKYYHHLLKEGKVKMVAVVACMRKLLTILNAMVKKNESWKPKNA

SEQ ID NO: 488678 - protein, 417 aa, unidentified
MIRKVMEVIHPCVGGLDVHKKTVMACRRRLLGDGQVESEVREFGTSTLQLCALSKWLSEWGCTHVAMESTGVLWIPVWNVLEADFKLLLTNAQQLKKVPGRKRDVIDAEWIAQLMQCGLLKPSFVPNREVRLWRTLTRQRMKLIDHHTAVVNRLHKVLQQGNIKLSSVATDVMGVSGRAMILAMIEGESDPEALASLAKGRLKSKHEQLVESLEGRLNQDDRWVMKELWEQMEYLEEEIIRYDDQIKEKMSPYEESLSRLMTIDLIERRSAENLLAEIGPDMSFFPSDDNLVSWAGLCPGSDESAKKNRSGRTPKGNRWLRRALVEPAWGAARRKDGYLGAMYRGIAVRRGEKRAVIAVARTILQAAWHVLSKGVEYQERGGDYLDRINSEQTKNKLIKRLERLGYEVEIKHKQATV

SEQ ID NO: 488679 - protein, 422 aa, unidentified
MKLTYPVCCGVDVHKTFLVATIIKTDGLVQKYYKKRFSTFSRDLLAFRQWLLDNDCKGVCMESTGKYWVPIWNILEDAIRVVIVNPKWVSAVKGNKDDTKDSRWIGDLFRMGLVPGSFVPSRKIRVLREFTRYRYKLISMRSSERNRFQNAFTVCNSTLDAVLSDMFGKSAAAIQNYLLDTDVVNPAYCASLLQRAAKKKSADVMAAVEGFKMSAEQKERVRIIQEHFSDINARVARLDAEINKLVSEYESQIALLCTIPGVDRNLAITIISEIGTDMSEFGSSKRLCRWAGLTPGNNESAGKKKSVKITRAGVYLKPALVQAAHAAVKSTKSVYFKSKYEHISKRRGKKRAIIAIARMILTAVFAMLKTGEVFHPCDLQKYDMPEQLRRRQVVSSAKNAVKLLVSLGVLQEDSVSLAALAG

SEQ ID NO: 488680 - protein, 422 aa, unidentified
MSPTNILLTQQTLVVGIDIAKRTHYACFVDDRGRVLRKSFPIFQSKEGFQQLYEAIQGAMQAFGKSQVIVAVEPTGHYWLNLAYFLEEHGIPLVMVNPAYVCRSKELDDNLPTKHDAKDALVIARLAKDGRFLVPRLLHEIEADLRVGSTLKEKLRKEQTAVKNAIVRWTDRYFPEFWTVFRDLGKTALSVLEWTPLPADMAGRTAEELIEVYRQSEGMKCPQKAKIQALINAAKDSIGVTEGATMARFEIAALVRRYRQLEAEIAALDAELKALVQTTMEYQWLKTVDGLGDATIIDLLAEIGSFAHYRDPRQLVKLAGLTLKENSSGQRKGQKHISKRGRKRLRSVLFRAMIPLIRHNEAFRELHEYDTTRPVNPLTGKQSIVALCRKLLNVLFAICTKKQAFDAERMKQDILSQVQRAA

SEQ ID NO: 488681 - protein, 441 aa, unidentified
MENKISFEQIHANAAGIDVGSEKIFVSVDGATVKNFGTCTSDYHDCIRYLREHHIERVAMEATGIYWLSLYGMLEFEGIKVSLVNPKQTKQQRGKKTDVQDCRWIQKLFAAGLLQESFVPEGKMLEIRYLVRERLDIIEMGSSYVNKMQRCLELMNIKLSEVISQVHGASGIKIIQAMIDGERDPEVLLLLCDQRIISKKREQMLKSLEGNYNVTWLFMLSQNLSLWRQHQLQIENIDERIESLLTELTAGKQIDPSKKGKVKPIRHHKPRIKDLHETMVKLFGANLSSIAGINNYSLLRLIGETGTDMSRFPTIKHFVSWCGLSPGRNQSGKKSKWIKQAPCNKAGQIFMEAAQSLGQSKYTAIGCFIRKLKSRRGAGVAYKAGGRKIAEAYYNALTKGAPYVEHGAKQYELQIKQRELTTLKKLARKHNLQIIEKQNVA

SEQ ID NO: 488682 - protein, 310 aa, unidentified
MGVYVGIDVSKQHLDWVLGAEGNVERSPNTPAGVRRLMARLRKIELASIIVESTGGYERTLTEAFADDDLPVILVNPWRVRRFGEGLGVLAKTDPLDARVLALFGERARPPQRPLPGPRQREMADLVRRRRQLIAMIAAEKNRLDTAPRIIRRDILSLVQLLERRVAKLDLRIDQAIAGDAERAENWKRLQTVPSVGPGVARALIVDLPELGALGRRQITSLVGLAPFAKDSGKKSGYRRIRAGRAAPRTALYLAAMNGARFNPVLKAMYERMIAAGKSPKVALIALARKLLTILNAMVRDRTDWQETAT

SEQ ID NO: 488683 - protein, 410 aa, unidentified
MKIAGIDVHKKVLMVVVVDASAPEEKPARRRFVTLPSELQRFRIWLQAQEVEEAVMESTAQYWRSVWLELEPHMRLHLAQAFSNRAPRGRKHDFKDAERLVRRLIADELILSFVPDGEQRIWRSLTRMKVQLTRDRVRLQNQMECLLEEMRIKLSIVVSNLLGASGLRILHALAQGETDPKKLAELGDERLHCTEEQLVDALTGRVQPMHRGMLALQLQRLQLIDQQMAQLNCMIAQAMKSHQDAVIRLTEVPGLGVDSAQQIIAEVGAQASTFASAAELTSWVGTCPGKEESAEQNHSSRSAKGNKYLRRVLNQAAHAAVAKKGSHFQIVFRRLLPRLGYQSAIWAVAHRLCRVVWKILHEGVRFIEQGQQVGPREKKQRAQMLARALRKLGYEVTITPINQLAAKPAI

SEQ ID NO: 488684 - protein, 337 aa, unidentified
MIGLDLAKAVFQVHGVAADGRVVVRRALKRAQVVNFFQALPPCTVALEACGTAHHWAREIARCGHTVRLVPPAYVKPFVKRGKNDAVDAEAICEAATRPSMRFVPVKTVEQQAVAMLHRSRALLVKSRTMQINALRAHLAEFGFVAARGSAGVEALGQLLESAPEERLPAMVRRMLDGYLAGIAELEARIAALETELRAWHRQQAMSRRLETIPGIGVLTASALTALVPDPSLFRNGRHLAAWLGLTPRQHSTGGKTRLGRVSKAGDGYLRRLLVLGATALIRSLRGQSSRLARWVQGLLARRPARLVTLALANKLARIAWAVMVRGEEYRPIAAAA

SEQ ID NO: 488685 - protein, 340 aa, unidentified
MHKSSAESFLSCGIDVSAAQLVVALEGAAGSWRQRSFANRARGHQALILWLQKTGERVRVCLEATGRYSLDLALALHTASGIEVAVLNPKVVHAFAATLCRSKTDPADAQVLAEYARRMVFQPWHPPSAVALELRTITRHIAALTQQHTQQSNRLHALSASTTGSRWVLQDLKRSLRDLQRRMEKMRRAALALIAQDAELRVRFSRLLSMPGIGEISALYLLGELALLAPSLSVRQWVAHSGLDPAHYDSGSSVHKRARISRAGNRYLRRALYMPALVAVRRDPHLRAFYQALLARHKAKLQALMAVARKMLHAIFGMFRGNTDYDGSRLFPARALAAAA

SEQ ID NO: 488686 - protein, 403 aa, unidentified
MRAIGIDVHRDFCEVAISEDGQLRSAGRVASRPEELELFAASLSPDDEVALEATGNALAIARILEPHVARVVVASAKELHAITGAKAKTDRRDARTLARLLAANMFEGTWLPDEEVRALRRRLSHRAQLVRARSRLKSEVHAVLMRNLVGAPSATDLFGAAGRRWLAGLELPVDERETVDSCLRTTAFLDAEIASFERTVARFALGSSEIRRLMTIPGVGLLSAATFVAVVGDVRRFPSARRLVGYLGLDPRVRQSGSSAARMGHISKEGPSSARAALCEAAHAALRSPGPLRAFGGRIAARRGRQVAVVAVARKLATIAWQLLRSGEDYAYSNPAQVRLKWRRVELAAGARSQQGQRTGVTLASRQEREVALAAERTYRRMVADRRASAKGKSAGAAVGRAT

SEQ ID NO: 488687 - protein, 352 aa, unidentified
MNYVGIDIHKKYSVLCAQDERGGRLKEARIEGHCRQDYARFFGALEGPSRAVLEACWNWGLTHDLLEEIEEVEEVVLAHPLKTRLIADAQIKTDRLDAFALGTLLRGNLVARAHIPRAETRARKNLLRQRLYWARLRTMLRNRIHALLDRQHGLELPQCSDLFGVRGLGFLRQLELPEPDGTLLREALALHDLIAQQMKAQEKRIATEFKLDSSYERLLSLPGVGPTLGAVLAAEIDQIERFPSADKLCGYAGVVPTTHSSGGKVHHGRLLPYCNKWLRWALIEASWVAIGCSPYFGSLYRQQRARGKKANTAITIVARRMCRILYQILAQKRSFEKRPPRVQITHVPGCSA

SEQ ID NO: 488688 - protein, 391 aa, unidentified
MIYVGIDVAKDKHDCFITNSDGEVLFKAFTITNNLDGFNDLYQKIETVMKDITKVKVGLEATGHYSYNLLGYLIDKGLPTYVINPLHTNLYRKSLSLRQTKTDKVDARTIASILMSDVNLKSYSDISYHNEELKSLTRYRFDKVKERAKLKSSVSRLICILFPELEKLVPTLHMASVYALLSEFPGAKQVANAHLTRLTNLLSEASKARYSKDTAITFRDAARTSIGSNMPAKSLELKHTIKLIKELDSEIDEIENEIKIIMDEINSPILSIPGINYRMGAMIIAEIGDFSRFDSPDKILAYAGFSPSTYQSGHLYGAYAHMEKRGSRYLRYALYNAAKYVCHWDPTFTAYLAKKRAEGKHYNVAISHAVKKLIRVIYHLEKTNQQYIKAS

SEQ ID NO: 488689 - protein, 356 aa, unidentified
MEEFSKNYFSETEIFIGLDVHKKSWDASIYVEKIFFKSISISPPSTKILVDILHKSFPLGKYHVVYEAGFSGYWIYDQLTEAGIDCVVVSPADIPMSNKDKKFKTDRNDSKQLAQKLRAGLLEGIYIPGKIQREHRILLRYRDKLVRDRTRTKNYIKSNLMFFGKTIGADYEDSKSWSNKFIQGLSRIEYLTTQGKDVIEKLIKMVKVYNEEIKKIDKEILELSKTEQYKQDVKILISVPGISILSAMIILIEIGDFKRFEDTNKLKSYVGLIPQEHSSGEKEIKTGITRRGNKFLKKIIIEASWVAMKKDKTLLSRYTKLTHRMRGSKAIIIIAGILLNRIRSIMRTREQYKIAA

SEQ ID NO: 488690 - protein, 367 aa, unidentified
MKKISTATAHAIRKVESQRLTIGLDLGDRSSWYCVLDETGEVLLEQKLSTIPKTMREVFGEMPRSRIALETGMHSPWVSRLLSELGHEVIVAHARKVRLIGESRRKDDRLDARTLARLARIDPQLLAPVKHRSAKAQADLTVIRARAGLVRARTSLINTARGLTKSYGERLRGCNSRNMKPEKASGLSPELQAVLEPLLAGIESLSEQIREYNEQIEHLAQESYPQVALLKQVKGVGTLIALTYLLTLEDAHRFRKSRDVGCYLGLQPGRRNSGQSKPQLHISKEGDPYLRTLLVQGAHHILGPFGADSDLRRWGLKLAERGGKNGKKRAIVATARKLAVLLHRLWVSGEVYEPLRNSSQAMLPAAA

SEQ ID NO: 488691 - protein, 323 aa, unidentified
MVIIGVDSHKRTHTAVAVDRNGRKLAEKTVATTADGHLELVRWSRRWRERSFAVEDCRHLTRRLEGDLLRGGERVVRVPPKLMASTRRSAREPGKSDPIDAQSVARAALRERDLPIARLDGPEREVRLLVDHRVSLVSDRTRLQSRLRWFLVELGIPEPQPRTLGQPTVLARLERDLGGRSEPSARIGRDLLTRIRELTTAINALGREIQALTDLLAPSLLALHGCGHLTAGKLLGETGGIARFRSRAAFATHNGTAPIPVWSGNTVRHRLNRGGNRQLNLAVHRIAVTQLQKAGPGRDYVAKRMVAGDTKVEAIRALKRRMT

SEQ ID NO: 488692 - protein, 431 aa, unidentified
MLKINPLSTLYVGIDVSSKSNYVCALDFFKNKYINSSFANNQPGAEELALKILECLNQHPDLTMVVAALESTSVYSIHIANYLSSCEELMRFKPYVFVLNPKCTANYKKSYIGLGKSDPIDAFVIADYARAGNIESEPWRGSQFLALKRLTRHRLHLVECMTREKTYLVSNLYLKFSELQMLEGDDQPFCDIYGATSSSVLMEYFSPEEILDSSEEDLIAFLAKKSRNRIKDISKTADLLKKAARDSYRLDKALYEPLNVSIASSFNCIETFKREIKVIDNAIEKEIKGLNPNAFIILQSIDGIGPVFAGGIIAEIGDITAFHSSDALAKYAGLTWKSNQSGDFDGEDTPMIKAGNRYLRYYLGEAANSMRKHNVEYGTYYRKKYNEVPKHQHKRALALTSRKFVRLVYGLLARNQLYSGVSLDTSIKDSN

SEQ ID NO: 488693 - protein, 369 aa, unidentified
MEKDTTYVALDDSKRKIVAGILRPGDAQPELREIANEPRQIRRLFERLKCEGPVAACYEAGVSGYDLHRQLTALGVACSVIAPALTPRRPGQRIKTDRRDAVKLVRLFRAGELTAIHVLDESEEAVRDLVRCRDDLRRDVMRWRHRVLKLLARHGRAYLAGKNWSHAHWRWIREQRFDLPPLQRAFEATVFALEQALARQAELDKELEALAVTAPYREPVGWLRCFRGIDTLSAIILVAEVVDFQRFRRPRELMAYLGLVPSEYSSGETQRRGALTKAGNSHARRVLVEAAWHYRHRPTIGRALASRSQGQPDEIVGQAWRAQQRLHRRYRHLVGHGKRTPVAVAAIARELVGFIWAAMTRHESRRQAA

SEQ ID NO: 488694 - protein, 419 aa, unidentified
MKYARVPRPGMPPGGLSAGIDWASADHAVCIVDAAGAVVSRFSVAHTAEGLRALASRLARAGAAEVAIERGDGPLVDALLAAGVTVVVITPRQVKNLRSRYGSAGNKDDRFDAYVLADVLRTDRARLRPLIPDSPATATLRQACRARQDLVRHRVAVGNQLRAHLLSVFPGAAGLFGKLHSAISLAFLARFDCQDRADWLSQKRLAAWLKADSYSGRTSPAELYQRLRSAPRGATGPHAAASASVTGALAAVLASLNTQIKALEAQIAAQLAAHPDGHIFASLPRAGTVRAARLLTEIGDCRARFPEPQALICLAGAAPSTRQSGKHKAVTFRWAARKQLRGAVCDFADGSRHASPWAAKIYNDAIARGKDHPHAIRILARAWLYVIWNCWHNGVAYDPARHRALQRQLAQATSPQQAA

SEQ ID NO: 488695 - protein, 317 aa, unidentified
MPQGTCVVGLDVAKSKVDACIRSMGLRLSRPSTPEGEAELLAWVRANRVGRAVMEASGGYERCWAKALRAAGVEVRIVDPKRIRHFAKAAGRLAKNDPIDADTIAWFAEAFPDADPQPHDAAREELDRLVQARAALKDEEDRIKQQREHRPPPVVAQALAAVAKAIRIERRKIEAAIAAKIKANPAFARRAEIIDSVPGLGDQTVAGVIAWLPELGHIANEAAAALIGAAPYDDDSGGRKGARHIKGGRRKLRNLLYMPVMGAATQHNPVLKAYYARLRARGKEAKVALIACMRKLIVILNTMLARDETWNPARAAA

SEQ ID NO: 488696 - protein, 428 aa, unidentified
MSYRIAGIDVHKKMLAVVVSDVEIESEYQFERRMFSSNPEQLRSLAAWLVEQKAEEIVMESTAQYWKPVWGTLERYWKPLCEKREGARRRSGTLHLAQALSNRGRRGRKRDFVDAERLVKRLVARELTLSFVPDAEQRLWRTITRKKYQLRRDLVRIHNQLEALLEEAHIKLSSLVSDLLGVSARRMLKALADGETNPAALAALAHQRLRATPEQLCDALGACTELKPVYRRLLKMTLEHLQILEQQIGQLDQELATLLHPHQDAVERLAEVPGFAVDSAQQIIAEVGPAAATFPSEKCLSSWVGACPGEEESAGVNYSHRSPKGNRHMRRLLNQTANAAVKAKGSIFEIIYRRCVPRLGHNQAIGVIAHRQCRLIWLILHQGTRYEERGPAVTKRSRYQRTWRMIRQLRNLGYRIELPNPDASQAQA

SEQ ID NO: 488697 - protein, 349 aa, unidentified
MNIIGCDYHPGFQQIAFVDTETGDCGEQRLEHSEGAEKFYRDLAAQGKKVRVGMEASGHARWFERLLAELNFELWIGDATEIARKRERKQNTDRQDAQHILQLLMENRFPKIWVPSGENRDLRQLLWHRHRMVQMRTRMMNQLQAVALNEGLRCKKRLWRQHGREQLESFRLAPWASRRREDLLQLLGRLNPTISDLTQAIEQEVEKCPEARRLRTHPGVGALTALAFVLIIGRPERFQCGKQIAAYLGLVPLEDSSGNRRRLGHITKQGSSMLRFLLVEAAQVTARSIPEWRSKYFHLAMRRGRKIAKVAMARRLAIALYWMWRKGWNYEQSRKFGSHAGKLGTGDGV

SEQ ID NO: 488698 - protein, 419 aa, unidentified
MILLKIVYPVCCGLDVHKRTVVATIATTDNNNITTYSTKTFLTLNPGLYALRSWLLDSNCRHVCMESTGKYWIPVFNILEEYCYVILTHPKYVRTIKGKKTDKKDSKWIADLFKHDMVRASFIPPKDVRAWRELARYRAKLVNMRSSEKNRYQNCLTVSNIALANVLSDSFSKTADGIMRHLLSKEAFDEELCKSLIKYSAKKKTDIILDSVRDCSIGPDQKFKMSEARSHISFLDEMILRTEIELYVRVKPHYHLIENLTQIPGISELSAALIIAETGIDMSVFETSKHLISWAGLSPSNNESAGKKKSVRISKAGQFLKPLLVQCALAAVMDGKETYFAVKYHHIKKRRGHKKAIIAIARMMLVCVYHMLNTGEAFNPSDYEYFKNPLPRKQVLTEQNAINFLLEQGYDLSGIVKAM

SEQ ID NO: 488699 - protein, 370 aa, unidentified
MAQPTPLFVGLDVHKDSIALAHAQGQSTDPPVFVGAIGTRQADIDQMVRRLESKTSALIFAYEAGPTGYGLHRYLTGRGFECRVVAPSLIPKRPGDKVKTDRRDAVELARLLRSGDLTGVYVPSIDDEAIRDLSRARDAARLTMKSAKVRLKAFLLRLGRHYEGRADWTEAHRRYLAKVVCPTPAQQIVFQESIRAVDEQVDRVQRLESELHACTPTWRLQPVVNALQALRGVQWLVALTVVAELGDLTRFDNPRQLAAFVGLIPSEYSSGATRRLGGITKTGNSRARRALIEAAWAYRYPAKVSEHIQRRIDGLPKPIQDIGWKAQVRLCKRYRRLTARGKHANVAVTAIARELLAFMWAIAKEVPVTP

SEQ ID NO: 488700 - protein, 386 aa, unidentified
MRAVCGLDVHKDSVFLCILCETGEIFEKVYGVLTHELQSMCRDMKSRGVTEVSMESTSVYWIPIWRVLEPHFRLKLVNPYFIRQLPGRKSDVKDAQWIAECTLKDLVRGSFVPPERIQQLRQYDRRIFDLDAEIVRKLSKLDAVMQRCNIRLSNYVSNTDTKSYKEVVRKLCEGVTDPEELIKVIYSRIINRHGRETILAALTGVVSDAEKDAMRQLRDELDLAEKHKQECQDRMLHICKTYYPDELRRLMTIPGIKERAATSLIAEIGVDMTKFPTAAHLASWSGLKPRNDESNKKIKSRRITHGNVFLRKTIIECAWGASRTKDCFFSRFSFHQTQVRKKNKMKVLVAVARKLLIAVWHVLHDETDYKDFGANDCDTSAVENNG

SEQ ID NO: 488701 - protein, 343 aa, unidentified
MEYHVGLDVSLKQTSICVVNQTGSIVQEGVVGSDPEAIASFVRSRAPGTVRIGIETGPTTTWLWTELNRLGLPVICIDARHAKAVLKMQINKSDRNDAAGIARIMQTGWFKEVRVKDLDSHAVKALLASRALLVKIKRDLENQVRGLLKNLGLVIGRAKFNVFAVRAEELIDGRPELVAAVRPLLEARKAIEHQVDDLDCKVRKLARNDAQVRRFMTVPGVGPITALCFKATIDDPTRFKRSRSVGAYIGLTTRRHASGEIDWSGRISKCGDAMLRMYLFEAAGVLLTRVPKWSGLKAWGAKLTKRNGLRKAKVAVARKLAVILHRMWIDGTEFNWSTKKAAA

SEQ ID NO: 488702 - protein, 354 aa, unidentified
MSQTANTAIAVIGIDIGKNSFHVVGHDARGAIVLRQKWSRGQVEARLANIPPCLIGMEACVGAHHLSRKLASLGHDARLMPAKYVRPYSKGQKNDFNDADAIAEAVQRPTMKFVATKTAEQLDLQALHRVRERLVSQRTGIINQIRAFMLERGIAVRQGIGFLRTELPTILATRTDALSPRMLRVIEELAGDWRRLDQRIDGLSGEIEALARQDQACSRLMTVPGIGPIISSAMVVAIGTGDVFSKGRDFGAWLGLVPKQISTGDRTILGKISRRGNRYLRVLFVQAAWVVLVRIKNWERYGLKSWIEAAKRRLHHNVLAIALANKLARIAWAVLARGGNFELRRSNELSPQPA

SEQ ID NO: 488703 - protein, 361 aa, unidentified
MQIIGCDLHTRQQTLAMLDTTTGEVVEKTLMHEASNVRNFYSTLSGPVRVGIEATGSMQWFLNLMEKLGIECQVGHPAKIRAAEPRKQKHDRRDADLILKLLLENRFPSIWLPSKELRDLRALLRHRHQWVRMRTRVQNALQAIALANGLRRGPSLWSQAGQHTIASLPLAPHSAHRRTELQALYVKFETEIEQLNQRVEEQAYERPGAQLLLTHPGVGPVTALATDVFLGDPARFADGKALASYVGMIPSEYSSGGRQRLGGLSKQGNPLLRFLWCEAAMHAVRQDPELQRFYRRKLIHKGLGKARVAAARKLGIRLWIMLRDQIDYNEFCRRGQMRQKNGGACAGMPDTAHGAKQSPAE

SEQ ID NO: 488704 - protein, 354 aa, unidentified
MSQTLNAAIAVVGIDIGKNSFHIVGHDERGAIVLRQKWSRGQVEARFANLPPCLIGMEACVGAHHLSRKLKTLGHDARLMPAKYVRPYSKGQKNDFRDAEAIAEAVQRPTMKFVATKTADQLDLQALHRVRERLVSQRTGIINQIRAFLLERGIAVRQGQRFLRAELPRILATPPDVLSPRMARVIEGLAGDWRRLDERIEELSGEIEAIARQDAGCGRLMSVPGIGPIISSAMVAAIGAGDAFTKGRDFAAWLGLVPKQMSTGDRTILGKISKRGNRYLRVLFVQAAWVVLIKPTTWERHGLKPWIEAAKKRLHHNVLAIALANKLARIAWSVLARGRAFEVRKIDEAATQSA

SEQ ID NO: 488705 - protein, 346 aa, unidentified
MEHYAGIDVSLELSSVCVVDAQGKILKEAKVASEPDALVEFFETLGFAVKRIGLEAGPLSQWLHAGLKEAGFETVLLETRHVKAALSAMTVKTDRKDARGLAQLLRMGWFQQVHAKSMASQEVRALLVGRKQLLGRLIDVELSIRGILRGFGLKVGAVTRKGFEARIRELVTGQATLERIAEAMLSARAALKAEYEKLHKAVLAIVREDAVCRRLMTVPSVGPLVAITYKSAMDDPSRIAKSKAAGALFGLTPKKYQSGEKDVTGGITRTGDEMVRTALYEAANVLLSRITRFSKLKRWGMDVAKRRGSKRAKVALARKIAVILHRMWIDGTTYRWAEAKPFAAQA

SEQ ID NO: 488706 - protein, 356 aa, unidentified
MIVIGIDPHMRTHTAVALERVTGEIVAERTVKARARGHGELVLWARALDAERVFALEDCRHVSGSLERFLIARGERVVRVPPKLMAGARAGGRERGKSDAIDALAVARAFLREPELPVATLAGFEREVRLLADHREDLVGERTRIGNRLRWHLHDLEPSLEIPAGALDRYRWLDRLQEWLQGRDEGSAQVRIARELVVRCRELTRRIKELERELEALLESEAEELLELCGCGTLTAAKLVGEVAGVGRFAGESRLAKYTGTAPLPASSGERQRHRLNRSGNRQLNCALHRIAVTQARVYPPARAYLERRQAEGKTRREALRCLKRHLARTVYRALRAMDERKTTSTVEVAALADLT

SEQ ID NO: 488707 - protein, 415 aa, unidentified
MLRIVYPICCGLDVHKSFVFACIAATDENGVTTYQSRKFSTFTSELRELADWLAKNNCKDVCMESSGKYWIPVWNVLEETCTLTIAHPKYVKAIRGKKTDKKDAKWIADIFKHDLVSGSFIPPSDIRQLRGLTRYYRKLVGFNTGEKNRAQNCLTVSNIKLDDVFTDVFGKSATAITDRLLEHPGETFDVAPYVHGRCKTPIPEIQAAIDGAICEEQAEKLKVIRSHMGNLELCKLNLESIVLGIAQKYLPQLELILTVPGIADIFTAISIIAEIGVDMSVFPTSKQLCSWAGLTPQNNESAGKKKTTRISHAGAYIKPLLVQCSVAVSKSEKHPEIRNRYLSLRKRRGHKKAVIAISRMLLTAIYNILKKNEPYNVELYKSSDKPPEHRQVSVDEAIFILQRQGYSILAPQAEK

SEQ ID NO: 488708 - protein, 429 aa, unidentified
MNYTQNEKIEQVTDSTMVVGVDIGSQIHYARAFDNRGRELTKRIFSFHNDLEGFNSFNLWAETLKTENKKTAVLIGYEPTGHYWFAFAKYVNDHQKRLVMVNPFSVKKIKELDDNSPKKTDSKDPKTIAKLVVDGRYSIPYMPEGIYAEIRDLVYSRDRIMKQHNISANRVQRWLAIHFPEYLGLYTRFDAISGLAVLEKAPLPKDVIALGVNGIRKIWHDKKMRGRGVTEDRAKTLVEAAHNSVGLDGGIGTKSELYMLLEEHRLWTSQLEAVNKVLEEMILKVPHVEKLLAIKGVGSITIAGFIAEVGDIRRFDSPKQIQKYAGLELVENSSGKHKGRTRISKRGRRKLRKILYQVMVPLLARNKEFRGIYDYYVTRVKNPLKRRQAMVAVSCKLIRVFYAVLTKGVEYDRFKMMSDIHRKSDIIAA

SEQ ID NO: 488709 - protein, 308 aa, unidentified
MRCGGGWKRTYGSASEALPTETGSKQIGRACGVPRQSSTLPSISVVVRDAAGKLLMECIIETKAATILEFIQGLRGSLWVAFEEGTSAAWLYDLPKPHVAHVVVCDPRKNALLKAGNKNDRVDAQKLSDLLRAGLLTPVYHGESGVRTLRELGRSYLTVSKDLTRVMNRLKALYRSWAIPCAGQKVYSPRHRSAWLEKLSEAGVRHRAEQLYQQLDMLVRLRREVRRELLTESQKHPAHQLLRPIPRLGPVRVALLIALVQTPYRFRTKRQLWAYCGLALQRGAVALASLSHSNPFRGGSRWTCRGLG

SEQ ID NO: 488710 - protein, 449 aa, unidentified
MSVQKLASEKDKNIYTRRSSTMNYNQNDKIAQITSHTLIVGVDIAKFKHVARAQDFRGIEFGSAFHFENTKDHFELFLDWIKNLLEKHGMDNVIIGMEPTGHYWLNLAHFLREEEIKFVVVNPMHVKKSKELDDNSPTKNDVKDAKVIAQLVKDGRYAEPNIPQGVYAELRVARKIRDLLSVDLQAVQGQIHNWLDRYFPEFLTVFKDWEGKSALQLLKLNSLPHELEKVTEQEILVHLRKAVKRAVGLSKIQELKRVAKDSIGIREGSRMAKLELRTLLDKYELINEKFEELESDIDGLLERIPGVQQMLAITGIGKDTVAGFFSEVGNLSYYSHPKQIIKLAGLSLKENTSGKHKGQTKITKRGRKTLRALLFRVAMPLVAKNTAFKALHEYFTTRKNNPLKKMQSLIAICNKLIRILFVIGTKQCEFSEERMLKDIPHLAPLQNAA

SEQ ID NO: 488711 - protein, 448 aa, unidentified
MAKRKLEMEIINPNAAGIDIGSRSHFVAINQDLSDVREFGVYAEDMKELLKWLLENDVKTVAMESTGSYWQNLFTELQNSAIEVILTNGKFTKNIQGKKTDVLDCMWIQKLHTLGLLRGSFLPDLQTEHLRTLVRHRGNLIDTTSKASKRMAQNMRLMNLRLDVVVKDIVGLTGLRIINAICNGQTSGEELAKLRHGNCKKSEKEIAKALQSNNRQDYLFVLKQELQKYQDAQRLIFECDIEIKKILDQCINQDDVKKSLCIDKKVHKRINKNTPKNIDLNLISYQYFDGIDLYAIEGFSHGTVLTLMSELGENGILKFQNAQHFTSWLRLAPNNKVSGGRILSSRTPKGSNRLKIALRQAANSIGNLKDTHLSNFFNRIAYRKGRAVAVSATARKLATILWNMLYKKHQYNPPTVYEYLDQKRKRKVIELQKQIANLDARMTKIKPA

SEQ ID NO: 488712 - protein, 308 aa, unidentified
MPLWIGIDVAKDTLAVHVLPQDQLLSFPNTAHGHQRLCDHLAGQCVGNALLEATGGYERAVMTALATARIAVTRINPRRARAFATALGTIAKTDRLDAALLARMAQLVQAPAPVPDPLREQLRMLVQRREQLVQQRDDERRRLHQATLAVVRACLIEQIGDLRRRIQRMNQAIKQVRCQLDDALAHALSTVPGIGVVTTASLMAYLPELGTLDRRQIAALVGLAPYNVDSGQHRGKRRIRGGRASIRRVLYMACWSVVRTQASFKERYQQLRARGKPAKVAITACMRVLLIRLNAMARDRTPWREAIG

SEQ ID NO: 488713 - protein, 316 aa, unidentified
MKNYIGIDISKATLDVYDGLESYKFENNLPGFKQIISLVTEIKDVVFIFEPTGIYSYALSQFCSDKKIAVVMVGPKESRDFARSLKVRSKTDKIDAKVLYKYQSHVEPNMIQIPIIDHHSIKVQEMLNVYEGILSAKQKLKNQIESVSKGDKDLIPALHRIIDNLAKEAQKIFNKIELLLLEDNANKKRYDAISTIPSIGQKSALYLCAFFLKYPSANAKEITALVGLDPVMKDSGTFRGKQRISKQGGQQLRNLLYFPTLCAIQHNDRIKHFYEGLTRRAKTKKLAVIAAMRKLILMAFSIFKSEEEYQPLLATI

SEQ ID NO: 488714 - protein, 350 aa, unidentified
MDIIGLDLHKRESQLCLGAEDGTITERRIVTSRERFTVVLGNRPRAKILLEASTESEWVARHLESLGHEVLVADPNYAPMYATRSRRTKTDRRDARTLMDACQTGAYRLAHRLSDPRRHVRAELAVRDALVRTRTRYVALAKTLVRRDGLRVASSESHLVAQRIGALSLSPVLAAELQPLFTVLAPLNEQIAAADGRIATLAASDPLVARLATAPAIGPVTASAVVATVDDIGRFRSAHQFEAYLGLVPGERSSGEKRHVGPITKAGNSRVRWLLVEAAWRLLRTKSAEAAALRAWAHGVAGRRGKKIAVVALARRLAGILYAMWRDGVPYDASRIRGPRIAAEVTARAS

SEQ ID NO: 488715 - protein, 531 aa, unidentified
MVSFVMVVRHVLTDRASQVALAERDQPTQAFELDGPNEPLCMRVAVWSADGRLDDLDTGGAQKREHWAAPFAIAIANQHRARVETTVDVVSQMAHALQHEGVVWMRRGTNDVHAPGLKLDDEQGVDTMQGVGQTRRGCYAPTKVSRRSVAMITRTHTYASPAPSPLLLAFELGERSWKLGFSVGPGQRPRLRQIPAGAVSVLPNEIARAKARLALPSDAPVISCYEAGRDGFWLHRYLTAQGIVNHVIDSASIEVDRRARRAKSDRLDLVGLLSLLARFAHGDQRAWRVVRVPTVAEEDARHLPRAWETLTQERTRLINRLKGLLATQGVHVRIGADFLDQLRATRLWDGAPVPPGLQERVTQSWAQLQHLEGQLDQLKATRAAHERALATSTGIAIARLQTLRAIGPIGAWVLATEIFGWRQIRSRRQLGALVGLVPAPYHSGETEHDQGITHAGNAHVRRVIVQLAWGWLHYQPTSALSQWYHRRFGSGSRRIRKIGIVALARKLLIALWRYLETGLVPDGAQLKSMET

SEQ ID NO: 488716 - protein, 309 aa, unidentified
MTANQKFSRFIGIDVSKAKLDIYDDATGEFLTVENTAKAIEKYVSALSPDPELLIVVDLTGGYEALCINTFYNRGFTVHRAEGRRVKAFMRSYGEHAKTDRIDAYALALFGRKLHETLRMYTPLPLNLKPVTERISDLKTMLLQEKNRSTAPSLPPDMKKEIVRHIAYLEKEIERLYQKCLDIIKNDPPLAEAFYKIIAIKGIAEKSAVLLLTTLPELGCANRRQIAAIAGVAPYAKDSGTLSGYRRIRHGRTTAKSALFIVTLVAIRHNAQIKEFYERLLKKGKSKMTAIIACARKLLIIVNATLKTC

SEQ ID NO: 488717 - protein, 337 aa, unidentified
MHYIGLDVHSKNFAFAVMDRTGKVLFENQHPTSEHNLRQVIASVSGAKVVVLEETTVAAWVYRVLKPHAHRVIVCDPRHNESIAKSGHMTDAQAARQLADLARGKFVKPVHHPADEGRQAFRELVQSYHQLQRELVRVKNQLKAKLRQQGIPCAGTDIYQPHQRTFWLGRIKHEDVRFQVQMMMETVEHLTEQKIAYLQRLKQRAKAFPEIAAFQALAGIGLVHAATFYAIVDEPRRFATKKRLWSYCGLGIAQRSSDGMSSPPHLNRNGNRLLKGVAKSAAQMAVRHGDNAFARQYQRLIVNGVKSTNAQLTVARAIIATMFAMWRKGEAYIPREV

SEQ ID NO: 488718 - protein, 308 aa, unidentified
MTTLHTGLDIAKLNLQLHLAGRVHDLPNTAAGHRRLLKLLATQPGAHVVCEATGGYERDVVAALHTASVPVSVLNPARVRHFARATGQRAKTDHIDAAVLSAYGQALQPKPTAPRTEQEQHLAELIRRRVQVLEILVAQRQQAQRLTVPALRRQAQSLVRRLERDVKQIEAQLKELRTQATALDERVQKLEAITGVGAITALGVLAELPELGTLNRRQAAALAGLAPHPRESGQWHGRRRIGGGRAPVRRALYMAALVAARSHRQLKEFYQRLRAAGKPAKVALTAVMRKLIVLMNHLLKNPNFALSN

SEQ ID NO: 488719 - protein, 347 aa, unidentified
MKVLIGVDPHKASVAVAAVDEAKGELLERASFPQDRAGLRALERWVSRFPERRWAMENARGLGRHLAMRLAGSGESVVDVPPKLSARVRVLSTGNARKNDGLDALATALAASRNERLAPVGPEAASEVLRLLSERREDLVAERTRALNRLHGLLRDLLPGGVAGKLSADRAARILRGMRPKGGNSDRLRRRLASEVLRDVRMLDRKIADLNGRVEAEVEASGTTLTEIFGVGPILAATILGTVGDVARFPTKAHFASYSGTAPVEASSGKVVRHRLSLAGNRKLNYALHMVATSQARSDAPGGSYYRKKLAEGKSPKEALRCLKRRVCDAVYKSLVADTQAPSRSAA

SEQ ID NO: 488720 - protein, 454 aa, unidentified
MPKRGKKALPRGLAPVPVLEPNAAGVDIGATEIYIAVPADRDSQPVRRFATFTEDLIAAADWLQRCGIKTVAMESTGVYWIPLFQMLEERGLKVCLVNARHVKNVPGRKTDVSDCQWLQYLHAVGLLRASFRPSNQVCAVRSLMRYRESLVEMATVHLQHMQKALDQMNLQLHHVISDLSGTTGMAILDAILSGERDPRRLAELRDPRIKASPATIAKSLVGDYRREHLFTLGQSVVAYRHYQQQIAACDVEIEQMLGDFSDSAGPDAPALPEPKDRHKPRRNEMRFDLRGHRYRIFGVDLTGIPGVNALTAHTFLTEVGRDLSAFRNAGAFASWMGLCPDNRVSGGKVLSSRTRGVNNRLARALRLAAQSLFRSQSWLGQYYRRMRAKLGAPKAITAAAHKLARILFHLITTSQPYDESVFAQQEIQNNQRMQQKLAQQARKYGFQLVEITTS

SEQ ID NO: 488721 - protein, 377 aa, unidentified
MKKELYLGLDVHKDCIITAVAEEGRKGEVRDTGVISNDLHALEKWVGRLRKAHGRDVILRACYEAGPCGFGIARRLKQLGVECEVVAPSLTPKRAGERVKTDRRDARKLARLLRAGELTPVYIPEATDEAIRDLCRARTDAVDDRRRSRHRLKGFLLRHGYRYQGKSSWSAAHERYLRELVLPHPAMKVILEEYLQGIAVAGERIARCEVGMRALLEQWRLAPAVRALMALKGFQTVAAMIVVSELGEVDRFAHPRQVMAYLGLVPTENTSNDKRRQGRITKCGNAHARWLLVECAQHYATPPKVSQHLSRRQQGQPAQVRAISWRAQNRLHSRYTRLLGRRLQRNKAMVAIARELCGFIWELLHTQSCYHVQATSV

SEQ ID NO: 488722 - protein, 340 aa, unidentified
MINNFLGIDVSKERFDVSLSFISKKGKRETRKRKFKNDDTGFQGLLNFLQKHNVEEVKACMESTGCYSEALAEFLHNAGYFVSVVNPACIRFYAKSKLTRQKNDQTDAEIIADYCQRQEPSRWTPPSPEKKKLKHLYRCSNALKDELTLANNHLEKKERLPKEVANAWEDLAMNIEQKIETIKNSIRELLKQHKELLEDFQLLLTIPGIGEETAIAILAEIPGIKAFINARQLAAYAGTIPQNITSGSSVHAKPRLSKTGSRTLHKAMYFPAIAAKKHNPIIMASCERLKEKGKHAMAIVGAAMRKLLHIVFGVLSSKKAFDPDHIKNYRAKRLTEGLVL

SEQ ID NO: 488723 - protein, 342 aa, unidentified
MKITTVGLDLAKNVFHVVCFDEHSKEVKKRVLRRNQIRMFFAQLPPCKVGMEACASSHYWGRELQALGHEVKLIPAQHVKPYLLGNKNDFNDARAIAEALTRPHIRGVALKTAEQQDIQTIHRLRSQCLRDRTALCNSVRGLLAEYGIVLGKGVSILRKSIHGLLEDAENGLSLTFRHLLAKSHERLIELDGYIDFYTHQLEIQSQQDDACQRLQEIPGYGPITASAFYSVVGSGQAYSCGRDVSASVGLVPGQHSTGGKNVLLGITKRGDGYLRTLLIHGARSVIVHASNKKDRLSQWINRIVAERGKNKAAVAVANKMARTGWAILRHNTHYQVNLNATG

SEQ ID NO: 488724 - protein, 367 aa, unidentified
MKKVSTAATKQSRNISQQRLTIGLDLGDRNSCYCVLDEAGRIQLEQRVRTTAKALQEVFGGMPRSRVALEIGTHSPWISRLLSKLGHEVIVANARKVRLIGENRKKDDRLDAQTLARLARIDPQLLCPVKHRSAQAQADLMMIRARASLVRVRTGLVNAARGLAKSYGERLLGCNVRNMNPEKAEGLSPELQRALGPLLSAIEEVSERICEYNDRIEALAQTSYPQVELLKQIKGVGTLIALTFLLTLEDPHRFRKSRDVGCYLGLQPGRRQSGKSDPQMHITKEGDPYLRTLLVQGAQHVLGPFGIDCDLRRWGLKLAERGGRNGKKRAIVATARKLAVLLHHLWVSGAVYEPLHNSSPMTSAAAA

SEQ ID NO: 488725 - protein, 386 aa, unidentified
MIYIGIDISKYKHDCFICNDTGEVIVENFSFENTKKGFQQFLDLLKPYDNSNVHIGLEATGHYGLNLKLFLEKNNYSFMEFNPLLVKEFKKSLTLRRTKTDKVDAIVICQKLMSVPYKPNSKLFYHKYSIKSLSRLRDSLVKQRSKYMVQLTNILDIVFLEFKSFFNNRFSSTSLYLLNKYRSAEKIANMRDFDTPNKLSKGHFTYAKFAKLKELAKNSIGESNEVFEIELQTLISLYNEIDSKINSIDKQISTIIKELNPPTLSIPGIGELTTAVIISEYGDFNRFSNADKLLSFAGLEPGIYQSGTILTNGKMVKRGSGYLRYSLMNIANVVIRYNPIFYDFYLKKRSEGKTHRVALSHVCKKLLRVIYKLETQNIQFDPSLLK

SEQ ID NO: 488726 - protein, 382 aa, unidentified
MTGTEPQAWGTGLMDDITFVGLDVHKATVCIAVAEGGRGGEVRQLGIFENRPEILSKVVSRLSKGGRRLSFCYEAGPCGYGLHRLLTGYGHECVVVAPSLIPMKAGDRVKTDRRDALMLAKLHRAGELTAIWIPDAAHEAMRDLVRARATAVRVLVKARQHLQGFLLRHERIYRGARAWTLAYRRWLSTVHFEHPAQQIVLQDYIHAVQDAETRRDRLTQQIEELLPNWSMAPVVAALQSMRGVALIVAVTVVAEVGDFRRFANPRQLMAYLGLVPSEHSSGRSVRRGGITKAGNALARRVLIEGAWTYRMSARVSRKLYDRLEPLPAAVRDIAWKAQLRLCARYRRLAAIGKPKVVVTTAIAREMVGFIWAIARLAQPALV

SEQ ID NO: 488727 - protein, 405 aa, unidentified
MHSPITTYAGIDWATASHAVCVIDTAGAVLERYEVEHTEAGLATLVKRLTTSRVSEVAIERPDGPVIDALLGAGLRVVVIASRHVKALRTRYGSAGNKDDRTDAYVLADVLRTDRHRLRPLLPDAPATVALRASVRARKDLVHTRVGLVQQLSAHLALVFPGALGLFARLESPIATAFLTRFPSAERAAWLTPRRFDAWLTRQGYPGRHGGAELHAQLIAAPGGVSGEGTDSLAAVTLGYVRAIAALREQVRLLEQRIAGQLRVHPDGAIFTSLPRSGTVRAATLLAEIGDCRERFPTPEALACLAGAAPSTRQSGKYRVVTFRYACDKKLRDALIDFAGGSRSDSIWAADIYGRAIARGKRHPHAVRILARAWIQVIWRCWQDRIPYDPERHQALQLISLARAA

SEQ ID NO: 488728 - protein, 343 aa, unidentified
MKITRVGVDLAKKVFQVHGVDAAGRRVWQRQLKRSSWLSVLTETVEPGCEIGMEACGGAHHWARELKSRGFKVKLISPQFVKPYLKSLKNDVNDAEAICEAMARHHMRFVAVKTVEQQDIQAMHRVREGLMNHRKAKANQIRGLVAEYGLVAPRQMGPLRKAIPCWLEDAENGLRSAFRALLHGLWEDLQNLDIRLKVLDKEILMLSENHADAKRLKQLRGIGPLTATAMVAQFGDGRHFKRGRQASASVGITPRHAGTGGKNWLFGITKKGNPYLRSILIHGARSVVSKAKHKDDRLSRWVTELAERKHPNVAAVALANKTVRIAWAMLRNGTDYDPELAMA

SEQ ID NO: 488729 - protein, 352 aa, unidentified
MLYTGIDYHKKYSVVSTQDATGARVCEARIDDNEPAAFAAYFARLPEPSRVVVEACWNWGWLYDELGEIDAVADVVLAHPFKTRLIADAQIKTDKLDARALATLLRGNLLATVHAPDPANRARKHVIRQRLFLARVRTMVRNRVHTLVARQRNLARPVFSDQFGKKGLHWLRTLELPAPDATLLGQDLATLEQLGTVIKELETQLGAANTADAATARLQSLPGVGPILAAVMAAEIDGITRFPRADKLCCYAGLVPTTHSSGGKTSHGRMMPFANRWLKWAFIEAAWVAVGCSSYFGDLYTRHRRRGKKANTAITIIARRMCRIAWQLLHDGRDFSLHPPKLTLSPVAPSKD

SEQ ID NO: 488730 - protein, 461 aa, unidentified
MLTPISGHLHVGVDIGSRCHAVAIGLSDGRLLEEFEIAHSAAGFEDFFSRIEAQSESHPYPVVVAMEGYGGHARPLDGLVAERGWSLFNVNNLKLARFKEIFPAAAKSDRIDTRKTLELLQLREHLPLAADVLQEVMARPEENDVLKRLTRRRRRLVNERVRLTSVLHSDLQAAAPGLVEITRDVANLWFLNFLTCRKDLRKLVRIRRASLLKLPAIGACYADRIQAWQNCACFSRDAGLVGTMIRQDALRVLDLKRQIKALDDEIARVAETSGAARRLASIPGFGAVCSAELAGEIGTIARFKSEASLALYLGMAPLDHSSGKLRGSKSPKHVNTRAKAAMINALDRHRKEVLQSQRYYETKRAGGKTHNQAIRALGRHLCRVIFKMLRSDRPYRIDPRGDPADDQINASAREPASDSGNQPSNPPAADRENGPPEGEPSKVRSSPLAAIGSPACTAGPP

SEQ ID NO: 488731 - protein, 359 aa, unidentified
MKIIGCDLHARQQTLAMLDTTTGEVVQMTLQHEGVNVREFYRDLPRPVRVGIEATGSMQWFVNLMEELGIECLVGHPATIRAAEPRKQKHDRRDAELILTLLAENRFPAIWLPTKELLDLRALLRHRHQWVCLRVKVQNALQAIALANGLRRGSSLWTQGGQHAMASLPLSPHAAYRRNELQAMYVKFEREIENLNQRVERHARERVGARLLMTHPGVGPITALATEVFLGDPARFADSKALASYAGMIPGEHSSGKRQRLGGLTKQGNPLLRFLWSEAAIHAVRRDTELKHFYRRKLIQKGLGKARAAVARKLGIRMWIMLRDGIDYNEFCRRGQMQQKSGDACAGMPGPRYGAKVTG

SEQ ID NO: 488732 - protein, 369 aa, unidentified
MEKSTTYVAMDDSKRKIVVGILRPTADDPELREIANDPRQIRRLFERLKPEGRLAACYEAGVSGYNLHRQIMALGVPCSVIAPALTPRRPGQRVKTDRRDAAKLVRLFRAGELTAIHILDEREEALRDLVRCRDDLRRDVLRWRHRVLKLLARHGCTYLAGRNWSRAHWRWIREQHFDLPPLQRAFEATLFALEQALARQAELDTELATVATTAPYREPVAALRCFRGIDTLSAIILLAEIVDFQRFPRPRQLMAYLGLVPSEYSSGETQRRGALTKAGNSHARRVLIEAAWHYRHRPAIGPALATRRHGQPDEILGHAWRAQQRLHRRYRHLVGHGKRSPVAVAAVARELVGFLWAAMTRADHRSAVA

SEQ ID NO: 488733 - protein, 411 aa, unidentified
MLHSSDEGVIVAPAASPGERSESGEAAARCAGRAVAADRCQLGARDAVLQPDRRRRAALVHGRKPNSRQTGRMTRSHSQERHAVKENDLPPVVAGIDVSKDVLDVHLWPSGQNLSLDNTPAGAAELVDRLRPHDVELVVIEATGRYERRPALALMDAGYEVAVVNPRQPRDFAKSTGQLAKTDAIDARILAQFGAVIGPRPSERPAENQLILDELVARRRQLVEMITMERNRIEHALHVRLRRQIEHVVKALEKQLVQIETGILALIDRDDDWRRRFDVLKSVPGIGDATAATLVAELPELGQLNRQAIAALVGVAPINRDSGQQRGQRHIAGGRHSVRRMLYMATLTARSWNPTIKAFAQRLAAAGKPFKVVMTACMRKLLTILNAMVRNNELWRTPCLKETENKMFQPT

SEQ ID NO: 488734 - protein, 465 aa, unidentified
MTTAKLWRNRKERKDWARRLRSEDPGLEVVHPHAAGIDVGNSAHYVAVRPDRDPEPVRRFECFTADLYRLAEWLESCGVKTVAMQSTGVYWIPLYEILEDRGFEVYLVNARHTKNLPGRKSDVQESQWLLKLHTYGLLNNSFQPPAEIRVLRTYWRQRAEHVSGAATCIQRMQKALTQMNLQLANVISDLSGVTGQAIVRAIVAGERNPQKLAELGDPRIEASREEVAKSLEGNWRPELVFVLRQEVEMYDAYQRRIAECDQQLQKHLASFADTELPQSPKAESKEKRAKSTKNAPRFDLSSELKRITGVDLTRIDGIDVMVAQTLLSEVGMDMSRWNTEAHFSSWLGLCPDNRISGDKLLGKGTRHVVNRAATALRLAARNLIRSRSYLGAQYRRLRTKLGALKAITAMAHRLARLVYRMLKYGQQYVDKGTEYYENRYRQPQIHLLQKNAAKLGLQITVAAQS

SEQ ID NO: 488735 - protein, 343 aa, unidentified
MDYFAGLDISVKDTSVCIVDDTGRIVREVKVASEPDALLAVLANHSYRFKRIGLEAGPLSQWLFSALAEAGLPVICVETRHMRAVLKAQINKTDRNDARGIAQMLRVGLYRPVHVKTLRSQKLRMLLTHRKLLQSKAIAVDNDLRGTLRNFGLKVGVVGAARFEARIRELVDDLPDLAVLIEPLLVVRRVLREQIGILHRRLLTVVRDDEVCRRLMTVPGVGPVVALTYRATVDVPARFRKSKSVGAVFGLTCSRDQSGERDRPGAISRCGDEMMRAMLYEAAQSMLVHSTRWSWLKAWAMQIARRRGMKRAIVALARRLAVILHRIWIDGTEFRWTREPVAA

SEQ ID NO: 488736 - protein, 370 aa, unidentified
MIATEVETVIGGVDTHKHTHYAAVIDQHGRLLGHQEFPATDAGYHALLSWMRTHGALEAIGVESTGSFGATLTRALTTAGERVIEVNRPNRIARRMDGKSDRLDAEQIARAVLGQTSTATPKSKCGMVEVIRTLRVTRSSAVKARTQTFNTLFGIMIGAPSPLRDELVTLTKRTLINRCLGLRPETTDFAHLCAHPERLLMASIKTALRDLARRWKALDGEIKALNKQIEVVVRAAAPDLVELFGVGVELAGQFLVTTGDNPERIHDEAAFAKLCGVAPQPASSGRTTGRHRLSRSGDRQANSALYIVTIVRLRHHEPTRAYVERRTNEGLTKREIIRCLKRYIAREIYANLPRPQATSTPAAEPHQTAA

SEQ ID NO: 488737 - protein, 326 aa, unidentified
MKVSYESFAGIDTALKNLDVKVLPANLVKRFTNNASGHRELVEFLKLHKVDLIVIEATGGYEHPAVIAMVHAGLRVHVAQPQVIRSFARSHALRAKNDLLDANVCALYAMERCEQLRIKDRIDPTHETLKSLINRRQELVEAHSAEMNRAQQTADKLTAASINRSLKSLKKEIEIVEEQIDQKIQEDKALAAKSKTIQENYGIGPQVARIILALLPELGTVDTKRLNALVGVAPYDAQSGEKQGTRHIAGGRALLRNGLYMACMTATNHDPFMKTYYQERIANGKPHKSVMMACIRKMLAYLDKQIRALVQPPGLPSNQPSTALNV

SEQ ID NO: 488738 - protein, 345 aa, unidentified
MKKGITIGMDLGDKKHQVCILDKTGKIMAEEEVAGNRTATASFFKQYRGAVVAMETGTHSRWVSQVAAAAGLEVLVGNARKLRMIWQSRQKSDTRDAVMLARIARFDPALLCPIRHRGEQVQMDLEIIRARDLLVGERTRMVNHVRGVVKNMGERLAACSAESFGRKAKLPEALNEALKPMLEMIRELTKKIRGYDLMIKETAANKYPETEQLRQVGGVGPLTALAYVLTLEEPERFAKSRMAGAYLGLVPRLDQSGQIDKQLHITKHGDGYLRRLLIGSAHYILGPFGPDCDLRTFGLKLMQRGGKNAKKRAVVAVARKLAVLLHALWRSGQQYEPKRIQPLAA

SEQ ID NO: 488739 - protein, 387 aa, unidentified
MSEMFNPHAPATAYDHNTTIVAVLELSGKNWLFGAVAPGLSRRTRRSLEARNVEAVVRALEQAKGESAKARFEVARIVVGFESGRDGFWIARALQQRGFEVYVMHAASIAVERRGKRAKTDRLDVDLLLTTLMGWLRGEPGRCTMAPVPSEEEEDLREAGRRRETLVHARLKVENQISSLLIRQGIEGFKPRLKNAETKLCELRTFDGRSLPANTMNSLRLLLAQHRLLSAQLKEIEEARQRVVNVAKPDRLQRMILALARVVGVGVETATVLVHEVFSRSFKDRRALGAFVGLTGTPYNSGSSKTEQGISKNGNARVRRMLSQLAWRWLGHQPESALAQWFNARLGGAKGRVKKVLIVALMRKLVIALWRLAETGEIPIGARLAAR

SEQ ID NO: 488740 - protein, 409 aa, unidentified
MTDKDTRYVGLDVHKHFVMVGAVARNQKVLMPPRKVGLTEFQDWAKKHLLPTDEVVLEATTNAWYVHDLLAPIVGRVVVTHPPHIKLIAATMVKTDKKDTMTLAKLLAAGLAPEVWVPPEHIRDLRALISHRRRLVSQQTQCKNRLQSVLHRNHILPPQGKAYHPDNRDWWTKLNLSPGDKLRVRQELVMLEQLDTLINETSDELHRLSLSDPWREQLPYLIQLPGIGVMTGLVILSAVGDISRFPSAKKLVGYAGLGARVHASGQSYRTGGITKQGRKELRHALIEAAWITVRFDPAWNEPFERLANRIGRRKAIVAIARKLLVVIWHVLSKRRVDRQADPERLVRYFLAWGRQTRVYTRLGLKAPEFARQQLDLLGVGQELSLITFGATYRLPPSTLPVIEAAVASA

SEQ ID NO: 488741 - protein, 347 aa, unidentified
MRFYTKQHKYYCGIDLHTKKMYICILDGTGETVIHQNIRTDPEAFLSVIAAYREDIVVAVECMFTWYWIADLCASEGIPFVLGHALYMKAIHGGKSKNDKIDSHKIAVLLRGGMLPQSYVYPARMRAARDLLRRRNHLVRKRAELLAHIQNTRHQYNLEDPLGRIAKPKNREGVVERFDNPCVQKSIAVNLEIISAYDRILERLERDIIQTANEHDALSYNLLKTIPGVGRILALILLYEVENIDRFPRVQDFVSYARLVKCAKESNGKKYGTSGKKIGNAHLKWAFSEAAVLFLKGNEAGKRYLDRLTSKHGKGKALSILAHKLGRAAYFMLKDKKAFDEKRFLSH

SEQ ID NO: 488742 - protein, 355 aa, unidentified
MSRDIKYIGMDVHKEATVIAVLNANGNLVMESIVETKAGSLLQFIHGLRGELHVTWEEGTWAAWLYDLLKPQVQVLVCDPRRNALLKEGNKSDKVDARKLADLLRTGMLRPVYHGENGLRTLRELGRSYQTISQDLNRVMNRLKALYRGWGIACAGTQVYAPRYREEWLQKIEHAGVRRRAELLYQQLDGLQALRRTLRPELLAESRKHKATQLLRQIPCIGPIRAARLLALMQTPHRFRSKRQLWTYCGLGIETRDSAQYRFVRGQLQRAKKPQQIRGLNRNHNHEMKEIFKGAATRASCGVGPLRDFYVALLDKGMKAEMARLTLARKIAAIALTLWKKEERFDAEQLKTQAA

SEQ ID NO: 488743 - protein, 355 aa, unidentified
MTLSTFSPKDYDLFVGLDVDKNSFSFTIKDHHCMNKSKKIPSEPKQLHHYMQNHFAEKKILYAYEAGPTGYHLHDYLTEQDEDCMVISPLSIPKAPNQKVKNNRLDSQKIVDELRAGKLTSIRVPQGQYRELRHLINLRENYVYNRKAAKQRIKALLLFAHLDYALKDIDQNWSTCYIQALKALSCSPAERQRLDMLLMDLEYARKQTLMILRQLQALVENSKEIQQNMNYLTSLPGIGFIVAITTLGRIGDPQYLKNVRELSAFLGLVPSEKSTGDTVHHGSITHLGDRHLRALLIEASWSAIRKDKELNQFYHRIKNRHHPKIGARKAIVAVARKMTHRIYCVLKDQRPYIVH

SEQ ID NO: 488744 - protein, 433 aa, unidentified
MPTEFAALVAIDWADQKHVWALQKAGSSERETGTIDHTPEAVEDWASGLRLRFGGQPIAVALEQSRGPLVFALTKYDHLVIFPVHPTTLANYRKSFRPSGAKDDPSDARLLLDILTLHRDQLRRLNPDTPGTRTLQFLVEERRKLVHEKTRYSNRITAHLKMYFPQVLHWFDVGTIMSADFLKRWPSLEQLQRAKPATIERFFLDHNSRDRERIAQRMEQIRKAVPATLDAAVLTACSAAIGAWAALLKQVLTAIALYDEKIDELARVHPDYALMNSFPGAGSALAPRLIAAMGSQRERYQTAQEIQCYSGIAPVVVSSGQQRWVHWRWACPKFLRQTFHEWALHSIAYCPWAREYYEQQRAKGKLHNTAIRAVAFKWIRILFRCWKERKPYDEAIYQRALDARHPKTQLAAPAEELQWKNVAGFLKIAIKEA

SEQ ID NO: 488745 - protein, 351 aa, unidentified
MGLQWVRRRTQLAPMGKEDLMRYVGIDLHKRDLVVAVEDETGPVGKPRRIRCEEESVIIEFFDTLHPFRAVIEASASYRWLYDLLSPLGPVMLAHPLRLRAIVTSRAKTDKLDAGVLAKLLRLGEIPAAYVPPRPYQELRDLTRARARLSQAATAAKCQLHALLGSANVHPPYRVPFGVRGRRWLGSLDLGLAANLQRDELLLRLEHYERETGKLDAGLERLAIAFPEAEALSALHGIGLYSALLIVAEIGEVDRFRTDRQVGAYAGLTARVHQSGGHDYHGHITRQGSRWLRWILVQAAMKVIHKDVPLRNFYTRIRKRSSKHIARVAVARKLAGICWVRLRRWHREHAA

SEQ ID NO: 488746 - protein, 341 aa, unidentified
MNIITVGIDLAKNVFAVHGVNDNGKPVLVKPKVARADLLPLIAQLPPCLIGMEACSGAHHWARLFRQHGHTVKLMAPKFVAPYRMTGKRGKNDAADAAAICEAVTRPTMLFVPVKEEHQQIILCLHRTRQGFVEERTASYNRLRGLIAEFGIVLPQKVVCLRREIGAHLENLPGYANLCVGDLLAHADELDKRIEEYDRAIAKAARDDARSKRLMKLPGIGPVTASALLASMGSGHDFDNGRQVAAWIGLVPGQYSSGGKARLGRITKAGDGYLRSLLVMGARAVLNSLGDKQDRFSRWARSLEERRGYWRAVVAIAAKNARLAWAVLKYGEDFRLEPGKD

SEQ ID NO: 488747 - protein, 371 aa, unidentified
MADYREAFVGIDVAKLKNAIAVAESGREGEIRYVGEIEASDVTMRRIIQRIAAKFDRVHFCYEAGPTGYGLHRLIVSLGYECIVVAPSLIPRKPGDRVKTNRRDALALARLLRAGELTPVWVPDQGHEAMRDLVRARAAAVETLRVHRQQISAFMLKHGRIYPRKKGWTMRYLRWLQEQQFNHPAHQIALQEMAEAVRVSKERVERLEKVIEEFVPNWSLAPVVRALQTLRGVDLIVAVTFATEVGDVTRFESPRQLMGYLGLVPGERSTGETVRRGGITKAGNGRVRHLLVESAWTYRHPPRVGTRKLYLMEHAPSRVREIAWKAQSRLTARYRKLAGRGKRTTVVCTAIARELAGFMWAVAREAQAIKS

SEQ ID NO: 488748 - protein, 401 aa, unidentified
MTTYLLRNVSKVQPQQPQPKPATAAAISGGPILFIGLDVHTDSIAVSLAPSDSAEVRRYGIIGGTHDDVLRLAKKLQTAHPDCRLRFCYEAGPHGYPLCRFLHARGYECILISPSKLPRKPGERVKTNRRDADQLARLYRAGELTGIYVPNAQDEAARDLVRARHQVQRQQHRARQQLKMFLLRHNLRYAGTKAWSPAHLRYLATVKMPFPEQQFVFQEMVNVITEAGQRLERYEAEIARVIPGWRWEPVVRALMSFRGLAQLNAVTLVAELGDLHRFATARQLMGYLGLVPSEDSTGDERRQGGITKMGNGIARRALIEAAWNYRSPARISRELLKRQEGLAKEVTDLSWKAQTRLHHRYKFLTGVKHKKSPVAAAALGRELSGFVWAVGQIVSPHPLKP

SEQ ID NO: 488749 - protein, 379 aa, unidentified
MERQQEDPPSIRHRCARVEMFGNHSQDRGSDMQVTTYGVDLAKRMFQVHWVEPDTGEVKRKMLTRGEFAAFFARRAAGLVAMEACGSAHHWGRTLRGLGHQVRLIPTQFVRPFVKSNKTDAADAQAIWEAVQRPEMRFVALKSELQQAVLGLHRVRAQLVKMRTMQANQVRGLLYEFGVVVPRSWRTLLLQAGPILADSSRREVPELLRGELQQQLQGLRELTRRLEQLEHSIGTYRQQDEQCRRIEAIPGVGPLSSTAVLASIGDARTFRSGRQFAAFLGLVPRQSGTGGRVKLLGISKRGDPYLRTLLIHGARAVLNHSSRPGKTPSQWLAGLLSRRPKNVATVALANKIARTIWALLAHGRVFDPRWRRALPVSVA

SEQ ID NO: 488750 - protein, 438 aa, unidentified
MTEMVTLATLFFVGIDWGSQEHRVVVLDAAGKQIRDWKIAHTGSGIADLVERLSSLVDGAVERCQVGIELKTGPIVEALIERGFVVFAVNPKQTDRFRDRFTPSGAKDDRRDAMVLASAVRTDSEHLTRLSKTDSRTIELRAMLRLRDELVGDKARLVMRLRELLWRYYVQLVELADGDFDARWLWALWEKAPTPREGAALSRPVVARLLRDHRIRRIDAAAVMAALKKPSLVVADGVEKASTIHVRSIIERLRLLDAQVRAATRDIEQQLTLWSKLSSADVDTDESAASDETASDDGEPSRCEQRDEVILRSLPGVGTITLATLLAEAGEPLGRRDYTALRTMFGVAPITRQSGNSRVVVMRRACSETLRNAAFNWARAAVDNDDRCRARFEAHVARGAKKPAAYRAVADSLLRVACAMLRSGTEYDPARAARPRAA

SEQ ID NO: 488751 - protein, 351 aa, unidentified
MSQTPRTSITAVGIDIGKNSFHIVGQDDRGAIVLCQKWSRSQVEARFANMPPCLIGMEACVGAHHLSRKLKALGHDARLMPAKYVRPYSKGQKNDFRDAEAIAEAVQRPTMKFVATKTADQLDLQALHRVRERLVSQRTGIINQIRAFLLERGIAVRQGQRSLRAELPRILATPPDVLSPGMVRVIEGLAADWRWLDERIEGLSREIEELAKRDAGCERLMSIPGIGPIISSAMVAAIGTGDGFAKGRDFAAWLGLVPRQISTGDRTILGKISKRGNRYLRVLFVQAAWVVLVKVKPTRWEGHGLKHWIEAASKRLHHNVLAVALANKLARIAWSVLARGRAFEASKLQAA

SEQ ID NO: 488752 - protein, 352 aa, unidentified
MAATAQSAIAVIGIDIGKNSFHVVGLDGRGAIVLRQKWSRGQVEARFANMSPCLIGMEACVGAHHLSRKLKALGHDARLMPARYVRPYSKGQKNDFRDAEAIAEAVQRPTMKFVVTKTADQLDLQALHRVRERLVSQRTGIINQIRAFLLERGIAVRQGERFLRVELPRILATPPDVLSPRMVRVIEGLASDWHRLDERIEVLSSEIEELAKRDAGCERLMSIPGIGPIISSAMVAAIGTGDSFSKGRDFAAWLGLVPRQISTGDRTILGKISKRGNRYLRVLFVQAAWVVLVKVKPTRWQGHGLRPWIEAAKKRLHHNVLAIALANKLARIAWSVLAHGRAFETNKLPAAA

SEQ ID NO: 488753 - protein, 316 aa, unidentified
MESPQTFVGIDVSAKRLDVAVLPAGTHFTVAHTDEGIASLVRRLLELRPHIVVLEATGGYEILVAYAMSEASLPVVIMNPKVLRHFAKSTGKLAKTDKLDARVLAHYAQAIQPPVRPLKDPEQAEPATLMSRRRQLRDMIVMEGNRRRTSTPKVRGNIDQHLAYLRQLLKDLDREIHDAIRRTPLWHEKSEILQSFNGVGPKVSASLIADLAELGTAPRTQISALAGLAPMNRDSGQWRGKRTIQGGRPAVRQALYMAALVASRHNPVIREFYQRLRQAGKPAKVALTACMRKILVILNAMLKNRTYWNPQLPLAA

SEQ ID NO: 488754 - protein, 418 aa, unidentified
MADEIMAEETIRWFAGIDWGSAKHQACLLDGAGTVVGERAFAHGGAGLAALCDWLVSMAGDPGSVAVAIEVPHGPVVDALLDRGFAVYAINPKQLDRLRDRISVAGAKDDRRDARVAAAGLRTDPHLFRRVLAGDPSVIELREWSRLAEEVQQERVRLGNRVRQQLWRYYPQLLALSDDVTAEWVLALWNMAPTPAQAARLREATLARLLRQHRIRKLDAPAVLAILRQPAIPVAPGVTEAAVLHLRSLVARLRLANQEFRQAERKLEELCTALSETQPTAQDSGPGDATILRSLPGVGPVTLATLLTEATGPLARRDYPALRTLSGVAPVTKRSGKSCIVVMRYAAQVRLRNAVFHWARVAVLNDRRCRGRYEALRARGHSYGRALRGVGDRLLGVACVLLRRGTLFDPDYGSSASA

SEQ ID NO: 488755 - protein, 336 aa, unidentified
MATIATIGIDLAKSAFSVHAVSDGGAVQMHCTVSRAKLLPLIAKLSPCLIGMEACSGSHEWARRFREMGHAVRLMAPKFVVAYRKGGKNDGNDAEAICEAVSRPNMRFVPIKTIDQQAVLTLHRIRQGFVTERTAIINRMRSLLAEFGIVVAQGANRARHDIAEHLDRLPILVSSSLQDLLDHLQGLDERVSQYDRQLSQLVRDDEVAQRLQSIPGVGPLTASAIVASVGNATEFRNGRQFAAWLGLVPRQNSTGGKARLGHITKSGDTYLRTLLVLGARAMLHRVARHQDRLSQWVAGVRERRGYARTTVALAAKNARILWALLTKGDRFVAVPA

SEQ ID NO: 488756 - protein, 342 aa, unidentified
MKIIGCDFHPSFQQIAMVDTETGEHTERRLNREEAIVFYRSLNGKVLVGMEACGNTLWVERLLTELGHELRMGDASKIRAMEVRKQKTDRRDAELLLRLLLEERFPQVWVPSPQQRDSRQLLLHRQKLVSARRQFKNQLQHLALNQGLQQKQKLWTKSGRELLEELPLTGWTAQRRADDLELLDQLERRIAELDVSVQQEAASDPIAVLLQTHPGVGPVTSLAFVLTLGTIDRFASSKKVVSYLGLNPAEHSSGGQQKLGSISKQGNPMVRSLLVEAGQSAARLVPELKRAYQRLKHRKHSGVAKVMIARKLAVRLYWIWRTQQPYTATRMQGSPSHLVGVR

SEQ ID NO: 488757 - protein, 377 aa, unidentified
MTQFPVSTSNEQSIYAALELSKNSWLLAIQVPGRDNPSLYPIRGGNAEGLMAKLDAARKRVAKVTGQTPKVTLCYEAGYDGFWLARFLAQRGIECLVMEPASLQVNRRARRVKTDRIDVENILHTLIAWCRGERHVCSMVVIPSVEEEDLRRSHRERGRLVRERTAHINRIKGLLFGQGIRGINVMKNYKTLAPAELVTGDGRPLPKRLGREITREIDRLALVQAQLVETEHERDQAPTPCAATERKRRDLLRLNGIGPTFSAILAREVYYRRFANRRQVASYIGLAPSPYDSGDGRRSQGISKAGNSLVRYSLIQAAWLWLRHQPNSALTQWFHRRTEGQSKRVRCIMIVALARKLAIALWRYVELGLIPEGAVVK

SEQ ID NO: 488758 - protein, 362 aa, unidentified
MEVDRTVPDRSRRIVGGVDTHKDLHVAAVVDELDRVLASQCFATTRHGYKQMLTWMRSFGSLQRIGVEATGTYGAGLLRYMQKAGIEVLEVTTPDPHDRRKRGKNDDLDAQNAAHAAFAGKRTVTPKSRDGMIESLRVLKACRKTAVAARRVALQMIQNTIVCAPDELRETLRKLTRMQLIRTLAAWRPDLTDYRNVVSAYRITLKSLGRRYLELNDEIADLDSMIVAIVDELAPALVARNAVGHGCAAQLLLTAGDNAARLHSEASFAALCGVSPVPASSGKTVRHRLNRGGDRAANSALHIIAISRLRTETRTQAYVAKRIAEGHSKLEAIRCLKRYIAREVFALIKQGHQGPPQAAIAA

SEQ ID NO: 488759 - protein, 354 aa, unidentified
MQHDAPSRKIFVGIDTHKDTHAAVALNGLGVRLGATIVPVNRVGYRCIDAWARSFGTVTAFGIEGTGSYGAGLARALRETGHHVLEVNRPDRSTRRRNGKTDMLDAEAAARAVLSGQASAEPKTGTSTVEMIRHLKIARDAAVKAKTQAMQTLKSIIVVAAAELREQLESIRGPITLARHLASMRPGPLTSPLASAKTALRAIARRWLALHQEIQGHDRDLDALVAATAPHLTAALGIANTTTAELLLLVGDNSARIRSEGAFAKLCGACPIPASSGRTKRHRLNRGGNRQANAALHRIVVTRMRLHQPTIDYVRRRTSEGRTKPEIMRCLKRYVAREVFRSLCKPRPPAPSAH

SEQ ID NO: 488760 - protein, 349 aa, unidentified
MIVIGVDAHKSTHTFVAVDEVGRKLAELTAKATTDGHLSAIEWAKQWPQLQFALEDCRHVTRRLEADLLNRGHAVVRVKTQLMAVHRRSAREPGKSDPIDAHAVAMAALREPNLPIARLDGPAREVKLLSDHRHDMVCERTKLISRLRWHLHELDPELHVPVRGIRHYRVMDELADRLTHFTGVVAQIAGELLSRCRQMTRQINDLERQIRERVRVLAPSLLAIPGCGVLSAAVIIGETAGAHRFHSKDAYAKFNGTAPIPVWSAQERVRLNRGGNRTVNAALHAIAITQVARGGLGKAYVAKLQAAGKTRREALRLLRRRISDRVFQVLRADESELGNTAKGPFAVAA

SEQ ID NO: 488761 - protein, 339 aa, unidentified
MVLYGGMDLHGDNVFCTVMDQDYRPVYERRLPNDLTTVLAALAPYRERLAGVAVESTYNWYWLVDGLQANQYATRLANPARMQENIGLKSANDKTDARFLAKQMVMGVLPEGYIYPKEERPVRDLLRRRMSLVHTRTGEWLRLEGLVARQSGQDLGIQALQGLAAGELGKLLGNDPLVLQAAQISYRHIAFLDQEIRQIEKAVEPRVTLTDGYERLLGVPGIGRILAMTIMLETGPIRRFSGPGNYASYCRAVKAEHTSNHRKKGEGNGKSGNRYLAWTYVEAANFAVRYSPELRAWYQRKAARTKRVVALKALANKLAKACYFILRDGVEFDVKKLVG

SEQ ID NO: 488762 - protein, 347 aa, unidentified
MLADELDFVIGVDTHRDAHALALLQASTGGVVLERELGADGPGYACALALAKKHAPGGRAWAIEGTGSYGAGIARFLLARGERVFEVERPRREGRSHAKTDALDAIRAARTLLAREKLAGPRAGGRREALRALMTTREGTLKAKRAALCQVRALVVASPEPLRAELRPLTRARLLRRLGALRPKRRSEGELRGLFVALRALARRALALTAEERELKQEIEALVCELAPALLSEPGVGPISAAQVLISWSHPGRLRNEAAFARLGAAAPIPASSGRTVRHRLDRGGDRRLNRALHTIIVARRKRHAPTIAYVERRTAEGKSVRETIRCLKRYLARHLFRLLEGMPLAA

SEQ ID NO: 488763 - protein, 346 aa, unidentified
MLYAGLDLSRKRLDVHVLDEEGTTVEVMAVRPDADALRTLAAHVFRYGQEVTAVIESMTGARFVHDQLEFRGWDVAIGDAVKVKGLAPLAAKTDKIDAWVLAELGRRDLVPEIWLPTPDVRAERERVRFRLHLVRHRTALKNRIHATLITFGHPVPVADLFGVKGRELLARMDVPEPWSSSLATSLAMVDDLDERIDACAKDLRALGADHPSIPLLLTVPGVGHILAYTIASEIGDIRRFASPKKLTGYTGLCPKVYQSGDRDVRGPLAKNGPKYLRWALVEAATHAARHPHYKERYERNKKRLGRQRGAKVARIDIARKLAEAIWHVLTKNEPFAPAGPAMPLVA

SEQ ID NO: 488764 - protein, 518 aa, unidentified
MTNTQRWARGRNWPTAAWLDTVTGGMRVTGPSIGIDLSINGAHDCTVLDATGQVVQRFTFDSSSAGLQKLEQCVRALDPSDGAPVVIMEPTGLAWFLPCHYLRAEHPEVKVVRIKTSKVAALRRYLKQDAKSDRLDSLTLAKMPLVDPETLYAVDLPPAAVQGLDRMTRQRARLVESLTGRKNRLQALVGGYLPGLMAVVGKPWESEFRAMLTVSLNPFTLAGQGTTALRKAVQGKRSREALSEVRLPRLRTACKQLTQLYGSIIQAGLLTEIFFDDVRDEVARELRLMDVEEQEVKELEAAIARRYQEIVPEDHLRTIKGLGAVTAPTILAAVGTPQRFHSQAAFRGWTGVVAHASQSADNDAKGLPMTKAGPRRVKLALYQAAEIARQWDPQLAKLYYDQMVHKGKPHYKAIGAVMSHLASRIHAVLTEQRDYVLRDVGGREVSAREARTIIQTQYQVPAAIRAERRTSKRRKRDVSTGAYRGSATRSSRRSPTSSHLQSTRSQNANQTGALPTTH

SEQ ID NO: 488765 - protein, 353 aa, unidentified
MRYIGVDLHTNSFTACYLEQEKPEYIKTFRLQDLGNFIKNLQETDEVALEATGNSCFFYDEVSPYVKRVVVVAPLQFEVIRRSVSKTDKHDARAIAFFLSKDMLPEAKCKSKQCQQLASLLKTRDQLVKSRVSLINKIHGLFNYHGIKIKKEVLTIKAGFECSLGKHDWSHLEKVEIEVISSNLEVIRESLKKLEKEIIAFAQQLPGFNNLISIKGIGAISAAVFVATIGDINDFSNPEKLTAYFGVVPRVSQSNQQCTIGRITKRGSKIGRTSLVQCTWIAIRYSPYLKSFYERVKKSAVLLRLLLLLLGSFSQLFSILLKTTGFSKILQNMKFLIDNNHRRNIYELYNRTK

SEQ ID NO: 488766 - protein, 400 aa, unidentified
MTVAVGIDVAKDIHWIEVKVAETGTVLTSHAVENTPAAIAGMIDEVHAAETVHGPARVGIDLLGGIAGLLEAMLIEAGLTVVHVPGLAVNRARRGTVGGEHKSDPKDARVIADQVRMRDDLRQVTAMREDDVELRLLVGRRSEIVADQTRRAARLRDLLVSINPGLERIVDVTTKTGLWLLTRYAAPGELRTAGRARVLAHLRKLDHVKAASITALADAALAAAHAQTISVPGEAVAADLVRDLAREMLTARDQLHHIDRRIEGTLDRHPDAALIRSLPGMGATLTAEFLAITGGIARYPDGDHLAAAAGLAPVLKQSGKVRYLQRARAGDSALKRVFYQSAFVAITCDPTSKAYYRRKRTEGKTHHQAVLALARRRVNVLHAVLRNRDPYRSQATPHAA

SEQ ID NO: 488767 - protein, 347 aa, unidentified
MMVMLGTDAHKRSHTIVAVDPAGAEIGSLTVAATTDGHRRAVQWAGQFDERRWAIEDCRALSRRFESDLLGVGERVVRVPPKMMARARATARGAGKSDPIDALAVGRAALREPDLPIAQLEGPSREVRLLVDYRETLVHQRTGFQNQLRWRLHELEPGFDPPPGSLNRYRTLDTVDELLTKHTSMVAELATRETGRIRELTREINQLERDIEQRVATLAPSLLSIPGCGTLTAAKLVGEAADITRFRSKDAYAMWAGAAPIPVWSANNTRFRLNRGGNRQTNAALHRIAITQMRIHPDAQAFIKRRIETGSTKREAIRLLKRKLANVVYRKPPHRHPNNPTRTRRLT

SEQ ID NO: 488768 - protein, 356 aa, unidentified
MPPIAPADVVVGVDTHKHVHAATALSGLGARLGTITVPASAEGYRELEAWACSFGAVHAFGIEGTGSYGAGLARALAGRGHAVIEVNRPNRQLRHPQGKSDPLDAESAARAVLGGQATARPKSGTSTVEMIRHLKVARDTAVKSRTRAMITLKTLIVNAPAPLREQLDHLSSRMALIHHLAVLRPGALTSTTASTKVALRALARRWLALDAEIKEHDLALDALTDACAAGLKRAHGIATGTAAERLILVGDNPERIRSEAAFAKLCGTCPVPASSGKTTRHRLNRGGNRQANAALYRVVITRMRSHPPTLAYVAKRLAKGRTKREIVRCLKRYVAREIFGHLCGPKLRAACRPEGA

SEQ ID NO: 488769 - protein, 482 aa, unidentified
MVKKNKNKRKKTKKVVVFKEIRRNVAGIDLAWRADHYVCGPIQENGEKEITSFGTTTPELYKMLKWLQERNVESVALESTSVYWIPTAELLEANDIEVVLIDPREVRMVPGRKSDMKDCEWIQKLHSCGLLRGAFRPPESVVAIRSILREKETVLAMRVQTLQQMQKSLDQMNIRVHHAVSDIDGVTGTAIVRAIVEGERDPIKLAAHRDKRCKKSLSEIAEHLTGTWRDEHIFNLTQAFNRLQFLNKSIEEYDSRAKEMFAALSTTITDSDNPTSSSSDLPIEKPTNSTSPTSTPAKLPAQKPTAKELKNITEKKSLYKIMGFDLTSLAGIGYETAAIIVAELGNNLNRFEDENKFASYLGLSPSHGKSGGKNVRQNRRCKNTSRAGRALRMAAASLYHSTSALGAYFRNVTRRSDRKTAVKATARRLAHMIYRGVVYGKQYLDCGAEAYDNFLREKMVKNVKKIITTFNISMLEICPDIK

SEQ ID NO: 488770 - protein, 357 aa, unidentified
MIAMKYYTSTTEFNCGIDLHARQMYVCVLDRDGKKLVHTNIKNNDFAYFLKLVAPYRHDLTVCAECMFGWYWLADACADAGIHFVLAHALYLKAIHGGKNKNDRLDSEKIAHLLRTNFIPPSYVYPAAKRPLRALLRQRLLYVWNRSELLARLQSHQLAYNRPTHRQTLYNRESWSEQLLTAEPDPVRQLALQNDLALITHYDTQLATLEKEMLKLTKQTASRDFTLLQTTPGIGDYLGLTILHEIGDIARFPSVKDFLSYCRLVKGTVASAGKIKGLRGAKLGNPYLRWAFGEAAVVAKRDPLVIGPLAQRLEARLNNKFKANTVLAIKLARAVYFMLKTKTVFDPERLVAALSKN

SEQ ID NO: 488771 - protein, 415 aa, unidentified
MKVVFPTCCGVDVHKSFLVATIIATPKDSLQPSYQKKRFTTFNSSLNRFADWLHENNCLDVCMESTGKYWVPVFNALERRGIRTVIANPKWVKAVKGNKDDTKDSKWIGDLFRIGLVKSSFIPCKDIRILREFTRYRYKLTSMRSSEKNRFQNAFTVCNVALDSVVSDMFGKSATAITDYLTSDEPFDAQHCVSLLQRSLRKKADAVVDSIEGYSITDEQKARIAIIRKHHYFINSLIAEMDSCIDGMVVKYESAITLLCTIPGVDRDSAITIISEIGTDMSQFGSSRRLCCWAGLTPGNNESAGKKKSVRISRAGVYLKPALVQVAHAAVKDKASPYYARKYEQISKRRGKKRAIIAIARMILTAIYSMLSTGEVWNPVDLYKVDMPEHLKEKQLAKAVKQAIRLLESQGLNVS

SEQ ID NO: 488772 - protein, 339 aa, unidentified
MEETNVFIGIDFSKKTFDVAVMDGKCRRFPNSEAGCDELLGWLGQDLGEGLSNCLFYCENTGSHSLLLADRLHLNGCTLWMENPLQIKRSVGLSRGKDDRTDAMQIARYAARNKADAVAYEPVSQHIADLRNLLSHRALLVSQCTALRNAATERKVTDKGSACDGFLAQLSADRIQRLRHDIKEIEARMLQIIHGDERMDKHYSHIVSIKGVGLVNAAALIALTADFMKFPLDAGKLACHVGVAPFKYESGTSVRRGTHVSRLCNHNFKPLLTQAALSAVRHNPDIKAYYTRLIMRGKPSPLALNNVKNKLVHIIVGLIRKDEDYCLHYRPATRECNIN

SEQ ID NO: 488773 - protein, 308 aa, unidentified
MKELQFEQLISVGCGIDVHKDVIVATIRKSSKDYETRSFQAFTSSLIELKDWCTIEKVTHIAMESTGIYWKPLFNILEEDFEIILVNARHIKNVPGHKTDKKDSVWISKLLLSGLLKGSFIPPVAIRELRDLVRYKKKKIQFIAAEKNRMIKFLEDCNIKLSSVVSDTQGVSATKIINDIIDGNDNVKHLITHAHGKIKASKEDIEKALTGKITSHHRFMLKMIRETIDENEKLIAKIDSQIDLCVSKYEEEIRNLETIDGVGRDTAITIISEVGTDMGFFPNEQHLASWSGLSPGSNESAGKKKAQG

SEQ ID NO: 488774 - protein, 370 aa, unidentified
MYLVGIDISKYKHNCFIATETGVQLKEFVFENNFEGFKMFHKSLSELDQDQEIRIGLESTGHYGTNLKQFITASRYTYLEFNPYLTHQFSKAMSLRKTKTDKVDAKTISNMLGSVDYKTLHTQFYHNNELKQLVRDRDDILINRSKTLVKLTNLLDILFPEFKPFFNNRLGSTAFLILKKYKSAQRISKLTMKDYEVLKSKSRGKLTYPKFSRLKSLAKDTIGVQSEIYNKRIQMLIRDYEYLDQSLDEIDQDITTLFGEVKSKLTTIPGLGIIQAATIYAEIGDIHLFSIPQKLIAYVGFDVSISQSGTSEHHGKIVKRGSPLLRKAIWTYALPSLRFIPTLNDYYHKKKSEGQHHKVALTHVCRKLIV

SEQ ID NO: 488775 - protein, 346 aa, unidentified
MLYAGLDLSRQRLDVHVLDEDGRTIEVTAVRPDADALRTLAAHVLRHGQEVSAAIESMTGARFVHDTLELWGWDVAIADAAKVKGIAPLAAKTDKIDAWVLAELARRDLVPEIWLPTPEVRAERERARFRLHLVHHRTALKNRIHATLMTFGHPVPVADLFGLGGRELLARLALPEPWTDTLATSLRMVDELDGRIDACEAELRALGADHPSIPLLLTVPGVGWVLAYTIASEIGDIARFSSPKKLSGYTGLCPLVRQSGDRDVRGPLAKNGPKYLRWALIEAATHAARDAHYRERYERTKRRLGRQRGAKVARIDIARKLAEAIWHILTKHEPFAPAGPTMLLVA

SEQ ID NO: 488776 - protein, 336 aa, unidentified
MVQIYGIDLGMSSFDVSFLSESGSVRHLSGVKNTVHGISKFLLSLPSSAVLCAEHTGVYGDLLLRLCTLNRTCLCFVPGYQIKHSLGLQRGKSDPLDACRIREYAERFYDLLRPCFYPGEEMSELQELYRTRSLLVESRKRLDTLNIGDNCKSSVSLAADHARRAVLAELNTQISGLDHEIEALIQNSSEFSRNYQILTSIVGVGPVTSCELIIKTENFRKLDTAKKCAAYAGIAPYPKESGKMKCGHKISPMGDKQLKTLLFLCARSAKEHNKEIRLYFLKKHKVEKKHFFVAMNNIANKLLRLIYSLIHKQQTYDRDYIQRDPRCVVISDTHKC

SEQ ID NO: 488777 - protein, 345 aa, unidentified
MKLTTVGIDLAKNVFQVHGVDDRGKPVLKRQLKRDQLASFFAVLAPCLIGMEACGSAHHWARKLQEFGHTVKLMAPQFVKPYVKTNKNDVADAEAICEAVARPNMRFVPIKTTEQQAVLAMHRARQGFVKARTAQANSIRGLLGEFGIVIAQGIGHIAERLPGILEDGENGLPGPFRQLIQRLGDHLKELDRQVGQLEREIQQWHRGNEASCKLAEIPGIGPITASALVASVGDAKSFANGRQMAAWLGLVPRQHSSGGKSMLLGISKRGDSYLRTLLVHGARAVVRYAEGKADPSSDWLKGLLTRRNTNVAVIAQANKNARIAWALLAHDRRFRSGYTPAVAGA

SEQ ID NO: 488778 - protein, 355 aa, unidentified
MSQEKYIGMDVHQATISVAVMDAQGKLIMECLLETKAATIVEFIRGLHGTLSLTFEEGTSAAWLHDLLKPHVSWLVVCDPRKNALLKDGNKSDRIDARKLAGLLRGNQLHPVYHGEHGVRTLKELGRSYLTITQDVTRVMNRIKALYRSWAIPCAGATVYSPRHRAEWLAKIAEPGVRVRAERLYQQLDLLQPVRLEARRDLLAESHKHSAVKLLRQIPSIGPIRSALLVALMQTPNRFRTKRQLWAYSGFAVETHDSGEYRSVRGKLQRNRERMTVRGLNDNHNRDLKNLFKSAAISASTRPGPLRDFYVARVEKGMRPTMARLTLARKMAAISLAVWKKGVEFDPQQLQRQAA

SEQ ID NO: 488779 - protein, 324 aa, unidentified
MTKMESAVLGIDVSKKTLDVTLLTEKGGKRRKRIANTTAGIESLKTWLQKQTSNVVHVCMESTSVYWEEVAEALHAAGQQVSVVNPLRIKGYAMSQLRRSKTDPLDGDVIAHFCRTQKPDLWQPPTVEQKKLRALVRHLEALKKSKAQQLNRLSVCRDTEVKASLEMLLATLATEIERVEQRIRDFIDQNPDLKTKKELLETIKGFGEKTAIHVLAEMYDLAEYENAKAAAADAGVTASHFRSGTSVRKRSKMSRMGKAVIRSALYYPAISAIQHNPVVKALAKRMEAKQKTKSAIRVAAMRKLMHLAYGVLKNQTPFDPAYAA

SEQ ID NO: 488780 - protein, 449 aa, unidentified
MSKVGKTLGLPIVNARAAGIDIGARIQVAAVAPELSDDPVRTFGSFTADIEAMANWLVSVGITTVAMESTGVYWVPVYEILEEHGLTVVLANARDCKAVPGRKSDVNDAQWLQRLHACGLLRPSFHPARDIAALRAYMRIRDRHLEYAAAHMQHMQKALTLMNLQLHHVLSDISGVTGLKIIRAIVAGERDPDVLASMRDVRCRESLLTIRSALVGNYQPEHVFALSQALALFDSYQDRIADCDRQIESSLRQLNVGRPEPETKLAAPRTKTKQVNAPKFDVRAMLHQLTGTDLTAIHGLGPSISLSLVAECGTDLSKWPTEKHFTSWLCLSPGCKISGGKVLSARTRRSSSRLASQLRLVAVNVGRTETALGAFYRRLAARIGKAKAVTATARKLAILFYRAMRFGMQYQDPGADQYEQRYRERVVKQLERRAARFGFALQPVEEGVS

SEQ ID NO: 488781 - protein, 332 aa, unidentified
MKSVHIGVDVSKEKLDVYVPAAKEGARPTTMEVDNNAKGFRKLRELARKAKATVCVEPTGGYELELIAFMHKFDVAVAYADALRVRQFARAEGSLSKNDAIDAALISRFADKIGVRILDKQDVDAVELKRKTKFRQTLTDARTAMTCRLETEIDADMKAMLREQVKHLDRLIARAEKSCLETVARNEPMDTLRKRFVQVGGVGDVTAIAILAGLPEIGKLPDAKLNRLVGIAPEEKQSGTREWRRKIWGGRKDVRNALYMATTASLLWNAKLGAYYRKKRAEGHPHKWAMVPTMRKLLSLLNRIARDPNFVPAPEPETTKRNATAWRKRKAA

SEQ ID NO: 488782 - protein, 419 aa, unidentified
MFKIFRKNCCGLDVHKTWIFACIGITDANNLTVYKQARFSSFTKGLTELSDWLGSFHCSDVCMESSGKYWIPVFNILEKSCNVTLAHPKYTKPRKGNKTDRKDAKWICDLFMCDMIRPSFIPPERIRHLRDLVRYRTKLTNMLTGEKNRAQNCLTVSNLKLDGVFSDIFGKSSRSITDYILDHPGESFDVTPFVDCHCKTPIPEIQAAVDGAISPEQAIKLRQCLTHIDELDAHKEKIEQGILKICEPFSDCLTLLRTVPGFDHNPLTAITVLSEIGYDMAVFPSAKHLASWAGCCPRNDQSGGKVKSTRISRAGSNLKPLLVQVANALVRSDKHPEFKERYRRIKARRGHKKAIIAICRMLLTAIWNILKKMVPYSPDGFLSSRPVHSSKILTTSQAINLLKSRGYIIKDEWSVAANN

SEQ ID NO: 488783 - protein, 328 aa, unidentified
MLLVACDVSKATVDAAWFDESRQRWFERSKVANNRRGWRGLLEWLEKSSGKRRAGFRLVVEATGVYHRPFVDFAYGQGLRVIVTNPGRAAENARSHNRLNKNDRLDARSLHGYGQELKKVFEYEPDSPEINGLKAMLSRLRQLDKDLTRERNRLEKCPYIAESQSLTASIRRQMKALEREKKLIQGEIDELIRSHPDLKHLQDRMCSTKGVGKVMSQWLLPLLYREQFTSARQLAAFLGLTPIHKRSGTSLKKRGRLSGRGNGYLRSRLYMPAVSAITHNPELRCFYDTLTRRGKTEKQALTAVMRKLVHICYGVVKNDQPYRCPAAA

SEQ ID NO: 488784 - protein, 411 aa, unidentified
MEVVYRRCSGVDVHKESISVCVLLMEDQKVKKQIRRFGTMTRDLLELRLWLQQLGVTHVAMESTGVYWKPVWNLLEDQFELLLVNAQHIKQVPGRKTDIRDCEWIADLFQHGLLRGSYVPKQEQRDLRDLTRYRVRLNEDKVRLANRIQKTLEDANIKRASVATDVLGASGRTMLQAIAAGEDDPEKLAQMARKGLRKKLPQLRLALQGRIRDHHRFLLGQLLEELRFTEDKINELDQRIQQCMLPHHHAISLWTSMPGIRMTTAWSLVAEIGTNPEQFPQGSNLASWAGMCPGNNESAGRRKSGKTRRGNRWLRRALNQAAWAAARTKNTYLAARFHRLAAKRGSKRAIVAIGHKILVLAHYMLQHNTPFRELGAEYYQRLRAPSFSQSLVRRLQRLGFQVTLTPTQQVS

SEQ ID NO: 488785 - protein, 400 aa, unidentified
MNFIGIDVSQGKSHATQITDEFEKRTFAFNHNKSGFNDLSTHFTSDTCIIFETTGYYSNALTRYLQQKHIKFIELNPFEASLRMAELRRNKNDSNDSFKLAMLGITQYDEIKFRGRQYSDGSYKNLKKYCLNYLYLQKCQTRAINHLRSLIELSFPELNSIFVHASSVMALQMFRMYAHPDFLVGLTVKNMVDRLYQIIGKHINRTLIEKYCAKVWLAAKGSYPSIEADDPIILLIFDYCDEIEAYNNRLIKDKKEVIRRASKFKKFRIITSIPGTGQLSTALLLGFTGDLNRFSIYKQLNAFLGVDLNRYQSGKFEKRDKINRRGSSQGRYIESNMIRSMLRNQARINNHIIDYYYKMRKPPYSKKDKVALIACVNHLNRTIINLVHTNQLYDYQKAIH

SEQ ID NO: 488786 - protein, 344 aa, unidentified
MKYYAGLDVSLEETSVCIVDGEGTIVAERKVASQPGAIAEALRDSGFALTRVGLEAGPLSPWLHAGLRTEGFAVICIETRQAKAALRAMRNKTDRNDARGIAQIMRTGWFRIVHVKSGESHELRFLLTNRKTLQRKALDIENEIRGTLKAFGLKVGKVSRRRFEARVLELVADRAALHRMVVPMLKARAALLEEFARLHRMVLEVVRDDEVCRRLMTIPGVGAITALTFKTGVDMPGRFAKSKTVGAHFGLTPRKFSSGEIDYQGRISKCGDAMVRSALYEAANVMLTRCTRWSALKAWAARIAKKAGAKRARVALARKLAVIMHRMWIDGTDFQWGEQTKAAR

SEQ ID NO: 488787 - protein, 371 aa, unidentified
MEHTRFIGLDIHKERISVAVAESGRSGAVEYLGEIANEPGAISKLCDRLRRPGKPLAFCYEAGPCGYGIHRQLTRLGHRCDVVAPSLIPTKAGDRVKTNRRDATMLARLHRVGELTPVWVPDADHEAMRDLIRLRSVVRQIVTRARQHLQGFLLRHGRKHGRGTAWRMAYRRWLSTLAFEHPAQQIALQDYVDAVMDAERRLKRVEEQVFGLLPDWNLRLVVDGLQAMRGIALINAVVLVTEVGDFTRFSNPRQLMAYFGLVPGERSSGETVRRGAITKTGNAHVRRALVEGAWAYRMKARIGRHKVDRIEALPKVVRDIGWKAQVRLCTRYRRLRARGKTANVVNVAIAREMVGFIWSIACTIQSAPRAA

SEQ ID NO: 488788 - protein, 392 aa, unidentified
MVCVGIDVAKDKHDCFILSSEGDVLADVFTIDNNLDGFETLLQRIHSCTRPTDSIKVGLEATGHYSYNILGFLLDKGLATYVINPLHTNLYRKSLSLRQTKTDRIDARTIASMLMSDVDLKSYTDTAYHNEELKSLTRYRFDKVRERAQLKQSVSRLVNILFPELETLVPTLHMASVYAMLSEFPGAKQIACVHLTHFKTVLSDASRGRYDRDKAVEIREAARRSIGSSMPAKSLELQHTIRLICELDKEIDEIEAAIKKIVDEMAPPILTIPGISYRMGAMILAEIGDFSRFDSPDKLLAYAGLSPSTYESGKLKATGSYAHMEKRGSRYLRYALFNATKYVCYWEPSFAAYLAKKRAEGKHYNVAISHAAKKLVRLIFALQKSGKAFLPA

SEQ ID NO: 488789 - protein, 348 aa, unidentified
MVTLGVDTHKRSHTLVAVDEGGRQLGQLTVAATAEGHLAALRWAARWRERRWALEDCRSLSRHLEADLLRVGEAALRVPPKLMTESRKSARTPGKSDPIDALAVARAAIREPDLPVAFLDPAGRELRLLVDHREDLVKERTKVQNRLRWHLHELDPSFWVKPAGLNRQHVLKAVEARLTCESSTLASIALELVARVRELNVRVGQLERQIAERVSPAAANLLGIYGCGALTAAKLVAETAGVHRFRSRAKYARHNGSAPIPVWSGNSTRHRLNPSGNRQLNAALHRIAVSHLRGHEPSIAYVAKRRALGDTKREAMRALKRRLSDDVYRRMLLDHSLATPQGLASAAA

SEQ ID NO: 488790 - protein, 340 aa, unidentified
MNTNAPQLGIDVSKLKLDVALLLPTGAHAATFVNTPKGFLALARWLARFPVQPRVCLEATGTYALPVTHYLHGQGLIVSIVNPMGIHFFARTRMSRNKTDAHDATLIAHFAQQHQPRAWQPPTPAQAQLQPLVRVREQVLESRVVAQQHLESAPASTAKYFRAQIRLLDRQLRALAGQIQQVLQAHPTLKESAALLTTIPGVGTVTAATVLAIIPEIDQLDNARQLAAFAGVTPSQRQSGTLSGRTRMSKLGHRRLRKALYFPAITALRCNPRVQALAIRLAQKGKAKMVIVGAAMRLLAHLIFGVLKNRTAFDPTYQQRRAGTTSSRAAASRQLAPGCP

SEQ ID NO: 488791 - protein, 345 aa, unidentified
MNSMYYIGLDVHKKTISYCVKDGSGQVHREGKMGATRRELDDWIKTPPQPWSVAMEATIFTGWIYDHLLPHAAQVKVAHPLMLRAIAAAKKKNDRVDAGKIADCLRCDFLPECHMAPTAIRDRRRTLRYRHLLVRQMVQMKNRVSGLLMETGVEYNKRRLHKVGYFRELLSTNEEVNESIRPLLKLSRETIVRLQKTEYALLSSLQRDPLLAERIQRLRTVPGVGPITALTWALEMGDTSRFRSIRQAISYCGLCGDEKSSADKVMRTPLSKQRNKHIQRVLVEAAKLAPREDHKLALVYASEKQKGNANRATLAVARKMVAYLLAVDRGRRNFVPAEEHRRTAA

SEQ ID NO: 488792 - protein, 341 aa, unidentified
MKVSTLGIDLAKNVFQLHGVDHEGHTILRKKLTRAKFVQFVIQLEPCLIGMEACSSSHYFARLFTRYGHEVKLIPPQYVKPYVKTNKTDAADAEAICEAVTRPNMRFVQIKTEEQQAVLALHTERGILIRERIACANSLRATLAEFGITIAAGQSHLTRELPAILEDGENGLSPFVRTSIYRQSKHIRELEEQVKQVEEALASWYRTQEACQRMAKIPRVGMLTATYVVAAVGNARQFSTAKQFASWLGLTPKEHSSGGKQQLGGISKRGDGYFRYLLVHGARALTAWVNRNGAVEENSWLQGLLERKHYNVAVVAMAAKTARIMWSMLSHNTEYQPRQLA

SEQ ID NO: 488793 - protein, 428 aa, unidentified
MKRKAAVCLPFILTRGLLWFLPEQSRTNGRDTRVPEALQCKQFELANTPMKTELYVGLDVDKEWIVTAVAEWGRNGPVHDLGAISNDLHALEKLLARLRKRYGPDVRICACYEAGPCGFGIARRLHQLGVECTVVAPSLTPTRSGDRLKTDKRDARKLARLLRAGELTEIYIPEPTDEALRDLCRARSDAVDDRRRSRHRLKAFLLRHGYRYQGKSAWSAAHERYLRELVLPHPAMKVILEEYLISVQLASERIARTEAAMSDLLGKWRLEPAVRALMAMKGFQTVAAMIVVSELGALDRFTHPRQVMAYLGLVPSEKSSSDRRRQGSITKCGNAHARWLLVECAQHYAAPPKVSKELSRRQQNQSRAVRLISWKAQNRLHQRYVRLMARRLQRNKVIVAVARELCGFIWELLRSQECYHAPCPSGMN

SEQ ID NO: 488794 - protein, 418 aa, unidentified
MEIVYERVAAIDVGKKIIAVAVRTPGERAGKRRQQVRKYNTFHQTLAEMVAWLACEGVTHVTMEATGIYWKPIFHALCEAEHPVEVLLVNARHVKNVPGRKSDALDAVWLAKLTECGLLRGSFIPPPQIAAIRELTRYRKKLIEQRTSELQRLAKVLEDSGIKIDSVASALTTLSARDMIEALIAGQRDPAVLADLARGVMRKKIPDLTLACAGRFGDQHALMCTLHLEHIDHLADMIARLDTRIDEATLPFAQQTALLATIPGIGERAAQVIISEIGVEMSRFPTAAHLASWTGLCPGNNESAGRHRSGKTRKGNTELCAVLTECAWSAGRTSTYVGAQFRRFHRRFGKKGGPKAAIATAHTLIVIIWHVLAETTAYRDLGSDYFTRRVDNPEARKRRLIRELEALGHKVSIEPTAA

SEQ ID NO: 488795 - protein, 452 aa, unidentified
MDVLHERCAGLDISKKDAKACVRTPSTKRRGSFTTETTTWGSTTNAVLDLRDHLLAARVTLVVIEATSDYWKPFYYVLAEGLNVILVNARQVKNLPGRKTDVSDAAWLAQLGAHGLVRPSFVPPEPVRELRDLTRARTTATRERSRVVQRLEKLLEDTGIKLSAVAADIMGVSGRAMLEALIRGEADPHVLADLAKRKLRNKIPELTEALTGRFREHHAFLARLHLDQYDQLTVMIDQLTGRIEEAMAPFRGALDLLDTVPGINQHVAEVIIAETGGDMTRFATAKHLASWAGVCPGHHESAGRTKNTKVRPGNPYLKGALGLAAFGAVKNQGHLPRRPLQTAHRPPRPPAGPRRRRTLDHHRDLAHAHRQRRLSRARRRLLHPPRPRTRHPPGHHPAQPARLHRHSQPKGDRSLTGRPGHPPALNGQRAPSPAHTHPDLLLFTRQKHSPLI

SEQ ID NO: 488796 - protein, 352 aa, unidentified
MKIIGCDFHPSFQQISLLDLESKERVRRKLMHATGEAERFYRSLQGEGVRVGIEASGNTRWFQRLLEELGHELLIGDAGRIRAAELRRQKTDRRDADHLLELLESGKFPAIWVPSAEQRDLRQLLLHRHKLVQMRTRIKNQLQHVAMNEGLQKKRQLWTERGQRWLKELSLPPWTERRRQDLLLLLQGLEPAIQELSQAVEQQAEQDERVRLLMTHPGVGPITGLAFVLVIGDVQRFSRSREWASYLGLIPCEDSSGTRRRLGAISKQGNTLLRTLLVEAGQSAARLDPELRRAYQRLCHKKQHTGIGKVMVARKLAVRLYWMLKTQQPYAPARTQSSPSHPVSTREGSSSL

SEQ ID NO: 488797 - protein, 347 aa, unidentified
MAKLIIGIDFSKEKMNYCCMESESMSILQEGEVENSRKGCAQMTGRLRSLYKGLKAADFLFCGENTGMYSMEVVECFTQRKYLFWLENPLQIKLSSGIQRSKTDRLDARMIAEYACRHRDKAKGCPLPDKGLKKLRELHLTRRMLKECEVKLRNFSGSTSKASSEASKALRKVMKAIMESVKSLEKEIRETLMEEDEFKENTELALSVPGISWVTASAIILDTRNFTRFDSARQYANHTGCVPHEHSSGTSINKKPRVSKASNRYVNSLLTQGALSLLTHNPRTKEYAQRKKTEGKPFGFIVNNIRNKTIHRLFAVIRNKTPFCWDYVKGSPTSCVNLLQKDVVTFA

SEQ ID NO: 488798 - protein, 332 aa, unidentified
MAYDFVIGVDVGKYFHHACVLDPQGRQVLSKRINQHEGSLRKLFGQFLADNASVLVIVDQPNNIGRLTVAVAQDMGADVRYLPGLAMRQLSRIHVGNSKTDVRDAYVIAHAGLNLPDALRNVDRVEEVFTQLKVLNGIDEDLARAYTRQINQMRSALVGTYPAFEHVLRGQMIHRKWILHLRAKYGGPTKIRRIGKTRLAAFARSHKARNPEPVINAMLAAIHGQTMSIAGAEYAELGVAMSAKDALAKLEHRKQIEAQVLKLIKDIPQTEILLSMPGIGPRSAAQILMTVGDMSDLPDAAHLASYAGLSPRTNQSGTSIMSNSPNRAGNKN

SEQ ID NO: 488799 - protein, 372 aa, unidentified
MTSIIYIGMDVHTTNYTLCCYTVDSDDAFAVVNVKPDYHEILKYMERVRSTRGGNCDFICGYEAGCLGYSLYHQLAKHGVACIILAPSTMPQQKGKSIKTDKRDAKNIAKCLAFNLYSPVYVPTAEDDAIKEYIRMRDDVKADLKRTKQQIISFCTRHGFHYEGKSRWTQAYFKWLDSLVSENALYKETLQEYLALYYTLDEKIAVYDARIEELAHQKRYEENVRKLCCFKGVSTHTALPLLVEVGDFHRFRTAQHFSAYLGLVPGESSSGEKVIHTNITKAGNSHLRTLLVESANSYSRGVVGKKSKVMKDKQGGNSPEIIAYADKANERLHRKFYKIAIRSKKNVAKTAIARELSCFVWGMMTNHISRAV

SEQ ID NO: 488800 - protein, 333 aa, unidentified
MKKYLFHVGVDVSKQKLDFNILDVSSFKSEHFVVDNDIKSISFFVKNLSKRIGMGQTLFCCENTGVYTNHLSSVLANLHLDLWVVHAIEIKKSKGISRGKTDKSDAKDIAYYSYRNIDKLKLFTLADTDIQKLKILYTEREKMLKSLLLLETTKENKDFVSKEVFKEVSSINQALVKTIKNSIRKIEAKIKEIIKSNNQLSKQTQLIRTIPGIGEQTSVYLIIATKGFTAFKNWRKFACYSGVAPFKYGSGTSVRGRTKVDHLADKKMKSLLQMCAMTTLKYDPQLKEYYNRKKAEGKNSMVVLNNIRCKLISRVFAVVNRETSYINTYKFAS

SEQ ID NO: 488801 - protein, 340 aa, unidentified
MNEVKVVGLDLAKNVLQAHGIDSSGKKTFNVRLKREQVKPFFAGLDPCLVAMEAGSACHFWGREIARFGHEIMIIPAQHVKPFVKRNKTDALDAQAIAVAALQDGMQRVAVKTVEQQALTVIIKTRALFIRQRTNTLLALRGHLAEFGFITGTGVARLTKITEDVCAGRIPEIPELARQAVADVLAEVEALNVRIERLEADVARLSRADGDVRRLLAIPGIGPVTASAIKAYVPDIAVFRSSRHFASWLGLTPRSHDSGGKSRPGRISKRGNVTLRSLLYLGGLTLVRIAKAKPEADPWLARLATNKPMKVAAVAAANKLARIIWALLTGSKDYTPAPVT

SEQ ID NO: 488802 - protein, 321 aa, unidentified
MPSFIGIDVSKKTLDVAIRGAELKLHRVDNDESGHATLIEALRALGEVSLVVLEATGGYEMPIAAALAAEKIPVAIANPRQVRDFAKGIGKLAKTDQIDAGVLAHFAEIVQPAAQPMPDEQQLELVALVTRRRQFVDMRSMEKNRRSLIMQNKSAMVRESINDHIEYLDQRISELDRDIDGVIKRSTIWKANDDLLSAVPGIGDITTRTLTALLPELGKLNRRKMAALVGVAPFARDSGAMKGRRTIVGGRSAVRAVLYMATITAINHNPVITRYYERLLAAGKTGKVAVVAAMRKLLTILNAMLRDRKPWNPNLTEAVQS

SEQ ID NO: 488803 - protein, 345 aa, unidentified
METMYYIGLDVHKKTISYCVKDGSGRIYTAGSIPATRLTLDLWMKTLPQPWTVAMEATIFTAWIYDHLQPHAAAVKVAHPLMLRAIAVAKKKNDRIDANKIADCLRCDFLPECYMASTEIRERRRTLRYRNLLVRQAVQMKNKIAVLLMEAGVSYNKQKLHKVGYFRELLATNQDIDEGLKPLLRLCRETVVRLGKTESALVRSLQRDSLLVERVERLMTIPAVGPITALTWALEVGDVQRFSSIKKAISYCGLCGAERSSANITMRTPLSKQRNKHLQTVLIEAAKMAPRNSPELAMVYEQEKQKGNANRATLAVARKMVAYLVAVDRRQKGFLVVENQNRTAA

SEQ ID NO: 488804 - protein, 419 aa, unidentified
MTRKRSKVCGIDVHKKFVVATTLDGDGNSETKRYSQNFDSLTALRDWVLQSKCESVAFESTADYWRPLYMILAPHVTLTVANAYHIKHIPGKKTDVIDSHWIAELELNGLITPSRVFTGEQYDLRALTRYRETLVNSRTVYKNKVQHQLDLCGIRLGNYMRDLFGKTGYPLLKGTIERKSREEIKESLPKKSRKKAELFFSAIPDDVPEHILFILDSLLTMIERLTEQIKAVEERIKFVLNQRRREIHILMSIPGVGFIGASTILAEIGNAHDFPNSDKLAKWAGLTPSVYQSANTNYTGAITKQGSKHLRRILIECTHAAVRSSGKLKNSFNRYLPGKGYKKAIVAVARKILRIAWHLLVNDEVFIDEESKSKDVWIPKMPSVMDKIGIEKIIELLSRGAEMIIREDDREVMRLKLDT

SEQ ID NO: 488805 - protein, 388 aa, unidentified
MEARLVDTTSTARNDAPARCLIAIELSKASWVVGVQTPLSNKTSQYRLTAGDWKSLLKLIERIRRQVGGELGRPVEMISCYEAGYDGFWLHRLLEAHGVRNHVLDPASLLVNRRARRAKTDRIDVERMLRALGRYLRGEPDACSVVRVPSVEQEDARRLHRERHRLIRERVQHVNRIKGLCATQGIYDYEPLRSDRKAQLEGLRTGDGRALPARLKAEIIRELHRLELVLKMVAEIEAERDAIVTEAAPQHLNAGKIKALANLKSIGPEFATTLVGEVFYRSFDNRRQVGSYVGLAPSPFSSGSTDRDQGISKAGNPKARSTMIELAWMWLRYQPDSTLSIWFRQRVGDRKGRVRRIAIVALARKLLVALWRYLETGLVPAGAVFKTR

SEQ ID NO: 488806 - protein, 399 aa, unidentified
MKYGIGIDVSKGKSTIAIISIEGEVVKEPFEINHDIEGLQKLETILNGFTKENLKIVMEETGTYHLPIITYLLDKGFTVIAENALKIKKYLDLGLRKAKTDNKDALKLAQYACDNWYKINKKFENDEIFEDLKFLSRQYFNNISIQTNLKINFSNLCDLLFPGYYQLLDNNNFILGLEIFKKYFHPDIVKNKKQSQFINEIDKLAHKLGHKGAGIKLANKIYALAFKTISPRPNNEYSQLSASCVDILISTIKTSNDIISKMDELANNLPEYKVVNSLPGCGKTLSSLLIAEIGDIRRFKSAGSIIAFAGIDAPPYQSGKFTATHNHISKRGNKYLRKVGYILIKSIKSNSENDIKSFIIKKENEGKAKKVAKIAGFNKFLRKYYGTVKKVYKELDLMS

SEQ ID NO: 488807 - protein, 333 aa, unidentified
MSRFWVGIDVSKRKLDVALLNDAGKVKSKSLANDPAGFAALMTWLKERGAGSASTHVCMESTGTYSDGCATAFADAGWLVSVVNPAQPKSFGQSELNRNKTDEMDAALLARYCSKMEPAAWQPPPMEFRKLRSLVDRMQALKDMRQQEANRLEATTEVAAQQSITEHLAWLDARITDLDKDINDHIDGNKETLGKDAQLLTSIPGIGKTTAAKVLGLLGDLRRFSSGKALAAFIGVTPKRRESGTSVRGPSGIGRAGHPRIRHALFMPTLVAAKHNPMIKEFRNRLLAAGKPKKSAALASMHKLVHLMHAIVCKGVAFDSRFNQLALDVQDGI

SEQ ID NO: 488808 - protein, 347 aa, unidentified
MRFYNRPHPYYCGIDLHVKTMYVCILDGAGQVLVHRNVASTPAAFLEVVAPYRTDLVVAAECMFTWYWLADVCAAEGIMFVLGHALAMKAIHGGKAKNDKIDSHKIAVLLRGGMLPQAYVYPAAMRSTRDLIRRRLHLVRKRGQLLAHIQNTRAQYNLPAFGRKLAYKANREGVVEHFSDLSVQKSIEVDLALIDHYDALVTDLELTIVREAKRHDADAFHRLRSVPGIGKVLALTILYEIHDITRFDRVQEFASYARLIKCTRESAGKKLGTGGAKMGNVHLKWAFSEAAVTFLRHNSDGKRLLARLEKKHGKGKALSILAHKIGRAVYYMLSRGTVFSMEQFLAA

SEQ ID NO: 488809 - protein, 291 aa, unidentified
MEQNNEVILGVDTHLDGHVGAVISETGKLLGTLSVSTDTAGYLNLVSWAHSFGHLRRAGVEGTGTYGAGLARVLRDHEIEVLEVNRADRAMRRSRGKSDPTDAENAARAVLSGRATAVPKEQSGAAEAMRAVSVARRSAVKAKTQANQLRALLVSAPQEIRERLLKTKTAECVASCARLRSLGDTPMLQTLTTTLRLLAKRWLALTEELNTLDAMLDRLTSQHASRLRDRFGVGPQTAAVLVAVAGDNPERLKSEAALAALCGTSPLQASSGKTVRHRLNRGGDRSANNAL

SEQ ID NO: 488810 - protein, 344 aa, unidentified
MDKFDVAGVEVSAKILVVALKVNGQLRTHEFANTAASHQQLIGFLLKHSRCVRVCLESTGLYGLDVALALHAEPEIEVRVANPRSVRHFAQAMMQRSKNDPLDALLLAEYAQRMPFQAWQPPSLPGRQLCALTRSIHQLTEMCTMQKNRLHAAAATATTPKFLIRELQRSLAQLQKSVQRLTQKALQLVRSHAQLRQQLELLDSLPGVGELSALYLLGELVLLSPDFSVREWVAYAGLDPRQYKSGDSVEKKIRISKVGNTHLRRALYMPVLVGARHDPHFRAHYRHLLAKGKLGMVALVALMRKLLHGIFGVLKSLQPYDGSKLFTLPLILDSKPTMKEKIAC

SEQ ID NO: 488811 - protein, 409 aa, unidentified
MDQLIERCCGLDVHRDTVVACVRGPGPNGRRQHQVRTFGTTAVELLALRDWLEAHAVTDVAMESTGVYWKPVFYVLEEAFTCLLVNAAHIKQVPGRKTDVKDCMWIAQCLEHGLLRGSFVPPAPIRELRDLTRHRKVLIQERTRAANRLHKLLEDAGIKLASVATNILGVSGRAMLEALVHGTTDPAVLADLARGKLRKKLPALRQALAGRFRPHHAFLVGQLLAHVDYLDEAITTMSEEVEGRLAPFAAQLTQLDTIPGINTRTAEVIIAELGVDMSCFPSDRHLASWAGICPGNNESAGKHQSGKTRKGNRWLRMTLIEAAGAAIRTKDSALGARYRRVMRHRGHKKAVVAVAHAMLRAVYHLLAEGTTYREQGADYSDRHHTHRVTRRAIQLLERQGYRVVLEPAA

SEQ ID NO: 488812 - protein, 339 aa, unidentified
MQVTTIGLDLAKNIFQIHGVTDKGDVAFNRSLRRAQVLKFFESLPPCLVGIEACGTSHYWAREIKKLGHEVLLIPPSYVKPYVKRGKSDAIDAAAICEAVTRPSMRFVTIKTPEQQAVLALHRVRDLIVRQRTQIVNMLRGVLAEFGIVVRQGAGHAITFAKQCLEGAEQDLPDLAREVVTNLCHQLVALHRRVLWYGRQMNRAASRDARVARLRTIPGVGPITASAIVASIGNGYQFSNGRSFAAWLGLTPLNRSSGGKERLGRISKMGDRYIRRLLVLGMTSRIKQIQKRPDQFDPWFGKILERKPAKLAAVAMANKTARIIWAVLTREQNYRIRAA

SEQ ID NO: 488813 - protein, 316 aa, unidentified
MNKPEAEQTPAYAGVDISKEVLDVSLAGQPPCRYANDTTGIAALIKVLKKLPQPVQVVCEPSGGYERDLLSALWTAGLAVSLVHAARIRAFARAQGLLAKTDPIDAVVLREFGELLKPETLAAPSPQQERLAALVQRREQLVNLLSMEDQRLAQARDAVVRKMSERLLKKLATQIEQMDALIEEQITADKTLKSQSERLQQVKGIGPVTASTLLAELPELGTLSRNESGALAGVAPYNRDSGEHRGRRTIRGGRVKVRRVLYMAALVAARYNPILQAFYQRLVAAGKPKKVAITAVMRKLVVLLNHLLKNPDFKLA

SEQ ID NO: 488814 - protein, 321 aa, unidentified
MTAILGIDVAKKKFDVALLRNGKYKSKSFENKHSGFESLIDWLNQHEIVTLHACVEATGAYGDALARLLFELGHVVSVVNPARIKAFGETELLRTKNDKMDAKLIARFCETMKPVQWQPDPPEVEHLRMLGRRRDALVSMRTQEVNRLEVVDSAVNASIQKVVAFLDVEIEQISKLIREHINSHPDLQKKRDLLKTIPGVGDVTIEAILSEINAFEGFETIEKVVAYMGLSPKEKTSGSSVKGKSTLCKIGSARLRKILYMPSLTAIQYNPLIRALYNRLKAKSKNGMIIVCACMKKLVHIIYGVIKNGKPFNPAYNMKTA

SEQ ID NO: 488815 - protein, 432 aa, unidentified
MQMKTDTHPDSSVQWAALIGFDWGDSKHAVAIRPKNQALETLDLPHSAEALHAWLDELEKRFGGQPVAIAIEATRGAVVYALMERPWIHIFAIHPASSHHHRRTFRPSGAKDDAPDALVLLSLLEHHQDRLHRLIADDEATQSLRGLAEARRHAVDRRTRLSNQLTSTLKDYFPQALELCGEVVSAPMALDFIDKWPCLADLKSAKPTTIRRFYQAHNVRSSQLIDQRLSHIQAAKPLMRNQALIDIKIRIVRLLVAELRVLREHIEGFEDAIATGFANHPERALFRGLPGAGANLAPRLLTLFGTDRSRYSSATELQRLSGVAPVTERSGSHCWVHWRWNAPWFLRQTLIEWAGQTIKFCAWAKAYHEQQKAKGQSHWAILRSLAFKWLRILWKCWKSNTSYDDELYLKQLEQRKAPIAKRARQIAQEMAA

SEQ ID NO: 488816 - protein, 458 aa, unidentified
MKKSKKHKMFSTSEFKQINFNAAGIDIGAKVHYVSVPEGRDPESRNVRSFDTFTSDLYAIADWLKQCQIDTVAMESTGVYWIPLFEILESKGFDVKLVNPSFIKNVPGRKTDVVDCQWIRQLHAYGLLKGSFRPEDQICVLRSYLRQRALLVSYASHHIQHIQKALEQMNIKLNQVIRDITGQTGMRIIRAILAGERDPKKLAQLRNSRCKNDVKTIAKALHGNWRQDHLFSLQQAVELFDFYQNQIAACDLKIEEHLADFEDRSNGAPLGKSHRTTGRNKLSFDARTHLFRMTGVDLTKVDGLDSLTALKVISEIGLDMSRWPTVKHFASWLGLSPGSKISGGQVISAKTKKCASRAAHYLRLAAYSLHNSQTAIGAFFRRKKAQLGPAKAITATAHKLARIIYHILKSGTEYKDVGQDYYEQRYKSRVIANLKRRAKQFGYELTYVKEQQEVIQNV

SEQ ID NO: 488817 - protein, 369 aa, unidentified
MSVDHQPEQTAVRTHLGAIFVSLELSRATWLVTALLPGHGEKMSKHLVRGGDVVGLLAKFAELKAKAHLRTGRMFPIIAIQEAGLDGFWLHRVLEGEGVESHVVDPASITTSRRRRRAKTDKVDGEALIRALLAYKRREPRVCAMVRAPAPEEEDRRRICRERKTLIAERVEHVNRIKGLLFAQGIRDYQPLGRRRRERLDELTTADGRSLPAHLKAQISRELDRLELLLQQIEAVEAARDALLAQSAEQCSSAPAAMLMRVQGVGPEFAGIIWSEGLFRRFDNRRQIAAYAGLAPTPWQSGAVAREQGVSKAGNPRLRTTMIQLAWLWLRHQPCSGLSQWFHERVKRNGGRLKKPMIVALARKLLVTC

SEQ ID NO: 488818 - protein, 412 aa, unidentified
MIYVGIDWSDEDHKVYLTDDSEKRLDAFVILHTPEGVSELFARVEKFAKSVDDVLFAVEKPSGLLVSAILDRGFTLYPINPKAVDRYRDRFKVSGKKDDFFDARVLANILRTDRHIHKPLIPDSPVCRNLKILTRQYESLSRLKRRVMNQIISTLKDYYPVALELFGKIDQPITIDFLKRFPTAEKFSKLTISQIKNFLKKHHYPGVEKKADELFQLAKTPHFQVEEFVVESRSLYLSTLLTQLKNLMNALTTFEHEIEKILSQHPDKDIFLSLPGSGNLTSAKLIAEFGDDRDRYKKVGAVQAVAGSCPVTRQSGRYRNVYFRKACIKPFRNATNQFAFNSIKNSQWAKDRYKKYVDSGKKKTHALRCLSNAWLEVIFAMWKNRSTYDEQKHLKIVKEQFQGEISPSFLTC

SEQ ID NO: 488819 - protein, 398 aa, unidentified
MGVAVGVDIAKEFHWAAASDTSTGEILLSRRVENEPIAIDELIGELGRLGATHGRVTVGIDVLGGIAGLLVAMLAEAGVELVHVPGLAVNRAREGTAGGEHKSDPRDAAVIAELVRTRRDLRALEPAEEIDIEIRLLVGRRRDLVGDQTRRIGRLRDLLVSIHPGLERIIDPTQKSSLWLLSRYVTPSEIRRAGRKRLIDYLARAGGLPRRHIEQLVDTALAASKAQQLSVPGERVTAEIIRELALELRQLRERLITLDHELEATLDRHPDAALIRSLPGMGATLTAEFIAEAGNLNRFPTPDHLAAAAGLAPVLKQSGKVRYLKRPTGGNKTLKRVFYQSAFCSLSNPASRTFYDRKRAEGKRHHQAVIALARRRVNVLHAILRDRRPFEIKLAKTA

SEQ ID NO: 488820 - protein, 423 aa, unidentified
MNKLNSRRNGLPVINDRAAGMDIGSRFHVVAVPADLDEQPVRTFKAFTADLECVARWLADTGITTVAMESTGVYWIPVYEVLESHGLRVILANARDARAVPGRKTDVNDAQWIQRLRACGLLRASFHPDREIAALRNYLRLRERHLDYAAAHIQYMQKALTHMNIQLHHVVADITGATGMKIIRAIVDGERSPAVLAKMRNIRCKSDIATIQNSLVGNYQPKHVFALTQALAMYDAYQAQLELCDQQIAHTLLRLAQQKAPPCAPLPKPRHRNRQPNALNFDVRAMLYQLTGVDLTQIHGIGPYLALRLVAECGTDLSRWPTAHHFTSWLTLAPGCRVSGGKVLSAHTRKTKNRVTAHLRLAAVTVGRTHTALGAFYRRLSARIGKAKEVTATARKIAILFYNATRFGMDYKDPGAGRYEQKY

SEQ ID NO: 488821 - protein, 313 aa, unidentified
MDPKSFVGIDVAKDTLDVHVLPTHNQSQYTTHPEDVETLLARLAELHPTLIALEATGGYGTTLAAQLQDAGLTVAVVNPRQVRDFARATGQLAKTDRIDAEILARFAVAIKPPPRPVGTDSERSIKALSARRRQLVKMQTAERNRLYRAHDDQIASSIQDILDVIARQLEDIDRQLGNAIRSSDAWLEKAALIQSTPGMGRTSTLKLVATLPELGQLNRRQISSLVGLAPMNQDSGRRKGYRSIRGGRREVRAALYMPTLAAIRHNPDIRQFYLRLTENGKKPKVAITACMRKMLITLNAIVRDSQTWTPQNA

SEQ ID NO: 488822 - protein, 411 aa, unidentified
MSQMLVGIDVSLRSHHVHFMHGEGHMLADFSVSNDTEGANTLIQKLLKTAEKNQCEHIKIGLEATDQYSWHIAHYLKSELKGYEPSFQSAIYMLNARKVSRFKKGYDTLPKNDRIDAWVIADHLRFGRLPHEMQETLQYDALRRLTRTRFHIMHEIARNKTYMMNQVFLKFSGLRQDNPFSNTFGATSVAVMEELDPETIAEMPVEELIEFLQDKGKNRFAEPEEIAKYLQKLARNSYRLDKMMADPINLSLSVILSTIRHMEGQVKRLDQEIDRMMKGITQTLTSVKGIGPVYAAGLLAEIGNIKRFDDHHALAKYAGLVWTQYQSGEFEAENTSRMRTGNKYLRYYLVQAADAIRKFDTEYKGFYQKKYKEVTKHQHKRALVLTARKLVRLVHSLLRTNQLHIPQERRE

SEQ ID NO: 488823 - protein, 282 aa, unidentified
MHATTYGLDVAKRVFQMHWVDNESGEIVNRRFGRDDLIQYLSRQSPARVALEACGSAHWWARKIKTLGHDVVLLHAKFIRPFVQTNKTDASDARAIWTAVQQPGMRTVAAKSEEQQTMLSLHRIRSLLVKFRTMQVNQLRGLLYEFGASFRTGRVAGLAEIRARMTELEEALPGAMMSCLQDQLRRIDGLQAEIHQLEQRLGAWQKQDAACRAIAEVPGIGKLTATALVATMGDARTFKSGREFAAFLGLVPRQSGTGGKVRLGAMSKRGDPYLRTLLIHGA

SEQ ID NO: 488824 - protein, 387 aa, unidentified
MDRTRIVPLGANASATYNTKGAQIMSVQYVGMDVDKQKIVLARLGATPDTRAVEQVIANTPSAVKKYFASLLGAAEVHATYEAGCFGFGLYRQLSAMGVTVVLAAPGLIPRKPADRIKTDRRDAQSLALALRAGQLTGIYVPTEQDESVRDYLRMYESLRGDLRVCKQRVLQFLLRRGISYDGGSPWTVKHRHWLSALPFPQARDRQTLDMYLSQMQELEAKCAEAAAEVEAIAAQDCYRQQTKKLTAFKGIKTLIALSFVTDIGDFRRFSNARQFMAYLGLVPSERSSGNKRRQGGITKAGNSHLRRLLVEAAWHYRSYHPSSRDLTERRRGVEAAVLSYINRAGRRLNRKYMHMLLRGKRSQVAVTAVSRELAGFLWGVMTDQVA

SEQ ID NO: 488825 - protein, 405 aa, unidentified
MQEATQHDAVDVFVGVDVDVDVGKGQHHAVALDRNGKRLYNKALPNDEVKLRALIAELKTHRRLLFVVDQPSTIGALPVAVARAEGVLVAYLPGLAMRRIADLHAGEAKTDARDAAIIAEAARSMPHTLRSLRLADEQLAELTMLCGFDDDLAAQVTQTSNRIRGLLTQIHPALERVLGPRLDHPAVLDLLERYPSPSALAAANEKTLANRLTKLAPRLGKNLAAEIVQALNEQAVIVPGTQAATIVMPRLAQQLAALRKQRDEIAAEVERLVLAHPFWPVLTSMPGVGVRTAARRLTEAAPKAFATAAHLAAYAGLAPVTRRSGSSIRGEHPSRRGNKVLKRALFLSAFAALRDPVSRAYYSRKIQQGKRHNQALIALARRRCDVLFAMLRDGTIYPPKSAPNA

SEQ ID NO: 488826 - protein, 328 aa, unidentified
MIYLGMDVAKAKLDCCLLLDDAGSKRKTKVVQNSKTGVADLLSWIAKQHVSAGELHVVMEGTGVYHEQAAMALADAGVTVSIVNPAQIKDFGRGLAVRTKTDGVDSFVLARYGALLKPPAWMPPSPEARMLQALLARRNAIAQDLQRERNRQEKADATDTTELIRQSLLDSIEFLSRQLKQLQKEIDQHIDRNPGLKSDMKLLQSIPAVGPQVGSNMLSVIHGHSFHSAEQLAAYLGLVPVERQSGSSVMGRARLSKAGPPRIRAVLYMAAIVATTHNPHVRAVYERMLARGKSKMSALGAAMRKLVHLCFGVIKTQRPYEPNYARIA

SEQ ID NO: 488827 - protein, 345 aa, unidentified
MNITTVGIDLAKNVFQVHGVDARGKVVLRRQLRREQVVRFFVKLPPCLVGMESCASAHHWGRTLERFGHSVRLMAPQFVKPYVKANKNDVADAEAICEAVGRPNMRFVPIKSIEQQGILSVHRVRQGFVKARTAQANQIRGLLGEFGLVIRKGICHVARCVPGLLEDASNELPLALRQLIDRLTRHLKDLDQQVREFERQIIAWHRGSELSCKLEKIPGIGPLAATALVASIADARSFNNGRQVSAWLGLVPRQNSSGGKSTLLGISKRGDVYLRTLLIHGARSAILAAKRQRENKNVWLANLLNRRHHNIAAVALANKNLRTVWALLAHGRDFKPDYVPVRATA

SEQ ID NO: 488828 - protein, 387 aa, unidentified
MAQQLDDLSRSPTPLDQDSTIITVIEMSQATWLVAGIVPGIERHPLKKIEPNEVELLCLLMRWRAEAMKKGRTITRIVVAFEAGRDGFWLARWLRVRDIESYVIHPTSVAVSREHRRAKTDRLDTGLLKRVFLGWLRGEPDHCHMAAIPTLAEEDAKRPNREREGLVRERTRLVNRMKSCLVRFGVRTFKPTLRNAPDRLATLHTPEGVPLPPNTLLELRRDMARLRFVMDQIKEVEAARAQGLKQAPQEKTHAMVNLLARILGIGIDTADMLVHEVLARNLRDRRAVARYAGLTGSPDESGSRRREKGLAKAGSARVRRGMIQLAWRFLLFQKESALAQWYRARTADARGGTRKTMIVALARKLLIALWRMLTTGEVPAGVVLRAA

SEQ ID NO: 488829 - protein, 334 aa, unidentified
MSQRNDLSRSLIPFDQHNALIAVIEMSQSSWLVAGIVPGVERHPLKKLEPDEKALLQLLQRWREEAVKAGHTITRISVAFEAGRDGFWLARWLRARDIDAHVIHPTSVAVSREHRRAKTDRLDTELLKRVFIGWLRGEPEHCHMAAVPTIEEEDARRPNRERESLVGERSRIVNRMKSCLARLGIRNFRATLRKAPERLAALHTPEGALLPPNTQAELRRDMARLRFIMNQIKEIEQARLERLEQATEKGPNAMVRLLARVIGVGVETADMLVHEILSRNLRDRKAVARYAGLTGSPDESGSRRRQKGLARTGNARVRRGMIQLRTAPRSWPPT

SEQ ID NO: 488830 - protein, 362 aa, unidentified
MFESTPVVAFDQHAASVTAAVLFPGARQPAVHQLAPDVPTIRRFLAKVRRQGAVRCCYEAGPCGFELQRALTADGVSCDVIAPALIPRRAGDRIKTDRRDAIQLAVLYRAGARTRIHIPTDQEEAVRDLLRCREDIRADLLRARHRLSKFLLRHGRRFTGTKKAWTRAHDAWLRAQRWPLPALQQTQAAYLRAVDEARARLAAVETDLQACLTLEPIATRARRLRCFRGIDDLTALTIAAELSDPRRFPTARSVMAYVGLVPSEHSSGAKRARGGITKTGNAHLRRVVVEAAWHYRHHPFVGHALRRRQHGQPEAVCQQAWQAQHRLHQRYRQLTGRGKTKQHVVTAVGRELTGFLWAALTR

SEQ ID NO: 488831 - protein, 469 aa, unidentified
MAYSVFNHIQGKKGSRWAEFVRETGSENLMMVAVDAAKFTQKALICTFYGDILVKPFEFDASLTGFEYLKRIIQSEKDKHKFKEVVVGIETTGHYYEDLVRRCQSYGYHVRTLNAATTAQERQALLNWSKTDNLDLMAIVQSMIHGRGTSNELSSGDVLTLQKLTRARRELVGEQTTTQNLIRVHMDHIFREFQGKSIWKNGIREHVKPFSKLFGKAPLYLMRYFPHPSDILKLGKEGLRELSIRENLKLRDSTIQTLLEFAQNSISQPKDFLEGDIFLLTQKLDRLELLSKQISVLERKIEDLFVEMEGAVLLSVSGIGVVTGAELYAEMGDISDFDHAGQLIKLAGTNPIVKQSGGKKPSYYCISKQGRRTFRNITYQVGKSLAVNNPEMKQRYLDFKERGKLSNQAYIALGNRMIRLAFSMIRNQTLYRSSQENYVLLNEISKKLRASNVKRFYEIHVSSKLCRSA

SEQ ID NO: 488832 - protein, 389 aa, unidentified
MVVIGVDPHKASHTAAALDEGTHQRLGTVRIEATLAEYARLLRWAKRFDKRRWAVENAGGLGRHLAQWLIARGETVVDVAATATARVRELSRGGRRKTDVLDAAAAASVVALHGDAAPVAAEAASTVLRMLDERRVDLTQQRTRTVNQLHALLRELIPGGAPLNLTADHAAAMVTRIRPASPVEHARKDLARELIADIRALDARVSANRQRMQQAVSDSASRLPEIPGVGPVVVARLLGRTGTPSRFLTAAAFAVYCGVAPIEIASADKTRHRLSRQGDRKLNNALHTIALTQVRMSQSRGRLYYDRKIAEGKTHNEAMRCLKRRLADHVWRVMIIDEQRQRQTAGPRGHTGATLQSSAANPTPTAGSLDKSLLGPANPNSTTNPTPPD

SEQ ID NO: 488833 - protein, 438 aa, unidentified
MSNKVIFNLDELFISVGIDVGADFSWMSIALPNQQFVGKPYKILHNSIDSLTTAVSKIKEAEELYSLESRIFLESTGIYHYPLFCYLRDKGFNCSVINPIITKNSTNINIRKVHNDRFDSKKAALVGLKPDLKVSLMPSDLALNCRNLCREYYDLMDNRSAYVNKLQGELRMAFPQYLGIFSKVTINTSLTLLETYTSPSAFLKADKQEIIDIIKSTARFGLIYAQNKYNAIIQAATDANQFGYIIDSNIKRIRLYISFIRKYDEEINSILESLHELVDANEDSDFVKQIHLIETFKGAGFLSAVSIMGEIGDFSAFSKPKQLFAYFGLDPAVKQSGKFEGTKVQMSKRGSAIARRVIHTLTLQSISISRNREAKNPVLREYYLKKCDSKPKLVAMGAVSHKVCNMIFAILRDNKPFKIIAPQEHIKQYNSAKCDIAA

SEQ ID NO: 488834 - protein, 367 aa, unidentified
MKKVSTVAVRASRKISQPKLTVGLDLGDRSSWYCVLDECGAILREQRLSTTAKALQEIFGRMPHSRIVLETGMHSPWVSRLLSGLGHEVIVAHARKVRLIGESRKKDDRLDAQTLARLARIDPELLCPVKHRSAKAQADLTVIRARAGLVRARTALVNTARGLAKSYGERLRGCNVRNLNPEKAAGLSPELQGALEPLLAGIESLSQQIGEYNERIEKLVQESYPQAALLKQVKGVGTLIALTFLLTLEDPHRFAKSRDVGCYLGLQPGRRNSGQSEPQMHISKQGDPYLRTLLVQGAQHILGPFGVDSDLRRWGLKLAERGGKSGKKRAIIATARKLAVLLHHLWVSGEVYEPLHHSGAVTMPAAA

SEQ ID NO: 488835 - protein, 418 aa, unidentified
MDVVVERCAGLDVHRDNVVATVRVPGEGRRRWLQSTRTFKATLAGLRDLGQWLAGFGVTLVGMEATGVYWKTVFQALEGSFECWLLNAQHLRNVPGRKTDVKDSEWICQLVAHGLVRPSFVPPPEIRRLRDLTRLRKAQSNERIRAIQRLEKVLQDAGIKLTSVASQTYSKSARAMLEALLSGVTDPGELAELAKARMRSKIPQLREALANRFDVSHHGIMVAQLLAHIDTLDAAIGMLDEKIEALLAPHATIVDLLCTIPGVATRTAQVLIAECGLDMARFPTVGHFASWAGVCPGNHESAGRKKTGRTRPGPRWLTEALTESAKAAARSKGTYLAAHHAQLRGRRGEAKAIGALRHDILVAYFHIVRDQVPFRELGPDWQKKRSSPEHRARRLQRQLEALGFNVTLQPAEAGAPAA

SEQ ID NO: 488836 - protein, 400 aa, unidentified
MFVGWDWASTTHDITVIDATGAVVDRWAPPHTEHGLTQTITRLARHGHPADLPVAIERPSGLVVDRLLAAGHPVVPIHAAAFHAARPRWGAASPKSDPGDSYKLADYLRTDGHRLRRLQPLDDATRHLQALIRLREDHIKAKTAASNQLNALLDAAWPGAAAIFSRLASDIALAFLQAYPTPQAAARLSQARLAAFCRRHSYRGGRSPAELLQRLWAAPTPPVGLDPETLTELVNAQVRLLRTLLATITDLDRAIGAALLGHTKAKLLAPMPYIGEINLGQIVAEVGPILDRASSAEHAIAECGAAPVTRASGKTRTVGFRWAANRHARTALHAFADNSRHGSPWAARLYADARRRGKRHPHAIRILARAWLRVMWACWHTNTAYNPTKHRAEQRLAAGT

SEQ ID NO: 488837 - protein, 388 aa, unidentified
MLLPIDLSKKSPTTFEQGATLVAVVELSLKSWLVAGIVPGIDRHPLKKFEASENRLLALLGHWQQQALNAGSRIKRIVVAFEAGRDGFWLARWLRARGIEAYVIHPTSVAVSREHRRAKTDRLDTELLKRAFLGWLRGETHHCRMVAIPTLEEEDAKRPNREHDTLVRQRTRIINRIKSGLVRFGIQNFKPTLRKSAERLAKLMTPEGMRLPPNTVAELHRDMERLRFIRDQIKAVEQARIKDLKTAPKTQSNAMVLLIARVFGIGIETADMLVHEILSRNLRDRRAVARYAGLTGSPDESGDRRREKGLARAGNARVRRGMIQLAWRFLRFHSDNPLAQWYRKRTADARGSTRKTMIVALARKLLIALWRMVTTGEIPRGLKLRAAA

SEQ ID NO: 488838 - protein, 364 aa, unidentified
MKIIGCDYHPSGQQVFGIDKESGEIFADQWIGHSGSELEEFYSKLPAGTVVGVESSGNMQWFESRLEQWGHRLRLGDAAQIRARETRKQKHDRRDAELIARLLVEDTFPELKWVPTLAERDQRQLLMHRHKLVGMRTQVKNQLQHIAMNQGEQKKRRLWTKAGRELLEGLVLDRWTARRRDDLLRWLDLLHSDCESLEREVERAAEAREDARLLMTHPGIGPVISLGFVLTIGRIERFERSRQLVSYLGLNPSEASSGERRRRGGISKQGSSFMRRLLIQGAQTAVRGDEDLNRQYRRLASKKHRAVAKVMVARKLAVRMFWMLKTQKTHAELVRMRGSSSHPGVGKTDRLSERPASSRIEPQG

SEQ ID NO: 488839 - protein, 400 aa, unidentified
MNPVIGLDISKGKSDGQVFLDKGKPFGNPFCFQHNQEGFSQLLGIISNVQDKSGKTPAVILESTGHYHQAVIQFLEEHGILHLVVNPLISHQAKKSSLRKVKTDAVDALRLCELYFKEEFEDHKQRGVQLLNLRHLTRQFDSLTQMYVQVKLQFQAVLDQVFPDYRGIFGDLYSRVSLRLLKQFTTPEAFQAAGESSIAYVIACLCPSRSKRWATDKANRIVAAATNNPFQKVNYTSHLISLALYIDLLLQYQEHLSHLQSQIDALAKEVEEYEIIQSIPGIGSKIAATILSEIGEIYRFNRAKKLVAIAGIDPSVYSSGKFTATTNRITKRGSKKLRHALYLAVLCGLKKTGSKKLREFYDKKREEGKPYRVALIACVNKLLHWIYALLVKKESFVEII

SEQ ID NO: 488840 - protein, 347 aa, unidentified
MRFYTRQHRHYCGIDLHARTMYVCVLNDAGEVLVEQNLRCEPVLLLRLLEPYREDLVIAVECIFTWYWLADLCTREHITFVLGHALYMKAIHGGKAKNDRIDAHKIALLLRGGMLPQAYVYPPAMRSTRDLLRRRLYLVRKRGQLLAHIQNTHHQCNLPEPTRKILYKANREGIAEKFVDPSVRKSVEVDFELVAHYDKLIRGLELFLVRSAKQHDPQVFHRLRSLPGVGKILALTLLYEIHDIHRFPRVQDFTSYARLVKCAKQSAGKNLGTGGRKIGNVHLKWAFSEAAVLFLRNNPRGQALLAKLRRKHGRAKALSVLAHKLGRVTYHLLAREIVFDMQKFLAA

SEQ ID NO: 488841 - protein, 416 aa, unidentified
MDIVHEQCAGLDVHKKTVVACVLRSAPGGVIDKEVRTFGTMTADLEAMRDWLAERGCSHVAMEATGVYWKPVYNVLEQREALTLLVINAQHLKTVPGRKTDVKDAEWIATLLRHGLLRASFIPDRHQRELRELVRYRTALIHQRAAEVNRLQKTLEGANIKLAAVLSDVTGVSGQRILEALLEGESDPQQLAELAHVRVLKHKREALEQAVVGRLSDVLRFVVQQQLQHLHDLEAQIATCDAKVADLLRPFEAALERLRSITGVGPRTAEIILVEVGLAIQRFPTARHVSAWAGMCPGNRESAGKRQRVGTRKGSPWLRAALAEAAWAASKSKDAYLPALFRRLSARRGKKRAIVAVGHSILVTAYYLLTRGAMYQDLGETYFDERDRQNVVRRSIRRLQGLGYTVHLESTDTKAA

SEQ ID NO: 488842 - protein, 343 aa, unidentified
MQTVTTIGLDIAKSVFQVHGVDAEGNVLIRRKLKRRSVLAFFQKLSPCLVGIEACATSHHWSRQLKRLGHTVRLMPPAYVKPYVKRQKNDAADAEAICEAVTRANMRFVETKTPEQQSCLMLHSTRQLFIRQQTSVINAIRAHMAEFGIVAPVGRKGVEQLLAIVTDASDRCVPEVARACLIALAAQLRMLKAQILEFDRRIMAWHRSNETSRRLDAVPGIGPALATALVASVADPKAFRSGRNFSAWIGLVPKQHSSGGKDRLGNITKQGDRYLRSLFTAGALAVIRYAKINGTQHRPWLTALLARRPTKVAAIALANKIARMAWAMMAKGERYKEPVALAA

SEQ ID NO: 488843 - protein, 413 aa, unidentified
MQVVYARCCGIDVHKATAVACVLITQADGTVQREVRTFSTMTGALEVLSRWLHEHAVEQVALESTGVFWQPVFNILEEGGHAVLLVNPQHMRAVPGRKTDVADSVWLADLLRHGLLTASFIPPAPIRRLRALTRYRVTVVHERSQEINRLQKVLESANIKLAAVATNILGASGQRMLHALAEGTEDDPAVLAEFAKGKLRKKLVLLRQALEGRVEPHHRLLIGRLLEHIASLSEAVEQMEGEIARSVLPFAEEMTLLQTIAGIKQTAAAAILAEIGADMSRFPDAKHLASWAGVCPGNRTSAGKRKGSQTTDGDVWLRGILGEVAWAAIHTNGTSFQAQYHRLVRRLGKLKALVAVMHSLLTVIYCVLRDRVPYHELGPDYLGPRETERRTRQHIRQLEELGYTVTLTPREVA

SEQ ID NO: 488844 - protein, 340 aa, unidentified
MSRYVGIDLHRNCFTACVQLETGRQYMSTWKIERLEHFAAKLRPTDEVAVEVTGNTRLFYDAVAPHVARVVVVNPQQFQVICKSVKKTDEHDARTLARFLSKDMLPEVRMKDPEHAAMASLVQTRDTLVKSRTALKNKINNLLSARGVNLAKESLASEKGLQEVLGMYLGEVVDVELQVLVEQIRGLNQSIAKLEKTISEQGPKLPGHENLKSIKGIGDVGAGVLLSVIGDVNDFDDEGKLAAYFGIVPRVSNSNETERSGRITKRGTKLGRTTLVQCALIAKRYSHYLTSYYERIKARRGTGKAIIALARKFLGIIYRTLKDNLIWDDFPNGVLRDRQA

SEQ ID NO: 488845 - protein, 337 aa, unidentified
MWTLGIDVAKRRHNATLLDEEGKAVFRNVSFAHSRKGLDGFLDRLAATGQSPRGILVAMEATGHYWMVLFQCLTQAGYTVHVINPIVTAARRNVTIRGTKTDAVDSFLIARVLREENPKVSAIPAEDVQRLRDLTRLRFECAQAAMAEKQRLVALLDLAFPEYAENFSDIFGTTSRKILAEFPTAEDLAKVDIRRLTRLLREASRGRMGRSKAEQLKKAARESFALTGNTDALALEIRFLVERLNLLIEQIAKLDKRFGRLLPADQKLLQSIPGLGKVWAPTILAEVLPVFHPELQHGAKKFVAAAGIDVRLHDSGEFAAKGRMYKRASKYFRKAIA

SEQ ID NO: 488846 - protein, 391 aa, unidentified
MICVGIDVAKDKHDCFILSSEGEVLADVFTIQNNAEGFDTLLQTIRRCVCPGDKIKVGLEATGHYSYNILGFLLDNDLPVYVMNPLHTNLYRKSLSLRKTKTDRVDAKTIATMLLSDVDLKSYTDTAYHNEELKSLTRYRFDKVQERAKLKQSVSRLVTILFPELEQLVSSIHGTSIYALLREYPGAKQISEAHLTRLANILVKTSRGHYRKDKATHIRDAARTSIGSVMPAKSLELKHTIKLIQELTSEINEIEDAIRKIMDELKPPILSIPGMGFHSAAMILAEVGDFSNFNSPDKVLAYAGCSPSTYQSGKLTNCYAHMEKRGSRYLRYALYTATKYVCYWNPVFTEYLTKKQAEGKHYNVALSHATKKLVRLIYALQKSGKAYLAVT

SEQ ID NO: 488847 - protein, 429 aa, unidentified
MKNSTARKISQVPYRYLIMGIDPHKKIHVAVAMTQDTIIHTKFKFANSKHGFEQVMMRARDQMAETGSIGVIFAIETAGHYWRNLAYFLDEQVIPFRLINPFTLKRMRDGKDINRRKTDFRDAEMAAELLRNGEFVETKLPKGIYAELRATYSAYRRLVKERSRAKNLLKGLLDGLFPEFNQVFKNTCGMTSLDVLALCPAPKTITGMKLEEFVDAIRKGFKGRAPKVQKLHAIYSLAQASAGIETGADSVSLELSFLVQRLRLFTEQIERLEDTLVRLVKSIPDARYLLSIAGISYISVAGILAELGPLGDYQSAGQLIKMAGTNPIEWESAGKRGSHTPMSKKGRPGLRWCIWTAAMCLLRHNTDYRSWAKERRERPAHLHPLKAREVFGAVANRLLRLAYALVKKQTFYQSPKPKVAPELELVAAV

SEQ ID NO: 488848 - protein, 418 aa, unidentified
MKHSKTEKIGTINKKTLIAALDIGKKVHYAYFRAPSGKDFQPFAFHNTRNGFDKFWERLCRFKEKQMLEEIIVGFESTGPYAEPICHYLRHKSVKLVQVNPMHTKRIKELTGNSPNKTDKKDPRVIADVMSLGHSLTVIVPEGVAAHLRRLTQARERAIERRTAMSNQLQHLVFLIFPELVHIIKPSTKTGMYLIKHYSDPKKLLFAGIDKLNAIIKKVSRGRLGPDRAEQLHGAAKKSVGITEGKESILFEITHLVSKIESENHYVKDLEKQMGDYLEKIPYSHSILSITGIAHVTAAGLIGEVGDFRKFKTISEVLKLAGLDLYETSSGAHQGCRRISKRGRALMRKLLYFAAINTTRKNGILHGPYQRHLAKGMPKIKALMAIARKLIGIIFALVRDHSNYSADYSSQLEFKKAA

SEQ ID NO: 488849 - protein, 409 aa, unidentified
MLFIGDDWAEAHHDIEVQDETGRRLVRRRLPEGVAGIAALHALVAEHLGDGEPGDVVVGIETDRGPWVQALLAAGYRVYAINPLSAARYRDRHVVSGAKSDAGDAHVLAGLVRTDRHAHRPIAGDSELAEAVKVLARTHQGLIWSRQRQANALRSTLREFYPAALAAFDELAGRDALAVLDLAPTPARGRALSRSKIASALRRTGRQRNIDAKAAEIQAALRTEQLAALPAVEAAFGHTVTALVRVLAELSRQIETLEGELTAHFDRHPDAEILRSQPGLGTVLAARVLAEFGDDPHRFADAKARRNYAATSPITRASGTRRVVLARVTANKRLRDALYLQAFAALRASPGARAYYDTHRARGATHNQALRAVANRLVGILHGCLRHRTTYHEATAWPASTQPELAAAA

SEQ ID NO: 488850 - protein, 361 aa, unidentified
MQITTIGLDIAKNVFQVHGIDAAEKVIVRKQLRRGQVTAFFEALAPCLVGMEACATSHHWARELTKLGHEVRLMPAKDVKAYVKRNKNDAADAEAICEAVRRPTMRFVRIKSAEQQGQLMLHRARDLLMRQRTQVINALRAHSAEFGITAAQGREGIKELLAMVAHEEGSRLPSDAHASLTVLATQLQAVQTMIGSLEKRIVAQHRSNEARKRLETIPGIGVIGATTIAAVVPDPRVFRSGRDFAAWIGIVPRQDSTGGKQKLGPISKQGDQYLRRILIVGAHAVLRRARQQPETYPWLTQLLARRPFKVVAVALANKMARIAWALRPRAGPTERPNSWQPDKELGNGRMRLRPCVHELQG

SEQ ID NO: 488851 - protein, 523 aa, unidentified
MPVTRSRKRSSNRRPEVLQKPRGVIHPRVQKVGPEHFGIVSVDCAKARSKWMLCDFYGNVLVPPTVVEHNRPALTAATTQLRQAMARHDLRDVIVAIERTGRYHHATQHAFAAAGFEVRIVHPFATKQFRQASDPGTKTDDTDLVAIHRAACSGFALIELPRDDHWKELQLLIRYRRDLVFKTSALCAQIREHLEAALPGYATCFYNLWIRACAFPLVRAFGSAEALLQAGLRGLSEVLRQQHVRFQERTLQRVLAWTEQAAPSDQAAALHLRVALRLEDDRQQKSLEILGLERDIASRLVRTPYVLLLSFPGINVVSAADFAGEMGPIGNYANSRCITGRAGLRPARYQSDQVDRPNGPLVRCANRKLRAAILGIADNLVCCNRHFNVLALRWRAEGKDPRHTRVKIAQRFCRIAYQMVAGGQVFRHPCLQHRSYILDKLNAFHREHDTAMPQALTDLQAAIEQLPRSAYAEEARPLAAELQRIEQGRRRGPQLLGDMLPIVLARLGVGALQSRESGEHDLT

SEQ ID NO: 488852 - protein, 402 aa, unidentified
MNCVGIDVSKGKSMIAVMRPFGEVVVSPFEVLHTDSELSELARLLKSLDGETRVVMESTGNYHAPVAWLLHDAGLYVSVVNAMLVHDYGNNSLRRAKTDKKDAVKLANYGLDHWLTLPRYIPEEDTRLMLRTCYRQYQQYSKVQTMLKNNLISLLDTTFPDANRLFTSPPRADGSEKWVDFVATFWHCECVCGRSEKAFTTQYQKWCRKHGYNFSEDKALDIYASACRHFGVIPKTDTAKLLVEQAISQLRATSAALAALKQEMQSLAASLPEYPVVMGMFGVGPSLGPQLMAEIGDVRRFHSKKALVAFAGIDAPPYQSGQMDVRSRSISKRGSASLRRTLFLVMSVILQCAPMDEPVYQFMSKKHSEGKPYRVYMMASANKFLRIYYASVKAYLDSMEYD

SEQ ID NO: 488853 - protein, 416 aa, unidentified
MMTESYRIFVGIDWGADAHQVWVTDAAGTAVGEQTVDHTGTAIAALVDWIVGLAEGDARAAAVALETPRGPIVDACLARGCQVFAINPKQLDRFRDRFSVAGAKDDARDAEVLSSAVRTDRRAFRHVTAEDPLTVQVREYSRQDTELGEDLRRLANRLRDHLLRTWPELLRLVPAADEPWFWALLKRAPTPVEGRRMRPAQVRQLLRAHRIRRITAEALLTVLRAPSVSVAPGVREGVRVRILDLVDQLPVLARQRRAAERRLATTLEAMTQGPDGESVREHTDVTVLQSLPGIGTRIAATMLAEAADALRDRDYHALRLLAGAAPVTKRSGKSCVVIMRYACNHHLQTALYHWARGCMQRDPRSRAHYAQLRRAGHGNARALRGVADRMLTVLIAALKTHMPYDATRRRPWAAGA

SEQ ID NO: 488854 - protein, 315 aa, unidentified
MTKDTIGIDISKDHLDIYRMSDGAICRFANNEAGHKSFVTWLGPAETVDRLRIVYEPTGSYHRAIERRLDLAGAALVKVNPRQARRFAEATGKLAKTDRMDAAMLARMGAALELEARPVRSPLFNDLKDLHMAREALLKNRTAAKNRAKNLTLSVLKRHNVEQLRQIERQMAAIETEIMRIVNDDPDLAGRFDILVSVPGVSTVTALALLIEMPELGSLDQRQAAALAGLAPVARQSGNWTGRAFIRGGRANVRQALYMPALVATRFNPDLKAKYDQLKAAGKPPKVAITAIMRKLIVLANALLKAGRKWQPMLA

SEQ ID NO: 488855 - protein, 376 aa, unidentified
MSMTTKYVGLDVSKNKIAVAIAEEGRKEARYWGVIPHTKDTVRKLIQQLLKTEDVSLEVCYEAGPTGYVLYRWLLELNISCTIVAPSLIPKRAGDRVKTDKRDALRLAQLFRAGELISVYVPTPEDEALRDLVRAREDAKEDLNRHKQRLGKFLLRNQLSDPKGSKPWTSANEEWLDTLKFTNECQRLTFQEYRHAIWETKERIKRYEKEMEQQSEVGVQAPLIQALQALRGVAMVTSVTIGSEIMSIARFPNPSAFMSYCGLVPSESSSGNSRYQGKITKAGNAHIRRVLVESAWSYRYPPAIKRKMRERITGLPPEAQAIAWAAQQRLHKKYKTMMRMGKHSGTIAAAIARELAGFIWAIAMEIEKIEQQKSVA

SEQ ID NO: 488856 - protein, 309 aa, unidentified
MNIAPGLIGIDIAKQHLDVFDAALGRAVQIPNTPAAISALIARWPNKPACVLFEATGAYDAALRHALDQDGIRFARVNPKRARDFARAAGFLAKTDAVDAKMLAAMAQCLSPPAEPPAQPERERLARLHKRRDQLVATRQQERTRRHDAPAEIVCDITRHIAWLTAEIAALQTRIDQLIAASSALKQTCRLLRSAPGVGPVTATTLIALLPELGDRSPQTIAALAGLAPINVESGQFRGKSQIRGGRKRVRDALYMAALAATRSQSRFAKLYQALRTAGKPTKLALVAIARKLLVTLNAIVRDNLAFQP

SEQ ID NO: 488857 - protein, 385 aa, unidentified
MGSQTFIARNYDVFAGLDVDKKSIAATFSSHQGFIRSLSMPYKVEDLLNHVRKHFADQKVAFVYEAGPTGYGLYDGLAAQGYTCLIAAPSMIPRAPGQRVKTNRLDSKALSESLRGGQLRSIHVPSPVYRELRHLTQLRDTMMSEAVAMKLRIKSLLLFEGIAFPPAPAGSQWSLIVKAKLRKLPCSNTVHFKLDQLLDSLEFAEKQIFKATREIRRFCQTDAELSRCIKYMMTVSGVGWIVASQLLARIGDWRELKNIRQLGGFLGLVPMEHSTGDNTDRGPITHTGDGRLRSKLIQAAWSAIRKDGELREFFRSVCQRHPRKVASRVAIVAVARKLSVRISVVLMKQRPYEVRKKVHSAPLTQEETSPQGTTRRLREPGDKNS

SEQ ID NO: 488858 - protein, 375 aa, unidentified
MEGAPMLDTTTFVGLDVHARSIKAVSLDVMTGEVRAATFGYDAGAVAGWVRSVDPRARCVYESGVTGFDLQKRLSGLGVDCVVGAVSKMIKPSADRRRKNDRNDAEFLARMLSVGNVVEVWVPDDECEAARDLTRALEDARDDLSRSKQRLSKFLLRHGLAFDERTPTGRRKGNWTRAHWSWIESIRFAERADEEVLAYYVDAVRRAAEEKARLEGLVEAEARKPRWRKRVDSLRCLKGVDTASAADLVFEAGEFSRFGNARSFAAWVGLTPSEHSSGESDRRGAITKAGNKHLRKTLVEAAWHYLTCSGRPKGLAKGQAPDRGARRHAAKGVRRLAERREALLARGVHGNKANVATARELACWVWAVGLMAEEA

SEQ ID NO: 488859 - protein, 359 aa, unidentified
MIVIGIDPHMKTHTAVAVDSATGAVRGEITAASGKAGHGRLLVWARDLDAEHLFAIEDCRHVSGSLERFLISRGERVVRVPPKLTARARRSSRSRGKSDPIDARAVAEAALREPTLPEVRLSGPEHDVRLLVDHRDDLVGERTRIQTRLRWHLHDLELGTRVPAGALDRFVWLKRLAAEIAAAPVTVQTAITADLIERCRSLTLEIKRLERELTAVMKALAPELLAYPGCGAVIAARLVGETAGASRFKGEAAFAMHTGTAPLPASSGQTIRHRLNRSGNRRLNSALHMMALTQARSHEPARAYMARKKAEGKSTREAMRCLKRHIARSVFGVLKRIEQATAGQIIEVAFRTKDVAIAV

SEQ ID NO: 488860 - protein, 376 aa, unidentified
MNEKLRFLGLDVHAETIAVAVAEPNGEVRSLGMIANREDSIRKFIRKLGSPEHLRACYEAGPTGFVLYWQLTQLGVKCDVVAPSLVPKKPGDRVKTDRRDALKLARSHRSDDLTAVWVPDEGSEALRDLVRAREAAKQDQLRAKHGLTKFLLRTGQRPPLGVKAWTEKYVEWVQQVRYTHPAQEATLLDCLNEVQHMEERVKRLEQSIVEVIQLAPAPMQEVVRGLQALRGIAHISAVTIAVELGNITSRFESARDLMGYSGAFPSEDSTGKRIRRGGITKSGNAHLRRIVVESAWSYRHRPAIGARLRRRQEGLPAEITEIAWKAQNRLHKRYMTLMARGKEQRKTMTAIARELLGFIWAIGIKAEAACKQQMAA

SEQ ID NO: 488861 - protein, 389 aa, unidentified
MEARTVSSLPTAAPHHDVVRCLLAIELSKASWIVAVLTPLSDKISRYTLEGCDWNGLLELIGRIRKRVIREFGPSVEMISCYEASYDGFWLHRLLERHGVRNHVIDPASLQVDRRARRAKTDRIDAARLLRSLMAHARGEPKVWSVVRVPSVAEEDDRRLHRERDRLINERGQHVNRIKGLCAVHGIYDYEPMHSKRMLRLERLRTATGDQLPRRFKEEIERELQRLELVLRMIKAIETERDAIASAKASTHTNAKKIQKLVKLKGIGAEFATVLVGEVFFRPFSNRQQIASYVGLTPSHFQSGSMSRDQGISKAGNPKARTTMVELAWMWLRHQPGSSLSAWFRERVGTLKGRIRRITIVAVARKLLICLWRYLEAGVLPTDIALKKG

SEQ ID NO: 488862 - protein, 346 aa, unidentified
MSKQVTTDSPKLFIGFDIHKMSWRFHFTTDIFSGTGHTFPPDIDKIKSYVAKNFADYEVSIAYEVGCFGYKPARSFESFGWDTFVVNPADIPRPSKSKFMKTDKIDAKNIAQQLKAGNLKKITIPEPVRESLRALTRQRTAVVRDYRRIKTRVKSLLLYNQIKIPDGMDCPKWPKRFLIWLEELDTGYLNTNSPLSSMLNQYRYIDQEIKDLSTEMRRYCKVHHKGDYMLLRSVPGIAGLTAAYILAELGDLRRFSSFKRLASYVGFIPSMQQSGEGLYTGGSTPRANRHVRNMIVEASWQAVRIDPVMQNYYRSHSGKKFESRDIQGRQKTTLENPCSDKNRNPI

SEQ ID NO: 488863 - protein, 320 aa, unidentified
MLSFCGIDVSKDRLDVMVLPDEYSSSVPNDPAGWAILVEQLRGFSITAIGIEASGGYERGAVRSLQAAGMPVRQVNPFKLRQFAKASGVLAKNDPLDARMIASFVGIMPTRPAQRTTPAAEQLVEMLAVRRQLSAEKTAAENASRLLEDLMLQRLSRRRIARLAADIELLDKRLVESVATDATLAHRYRLLTSMPGVGPVLACTLIALLPELGGMSRKQVAALVGVAPYAFESGTLKGRRCIWGGRANVRQVLYMAAMSASNWNPVLKLFHDRLKGAGKLPKVVIVAVMRKMITTLNAMVRDDLAWADRLSGRHSVTTAR

SEQ ID NO: 488864 - protein, 351 aa, unidentified
MSNPTRWVGVDLHRRRSQIAIIDEHGELALSRRIVNDPNTFKELLGDPDGTHVALEATYGWEWLADLLLEAGYEVHLAHPLRTRAIAAARVKTDAVDAKTLAHLLRAGLLPEAYIAPPELRDLRELLRHRAVLTRMRTAVKNRVHALLARQGIRHEHADLFGKAGREFLAGLELPEGSRRRLDSLLSLIGDFDREIIATTREIDTQAKADERVKVLCQLPGVGRYTAMLIIAEVGDVSRFPTARHLCAWTGLAPSVRSSDGKARLGHISRQGSPALRWALTEAAQKIPTGGGPLRAMFERIAKRRGRSIAKVAVARQILTLCYYGLRDGEIRCLNNQPDTNDHNDELAQAA

SEQ ID NO: 488865 - protein, 366 aa, unidentified
MKKISTVQIFESEIFKEQRLTIGMDLGDRSSCYCVLDEGGRILLEQKVAMTPEAMKQTFSKIPRSLLALETGTHSPWVSRLLTELGHEVIVAHAQKVQLITKSNRKDDRHDARTLARLARIDPELLGPVRHRSAQAQIHLTVIRARAELVRARTAMVNAARGLVKSYGQRLPKCGTRQVSRELGAGLPAELGEVLEPLLKEIESLNERIQEYEVRVEKIAKESYPQVELLKQVKGVGTQIALTYVLTLDDPRRFLKSREVGCFLGLKPGRRDSGESQPQLRISKEGDRYLRTMLVQGAHYILGPFGEDSDLRRWGLRLAGRGGKSAKKRAVVAVARKLAVLLHRLWVSGEVYEPLRNSQKAMRAVA

SEQ ID NO: 488866 - protein, 411 aa, unidentified
MDKVYDKCCGIDVHKKLIVACFRKGSKQELRNFGATTRELLELANWLQNGGCEMVAMESTASYWKPLYNILESSELKAMVVNASHMKAVPGRKTDTKDAEWIAELLQHGLLKASYIPDKQQRELRELVRYRKSLVSERTRELNRLQKMLEGANIKLSGTVSDINCMSARNILEYLLTGEFFDEAKYDEMYKQKIIAHNLKASKEQLIDDLNGVMTPLQRRMMKELLSHLDELNVHINNLEDEIDNFMKPEEKKATQAIQDVTGIGKNSSQAIISVIGTDMSRFPTAGHLAAWAGLCPGNNESAQKRKTGKMRKGNALLRSTLVVCAHSATRNKNSYFYAQFMRISAHRGKKRAYVAVAHSILIAIYHILKDGVVFKDLGADYYNQFNKERKINAYLKKLKALGWEVPVVAA

SEQ ID NO: 488867 - protein, 415 aa, unidentified
MQAIIERCCGLDVHKETVVACLLVGAPGEQPTKEVRTFRTVTRDLEALRDWLKEAGVTHVGMESTGVYWRPVYAVLEGHFDLIVGNARHIRNVPGRKTDVKDAEWIADLVRHGLVAKSFVPPRPLRELRELLRYRRKLTESQSAERNRLQKLLETANIKLGSIASDVFGVSGRAMLRALIAGEASPEAMADLARGQLRRKRDDLILALDGRVEEHHRFLLAMQLRRIEAIEADIATLDQRIGERLEPYSAAHALLLQIPGVDWVVAAVLIAEIGVDMSVFVSVYHLSAWAGVCPGNHESAGRQKSGRARKGNIHLRTVLVSAAISASRTKGSYLKDKYHRLKARRGALRAALAIAHKILVSAYHMLERNLPYRDLGEAYLDQIGQTRTVANLKRRLERLGYRVTLEPLQPNSQPT

SEQ ID NO: 488868 - protein, 457 aa, unidentified
MSKRRSKAKSKNIKVPKLPQHLQHMNLNAAGVDIGSERHLVAVPEGRDTVSVREFGTFTADLQALAAWLKQCGVTTVAMESTGVYWIPLFEVLERHGFEVKLVDARHVKNVSGRKSDVLDCQWIQQLHTYGLLAGAFRPPDEVCVLRSYLRQREMLTQASSMHIQHMQKALQQMNLLLHNVVSDITGVTGMKIIKAILAGERDPRVLAGHRDERCHNTAATIAKSLVGNYREEHLFALRQAVDLYQTYQAKIADCDHAIIKQVEKQPDSSDDDPPTPEKQVPAHQRIRDGVDVRDLLFKKSGVDLFAIPGLAADTLLILASEVGFDMTPWKTEKHFAAWLGVCPGTRKSGGKVLQNKTKRNPNRATQAFRMAAASLYRSQTALGAFYRRIKSRSGGQQAVTATAHKIARIYYAMLSHGTTYVELGQKAYEQRYKERRIDHLKVQAKSLGFQLVPCAT

SEQ ID NO: 488869 - protein, 318 aa, unidentified
MSKIAEHSHFVGVDVSKDWLDVCILPGRSALRVANTTRGIWLLIATLAEHENALVVMEATGGFEARALEVIAAAGLDVAMVNPRQVRAFARALGLLAKTDRIDALAIARYAEAVEPTPRAVEHKGLSEIRALMTRRQQLSDMLTQERGRRCRVTNPLVRRRILVSLRGLKKEIKFIDGEIDKLVAKTAAWREKEERLRSVPGVGKVVARTLIAFVPELGALTRRQIASLIGVAPFSRDSGTLRGRRTIWGGRANVRAVLYMAALVASKRNRVIAAFYAQLVARGKQRKLALVAAMRKLLTILNAMTRAQTTWEEPNRA

SEQ ID NO: 488870 - protein, 379 aa, unidentified
MQQDSEIYVGLDTSKLKISVALAEAGRSGEVRFFGDIDSTPEAVARLVAKLEKRHVRLAFCYEAGPTGYGLHRQITTLGHACTVGAPSLIPRRLGDRVKTNRRDAVTLAKLHRAGELTAVWVPDPGHEAMRELVRAREATMAELRRARQQLQSFLLRQGRIYTGRAAWTKAHARWLSEQAFTQPALYLVLQEHRQAIADAEKRLERLTRQVTEAAETWSMAPVVAAYQALRGVAFLTAVTFVAEIGDVRRFDSPRQLMAYLGLVPSESSTGEQVHRGRITKAGNSRARRVLIEGAWTYRHPARMSRLLQERQADLPPAVREIAWKAQVRLCARYRKLMARGKRQTVVTTAIAREMAAFLWAIGHEVEPTAAAPSDGQGH

SEQ ID NO: 488871 - protein, 334 aa, unidentified
MWHVGIDLHRATVVLAAVNDAGEAMNPITIPCSDTAMIVSTVKALGTFRAVIEACGTYRWLYDLLRPHGTILLAHPMRLRAMIQRRTKTDKLDAQLLANLLRINQIPLAYIPPEPYQQLRDLTRCRARLGRQQAEVKIRLRALLARQNRESPYKTPFGSRGFAWFRGQDFGPIENMVRDELLERFRHYEKQMALFDKRLEGMRQAFPQVESLLDIHGIGLYSALLIVAEIGEVERFRSAKQVGAYSGLTSRVHQSGGHCYQGSITRQGSPWLRWVLVQAAMKAVHKDAALKNFYSRIRKRSSAKIARVAAARKLAEICWKRLCRWQREHASQAA

SEQ ID NO: 488872 - protein, 334 aa, unidentified
MENIALIGIDLGKNSFHIHCQDRRGKAVYRKKFTRPKLIEFLATCPATTIAMEACGGSHFMARKLEELGHSPKLISPQFVRPFVKSNKNDFVDAEAICEAATRPSMRFVQPRTESQQAMRALHRVRESLVQDKVKTTNQMHAFLLEFGISVPRGAAVISRLSTILEDNSLPLYLSQLLLKLQQHYHYLVEQIKDLESQLKRKLDEDEVGQRLLSIPCVGTLTASTISTEIGDGKQYASSRDFAAATGVVPRQYSTGGRTTLLGISKRGNKKIRTLLVQCARVFIQKLEHQSGKLADWVRDLLCRKSNFVVTCALANKLARIAWALTARQQTYVA

SEQ ID NO: 488873 - protein, 421 aa, unidentified
MSYRVAAIDIHKKVLMVVVASGADQVEDAAGEALEFECRRFGTGNAERRHVVSWLKERGVREVVMESTAQYWKPVWLELEPHFEKLHLAQAYSNKAPKGRKSDYRDAKRLARRLLADELLLSFVPEPEQRLWRTLSRSKHQLVRDRIRLQNQLEALLEEARIKLSSVISDLLGVSGRRILAALAKGTTDPAKLAELGDVHLKCSQQELMDALTGSPEPLHLQVLQLFLDRLELLDQQIQSLDTLLAGELKRHEAAVIRVAQIPGFGVDSAQQIITEVGVDAETFPSAAQFSSWAGTCPGSEESAGQNQSSRSPKGNRFVRRILTQAAQAAVKKKGCHFQTVFRRLSPKLGYKGAIWAIAHRLGRLLWKILHDHISYLEQGQETNPKAKKRRAQKLAQALRKLGYQVSLTPINPQLRLEAQA

SEQ ID NO: 488874 - protein, 481 aa, unidentified
MMKPKKSTFQRLMSGPLNRKQRREMERKLSTEDPGLEIVNRNVAGIDVGNESHFVAVAPGRDPQPVQEFGSWTAELERMADWLKACGVETVVMQSTGVYWIALFDVLEARKFKVCLANARHTKNLPGRKSDVQESQWLLKLHTYGLLRDSFRPPDEIREVRSVWRLRDRHVKEAGRAIQHMQKSMTTMNVQLSNAISDISGVTGQAIIRAIVKGERDPRKLAKFRNYRVKATEEEIARSLEGNWRNDTLFELKQAVDAYDFIQKQIAECDQRLQKLLAELPLRGAAAPLGPPVAAEQTVSRKPNRKPRNVPPFDLHSELERICGVDLTSIDGIEVMTAQTILAELGTDFSRWKGEAHFTSWLGLTPSRDISGGKVIQQESRRVKNRVATALRTAATTLLRSDSYLGARYRSLRARLGPPKAIKAMARYLACLIYRLFAKGQAWVDRGARDFENKRAKRELSFLQRKAAALGFRLVSQPATA

SEQ ID NO: 488875 - protein, 383 aa, unidentified
MAALTIVAQTRPFVIGVDCHARTHTYAIIDASTKRRVACEQFPTTSAGISRALAWVGRWTDGDMACLWAVEGIGSYGARLARAVTEAGYDVAEAPRMNARGRRAIGKSDPLDAAAIGTAVLALEESQLRAPRRDEGTRAGLSILSAARDQLTRDRTMNVNALIALLRAHDLGIDARKPLVPAQIATITRWRERQEQIELSIAREEAVRLARRVLEVTTQLTANQKRMTELIQQSPAAPLLEMVGAGAVTVATVLTAWSHPGRVRSEAAFASLAGVNPLPASSGNTVRHRLNRGGDRRLNRALHTITMTRMVHDPGTRDYVTKRTEEGRSYREIRRSLKRYIARILYRQLNTLYATAEPAPIPCRVFAGDRSSRPASAILVSNW

SEQ ID NO: 488876 - protein, 394 aa, unidentified
MGKMYVGIDIAKDRSSACGIEEGGRTLFELTFTMDGAGFAELLKTIEANGGTPGNVVAAMESTACYHINLYSFLSAKGIDAVIINPLLIATYAKLSLRRTKTDKKDAKTIARFILAHKDSVTQLAISQDMQDIRDMARERESLCYQISAAKVEIQRVLQTTFPELAAMTNPLTKVMLHFIQRFPSARLVSIAKPSAIEKTLKEKPCSCRLRFTSKDLIEAARTSIATVSPAKELILSGKIETLIHLQKRRDELTKALTKYCESMIVEDLRIVTSISGINNTMATALLAEIGQIGNYLSHKHLIAFAGIDPTVYQSGKYEGASRISKRGNRHLRRVIWLMTISVIHHNSVFKNYFLKRRNEGQPFKKAVFATAHKLMRVIFAMLSKKTSFVAACV

SEQ ID NO: 488877 - protein, 349 aa, unidentified
MEQNEVILGVDTHLDTHVGAVISDTGRLLGTLSVSTDAAGYFELLTWANSFGQLQRAGVEGTGTYGAGLARVLRDHEIEVLEVNRPDRAMRRSKGKSDPTDAENAARAVLSGRATAIPKEQSGAAEAMRAVSVARRSAVKAKTQAINQLRALLVSAPQEIRERLLKTKTTECVEGCARLRSLGKTPMLQTLTTTLRLLAKRWLTLAEELKALDTMLDSLTSLHAARLRERFGVGPQTAAVLVAVAGDNPERLKSEAALAALCGTSPLQASSGKTVRHRLNRGGDRSANNALWTIAMVRMRSDPRTRAYVERRTKEGMSNKEIHRCLKRYIVRELYPLILADLADSTASA

SEQ ID NO: 488878 - protein, 452 aa, unidentified
MEKSRRHRAEREFSCTHPDAGAIDIGSRIHVAAVPPDRDPSEPVRTFGTCTGDLQRLADWFERCGVRTIAMESTGVYWIPAFEILEQRGFEVMLVNARDAKHVPGRKTDVSDAQWLQRLHEYGLLRASFRPKGELAALRAYLRQRERLLDYAASHIQHMQKALMQMNVQLHHVVTDMTGATGMRIVRAIVEGERDPTKLENHRDPRCHASMEEIAAALTGNWREEHVFALCQSVELYNTYQAKIAQCDAQVEAVLERLRSAAATGTQPLPPARHRQATANAPSFDARSALHAVLGVDLTQIHGLGPSLALKLVGECGTDLSAWPDAKHFTSWLCLAPSNKISGGKILSTRTRRSGSRAAALLRLAAVTVGRTQTALGAFYRRLSARIGKAKAITATARKIAVLFYNTLRHGRAYADPGASYYEQRYHARVLTNLQRRAKSLGYVLQKELSPT

SEQ ID NO: 488879 - protein, 313 aa, unidentified
MYYIGIDVSKKDLSVFNGKKDLKFINQEGLRPFKKYLKGKYKNFSDLVIIFEPTGIYSFNLKEFCAENSIKAYIVNPKRSHSFARSLGIRPKTDKIDARILYQFHKLIDAKDIKVPKVDQQTKVLSSYLTSYEFAVKQRVAISNHLESLRDEKLVSLLKKELKRARKLEDKIFHDIKEYIRQNQNLREDYERLLTISGVGEKMAIALLTLFKTYQGTNRAQITALVGLDSTKRESGSSVRGRAKISKNGKAIYRKVSYLPAICATVHNQKIKIFYQRLLAHHKPKKLAIIASMRKILLIAHAMYRDKTEYMAV

SEQ ID NO: 488880 - protein, 345 aa, unidentified
MFVAGIDAHATYSVIAIVSNTGELVHKPVRIKNSEVDRMDELLEPYRPLEVVVETSPAWPWLFDRLEGPEVHFVLAHAKRIRVIAESNYKSDDIDAELLARMRLAGLIPEVHTKSVEQRELAVLLRSRGRLVRQRTQMANRIHSQLHNVGLHLERGRLLTQDGREWVRTEAWPRLGDERRLFITMQWALIDQLEPMIKTLDRRVERMGRDNPAVALLESVPGIGAYRALVIATETLPITRFRTPGHLVSYAGLAPRSSQSGLRPIRHGSIPAGANRWLRGTFVRAVVSHVTNAPDSWLSESYDQMKQRLGWQVARVATARRLARAVHAMLRTGEVWRDQPVSQQN

SEQ ID NO: 488881 - protein, 403 aa, unidentified
MTKYHVGVDVGKDKHHVSVRDLSRDAYCKTFSVTNDRSGFMEFVSSLESLSVDKYDFLIGIEACSYGLNLSYFLMGVGFKLVEVNPFRAGQFRKAQGKKAKTDRIDARTIAAILTLGNHKPLSIPDPILDNLRDLTQFRAGLVRERAALLIHLREALSTLFPEYTKVFRQLDSAGSLALLLVFPGPEHLLGAGEERIAATLSHASPHRMGKGMARRIMEAAQNTIGVIQKQPALGIKISILAKRILSLQSTIKELDEQITTLFNTLPYKTQDFPLGHVSSLATIISEIGDIQRFPTLKKFLSHLGWCPQSFQTGNFRLEHPRMSHAGNRYVRQLIWMWSVIAIRILPRCREYFERRVREGKAKMHILVAVGRKLLSILYAILKRGVSYDPNWEENRHLAVARR

SEQ ID NO: 488882 - protein, 392 aa, unidentified
MFFLGIDIGKNTLVASLIDDNGKTVFKAFSFPNSTIGATSLLDKLTPFSNEIEIGMEATGHYWLALYSFLVEHGFVIHVINPIQTDGWRNATEIRKHKTDIIDSLIIADFIRYGEFLETSLANEDILSLRNLTRFRNYLVSSIGDLKRKTICILDQIFPEYESVFSNIFGKTSKEILLHFSSPAEFESITSEQLETALEQVSFKKFASKKISYISNIAKTSFGITFAVQSLTLQLKLLIKQINFIEQQVHDVEIQIKQLLHKINTPITTIPGIGDIIGATILGEIGDIERFSNPSKLVAYAGIDASVHQSGDYISTNNKMTKRGSPYLRTALFRAALIASVHDPVFKAYYQKKRSEGKHHLTCLGAVARKLCYTIHAILKNNCEYKVQLPTE

SEQ ID NO: 488883 - protein, 352 aa, unidentified
MSNKSTPIVATMGIDIGKNSFHVVGLDERGAIVVRQKLSRGQIEARLANMAPCLIGMEACVGAHHLSRKLQAQGHDARLMPAKYVRPYSKGQKNDFRDAEAIAEAVQRPTMKFVATKTVDQLDLQALHRVRERLVSQRTGIINQIRAFLLERGVAVRQGLRFLQRELPGILATRSDVLSPRMMHVIEDLAGDWHRLDERIEGLSTEIAALADQDPACERLMTVPGIGPIISSAMVAAIGNGSVFSKGRDFGAWLGLVPKQISTGDRTILGKVSKRGNRYLRVLFVQAAWVVLIWPQSWERYGLKSWIEAAKKRLHRNVLAIALANKLARIAWAVLHNGRAFECVKTNAPRSA

SEQ ID NO: 488884 - protein, 377 aa, unidentified
MKEQSFVPREFDIFGGLDVDKKSIAVTFMSHQGIVQSFSMPYRADHLLSYVGKHFEGKKIAFAYEAGPTGWGLYDKLTHEGHLCVVAAPSMIPKVPGQRVKTNRLDSQRLSEHLRGGQLKSVHVPSESYRQLRQLVQLRDTFVQDIVAMKLRVKAMLLLEGLEFPPAPAGSQWSLIVRGKLKKLSCSKAVRFKLDQLMESLEFSEKRVLQTIKEIRGFYQQDPELCQAMAHLKSIPGIGEIVASHLLARIGDPQQIGNVRQLAGFIGLAPTEHSTGDRVARGHITRSGDGRLRSKLIQAAWSAIRQDPELREFYRSVYQRHPRDRAPRKAIVAVARKLTTRIYAVLKQQRPYVVREVVHSAPLTQEETSPQGTTRRH

SEQ ID NO: 488885 - protein, 344 aa, unidentified
MGEVSTIGLDIAKSVFQVHGVDSSGAVVIRKRVSRLKLLEYFAALPPCLVGIEACPSAHHWGRKLQALGHTVRLMPPSYVKAYLKRSKNDANDAAAICEAVTRPSMRFVPIKSKEQQTALMLHRTRQLLVRQRTMLSNALRGHLAELGIVSAKGRNGIGELLRIIADGADNRIAPGTRAILDVMARQYSAIGAEIRSIDKSILAWHRSCEASRRLEEIPGIGPIVATALVAEVGDWREFRSGRNLAAWIGLVPKQHTTGGKDKLGRITKQGNRYLRWLLVAGAMAVIRYAQKHGTEGRPWLGRLMENRPTMVAAVALANKIARMAWAIMVRGERYQEPKLLVAA

SEQ ID NO: 488886 - protein, 395 aa, unidentified
MNKVIHYVGLDVHKETIAVSIAPQNTTEVRRYGIMGGTLDAVDKLIKKLSADNVELRWVYEAGPCGFVLCRHLRSKGFVCQVVAPSLIPKKASDRVKTDRRDADQLARLCRAGELTAIHVPDQEDEAIRDLVRARASAVVEQRKARNRLKGFLLRLGYRYTGKSGWNDAHKRYLSSLVMPRPAQQIAFQEYIHAINDATERLERLSQAVEDALPGWKWEPVVRALMSLRGVQVLTGMTLVAEVGDFSRFDDARSLMNFFGLTPSEHSSGGSRVQGGITKCGNVHCRRVLTEAAWHYRLTPKVSEPLQKRQEGQSKEVRLIAWNAQKRLHQRFRQLSAKKKSVIAAAAVARELTGFVWAIARQVKPVERPAAPEISRTCRAKVYRLNPKKKMQPAK

SEQ ID NO: 488887 - protein, 331 aa, unidentified
MQEVIVGIDISKRFIDVAFRCPDGKTLTSRFDGSVQKQFEGIVDYLNQNGLFSTKFVMEATGVYHLPLTYILVKNGYSVFVDNALKFKRFAQMRLIRAKTDRSDACLIAEYGATQEIRPFTIPETNQIQIKQYVQAVQDLQQLKTDMLSRVEALEIHPNKNTVLLEMWEEQITGIRAQIKQLNHKISKLAESWQPEAYSNLLSIPGIGPLTAGAFIGQFGSFESFENANQVAAFVGLNPSIYQSGSSVQSKRGISKQGHSYLRRLVYMGAWMAKECNPPCKALFQRLLLKHGSKKKALVAVAHKLVRQAFGVVKNRAPFEASFAENYVNVT

SEQ ID NO: 488888 - protein, 406 aa, unidentified
MTPQVCRIVDLPVYYELETNNGNRDYRIQIGGHYMNYNTVYVGMDVHKESFTLCSCKYEDEKASHYQRTPASYKNVLRYLAFLRTIYGEYTRFVCGYEAGCLGYSLYHQLENFNVECVILAPTTMLEQRSKRRIKTDKRDAEIIARSLAQHNYSPVHIPTETDNQTKEFIRMRDDHKAELKKIKQQILSFCLRQGYQYDGSGNWTAKHVKWLRSLKPAGLYKEILDEYLLTYTILTDKLNRLDQRIEELASKEEYKESVSKLTCFLGIKIHTALSVIVEVGDFQRFVSARKFAGYLGLVPGQHSSGDDRNGLGITKAGNTHVRRLLVESAQSYTRGKIGYKSRVLRSRQAGNSPQVINYADRANERLRRRYYKMVLKDGKKYNIAKTAVARELACFIWGMMTDNIY

SEQ ID NO: 488889 - protein, 354 aa, unidentified
MNTIKYIGIDVHQATSVFAIRDSRGNILGESILKTEPTTIVDFLKGQRGTVRVTFEEGTYASWLYDVIKPHVSKVIVCDPRKNKLDENKTDRIDARKLAELLRLNALSAVYHGEQSNQTLKEYARSYLSLQQDSTRIMNRLKAIYRGRGIGCRGTAIYRPKNRKEWLDKLKDTGAQCRAERLMKQLEFFGKLRLEAQRDLVRESRKQKDYKILKGIPGLGLIRIALIMAFVMTPHRFRNKRQFWTYIGFSVVRRGSSEYEINEGELKRKKRKPLPRGLNRNYNHVLKDVFKGAALTAAYRGQFKKLFDQRVADGATPNLALLTMARKIASITLAIWKKGERFDIKRHQLSEQKT

SEQ ID NO: 488890 - protein, 327 aa, unidentified
MAKHTTICAGIDTGKRKLDVALDGSSEPLQIDNTPEGYKVLLDWLRCHRVKRIGIEASGGYEQAVVAELRRKRFVVVTFQPAQVRAYAKFHLQRAKNDKIDAALIAACTAAVKKIHPPPDARLLPFGEHLTMIDQIGEDIALLKNRLETCRNLRIQQVWKEDLARLAKRERVEFKALVAAIREHSDLAERLDLIYSVNGAGMPTAVTILVRMPEIGQLTREQAAALAGLAPYDDDSGNHIGTRHIDGGRKRLRRALYTAALPASFRWNPQLIALYKRLIAAGKGHKRALIACARKLLIFINAIVARGIPWDHEPPPNMAATALPQTG

SEQ ID NO: 488891 - protein, 383 aa, unidentified
MTGTEPHAWETGLMDSITYVGLDVHKAAVCVAVAEGGRGGEVRQVGVFENRPETLVKLAARLSKGGRRLSFCYEAGPCGYGLHRLLTGCGHDCVVVAPSLIPIKAGDRVKTDRRDAVMLAKLHRAGELTPIWIPDAAHEAIRDLVRARATAGRVLSKARQHLQSFLLRHERIYRGVRAWTLAYRRWLTTVRFAHPAQQIVLQDYIVAVQDAEARLERLTRQIAELLPSWSMAPVVTALQAMRGVALVVAVTVVAEVGDFRRFANARQLMAYLGLVPSEHSSGASIRRGGITKAGNVLARRVLIEGAWTYRMPARVSRKLHDRNEKLPPAVRDIAWKAQLRLCSRYRRLAAIGKPKVVVTTAIAREMVGFIWAIAGITQPVLAA

SEQ ID NO: 488892 - protein, 354 aa, unidentified
MSGEKYIGLDVHQATISVAVMDSQGKLIMESILETKASTILEFLAGLRGTLSLTFEEGTWAAWLYDLLKPHVAKLVVCNPRKNALLKQGNKSDKIDARQLADRLRLNDLKSVYHGETGVRMLRELARSYLTVVKDLSRVMNRLKALYRSWAIPCAGRDVYYTRHRSQWLEKIPEAGTRRRAEQLYQQLDMLQHLRQQARRELLVESRKHTITAKLRQIPSLGPIRSALAVALIQTPHRFRSKRQLWTYSGLGLETRDSGEYHFVKGQVQRKKPVWIRGLNKDYNHDLKGLFKAAAMQASIQPGPFQEFYQRSLAKGIKPTMVRLTLARKIAAITLTVWKKGENFDIEKLKSQAA

SEQ ID NO: 488893 - protein, 351 aa, unidentified
MDHIGIDVHKRESQICILAEGGELIERRIRTEAERFAAVLGDRPRARIVIEASTDSEWVARCLEALGHEVVVADPNFAPMYTTRTRKVKTDRRDARALADACLLGAYRRAHRLSDPQRHVRGRLLVRDALVRTRTRYISVIRALLRQQGYRVPSGSAEAFPTRVRTLALPGPLLSLIAPLLAVMRHLNRQLAYSDETIERVSAHDERVQRLRSVPSIGPVTAAAFVATIDDVQRFSHAHQLEAYLGLVPRENSSGDTQRRGPITKAGSSRMRWLLIQAAVSILRRRPPEAEALRTWALRIAARRGKHVAVVALARRLAGILYALLRDGTVFMPRRTSPPVAPATRPVSANV

SEQ ID NO: 488894 - protein, 358 aa, unidentified
MKTESTKIDFSGQKVYSGIDVHLKSWKVTIMVNNREHKTYSQDPSAELLWNYLRKNFPGAEYYSAYEAGFCGFSAHRELERFGIRNIIVNPSDIPTTDKEKRQKEDKRDSRKIAKSLKNGELTGIYVPGKDMEELRGLIRYRKTLVKEISRHKNRIKSYLHFNGIKIPLELEGPSKHWSGRFTQWLKEVELSTIHGKMVIEDTLDTAEILRKKLLKVNRHLRQINKEGIYAAKLRLLQSIPGIGLITALTLLAEMEDILRFKNLDQLCSFVGLVPSTNSSGEKEKAGRITRRSNRFLREIIIEAAWMASRLDPSMAYSYGQLCKRMEPNEAIIRIAKKLLNRIRYVMKNETEYVHSVI

SEQ ID NO: 488895 - protein, 333 aa, unidentified
MKFKKEIIGIDVSKLTLDVFILSLKHHFVVSNNPLGFSKLLQVIWKRLPNKKKENLFFCFEDTGKYSLPLCIFLNGEKLSFAMVPALDIKRSMGLVRGKSDKKDASVIALYAWRKRDEIKSTVFPAGSIVRIKQLLSLRNKLVKHKKAYQTGMDDIQDYFKTGDSIFYLDVNKRVIKTLNAEIASIEKEIETIIKSDPQVQKNYKVLKTVPGIGKIIAFYLIAYTHNFTKFENARKFCCYCGIAPFENSSGTSLQGRTKVNPLANKMIKALLNMGALSTIRHYPEFKSYYNQRIEKGYNKMSTINIIRNKIVFRAFSVVKRGSTYVDLYKFAA

SEQ ID NO: 488896 - protein, 301 aa, unidentified
MENIALIGIDLGKNSFHIHCQDRRGKAVYRKKFTRPKLIEFLATCPATTIAMEACGGSHFMARKLEELGHSPKLISPQFVRPFVKSNKNDFVDAEAICEAASRPSMRFVQPRTESQQAMRALHRVRESLVQDKVKTTNQMHAFLLEFGISVPRGAAVISRLSTILEDNSLPLYLSQLLLKLQQHYHYLVEQIKDLESQLKRKLDEDEVGQRLLSIPCVGTLTASTISTEIGDGKQYASSRDFAAATGLVPRQYSTGGRTTLLGISKRGNKKIRTTAAWRLQIENRPGSSCCCRTPRRICML

SEQ ID NO: 488897 - protein, 314 aa, unidentified
MIGKVYVGVDVSKAKLDVCVEGGRAFVIENAPKKIVASLRRLLKEHAAAGLHVCYESTGVYGDALRDACWACGVAVSVLNAKQVRDWAKGSGQMAKTDKIDARVVCGFARAVGAPPCEAPAEWRTLVRGLLKLREAFVQQRVLVLGHLEQTAEARFRKRLESEAARLDKQVGKLEAEMVAAVRSDADASQVMARMTSVKGIGALTACSVIALVPEIGTLGRKRAAALAGLAPYADDSGTHSGERHIRAGRADLRRALYMPAVCAIRHNLILKAFYKGLRKRGKHAKVALTAVMRRLIILLDRIAGKPGFVPCAS

SEQ ID NO: 488898 - protein, 374 aa, unidentified
MLKMHILKNKRKKHTLQMEDIMDFHKIKSEFYCGVDLHSTFLYATVVDVHGNAFLRRKIKNDFDAFCRHVQPFLPNLAVGTESTYNWYWLADGCKQKNIPFYLGHALNMKLITSAKKKNDKLDSQTQADLMRNDFFPKAYAYPLEMRAGRDLLRRRNYFVVSRAAANSHIQTIFDQQGILDISGRDVKTKTTRRSLLDILANPDIKLSVSSDLDVMDILDAVIRKQEKHIRQQAKHHNPKALEILQTVPGIGDILSLTILYEIHTISRFSSVKKFSSYSRVVKCERSSAGKRTGGGNQKIGNPYLKWTFDQIINKAQQQSEGIKKKYNRLVSKHGTRKARAIMGHKFAVAVYYMLKNNEPFDEDKFLQTNRNKQ

SEQ ID NO: 488899 - protein, 345 aa, unidentified
MIIGCDFHPSWQQVSWLDTETGETGEQKLVHASGDAKTFYQQLAVPVRIGMEATGNSQWFIELVQDLGHEIWIGDAAEIRASYVRKQKTDKRDAAHILKLVVEGRFPRLWTPDREQRDLRQLVLHRHKLVMIRSRVKNELQHLSLNKGMQRKHKLWSQAGQKLLRELPLKPWAACRREDLLGLLEKLNQQIGKLDEAVQLAADEHAQARLLMTQPGVGPNTALAYVLTIGDVSRFPRGKQVASYLGLIPREESSGGRQKLGAITKQGNRLVRSLLVEAAQIAVRFDPGMKKQYLHRCHQKPKGVAKVAAARRLAVRLYWMLRTQKPYPEIVRIESSPRVPLVGAS

SEQ ID NO: 488900 - protein, 355 aa, unidentified
MYGLKHQKEKRSMDHFAGLDVSVKETSVCIVDDTGRIVREVKVASEPEALLAVLTNPAYHFKRIGLEAGPLSQWLYSAFAEADLPVICVETRHMRAVLQAQINKTDRNDARGIAQMMRAGLYRPVHVKTLRSQKLRMLLTHRKLLQSKAIAVENDLRGTLRNFGLKVGVVGTVKFEARIKELVENLPDLAILVEPLLIVRRVLHEQIGLLHRRLLAIVRDDEVCRRLMTVPGVGPVVALTYRATVDVPARFKNSKAVGAVFGLTPSKYQSGEINRTGAISKCGDEMMRMMLYEAAQVMLTRTNRWSWLKAWAMKIARHRGMKKAIVALARRLAVIMHRIWVDGTEFQWTRDIAAA

SEQ ID NO: 488901 - protein, 343 aa, unidentified
MAVIIGVDPHKASHTAVAIDGSEEEVVRKKVRAGVTQVDQLVSWAEPLGSRTWAIESAAGLGYLLSQQLVAAGETVVDVPATLASRVRVLATGRSNKNDPNDALSVAVAALRFRGLHQVAPAGHGEVLRLLAKRNIDIGNQRTRLVCRMHALVAELVPGGIAKEINASDVERLLETLHPATPVERVRYDLAVELLDDIRRLDHQLKGSHRRIRDAVRASATSLTELFGVGPIIAGMLIGYTGDIGRFASRDSYAAYNGTAPVEFSSGGRVVHRLSERGNRQLNHAIHMAAICQLRQPHSDGRAYFERRVKEGKTNKEAIRALKRQISNAVYRRLVADTRRARV

SEQ ID NO: 488902 - protein, 342 aa, unidentified
MQIAVLGTDLGKNSCSVVGLDTSGRVVLRRRLQRDGVVKLAAGLPSCLMAMEACGGAHYLGRKLRDQGHIVRLMSPEYVRPYVKAQKNDDRDAEAIAEAATRPTMRFVELKSEEQLDMQSLHRARDRLVGERTALINQLRAFLLERGITVPQGRRKLELFLETLLAADQALISPRTRLLIEDLRAEWCELDRRIQAFDEEFAHQARTDETARLLSTIPGIGPLNATALAAAIGRAETFGRGRDLAAWLGLVPKQMTTGGKPKLLGISKRGNVYLRKMLIHGARAVLPTLSKSATRLGEWLRGLLARAHVNTVIVALAAKLARIVCAVLRSGQQFEIKAAAMS

SEQ ID NO: 488903 - protein, 424 aa, unidentified
MNDTQNKKIAQVTDKTLVVGVDVGSDKHYARAILARGFEVSRKPFEFANTRDGFERFVNWLCHLAAENHLTKIFVALEPTGHYWFNLANYLRDYDVKLVLVAPQHVKHSKEMDDNTQMKNDRKDPLVIAKLVIEGRYMFPYIPEDIYAELRAAFNRRCDLVEALNRNTNRMVRWFDIYFPEYREVYGRANALTGLMILMRAPLPSDILALGVEGVCQIWRDAKLRGIGIKRAKKLVAAAERSIGKKGCEAVRQELWQLIEEHDLLSRQLSDMMQIITDLLGKIPGAERLLNVPGAGVVTVAGFLSEVGDIRRFTDPKQIQKLAGLAVVENSSGKRKGLPGISRRGRKRLRWVLFQLARTMVKINKEMKAYHHYYTTRKDNPLKKMQSLMAIAGKITRIFFGMLKNGTEYDPAVVMKDLNKAAAA

SEQ ID NO: 488904 - protein, 319 aa, unidentified
MTRIICGVDVSSVSLEARIGRQGAATSFPNHAEGIAALAAFCRQHQAELVAMEATGGYEQQAFAQLCEHGLSVAIVNPRAVRQFAQAMGLLEKTDKIDAGVIAWYAETRKCQPLCLAPQTQLELRARVTRLRQLTEVRTAQKNQQRLVTNRAVQSGFKKMLAFLAEQIVELEGEIATLIKADPLWRELDQAFRTIKGVADRTVARIMAEMPEIGTLSNKTISKLAGVAPLANDSGKHQGKRAIRGGRATVRDLLFIVASVVGRHEPDFILFQQRLRAAGKPPKVVRIALAHKLLVRLNAKARQIRQNMQSPSALLATTH

SEQ ID NO: 488905 - protein, 367 aa, unidentified
MEWPAPSVPQLKAKLAWQSEEEWKMQIAVLGIDLGKNSCSLAGLDNAGRVVVRRRLRRESVIKFAASLPPCIVAMEACCGAHHLGRILRSQGHEVRLMSPEYVRPYVKAQKNDDRDAEAIAEAATRPTMRFVELKSEAQLDMQTLHRARDRLVGERTALINQLRAVLLERGIVVPQGRRKLEQHLAAMLDEGEGLPLSPRVRALVADMRAEWRELDRRIGAFDDEFAARARSDEAARRLATIPGIGVLNATALLAAIGTGEAFRRGRDLAAWLGLVPRQASTGGRAKLLGISKRGNKYLRKLLIHGARSVLRPLSRSATPLGAWLRGLLARAHVNTAVVALANKLARIAWAVLSRTRTFNAGAVMVA

SEQ ID NO: 488906 - protein, 339 aa, unidentified
MKQEVATVGLDLAKNVFQVHAIGSDGAVLVRRKLRRAEVIGFFTDLPGCVVGMEACASAHHWARELIALGHEVRLMPPAYVKPYVKRGKTDAADAEAICEAVTRPTMRFVAVKSVEQQAVLMLHKSRDLMVRQRTMLINALRGHLAEYGIVTGMGAGGVTAMLKALHEREDELPAHARSALHGLAAQMRALASEIDRLEAQILAWHRADETSRRLATIPGIGPITASAISAAVPDASLFRSGRQFAAWLGLTPRANSSGGKERLGGITKQGDGYLRRLLVVGATAVMRMTRKNADRQPWMAQLLERKPAKIATVALANKTARIAWAVMSRKEVYAAPAA

SEQ ID NO: 488907 - protein, 350 aa, unidentified
MNYIAFDSHKRYTLASVERESGGLLQEARIEHGPGAIKDFLARWDKGSPVAVETLGNWYWIVDEIEAAGMVPRLVHARKAKLMMASANKTDTLDARGLNRLQRTGTLPSVWIAPRELRDQRELPRTRMVLTRERARLKNRIQATLAKYALSVEGVSDLFGKKGGELLRGQVSRLPAHARFATEQLLEQLALTQRQIGAFEERMRGVFEDTPEHRLLQSLPGVGFILATVILTETGDIGRFCGAGNYASYAGTTPRVHSSGGKTRFGPLRSDANSYLKWAFVEAANVVCLNRRRWPGRHVAQFYSRIHRRKGHQKAIGAVARHLAESTFWMLTRKEEYRDPASRTVVSIEG

SEQ ID NO: 488908 - protein, 374 aa, unidentified
MDTIYIGVDFHARQQTICYLKTETGELVSCELKHQDKEVVRAFYAQFRGQVVVGLEASGYSPWFERLLEELGCEVWLGHATEIRRRARWRQKNDRRDAELILELMLHDEFPRLHRPAVQSREVLRMLRYRQKLIKMRTMSKNSLQALALQAGVARRSHLFTREGQQELTAALMSPAMQWQREHWLQLLQPLNQQVLESMGWLKAQSKGDVDVARLRTHPGIGLLTSLCLAHTLQPIDRFRNTRKVVAYAGFDPVERSSAERKRFLGISKAGPRLLRHLLVEAAHIAIRKDEDLKRFYQRLADRRGRPKAKVAAARKLLIRAYIMLRDEIDYAEFRRRAVAARLARLGHGPKVPEVVIGQPASTERQEQLSRTRK

SEQ ID NO: 488909 - protein, 370 aa, unidentified
MKKYSEAFVGVDTAKKKHAVAIADAGRDGEIRYLGEIDSSPATVARVIGKLADRYETLHVCYEAGPTGYGLFRDIRALGHDCIVVAPSLIPKKPGERVKTNRRDAVTLARLLRAGELTSVWVPDAVHEAVRDLVRAREAAAEDFRKKRQQLLSFLLRHGRIFMGHKHWTQAHRRWLAGQKFERPAQQIVFQDAIDAIEDATTRAQRLEEQLALIVPSWSMAPVVAAYQAMRGVSFVVAVTFAAEIGDVRRFDNARQVTAFVGLVPSERSTGESVRRGGLTLAGNRRARRALIEAAWTYRYPARVSKVLQTRIEGLPKAVREIAWKAQIRLCARYRKLIAHGKKKPVAVAAIAREIAAFLWAIARHVAPAA

SEQ ID NO: 488910 - protein, 320 aa, unidentified
MSDSLVIGLDVDSKELVPAVVDCKAGDRISNTKAGIAKWLKTLPPRCRIGMEATGKHHELVARMAGQAGHVVYVINPRLIKSYAKATGARGKTDAMDAQVIARYVKKESDRLREYVPRSDEQQQMHDLLRKRKTLVETRARLEQSFEVTKSAPGELAGILQAMASTLSELESQLQQLGRDGEHGALYKRLLTIPGIGPAVAAHLVYYMTRWPLANANAWIACTGLDPRPNESGGRTGRRRLSKQGAPVLRQMLYMAAMGLKRCRNGQPLYEALSKRGHPSTAVFNILARKLARIAWGVFKSGKDFDPALLKVGQARFLQA

SEQ ID NO: 488911 - protein, 438 aa, unidentified
MPTISKIEQFRQVKSEATKNKDYLLIGLDASKKSSVACFYNIEKDTLIRKYHVNHSLEDFQRFTYKIEQIMEINNFQNAVIGIEPTGNYHKPLSEYLKNKGYFVVYVSSVAAKNNRKTIANGRWGKNDPRDAYNIVDLMRQGKILFYRDENTESANIRKYLLLRQRLMKLKTSLKTRIRNNIWACHFPELCNIFRNTEVHEVMLLLEYCPSAELVKSMDFQSFISIFPLAGNKNNKRYLRLCRVWQTAKTSVGFPMPSSTILESKMIARDIQRTQKDIAHIDKILAEFCTQNDVFANLLSIPGFGTFTASVFKSTLGNINDFNYAGQIVKFAGLDIETMSSGNFKGKEKISKKGNSLLRFAICQATNIAVSKNKVIKQMFQDKLNERGNSKAAKAKLKIKFAAKFIRTAFVMLKNNLTFDINRFNVPVNDPVLRTVRA

SEQ ID NO: 488912 - protein, 340 aa, unidentified
MRYIGIDCHKEFCQMSVVNEAGTEERNERVPTKRDALLAFLKGFQEDRSSAKFVIESTVRWRMVHDIIVGQGFEVKVAHPKGVKMIAASKIKTDKVDAYTLGNLLRVDMIPECHVASDAAQRWRKIVRHRYFLVNESTCLKNRIHSELREEGIDIPKQYAKPFSQKGKAWMRSLHMLMVDDLLDCLEELEAKIRDIEGVIEDECLGDREARRLSEIPGVGCYTALTLRAEIDDVDRFHDPESICSYFGMVPSVSQSGSHCHHGPITKQGSPMVRFLLAECVHVHATCCPGSGISRFLERKEGEIGKQRAAVAAARKLLVAIYFMLKRDEPFRGPQPDLEV

SEQ ID NO: 488913 - protein, 350 aa, unidentified
MTIVETRADTRAITGGVDTHADVHVAAALDSVGGLLGVEEFPVSPAGYARLLGWLGGFGTVCLVGIEGTGSYGAGLARHVAAAGIRVVEVDRSDRQDRRRQGKSGPLDAVSAARAARSGRARGAPKGRDGAVEAIRALMVAKRSAAGERTRTINQARALILTGPDDLRARFARHTPAALVAGIASLRPRPGDVPGYAVRVALRELGRRAVFLDGQLERLDELIVPLVTARAPGLLALYGIGPNTAALLLIAAGDHPGRLRSEAAWAHLCAAAPIPASSGKVTRHRLNPGGDRQANHALRRIVFTRMGSDPATRAYVERRTKEGKSKAEIIRCLKRYAARQVYPHLRPDAG

SEQ ID NO: 488914 - protein, 377 aa, unidentified
MSSLFIGKALGEAVSDCFTFTNTADGFEQLLKALLELGRDNVRIGFESTGHYAVNLKLFLEKNGFEFMEINPYLVKEWMKSDSLRMTYTDKVCAKAIAGYLCEKAFCSHATDFYDNFALKQLTRFRSSLVTTRSRYLIQLTNILDCIFPEFKPFFGNKFSVTALYILSHYQSAEKIANMNSQSYDKLRRVSRGHFSMHKFVELKALAKNTVGVWNDYYRFQLETVLELFGQIDSKIEDVEAEITKAVRELNPPTASIRGVGEISAAIIVSEYGDFSHYSNPNKMLAFAGLEPGHHQSGTVEYSGKMVKRGSPHLRRTLMNCASLIHIHNEVFAEYYRKKRSEGKPHRVALTHVAKKLVRIIFALETKGMMFDSEKLR

SEQ ID NO: 488915 - protein, 341 aa, unidentified
MKNLFIGVDFSKEKVDVAIIFADGLTETAPRVFNEFKTTVSGYKQLVKWVEQNSYGIDSSLWLFCGENTGDYSKGLCNFLYGKGYDMWLENAKSIKDASGLRRLKSDRADASMIAEYAMRNYDKAIMYEPLSESLAQLRELFLYRQMVVRHRCSFQVRRGEKRLTMEKSPVKTMISQSGRHIVSELNKEVEKIDKRIAELIKSDEELTEVFTIVTSVPGIGTQNAVCLMVYTDNFRRFNYDSRKIACYYGIAPFGKDSGTSVHSDPRVHYMANRQIKAMLTQAALAAVNFNPVMARYYMRLVERGKKKQVALNNVKNKLVHLITAMVRNRQLFSPEYKISA

SEQ ID NO: 488916 - protein, 414 aa, unidentified
MDIVHYRCAGLDISKRDAKVCVRVQEPTRARASSLVTTWGAMTNQILALREHLIEQKVTLVVMEATSDYWRPFYYVLEDGPFELMLVNPRHVKNLPGRKTDVSDAAWLAQLGAHGLVRGSFVPPEPIRQLRDLTRARTAIVRERSREIQRLEKFLEDAGIKLSSVATDITGVSGRAMLDALVAGERDTNVLADMAKRRLRSKIPELSEALTGRFNDHHAFLVKVHLNLIDEHTRALDEITAQIEEEMIPFRAARDLMSTIPGISTRVADVIIAETGANMSRFPTAGHLASWAGTCPGSNESAGRVKSTHTRPGNPYLKGALGIAALSAARSHDTYYSAKYRRLAARRGPIKAVVALEHAMLVAIWNMLQTGATYTDPGDDFYARRSPDKTKTRALNQLRNLGYTVTLEPTVQVA

SEQ ID NO: 488917 - protein, 370 aa, unidentified
MNDNTIYVGLDVHKSTISVAVAEDGRGGEVRNYGVVENRADLLVKLVERLGRRGQRLHFCYEAGPCGYGLYRLLSGLGQDCTVVAPSLIPKKAGERVKTNRRDAAMLARLHRAGELTAVWVPDAAHEAMRDLVRARATAARVLGKARQHLTGFLLRHGQIYAGQRAWTVAHRRWLTTVRFAHPAQQIVLQDYIHAVEDAETRIVRLSEQIEQLFGHWSMAPVVTAIQAMRGVAFINAITIIAEIGDFARFTNPRQLMAYVGLVPSERSTGESVRRGGITKAGNNQARRALIEGAWSYRMQARVSRKLHDRIVGLPKDIRDIAWKAQVRLCARYRRLVATGKKTVVATTAIAREMLGFIWAIARQVQPQSS

SEQ ID NO: 488918 - protein, 315 aa, unidentified
METAVCVGIDVSKSRLDVALGLRSELFSVANDFDGIRTISQRLGKLSVTRVVVEATGGLETALVAELGLAGLPVVVVNPRQVRDFARAIGQLAKTDRLDARVLALFGERIRPQLRPLPTEQERELKALVVRRRQVIEMMVAERNRLAGAPKVVQRQLRSHIDWLLKQLRRLDHDLDQALRNSPLWCEQQDLLKSVPGVGPVLCATVLSALPELGQLNRKQIAALVGLAPLAWDSGTLRGHRMVWGGRGSVRAVLYMSTLVAVRHNPTLKAFYLRLRSAGKPPKVALVAAMRKLLTILNAMLKNRTHWSPTCPVAA

SEQ ID NO: 488919 - protein, 341 aa, unidentified
MDHIGIDLHKRESQIYVLCDTGEVTEHRVQTSRERFAAVLGGRPPAKILLEASSESEWVATCLEALGHDVIVADPNYAPMYGMRIRAIKTDRRDAAALAEACRIGAYRAVHRVSAAQRQVRQQLRVREALVATRSRLISMVRALCRGEGVRLRCGAAEHFLNRLAEVMLPPSLADTFAPVLALLRHLDDQLTIADRTIAEVAARDVVVQRLMTVPGVGPIIGTAFVAALDTPTRFSRGRQVASYLGLVPREDSSAERRHRGHITKAGNPRMRWLLVQAAWTIRLSRHKRAAALRDWANHVAARRGTRIAVVALARRLAGILYALWRDGTLFDARRLQSAAV

SEQ ID NO: 488920 - protein, 446 aa, unidentified
MKKSSRMSVIHPHAAGVDIGAEFHVVAVPPDADAELVRTFQSFTGDLHRMSDWLKTCHITTIAMESTGVYWLPTFEILEAAGFNVILVNARDAKNVPGRKTDVNDAQWLQKLHSFGLLRASFRPEHDISVLRSYLRQRERLTEYRAAHIQHMQKALMQMNVQLHHAVSDITGVTGLSIVRAIVSGERDPSVLIQYRDVRCKKTPEVLQQALTGNWQPEHLFALEQSVAFFDFYQEKIRECDDQIETSLLQLSTGTEEPEGVLPSARRRTKQPNQLSFDVRPLLWKITGADLTQIHGFGPYLALKFVAECGTDMNRWPDASHFTSWLCLSPGNKLSGGKVLSSKTRRSSSRIAAALRLAATTIGRSDTALGAFYRRLSSRIGKAKAVTATERKLAILFYNALKYGQKYVDPGADYYEERYRNRVLDGLKRRAKSLGYSLQQDPELCV

SEQ ID NO: 488921 - protein, 332 aa, unidentified
MNQATTLRFVGLDVHRDTIAIAVAINDAQPAQSLATVPNDVLGLVKLLQRLGPMGSLRCCYEAGPTGLGLARRLNEVGIACEVIAPSLIPVQPGARVKTDRRDAKNLAHYLRSGNLTAIHVIDPITEAIRDLERARDDAKRAERSARQQLSKFLLRHERWFPGKSTWGPAHQAWLAQQSFDQPAQQDVMSDYRESVELTTARVARLTRQMAERSATWEKAPLVTALQALRGIEMVSAVTLAAEIGDFRRFASASELMSFVGLVPSEHSSGGSRRQGRITRTGNGHVRRILIEAAWHYRRLPRMSKAIRERNERVSGPVRVIARRRNSGFTGA

SEQ ID NO: 488922 - protein, 388 aa, unidentified
MFFLGIDIGKNTHVASLLDEKAKIIFKAYSFANTLDAAEALLVKLEPYKDSLEIGMEATGHYWLSLYSFLAEHKFIVHVLNPIQTDGWRKGIEIRKRKTDVIDSVLIADLIRYGDFLETSLADEDILSLRNLSRFRVYLVNSVSDLKRKAIAVLDQIFPEYVSVFSNVFGQTSKELLKSLSLPSDYENLSATKIEEVLSNITQKKKASKTISTLSDKARRSFGIAFCKDSFAFQLKLIIEQICFIEEQISSVELEIEQLMSKLGTNIKTIPGVGSVIGAVILGEIGDIERFDNPSKLVAYAGLDVSVSQSGEYESSSGKLSKRGSPYLRKALYMAAQRAEFCDPVFHAYYEKKRNEGKHHLVATNAVARKLCHTIYSILKKDIPYEVQ

SEQ ID NO: 488923 - protein, 344 aa, unidentified
MGEVSTIGFDIAKSVFQVHGVDDSGAVLIRKRVSRAKVLEFFAELPPCLVGIEACPSAHHWGRQLQGLGHTVRLMPPSYVKAYLKRSKNDANDAAAICEAVTRPSMRFVPVKTKEQQTALMLHRARQLLVRQRTMLSNALRGHLAELGIVSAKGRNGTGELLRIIADSTDKRVPPAVRGILDVLARQYSAIGTEIASIDKNILALHRSCEASRRLAEIPGIGPLVATALVAEIGDWKTFSSGRSLAAWIGLVPKQHTTGGKDRLGSITKQGNRYLRWLLVVGAMAVIRSARKHGAEKRPWLVRLMGRRPTKVAAVALANKIARMAWAIMVHGDRYKEPNLLLAA

SEQ ID NO: 488924 - protein, 459 aa, unidentified
MSKEVEFEMKHASSCGLDVHKDKIEACVIDAGGERHQKVFDTMRKTLYTLRDWILSFGCLAVLMESTSVYWIPIYEILEEVSGMDVGVGNSRNMKQVPGRPKTDKEDSRWIARLCMAGLILKSFVVGRKFRELRECTRYHKKLVQERARQVGRIEKLLQMNGFKLSSVLSDITGVSGLRLLKKLRDNGSVTLLDVAASLHGRVKKSPEEIESAINGQMKMTSRLLLGKMLLKLESCDREIEEIYEMMKDVSKEHQPQIMQIDSIPGLGELSAIYILAEIGTDMSSFRTANHITAWAGLAPKDNESAGKLRFSKTQKANIYIKSVLTECAWAAVKTRDTRLSNWYWSNVKRLGEKKAITAVARKLLVYIYTMLKSGELYDDSLDVTDTQKRKAEKLDSARKIVEHRSRAITQEHSENISQSDLVSTAVISRISDSVKPELPRKRGRPRKAATTGIKVESR

SEQ ID NO: 488925 - protein, 342 aa, unidentified
MNHYAGIDVSLECSSVCVVDASGKILREARVASEPEALIAWFRSSGFEFERIGLEAGPLSQWLFAAMREAGLAVELLETRHVRKAFEAMPVKSDRNDARGIAQLMRLGWFRPVHCKSMSAQETRSLLTARKLVQSKLRDVENCLRGILRGFGLKVGKITEREFAGRIEELVAGHPHLQVIARALLSVRAVLRTEFAAFQKQTRKMAQSDARTRLLMSTPAVGPIVALTYASAIDDPARFTSSKQAGAHFGLTPKKHQSGETDYTGRISKIGDGSVRTALYEAAHIMLTKPLKGCSQLKSWAMRIAKRAGMSKAKVALARRLAVIMHRMLADGTPFNAAAAAA

SEQ ID NO: 488926 - protein, 424 aa, unidentified
MSKKNSSPAGLQALYARVCGLDLHKKLIVACVRVLNTKDGTVQSTLRKFGTMTPDLIELRQWLTEQKVTHVAMESTGIYWQPVFNLFEGHFKLLLINAQHLKKVPGRKTDMKDAEWIAQLLQCGLLKASFVPDRQQRELRDLTRQQTKLVQQRNAVDNRIQKVLETANIKLGSVASDVLGVSGRKMIEGLIAGEKDVTALAELAQRQLRGKIPELQRALEGELNDHHRFLLRQLLEQYDFLEKKIASVSERLGAVAPPSFRAAVEQLDAIAGVGERGAQALLAETGTDMSRFPTHKHFASWAGQCPGNHESAGKRRSGKTPAANRHIDAVLTEMAHAAERTKNSYFKSQYHRLAGRRGKKRATGAVKHSLLVTVYFMLRDNKPYKDLGVDYFNKLNPQQRIRYHVRRLQELGQEVELSPMADAA

SEQ ID NO: 488927 - protein, 372 aa, unidentified
MKKQQQQLSKVMKYSVGVDASSEDVKLCCSTIDEKQYVKIKSSTKFNNTLSGFENAEQWIQRHHRDKQTPLVITIEATGTYYENFALYFHNKGYHVSVVLASHARQYMKSSGIKTKNDKIDAWGLSKMGAERYYESWQPIPEELYCLRSLTRKRKQLNDIRTCTINQSHAHSHCMYETGQVTNVNITLIEQLDEHIKAIDKAIDEILDQQEEIKTKIELILKNLRGVGKLTMVSLLAETGCFELFESIGQLISYTGYDVIEDQSGKHIGKTKISKKGNSYIRYALYMPSLNVVRWTKGPFSNLYERVFERTRIKKKANVAVQRKLLIILYTLWKKEEAFDPKYQMTIGEEELKPSFGKKEKINNDSEQKKRA

SEQ ID NO: 488928 - protein, 337 aa, unidentified
MIVIGVDVPKYSLSAVAVDEVGRQLDCLETSDAAELVAWSKRVGRRRRWALEDCRHVTRGLERTLQRHRQRLVRVPPRLTGPERRRGRVRGKSDLIEALAIARAALREPVLDSPRPEEPRLRELKLLVDHRDDLVDERRRCQQRLRWHLHELDPTLQVPLGALDRVVWLERLSRQLARREQTTQVRIARELLGRCRSQTRSIGELDRELQAQTTAIAPQLLELPGCAAITAAKLLCEIGPIDRFRSDAQLARHAGVAPLDASSGKHQRHRLDRGGNRQLNCALHRIAVTQGRVHPPARAYLERKQSEGKSRREALRCPKRQLARTVYVALKSEPLLT

SEQ ID NO: 488929 - protein, 358 aa, unidentified
MVQSKGINFNGQNIYIGIDVHLKSWSVTVITESNYKKTHSQKPSAKELFEHLKKHYPGGKYKAVYESGFSGYSTYYSLKEYGIDCIIIHAADVPTTQYENLMKTDSIDSEKLAKSLKGGILKGIYIRGKEGLDDRNLVRLRKTLQRQLAGYKSRVKHLLYNNGVEYPACFDKPSLHWSKRFLVWLKKDVTLLSSTRYSLDLLLDQVELFRKNLLKANRLVRELAQNPKYHDRYENLISIPGIGVTTAMCLLTEIDDINRFQNQREFASFLGLIPSCHSSGETICSMEKTFRGNKQLGPLIVESAWVAIRYDKALAIAYSEYCKRMKGQEAIIRIARRLSNRILSVLKSGKKYQYDRCR

SEQ ID NO: 488930 - protein, 364 aa, unidentified
MQYVSNNTELSSHEETRCQFNGSTGVIKLGIDVHQQFYTVVVQEGGSNPKPPQRFRKEAFLHWAARLKQQGAAVHAVYEACGFGFGLQRQLAALGIACHVVCPQKLDEHNRRVKTDSLDAKALCLKLDRFVQGNQDALALVRVPTEQEEQLRAIHRQREQLVKARKQLEAQGRSLIVNHGIEPVQSWWKLRTFAALPVPAWLKELLANSQPILIALQEKIRVLSLQLQSAAGPDQPRGLGAMSSVVIDREIGNWHRFRNRRQVGSYTGLCPGEHSSGNTRLQSCVTKHGNPRLRAALVELAWRLVRFQPNYRPIMKWNEVLRKGALATGAARKKAIVAVARQLAVDLWRIRTGRVRAETLGLIN

SEQ ID NO: 488931 - protein, 347 aa, unidentified
MDHYAGIDVSLECSSVCVVDASGKIVREGKVATEPEALIGYFGSLGVAVVRVGLEAGPLSQWLYAAMQQVGLAVELLETRHVRDAFKAMPVKSDRNDARGIAQLMRLGWFRPVHCKSLGAQELRAMLTARKLVQSKLHDIENSLRGILRGFGLKVGKTTARSFAGRIRELVAGQATLQTIAQALLAAHAVLLREFNGFEKQVRLMARAHDQAKLLMTTPAVGPIVALTYACAIDDPARFKSSKQTGAHFGLTPKKYQSGNTDVTGRISKIGDAAVREALYQAAHVMLTKPLKDCSQLKSWAMRIARRAGMRKAKVALARKLAVIMHRMLADAKPFNAAASTKPIAAA

SEQ ID NO: 488932 - protein, 355 aa, unidentified
MNVYSQQHTYYCGIDLHARTMYICILDQTGAKVLHKNYPCSPQTFLEAVAPYRSDLVVTTECVFCWYWLADRCEQENITFVLGHALYMKLIHGTKSKNDRNDSLKIARLLRGGNYPLAYVYPAGMRATRDLMRRRNFFVRKRAQLVAHIQNTTSQYNLPSLGNLARPHHRRDRDIAGHFPDPVVQLMIQANLDTIDHFDPLIKELDKQILALAKLHDPTNLHLLKSVQGIGPVLGLTILYEIHDINRFASRQDFCSYARLVKGQKQSAGKNYGTTGGRIGNAHLKWAFSEATILYLRGNKQAEKYYNRLISKHGKGKALSIIAKRLGTAVYYMLKRREPFNEHTFLNRNHYQSVE

SEQ ID NO: 488933 - protein, 406 aa, unidentified
MCDDELAEVTVPQIWAGVDIGKEHHHCVVVDERGERLLSRRVFNDEPAPLELIADVLALSEDALRAVDINHGGAALLIGLLLSHDQPMLYITGLAVHQATAAYRGQGKTDEKDAFVIADQVRMRQDLGLLRPGDEIAVDLRTLTARRLDLVNDRTRQTNRLRAQLLEFFPALEREFNLSKKGPVMLLTGYQTPAAIRRSGARRIGTWLKNRKVKNAAALAETAVGAARAQHAALTGETLAAAMVARIAKGVQALDQEIAELDALIEARFNEHRHATVIRSLPGMGTLLGAEFIAATGGDLEAFGTADRLASFAGLSPVPRDSGRISGNMRRPRRYHRGLLRAFYLSAMASLRTCSASQAYYGRKRNEGKGHKQALLALARRRANVLWAMIRDGACYEVLPTVTASA

SEQ ID NO: 488934 - protein, 341 aa, unidentified
MKNSTTITIDLAKDIFQIATFNKQGKCLLNKKISPKKVRQFVINHPGAEIYMEACGSAHYWGRQFEQLGYKVKLIPPHIVCRYRNGNKNDKNDAYAIYEASKNTSIYYVTIRTLEQQDLATQHKLRAGYIKQRTQLSNRIRGFAMEYGVKFSKGIQHLRKQVPSALEDAENELTMLARACLKQLLDQLILMDKIIKEVTDTLVNQAKQIDACVRLEKIPGVGWLVASMLYARLGNGSAFRRGRDASASLGLVPAHSGSGGRNRLGKITKRGDRYLRCLVVHGARSTLHRVGGKTDGLSVWIRRQQQTKHANNTAVALANKIVRMAWSILKTGDAYRVPVAQ

SEQ ID NO: 488935 - protein, 352 aa, unidentified
MNKITTVGVDLAKEVIVVCAGDAAGQVVCLRQFSFQGFAAWAANLSPCSFGMEACSSAHYWARWLTGQGHSAQLMAAEFVKPFRKSQGAKNDRNDAQAIRIAMCQPQMRFVAVKSVEQQAMLAWHRMRSGYNEERTALINRTRGLLAEFGVWLGRSAAALIRALPRLVQEQDLPARFRPLLQHAHEQLLVLEERIATCDQQIKAHARQSEAAQRISALSGIGPLTSRAVVATVANAGDFRNGRQMAAWIGLVPRQSSSGGKDRLGVITKRGDTYLRGLLTQGARSTLQAALTRPAEKCSHLQHWIVALHARVGYHKTLVAIANKHVRIIWAILAKGETYDPNAWQRYAPARP

SEQ ID NO: 488936 - protein, 349 aa, unidentified
MTVYVAVDFHAREQTISYCNTADGEIHRTKLRHQHDDVRKFYEQFTGEVIVAFEASGYSAWFEQMLAELGHPVWLGNAAEIRRKAPRRQKNDRRDADLMLDLLLKGDFPRVFSFSEESRTVMRQLRYRHKLVKVRTIAKNSLHALGINAGLPLKRKLLTQAGIEQLQALKLTPVMSSQRDEWLELLAAMNKRIATVEEALQQCAQDDAEVELLRTHPGIGLLTALALRYTLLPVSRFSTTRKVTAYVGLDCVEEQSSERRRLGSISKQGSRLLRFLLNEAGQTAARRDPELKQFYKRLLHRRDKPKAKVAGARKLLVRSFIMLRDQIDYAEFMRRGVAARVARETHSPK

SEQ ID NO: 488937 - protein, 298 aa, unidentified
MSVYVGIDVHRKRSRVAVVAGDGKVQLNRNVVNGQEPILRLIGGLPTGTPVAFEAAYGWGWLVALLEDYGFDPHLVHPLRCKAIASARLKNDKVDAAILAQLLRADLLPEAWIAPAPVRQLRAQLRHRASLVRLGTQLRNRIHAVAADFGYDRTGSYWTGPGRGWLAELDLPPVSREIVTDCLASIDALAPVIERLDGELHQRAKADPRVKVLRTLPGVGEFTALVMLAEIGDITRFSSARKLASWAGLTPTVRGSDLTVRHGHIWKAGLGVAAVGPEPGGADRQALPAVRRHLRRHR

SEQ ID NO: 488938 - protein, 424 aa, unidentified
MQVVYPVCCGIDVHKTFLVATIIKTNQDGLTPTYSKKRFSTFTRELRALKQWLLDNGCKDVCMESTGKYWVPVLNVLEDKINVTIANPKWVSAVKGNKDDVKDSKWIGDLFRMGLVPGSFIPDKDIRILREFTRYRCKLVAMRASEKNRFQNAFTVCNLTLDAVLSSMFGVSATNILDYLMKTDNIDPAHCASLLRGRAKGKADKIADAVEGFAMTDAQKTRVNIIQSHFTTIDCLIATLDCEISRLVAPYENQIALLCSIPGVDRDTAITIVSEIGTDMTQFSSSKRLCRWAGLTPGNNESAGKKKSVRITRAGVYLKPALVQAAHAAVKCTAQPYYRNKFERISKRRGNKRAIIAIARMILTAVFHILSNGEYFNPCDLANVALPESIRKSRLLHSVKSSVDFLVSLGVVSPDAICLSALAV

SEQ ID NO: 488939 - protein, 341 aa, unidentified
MGQASTIGLDIAKWVFQAHGADATGRVVFRKRLVRAKVLEFFAGQPPCLVALEACGGAHYWARELGKLGHTVRLIPPAYVKPFVKRQKNDVADAEAICEAAQRPGMRFVPVKDEAQQANTVVFRARDLLVRQRTQCINALRGHLAEYGHVVPQGPAHVDSLVALVEDPKSSVPESARGILQVLIRMLNALEEQLKELDGEIARRAKADPVARRLMTIPGIGPIAATAITALVPAPEGFRAGRDFAAWLGLTPLQRSTGGKHKLGAISKMGERTIRRLLILGASAVVRWASRRGAAAGSWLARMLARKPRMLVTTALANKMARIVWALLVKGGTYRAPAVAA

SEQ ID NO: 488940 - protein, 348 aa, unidentified
MAMTIVGKTRPVTGGVDTHLDVHVAAALDANGGLLGVESFPAERSGYAALHTWLTSFGELTRVGVEGTGAYGVGLARHLWAAGVEVIEVDRPNRQERRRAGKSDTLDAVEAARAALSGRAGGRAKTKVGDVEAIRALLVAKRSARSSRIMTRNQLRHLCFTAPDELRERLARLSRAELITQAAALRPRPKRDPVMYATKLSMAILARRVIALNDEIDRLDTHIAEFVRRAAPALLDLHGVGADTAAILLAAAGDNPERIRSEAAWAHLCGVAPLPASSGKTTRHRLNPGGNRQANHALWRIAFTRMSSDKRTRVYVERRVAEGLTKPEIIRVLKRYIARETYRHLPRD

SEQ ID NO: 488941 - protein, 409 aa, unidentified
MDVVFDRVAGLDIGKKSVVVCVRTPGPKGRRVSQIRTFPTMTRHVQVLGDWLVEEGVQVAAMESTATYWKPVFYGLEDRVECWLLNAAHMKAVPGRKTDVRDAEWIAQLVEHGLVRPSFVPAPPVRRLRNLTRYRVQLMGDRTRHAGRLEKLLEDASIKLSSVAANITGVSSRQMLAGLVAGERDAAVLADLAHNRLRRKIPELTQALTGRFDDHHALLVGAMLRELDLVDEALARLDEQIAAEMAPWAHELELLRTIPGVGQVVSQVFIAETGADMARFGSPECLAAWAGVAPAVHESAGRRTPAGSRRGNKWLTAALVEGAHSAAQSHGTYLAAQYARLASRRGAKRAAVAVAHSMLVSAYWMLVRDEPYQDLGPDWLSKRNDDAHTRRLVAQLQRLGHTVVLDPVA

SEQ ID NO: 488942 - protein, 347 aa, unidentified
MRFYTKQHKFYCGIDLHAKTMYLCILNQEGKIVLHRDIKTDPNVFMKTIASYREDIVVAVECIFTWYWIADLCERENIPFVLGHALYMKAIHGGKTKNDKIDSHKISVLLRGGMIPMAYVYPSEMRSTRDLLRRRMHLVHKRSELLAHVQNTTYQYNLPEIGKRIDRKSNRKGVADLFPDLSVKKSMELDLALLDHYDPLLSRLEHELSLIAKVHNADSYFRLRSVPGIGRILGLVILYEIHDIKRFPRVQDFVSYCRLVKCAKESAGKIMGSSGKKIGNVHLKWAFSEAAVLFLRRNPEAVKYREKLARKHGKAKSLTILAHKLARAVYYILKRKEVFQPKVFFAK

SEQ ID NO: 488943 - protein, 343 aa, unidentified
MKIHALGIDLGKTVFHLVGLDAIGQVVVRKRCSRTQLLAFTANLQVGLIGMEACSGAHFLGRALRAQGHEVRLMPAQYVKPYVKTNKSDYIDAEAIAEAVQRPRMRFVPIKTEEQLDLQALHRVRERWVMRRTAVVNQVRSLLLERGLTVPKGRRHLNQALPRILEDAELPLSGSFRVLLAQLKLELEQLAARIEQMDAVIEQEARENEACQRLTTIPGVGPVTATALIGAIGNGSAFGKGRDLSTWMGIVPGEFTTGGKQKLLGISKRGNKYLRRLFVQGARSVLQQRDKQAPGLSLWLSQLLASKHQNVVVVALANKLVRIAWAVLSKNESYRAPVLAVST

SEQ ID NO: 488944 - protein, 394 aa, unidentified
MRCAGIDIASEMHVAAVVDEASQVVVRPTAFGEDAAGYARLRELLGSPQDLLVAMEATGHYWQNLFAYLAAEGFAVALLNPLRTRRFAGEELERAKTDAIDALGIARFAAQKHPAATRLPDSATQELRELVRLRDRLRQDFDDRVRQLHRLVDLGFPEFTRYVRTLDSELATAILHDYPTAAAFQGVALRRLAALRYDGRHRVGEDLARTLLEVARTSVGRHHGPAYRVQVRYVCEDLDLLRRRLRELDRDLEHTLREHEVGTLLTTIDGIGSQTAARLVGELGDPAHFHSGAALVSYVGLVPGTNRSGKRQSQRAPLSPIGHARLRRALWMPTLTAVRKNPWLKAYYEHLCSTGKPPKVALVACMRKLLLALYSVAKHRKPFVPMLAAAEVPA

SEQ ID NO: 488945 - protein, 316 aa, unidentified
MHTPSIVIGIDVSKVRLDVAVRPSGEQTSVTYDADGMTTLVTQLNQIQPARIVVEATGGLERPLVRALVEAALPVLVVNPRQVRDFAKATGQLAKTDALDAQVLARFAEVIRPPLRVLPDAQTQELAAVLARRRQVLTMQRAEQNRLALAPARVQKRIEVHLRWLRAELARLEEDLDDMIQQSPVWRAREDLLQSVPGIGPVMSRTVLAELPELGLLNRKQIAALVGVAPFNRDSGRWRGHRTIWGGRASVRTALYMAALVATRWNPVIRQFYQRLRAAGKAPKVALVAAMRKLLTMLNAMMHHGTPWRPVVAPTA

SEQ ID NO: 488946 - protein, 392 aa, unidentified
MSHQDYHFDASRSLTALEQGSTIIAVIEMSQSKWLVAALVPGVERHPLKKFDAQEEGLLKLLHRWRNEAGQAGREIKRIVVAYEAGRDGFWLARWLRARDVEAYVIHPTSIAVSREHRRAKTDRLDTELLMRAFLGWLRGEKRHCSMVAIPTIEEEDARRPNRERQNLVTEQTRIVNQMKAIFVRFGIRAFRPTLRKVEGKLKDLRTAEGSPLPENTRAELCRHLARLHVVRDQIRAVEQERLRKLAAAPAVEKGSHVMVRLIARVLGVGIETADMLVNEVLSRRWRDHKAIARYAGLTGSPDESGKRRRERGLARAGSARVRCGMIQFAWRFVRFQKGSALAQWFAARTADRRASTRKTMIVALARKLLIALWRLATRGEVPRGIILRTAS

SEQ ID NO: 488947 - protein, 347 aa, unidentified
MKITVIGIDLAKNVFQIHGVDERGKTVLKKKLKRDQLAAFFVNLPACLIGMEACGGAHHWARKLQSFGHEVKLMAPQFVKPYVKSNKNDAADAEAICEAVSRPNMRFVAIKSIEQQSLLALHRVRQSLVRARTAHSNQIRGLLAEFGLIIPQGIHNVPKLVPELIEDASNELTGAFRILIDDLLNHVKNLSQRLDDLDGQVLTGHRANEHSCKLDEVQGVGPITASAFVATLGGAKAFKNGREVSAWLGIVPRQHSSGGKEKLLGISKRGDKYLRTLLIHGARSVIQANERKRGTPAEDLWISSLVNRRNKNVAAVAVANKNVRIMWALLAHDRDYRKDYKRDGAPV

SEQ ID NO: 488948 - protein, 338 aa, unidentified
MNQCFVGIDVSKKQIHVCVLGEKPHPYPNCLTGFRKMMKSLREKKPHGEETSFLIGMEATGVYHLKLATFLKDEPDVAVYVLNPAQVKSFFKASFHRTKTDAIDACGIASCTEFLVNRDKVRAFETPDNEVERLRQLCRRRDEILSMAQMEKNRIEALKEVPSHSGEVESSLLEHLEYLEQRLKDIEEKIKGHIRNSPGLKEQVDLLKSIPGISDTAAAGLISEIRCAERFDNVKELVAFAGLAPAERTSGTSVKGKTSICKTGSSRLRKHLYMPALVGIRYNPLLKEFYERLTNRNKPKKAALIACMRKLLHIIYGVLKNRTAFDPLWAKNRFAMAC

SEQ ID NO: 488949 - protein, 406 aa, unidentified
MEIRPIYKRVIGLDVHQNKISACALIEQPDGTVTVEHREFGGYKRDRRALADWGRDMAPDVVVMESTGIYWKSPYAALEKVGIAAWVVNARHVKTVPGRKTDVADAQWLATLARAGLLRASFIPPADIRHLRLIARQRQKLGGMLASEKNRLHKLLADAGIRLNVLVSDIHGQAGRAMVKALIAGQPMPAILDCAGRLRATRAELFEALQPEELSAKHRFVLREVMAHIEYLEATMSRFEQTLLEGLDAWQPQLVLLQTLPGIDQMGAAMLLVEIGTDMQSFGSAERLASWVGICPGNNESAGKRKSGRSRKGNAWVRRLLCEFAQAAARSRCALKDKFAALSIRKGHKKSIVALAHKMLRIIHAMLTNGTPYQDRTVDYEALVVQRNAPRWIKMLAKHGYLPTAG

SEQ ID NO: 488950 - protein, 412 aa, unidentified
MKDLLEISCGLDIHKEKIVACILTGPLGKPTHSEIREFTTLIPDMLALRDWIISENCHHVAMESTGIYWIPIYEILEDAFSGDITLLVVNARHMKNVPGKKTDIRDSEWISTLLRAGLLNASFIPEKRIREFRDLNRYRKSIIRDITSQKNRVEKFLQSSGFRLSSFISDIFGASGRNIILHLMEHGRIDKISLDSYLKTKTRKRIDEILMSVNGTLSEHQKSFLKILMCHYDSMKEHLIEIETHLQEDMIPFALQIEQLNTIYGISTTASCAIIAEIGTDMKPFKTAEHICSWAGLCPGNNESAGKRKSTSITKGNPYIKSMLCEIAWVIAGKRNTYLSAWYWRIKQKKGARKAIVALARKLLVIIYTMLKQGTNFDENCFEVRRKNCEQKQLSRYIRELEKHGYTVEAQV

SEQ ID NO: 488951 - protein, 420 aa, unidentified
MYYVGIDIAKKFHIASILDENNNIIKKNYRIESEISDFTLFGSMLCEIEQDKNSFIIGMEATGLLFENLYLSLKTQGFNVVLLNPYQTNRFREMDTMKYVKNDNIDSQMIAALLKSGRYSKAYVSEELYQSIKSLYRHKATLMDEMKKAKRQVSTTLAVVFPEFEQIIKDPFSVSGMALLEKYPTAKHYKHASGERILKVFRNIKGNNFNLEKANELLNLAITSIYQGNAKEERAYVILSNLRRIKFLKEEIINCESQMSELLDDTNKELDESISKDDEVYISQLVDNLRSIDGVSDKTIFAILSECGDINRFKDAKAFIGYLGLYPTLYQSGNSTKYGKLAKRGARLAKMAIYQASIAAIRHNDELKKLYLDKKSSGRASKECVIVVARKLAKIIYAIYKYNTPYNPIRVFSSKTSLSH

SEQ ID NO: 488952 - protein, 397 aa, unidentified
MIAVGIDISKAKSTVAVIDSDGTVLASPFTMAHTQPEMEAFVTYLKELGEPTTILMEYTGHYHYPVLKKLQDEGFPVCIVNPYQMKKYGDVEIHKAKTDKKDALRIAAYALEKSYKLVPYSSMEQKYEDLKFLFRQYSQRITYVAKLKVQLIALLDQTMPGITRILPLNSRNPEKCALLLFIKRFKSFDEIQRIGKARFLASYDVLAKKASERSASSKGLSIYELAVDSITTRGEDPYIWLSQNQCVDLLSATQNAADEIISQMRNIAETIPEYKVLRAMHGVGDRLGPIILAEIGDVHRFHSGKALNSYAGNDAPPYQSGQFESRNRHISKRGSSALRKACYEVMQALKLTKPQDDPVYLFMLKKEQEGKPFNVAKMAGVNKFLRIYYARAMELYK

SEQ ID NO: 488953 - protein, 391 aa, unidentified
MILVGIDIAKDKHDCFIRTLDGEVLWKPFTITNTISGFDLLYERICATGEDFDNIKVGLEATGHYSYNILGYLLDKGLPTFVINPLHTNLYRKSLSLRKTKTDKVDCTIIAGMLMSDVDLKPYSRALYHSTELKSLTRYRFDKIQQRAKLKISITRLVTILFPELPSLVSKIHIPSIYALLSEYPSAEAIATAHLTKLTGLLEKSSKGKFSKATAILFRDTARASIGASMPAKSLELKHTIKLIGTICAEIEEIECEINRIMATINSPITTIPGIGRMTGAQILAEIGDFQNFSSPDKILAFAGLSPSTYQSGQLYSSYAKMEKRGSPYLRYALFTATTLVCNWDPTFSAYLAKKRAEGKHYFVAVSHAAKKLVRVIYQLEKTRQPYIKSA

SEQ ID NO: 488954 - protein, 345 aa, unidentified
MDLRIRIYDDSSKDVIIILKSLVMKCIGIDVSKINFTVAYPTESVYRLEIFNNDIKGIKKFIKSICDGDYHCILEATGTYSTLLVYMIQEAQIAVSMVNPKQINHFSKMMLSVTKTDNLDAKLIAMYGEKMNPAIYKIPSLTIQKLRQKRTLLRQFKKQLRMLLNIQESFSVLPKIDDKVNKGLKKSISFIKKQIEELNLDMIAVTRSEFSRQLEHLTSIKGIGNGVATALIMATGGFTYFDSAKKFAKYIGVCPSYQQSGTSIKTKGVITRHGDPELRSLLYIASWSAIRFNTSCKELYERLKSKGKPSKVALMAVINKLLRQAFGVIISNTDYIDNYACSRTE

SEQ ID NO: 488955 - protein, 357 aa, unidentified
MQSSNIKYIGLDVHKEAMSIAVLNGAGKLIMESVIETKASTLVQFLDGLRGELHVTLEEGTWAAWLYDVLKPHVREIVVCNPRRNALLKEGSKSDKVDARKLAELLRSGMLRAVYHGENGLRTLRELARSYEVVSKDLKRVMNRIKALYRAWGIPCTGTQVYGRRHREQWLKKIREAGVRRRAELFYQQLDALQVLRRTVRGELLAESRKHRAVKVLRQIPFIGTLRAAQLVALMQTPHRFRSKRQLWTYSGLAVETHDSAQYRYVDGQLQRSKKPQQVRGLNQNHNHAMKEIFKSAALSATGRAGPFQDFYEGLLARGMKPELARLTLARKIAAITLTLWKKGECFDAGYVKRQAA

SEQ ID NO: 488956 - protein, 349 aa, unidentified
MKKIFIGIDFSKEKFDATVIKAEDLGEMQSIGHQEFINKATGYRKMLRWVDSLCGADTCEDWLFCGENTGGYSQMMSDYLYSKGYDLWIENALSIKRAFAMKRGKSDRSDSLMIAEYAMRYQDKACLYEPLSPALSQLREVFLYRHMLVRHKCSFEVRRIEKRLTQQKSFAKTMISQSSRHILTELNHEIQKCDQRIQELVRSDEELSRIFGIITSMPGVGTLNAVCLMVFTNNFTKFDYNARKIACYYGVAPFSRDSGTSVHSAPKVGYLANKMIKSLLSQAALAAVNFCPAMSVYYHRLVDKGKKPMVALNNVKNKMLTIITAMVKNECKYQPEYISINARSEMLNK

SEQ ID NO: 488957 - protein, 387 aa, unidentified
MSQTFAAPIPAAVDYERTLVLAIEVSNKSWVLAAQVPGLPHTKAKRTINPEAEALLAAITGYRTRAAATGRSIERVIAVYEAGWSGFWLARWLMRRGVEVHVVQPSSVPVDRRMRRAKSDGIDSELLLRTLLAWLRGEPRVCSMVPVPDEADEDARRCVRERTELISERVGLTNRIGAVLATLGVNDYNPLLRNRGHRLAELRTGLGEPLPANAHAKIKRLLARLELVLTQIAELERERDAVVETEASDKASKMIQQLTALRGIGVQSATVLVREAFVRRFANGKALGSYAGLASSPYSSGGTDREQGIGKAGNRRVRTVMVELAWLWTRYQPDAAQVCWFRERVGSTGPRVRKIMVVALARKLLIALWRFVIDGVVPEGAVLKPAA

SEQ ID NO: 488958 - protein, 350 aa, unidentified
MPCKTVTIAHTIGIDTGKNTLHMIGLDKKGAIVVREKVSRTRIAARLVNVPQCLIGIEAGMASHHVARELLALGHEVKQVPPAYAKPFRQGHKNDFRDAHAIAEAVQRPSTRCVPVKTTDQLDLQALHRVRSRLIGNRTAVINQLRGFLLEHGIPVRQGLRFLRQQLPQILATRTDVLSPRMVRIIGELIGDWEYLDERIERVTDEIETLARADENCRRLMTVPGIGPIIASAMVAAIGNGAAFAKGRDFAAWLGLVPKQMSTGDRTILGRITKRGNRYLRMLFIQGARAILFRPAGWAKHSFGPWLASAARRLHRNVLATAFANKLARIALTVLVEGRSYAARVEPRAA

SEQ ID NO: 488959 - protein, 340 aa, unidentified
MSLVLQSFLAYPDSCLGTSPHQQGWDTKMAELSFGGIDVSKDRLDVLLLPEGLCFSVCNNAPGWAELIVRLRPLAVSAIGLEPSGGYERGIIRALLAAGLSVRRINPNKLRQFARARGVLAKNDRLDARLIAEYVAIMPTRVVRRDDAVEHLAEIVTMRRQLCDEHAAAMNQAAHLEDAMLRRLSKRRLVRLEADILLLDKRLAELVAADPRLAHRYRLLISMPGVGPTLAYTLLATLPELGQIDRKQIAALVGLAPYDFDSGKLKGHRCIYGGRMPVRNVLYMAALSARRYNPALKEFSNRLAAASKKSKVIIVAVMRKMIITLNAMLRDNTEWRPSSV

SEQ ID NO: 488960 - protein, 319 aa, unidentified
MAATAKDQKMFVGIDVSKDRLDVHIHPSAVAFAVDRDTDGLSQLVTRLKDFDLAVIAIEATGGFESTPVATLAAASLPVVVVNPKQVHNYAKALGLNAKTDALDASVIARFAEATKPEIRPLPDDETLALADLLARRRQIVQMITAEKNRALRMAANKVLQKSIGRIIDALERELARLDEGIDTTVKGSPLWREKENLLASVPGIGRVIARTLLAEMPELGKLDRREVAALAGLAPWTRQSGQWRGKSMIGGGRTVPRTVLFLGALSAARYNPDLKAFSLRLLNAGKSKKVVLIAVARKLLTILNAILRDKTPWSPKTV

SEQ ID NO: 488961 - protein, 367 aa, unidentified
MKQSSKIFVGMDVHKESIDITLAEQDGEVGRFGTVGGDRMSLLKAVRKLTSRGRELVFVYEAGPCGFWIYREITALGHACLVVSPSLIPRRSGDHVKTDRRDSENLARLARAGELTGVHVPDVRDEAIRDLVRARDDAVITQRRARQQLKALLLRNEIRYLNRSSWTAAHLRWLGELKLPQPAQQIAFQEYVDAITVATRRIERLVQAIGNEAATWRFAPVVAALQAMRGIQFLHAVTLISELGDLTRFGSARQLMAYLGLVPRENSTGEHRHQGAITRAGNAYARRALVEAAWAYRHPARVSRLIATRQSALPKVACDIAWKAQLRLSTKYRRLSARRVNPNKIVVALARELSGFVWAIGQSVKLQ

SEQ ID NO: 488962 - protein, 362 aa, unidentified
MPKMIWLGMDVHAASITVARYEDQAATAMVQTIANDPAQVRRLVRRLPAGCDVRACYEAGSCGYGLHRQLTALGVHCDVIAPALIPRRPGERIKTDRRDAEKLGRFHRSGELTTITVPTPSQEAVRDLVRAREDVRRDRTAARQRLAKFLLRHGHRYPGSHWTKRHWEWVCGRPFEGAARTVFVHYCDHVLALNERLAHLVREIHTFADSPVYQPVVARLSCLRGLATLSALMLIAELYDLRRFRTPRELMAYLGLVPSEHSSGARERRGRITKTGNALARRLLIEAAWAYRHPARQTRRVHQALTTQPPEVHAISDRALHRLTARYRRLLSRGKTPHHAVTAIARELCGFVWAIALVPDLT

SEQ ID NO: 488963 - protein, 428 aa, unidentified
MPTRFFGLDVHRQFTQVAVLEHGRLTHLGQVPTTPEALREFASTLRRDDQLVLEATSNTYAIVQVLRQHIDRIVVSNPLQTRAIADAKIKTDKIDAEVLVRLLAGGWLPEVWVPDAETQALRQRVAHRVRLVRHHTRLKNRIHGVLIRNLVPGCPRSDLFGQAGQKWLIEQAVPQLPAHEQEIVVATLRQIESVREELGHVGQTLAGLALQSPAVPRLMTIPGIDAVTALTVVSIIGDVRRFRSPTKLVGYFGLDPRVRQSGSHAAYHGRITKRGRAHARAALVESAWAAIKSPGPLRGFYQRLRARRGPQIAAVATARKILVLAWHLLTDEKEHAFARPSLIARKHRTLELAAGQPAQFGKRGLAYQYNFKTVRQRELDLCVQAERAYTELTRHWQPRRPQQNAGAANGKATPRRRSAGQRGGAFIP

SEQ ID NO: 488964 - protein, 428 aa, unidentified
MNCNTQNAKIASITEKTLIVGIDVGSETHYARAFDWRNYEYTKKPLEFSNTEAGFQTFKAWMEDMAEKHGKTAVIPGMEPTGHYWFALGKFLQDNGMKPVHVNPRHVKKSKELDDNNPNKNDRKDPKTIAALVNEGRFSYPYIPTGIYAEIRSLSNLRFQTQEELTRIKNRIARWFSIYFPEYKDVYGDLKAVSGRMVLKAAPLPEDIQKLGAEGVNQIWRDAKLRGAGMKRAKTLVSAAEHSVGSKEAPEAARIELGNLLNDMDVYVLRLEELLRGIEKKLKEIPYVDKLMGIKGIGLATVSGFIAEVGDIGRFDNPKQLQKLAGYAIVSNDSGKHNGESRISYRGRKRLRYVLYEAAISLIGKNHEFKEIHEYYRTREKNPLKKMQSVIAVACKIIRVFYTILTKGVDYDGNRLLGDIRRPQVQAA

SEQ ID NO: 488965 - protein, 388 aa, unidentified
MPAAETPVAYLGIDVGKSSHSACALDAGGGVAFRAELANRPDDIDRLLERAGSGALVVVGQKRNIGALVLARAHAHGNPCAYLPGYAEKQARGMFPGTAKTDAIDAEVIARTALGVPRALRPAPEEPEGATSLRILSSQREFASSARTRAKNRLRATLLEADPALEGAVDPSSRWQVSMLAEFGGAAGCSAAGWRRFSNAARRAGAPAAGARRLWEALLASSRSGRRLPAGEDVAVRMLAREIASLDADIEELDSLVADSLAGDEVYECLLTVPGIGPKTAAALVTSIDISAFRGHDELASYCGVAPSDRRSGSSIRSTSPQHGGNRRLKNLLIFSCNSLIGTDNRFGRYYGECRARGMRHGKALKAVARKRLKVIYAIMRDAVPYAA

SEQ ID NO: 488966 - protein, 316 aa, unidentified
MAIPRQPTLFGVDVSKAELVIATPGDPVQVLANDPRAIDHWLATLAGPAWFALEATSTYHLALAQAAYQQGHRVYLLDGYRLARYRDSIGGRAKTDHHDARLLARYLAREHDQLRPWEPPPAAYTRLQALLRRRATLVQARVQIQQSLQDLPTLRTALQALLRQLTRLDILIQKLLREALAQAGWRDHARRCQAIEGVGPLTAAALTTAFHRGRFRSSDAFIAFLGLDVRVRDSGQARGRRKLTKQGDPELRRLLYLAAMTARRSPAWAGFYQRYLDRGLKSTQALTILARKLARIAFAVLKNGTDYVPREPCVAT

SEQ ID NO: 488967 - protein, 371 aa, unidentified
MVWTAPYGISCARMRLLQSQTREPSVKQIIRIGMDTSKHIFQLHGVDAAEQVALRKRLGRKAMLEFFAKLPPTVVGIEACGVAHHWARVLGELGHEVKLIAPQHVKPYVKRNKNDGRDAEGLCEAMSRPTMRFVPVKTAEQQAALMLAGLREQMIARRTQISNTIRGYAAEFGIAVAQGLNQIEPLLARLAQDQSVPELARDLFALQGRDYAQLQMELKAIEVKLRAWHRSNADSRRLAQIPGVGPVGATALVMKMPDPRGFASGRHFAAWLGLTPKDHSTAGKTRLGKITRAGDERLRSVLVAGATAVIQQATHGRGHPSPWLVALLKRKPPKLAAVALANKTARIAWKLMATGESYDGARMPGASALAA

SEQ ID NO: 488968 - protein, 339 aa, unidentified
MSIVMGLDQHRGQITGEWIDTETGEVRCTRVTPADREHVRRWLSRFDGRELEVALEATTGWRFVVEELRRVGAIVHLAEPAETADLRGSKKRAKSDRADARHLRELLMLKRLPESWIPPEHVLDLRGRVRLRHTLSEQRGEWQQRIQASLYHHGCPQRRQLMTGEGREWLAAQPLPAAAREQITVATLMIDALDRQLAPLDKELRAYARRQVGCKALMAHYGIGELTAVTILAELGDCTRFSSSRQAVRYAGLDITVYQSDRRRAPGHISRQGPPALRWALYEAAQVARRGERSPDRAYYLEAKERVGGNRACLSVARKLLKRSYHTLRELGEEALAPA

SEQ ID NO: 488969 - protein, 428 aa, unidentified
METPASVPEVVAWIGLDWADQRHEIRLAAAGSEGTESFTVEQKPAALHAWVGGLRARFRQGKIAVALEQSRGAVIYALMNYDFLVLYPIPPKTLARYREAFATSGAKSDATDADLLLELVRTHADRLRAWQPDDALTRQLRLLAEHRRKTVADRTRLTNRLTALLKTYFPQALEWAGDLRQPAAGEFLRAWPSLEALQGARRAQLRRFYDSHRRLSAQERQDLFRQIDQAESLTRDQALVEASALMAQGLAEQLAAVIAVIARLDSELERLFAQHPDHDLFDGLPGAGEALAPRLATAFGSDRNRYDSAEEIEKFSGVAPVTEQSGKIKWVHWRMACPKFVRQTFHEFAAASCKKSLWARAYYEQQRKRGVDHHTAVRALAYKWIRILYRCWKESSPYDEQVYLKSLKRHRSPLWLAVMSLSTQEAHG

SEQ ID NO: 488970 - protein, 422 aa, unidentified
MLEETHDTEELIERVAALDIGKAELVCCVRVPGQGKRGRRLQEVRSYSTMTRSLLVLADRLGELGVTRVVMEATSDYWKGPFYLLEAAGFEVWLVNAKDVKHLPGRPKTDRLDAVWLCKVAERQMLRPSFVPPPEIRRLRDVARYRADLVAVRTAEKQRVEKLLEDAQIKLSVVASDSFGVSGRAMLAALLAGERDPKVLAELARGRMRAKRSVLEEALTGHFSDHHGFLLARMLARVDALDADIAELDRKLEELIAPFTAAAERLDEITGVGRTAACAIIAEIGTDMGRFPTPGHLASWARFAPGVKQSAGKTKGKSSTGHGNPYLARVLGEAAAAAGRTDTFLGERYRRIARRRGAKRAIVAVGRSILVIVWHLLADPTARFHDLGPGFYDTHINPERAKRNHIRQLEALGYKVTLEPAA

SEQ ID NO: 488971 - protein, 369 aa, unidentified
MTDTTIFVGLDVHKETIAVAMAPASAGATFSYYGVIANTTEALRKLCKKLSSGGKTLQFCYEAGPCGYVVQRRLSGWGYRCDVVAPNLIPRKASDRIKNDRRDAITLAQNLRSDQLTAIWVPDEAHEAMRELIRLRSLAMRDQRRSRQQLLSFLLRHGLSYSGTHWSKAHRGWLADLSFSQPAQHLVLEELVQRIERAEGLCARLADAIADLLPSWTLAPVVEALQALRGVSMLNAATLVAEIGSFDRFDNPRQLMGYLGLVPSEYSSGKTVRRGSITKTGNSLARTSLVEAAWTYRFPARVSRIIHKRSAHLPEPIRVVAWKAQIRLTRRYRHLIATGKAAPKVVTAIARELVGFIWAIARMVEPKTT

SEQ ID NO: 488972 - protein, 410 aa, unidentified
MEVLHPRCCGLDVHKDTVVACVRLGIDGKTVKEVRTFSTTTADLMALSQWLDENKCTHIAMESTGVYWKPVWHILADGEFELVLANAAHIKGVPGRKSDVKDADWVSDLLAHGLIRASFVPDSPTQEMRTLMRTRKQLSREKARHILRIQKTLEDANIKLDSVISDLMGVSGRKMIEALIAGQRDPAKLARLADPRVKASQETLRQALRGRVTRQHRFLLRLHLDQIDGLDAAIAKIDREVEAAIAPFRTAVEQISSVPGVKKLAALQIISEIGTDMSRFPNDANLVSWACICPRSDESAGKRRSTRIRKGSPWLKTALVQSAHSAVRMKGTYFQALFHRIRSRRGVKKAIVAVAASILTAIYHMLKDGTMFQDLGADHFDRRTKEQQKNRLVKRLAELGYAVEVAPLPT

SEQ ID NO: 488973 - protein, 420 aa, unidentified
MTVDLERGYKRREPCGPKQYLNLLLRSVFMIFVGIDVAKDKHDCFITNSDGEVLFQVFTIQNNREGFDALFSRIQSVSPDTSNIKVGLEATGHYSYNLLGYLIDKGLPTFVINPLHTNLYRKSLSLRKTKTDKVDARTIAMMLMSDVNLKSYSDTSYHNEELKSLTRYRFDKVQERAQLKQSVSRLVTILFPELEKLVPTLHIASVYILLSELPSAGKIASCHLTHLTKMLENASKGRYSREKAIEIRDAARTSIGSNMPAKSLELKHTLRLIGELDSEISEIESEIKQIMDQISSPILTIPGMGYRMGAMILAEIGDFSRFDSPDKILAYAGVSPSTYQSGKLESSYSHMEKRGSRYLRFALINAAKYVCHWDETFGTYLQKKISEGKHYNVAITHAAKKLVRLIYAMEKSGKSYIKTE

SEQ ID NO: 488974 - protein, 342 aa, unidentified
MAIVGGLDLHRKQVTFDVVDTESGVAGRGRIAPADRERFRGWLAQYAGQQVDLAVEGCTGWRFVVEECQRAGIRAHLAEPADVAGLKGRRQHAKTDRLDARHLRDLLETGTLPECWIPPVHMLEVRAKVRLYKDLLEERGAWQQRIHATLFHHGAPAQTDLLRGDRDRLTRLEAVSPAGRQATAVALRVIDTLDVELLRLKEELVGFARRQPGCQALQREYGIGRLTSVVIWCELGDARRFRSSRNAVRHTGLDVSVYSSDGKRSRGHLTRQGPPLLRWALYEAGRCAARASSPDHAYYAQVARRLGTSRATLSVARKLTRRCHHRLRALGDEAMAPVRPAG

SEQ ID NO: 488975 - protein, 335 aa, unidentified
MQVHGVDTRDRIVFAKAIRREEFLSFAAQLPPCVLGLEACSASHYWARKLKELGHEPRVMAAEHVAPYRKSRKGKNDANDAEAICEAAGRPNMRLVTIKSEEQQSVLALHRLRAGLVEDRTGMMNRIRGILAEFGIWVAQTPDKLANWLGKEAELIEELPILAREGIGIAREHWRELDRRIAELDGKIAETSKASEEAKRLQKILGVGAITASAVVATIVDGKQFKNGRQFSASLGIVPSQHSTGGKTVLGRITKRGDGYLRHLLVQGARSAMNAAQRRKPEKLTRLERWMLELNARVGYQKTLVAIANKHARIIWAVLAKGEAYDPKYGQAEPA

SEQ ID NO: 488976 - protein, 438 aa, unidentified
MSNKVIFNLDELFISVGIDVGADFSWMSIALPNQQFVGKPYKILHSSIDSLTTAVSKIKEAEELYSLESRIFLESTGIYHYPLFCYLRDKGFNCSVINPIITKNSTNINIRKVHNDRFDSKKAALVGLKPDLKVSLMPSDLALNCRNLCREYYDLMDNRSAYVNKLQGELRMAFPQYLGIFSKVTINTSLTLLETYTSPSAFLKADKQEIIDIIKSTARFGLTYAQNKYNAIIQAATDANQFGYIIDSNIKRIRLYISFIRKYDEEINNILESLHELVDANEDADFVKQIHLIETFKGAGFLSAVSIMGEIGDFSAFSKPKQLFAYFGLDPAVKQSGKFEGTKVQMSKRGSAIARRVIHTLTLQSISISRNGEAKNPVLREYYLKKCDSKPKLVAMGAVSHKVCNMIFAILRDNKSFEIITPQEHIKQYNASKCDMAA

SEQ ID NO: 488977 - protein, 331 aa, unidentified
MKQCTTKLFVGLDVHKDSIAVACAAGQRDAEAVSLGTIGTRQHDIDKLLRKLVSRGRELCIVYEAGPCGYWLYRYLTKKGYACCVVAPSLIPKKSGVRVKTDRRDAVVLARAMRAGDLTPVYVPRLEDESIRDLTRAREDAMKDLKSAKFRLKAFLLRQDIRYEGRATWGPAHMRWLSQVVCRTPAQQIVFQEYVRAIEEQHERVQRLETELREQLSAWRMRPVVDAIQALRGVQLISAVTLIAELGDITRFDSPRQLMGYLGLTPSEYSSGRQRRLGGITKAGNGHARRVLVEGAWAYRYPAKVSRHLQLRLERVPKRAGDGAGRALHGP

SEQ ID NO: 488978 - protein, 344 aa, unidentified
MIRHIGVDLHTNTFTICILQEGKEDIIQTLPLQKGGLEQFIRSFNSNDEIAVEATGNASHFCRQVQPHVKRVVIIAPWQFEVIRRSVKKIDRHDARAIAFFLSKDMLPEARKKDEDKEQLASLIATRDQLVKLRVSLLGKVHGMFVRHGLKVKKEVLTTQKGFKHHVTSHAWSPLEKIEIDIIQNQLNSLLEGIKKLEKEIKIFVQAIEGYDNLISIKGIGSLSAAVMLTHIGQIIDFKDPGKLAAYFGITPRVSQSNTTCNIGRITKRGNKIARTTLVQCTLIAKRYSPYLNTFYEKVKAKRGTGKAIIATARKLLNTIFYTLKNNWVFEDFPNFKFKSCNQS

SEQ ID NO: 488979 - protein, 344 aa, unidentified
MEYFAGIDVSLRSCALCIVDSKGAVLLERELPCEVSDIAECLTHFPHPIERVGFEAGAMSQHLYFGLTTESFDVVCMEARQVNAALSAMRNKTDKNDARGIAQVLRTGWFSPVHMKSREAHGVRALLSTRKALLKKTMDLANEVRGLLKIFGIRLPMTVKHGSFDGVVRPLIEMDDVLAHALVPLLDARVVLYQHFLELDRRVKRAASHDEVCMRMMTVPGVGPIASLTFKAAVDDPTRFKRSRTVGAHFGLTPRRYQSGEHDNPGRISKAGDRDVRATLYAAANALLMRTMASSQIKSWGMRLIRTKGRRRAVVAVARKLAVLLHRMWVDGTEFRQENVGDMA

SEQ ID NO: 488980 - protein, 419 aa, unidentified
MNNIETKRLRIVNEKTLIVAIDLGKTTPMGYCRCSQKRDMKSFEFSNNAEGFRKLWDRICWTKTAYHLEEVVVGFESTGAYGEPLVHYLRKKPVKLVQVNPLHTKRVKELEGNSPSKTDRKDPKVIADIIELGHALTVVIPEGAAAELRRLTQARERSVQRKTALLNQLQGLVFVIFPEFLQGMRDIKSRSARYLLRHYPTPQDLVECGAEALALILRQVSHGKLGRERAQALYEAARDSVGIGEGQKEIVFEIQEILSWIDSSEEFITKVEQEMGNRLEQIPYSPLLLSVKGIGEVTVAGLIGEIGDFRQFHTNPEILKLAGLDLFEISSGQHRGNRHISKRGRPLLRKLLFFAAINTVRKGGVMHALYQRYLERGMPKIKALVVIARKLLKILFALVRDHCRYIENYSTTETLKLAA

SEQ ID NO: 488981 - protein, 324 aa, unidentified
MMYVGLDVHKRVCHGTVMNGEGTIVKQERFSNDPHSLGAFMGGVDGARVVMEAGYCWQPLYDRLEERGHDVRLAHPLKTKAIAQAKVKTDKIDSETLAHLLRADLIPESWVPPQEIRALRELVKRRAFLVQMRTKLKNRVRAELAKRDITPVRPPFTRKGMEVLRCLGIGAVNQLLPVIEVLDRQIGEASSVIEGMAVEHGDARLLTTIPGVGYYIALLLVAEIGDVDRFPSSEQLCSYAGLVPSVRRSGSSTIHGSITKAGSKWVRWALTQAVHVHVRYDTRLTRFYRRLARKKAKQVAVMATARKLLKVVYWMLKSGEEYRP

SEQ ID NO: 488982 - protein, 369 aa, unidentified
MAKSITFIGLDVHKDTIAVALAEAGLRGEVREHGKIPNAAAALKALAMKLASAGRELRFCYEAGPCGYGIQRQLAGMRHDCTVVAPSLIPRKPGERIKTDRRDAINLAKLHRAGELTPVWVPDQAHEAIRDLVRARQAAVRTLRQARQQLSGFLLRHGYHYHRPAWTQLHRRWLASLRFEQAVHHIVLEDCIAAVEAATARRDRLEAHIEAALPEWALAPVVQALQALRGVGLVAAATLLAELGDITRFTNPRQLMAYLGLVPSEHSSGRTRRQGGITKAGNGAARRMLIEAAWSYRFPARISREQLLRQERLAKPIRDIAWKAQERLCRRYRKLARAGKLPTVITAAIARELAGFIWAIARQPQATTP

SEQ ID NO: 488983 - protein, 340 aa, unidentified
MKYIPVGVDIAKHLMQVHFVDEHTGEIIDKQVKREKFLEYFSNREPCLIGMEACGGSHHWARELQKLGHKVRLLKGRFVKAFVMGNKNDVMDARAIWLAVQQPVKSVAVKSEEQQATLGLHRMRQQLVKFRTAQINALHGLLLEFGETTHKGRAALAKEVPEALERLKERLPLYLINMLDEQYCQRITELDEHLDHIEKQLQAVARQNETCQRLLNIPGVGPLIATAAVATMGDASAFKSGREFAAFIGLVPRQTGSGGKIRLLGISKRGDKYLRTLFIHGARAAALLTKEPGPWITELKKRRPASVAIVAMANKLARTVWAIAAHGRKYDKNHVSIRPD

SEQ ID NO: 488984 - protein, 351 aa, unidentified
MIIIGVDYHPSDQYIALVDTETGEYVERQLNHSAGEAAKFYRELATRGVSVRVGIEATGYSRWFERLLAELGMELWIGDAAKIKTKRVRKQKTDREDARLLLRLLRENNFPRIWVPSPENRDLRQLLWHRHRLVQMRTRIMNQLQALAMNEGQRRKKKLWSEAGRAQLEKLPLAPWAARRRKDLLELLDRMNPSIEELTAAIEQEARKWPEVLRLMTHPGVGPLTALAFVLIIGTVERFQCGKQIGSYVGLIPCEDSSAGHQRLGHITKQGSSLLRFLLGEAAQAAARCDADWRRRYLHLALRRQRNIAKVAMARRLGVRLYWMWRKGWEYADWVKFGSHAGQLGIGNGVQ

SEQ ID NO: 488985 - protein, 409 aa, unidentified
MRLFVGLDVSSFDMKVCFLNGEGEKLDSFSVSNDLPGAQVLKERLLQCTTNQEVETVIIGLESTSVYSFHPSMFLHHDEDLKRFGTKVFLLNPKQVANFKKSYSDMNKTDEIDAFVIADYLRFGRNQMSIVKESQYVALQQLTRSRYQLVRMLTKEKQHFLQHLSYKCNTFSQEVDSSIFGNAMMELFLEKFSLEELSDMPLEELAEFLQEKSKNRFGEPKCVASTIQKAVRTSYRLDKVVEGSIDILLGTSIEIIRTYQKQIKELEKSIKRIMAGLTQTLESIPGIGPIYAAGIIAEIGQIERFDDETKMAKYAGLYWRTYQSGRFTAENTSLSRNGNHYLRYYLVEAANSVRKHVLEYQEYYAKKYNEVPKHQHKRALVLTARKFVLLVDALLRNHQLFTLERRVKV

SEQ ID NO: 488986 - protein, 423 aa, unidentified
MVLEQAQDKQEIIERVAALDIGKATLVCCTRIPGQAGRGRAQEVTEHSTMTRSLQLMIDRLLELGVTRVVMEATSDYWKPPFYLLEAHGLEVWLVNAKDVKHLPGRPKTDRLDAVWLCKIAERQMIRPSFVPPVPIRRLRDLTRYRVALIADRTREKNRVEKLLEDALIKLSVVASDIFGVSGRAMMDQLIAGERDPKVLAQSARGSMRGKIATLEQAFVGSFTDHHAFLLRRMLARIDGLSTDVAELDTRIDEQIAPFAHAVAQLDEIPGIGVTAAQAIIAEIGLDMSRFPTPAHLASWAKFAPGVKESAGRNKGNGSTGHGDPYLARVLGEAAVGASRTNTFLGERYRRIARRRGKKKAIVAVGRSILVIVWHLLSDPDAHFHDLGPDFYDKRRGPERIKQTHVRQLEALGYKVTLEPTAA

SEQ ID NO: 488987 - protein, 426 aa, unidentified
MNCTQNYKIDQVTEQTLVVGIDIAKRAHYACFVDDRGRVLRKSFPIFQSKEGFQQLYKAIQEAMQAFGKSEVIVAVEPTGHYWLNLAYFLEEHGIPLVMVNPAHVCRSKELDDNLPTKHDAKDALVIARLAKDGRFLVPRLLHEIEADLRVGSTLKEKLRKEQTAVKNAIVRWTDRYFPEFWTVFRDLGKTALSVLEWTPLPADMAGRTVEELLEVYRQSEGMKCPQKAKIQALINTAKDSIGVTEGTAMARFEIAALVRRYRQLEAEIAALDAELKALVQTTMEYQWLKTVDGLGDATIIDLLAEIGSFAHYRDPRQLVKLAGLTLKENSSGQRKGQKHISKRGRKRLRSVLFRAMIPLIRHNEAFRELHEYYTTRSVNPLTGKQSIVALCRKLLNVLFAICTKKQAFDAERMKQDVLSQVQRAA

SEQ ID NO: 488988 - protein, 318 aa, unidentified
MEGSAVGTVVVGVDASKASLSVWREGAHREVPNRRKEVRRWVRSLPPGTALGVEATNRYHELLVEEALEAGLTAYVLNPREVRSYKDSLSHRAKTDRLDCEYVARFLERERDRLFPYVPPGRRHGLAGALLRQRDLLCRSRLSLQQSSRELPALAGRLVREAVREALGALEAAVGRCELLLASLLREDPTYRRLLRVPGVGPLGAAGLCAAVSSRPFASADAFVAFVGLDLRVEDSGALKGKRRLSKRGDPLLRKLLYLAAAALSRTAKGRAAHQSRLDRGVARVASLVHLARKTARLVWALHTRKTDFDPAKWSLTA

SEQ ID NO: 488989 - protein, 415 aa, unidentified
MKVVFPTCCGVDVHKTFLVATIITTPTDSLLPHYQKKRFSTFNSDLNRFADWLLKHDCLDVCMESTGKYWVPVFNILEKHDIRVVIANPKWVKAVKGNKDDTKDSKWIGDLFRIGLVKSSFIPDLDIRILREFTRYRYKLVSMKSSEKNRFQNAFTVCNVALDSVVSDMFGKSATAITDYLTSDEFFDPEHCISLLQRSLKKKAKQVLESIEGYSIADEQKFRIKIIREHHDFIEKMITKVDTCVNEMVEKYEGEINLLCTIPGIDRNSAITIISEVGTDMGQFCSSKQLCCWAGLTPGNNKSAGKKKSVQISRAGVYLKPALVQVAHAAVKDNKHPYYKLKYERIAKRRGKKRAIIAIARMILTAIYSMFCTGEVWNPVDLFKIDMPEHLKEQQLAKAIKQATKFLEKQGLTVA

SEQ ID NO: 488990 - protein, 345 aa, unidentified
MNKPEYFVGIDIASTTFTSAIGVIGEKWQIVVKPETFENEYDHLEKYKTWLQAHGLMPSNCVICMEATGVYGEVLAHYLVVQHYPVAVEPPLKVRRAFKPAGSKSDPVDTRQIAEYAYRFWDELVMWAPREEILERVKTLLAAREQYVAERTGHHNALHALKRKVVRTDLVEQMHEKTIQELTGHIKELEAEISRLIHDDPDLKAMYDSLTSVPGVKLLLAAHMIVVLQSAPQPCTPKTLAAFVGICPYEHSSGTSIHFTPTSRHFGPPALRKLLFLASLSIAQHNQHFKTYYARKVLDGKPKKLVLNNIANKLLKVMVVVVRSKTKFNTEYRSVNPGLLKPALT

SEQ ID NO: 488991 - protein, 445 aa, unidentified
MAPATIEWVTIKTPNLKQEEPSEMENTTARKRKQVPEGYLIIGIDPHKKRHAAVVITQDFTIRDKSKFDNTREGLETMLRRTRTEMVKADCRGVMFAIETGGHYWRNIAYFLDEQGIPFRFINQYTLKRRREGKDLNHKKNDYRDSEVAAQLLCTGEFTESTIPQGVYAELRTAHNAYRRLVKERTRITNLVKGLLDGLFPEFTQVFKDPCGLTALSVLSTCSIPGLIAGMTEDDFVAAIEARHHGRRLMRKKLRELHNSAMTSIGIAAGARSVSSEISFLVEKYELIRRHICIIERTLVSLVDEAEEGKYLLSIRGLNYIAVAGLLAGLGCFKSYRTAKQMIKMAGSNPTESESAGKRGAHTPMSKQGRPVLRYCAWTSVIPMLRFNSDFRAWAKQRRERPAHANPLSGREVVGAALNRLFRLAFALVKNQTYYLSPQLVQVTG

SEQ ID NO: 488992 - protein, 355 aa, unidentified
MSNEKYIGLDVHQATISVAVMDSVGKVIMESILETKASTILEFLAGLRGSLFVTFEEGTWAAWLYDLLKPHVTEVLVCNPCKIALLKHGNKSDKIDARKLAERLRLHDLKPVYHGQTGVRMLRELARSYLTVVKDLSRVMNRLKALYRSWAIPCAGRDVYYKRHRSQWLEKIPEAGTRRRAEQLYEQLDLLRDLRQQARRELLAESRRHAITAKLRQIPSLGPIRSALAVALIQTPYGFRSKRQLWTDSGLGLETRDSGEYHYVQGQVRRRKKQATIRGLNKDYNHDLKGVFKGAATRASVKPGPFQEFYQRSLAKGIKPTMVRLTLARKIAAITLTLWKKGEDFDINKLNSQAA

SEQ ID NO: 488993 - protein, 425 aa, unidentified
MLEEVEDTEQVIERIAALDIGKAELTCCVRVPSTRTPGRRMQEVRAYSTMTGSLLALSDRLHELAVSRVVMEATSDYWKPPYYILESAGFEVWLVNAKDVKHLPGRPKSDTIDSVWLCKVGERQMIRPSFVPPVEVRALRDLTRYRVDLVAACTADKQRTEKFLEDACIKVSSVVSDLFGVSGRDMMRALIAGERDPRVLARLARGRMRGKIATLEEAFTGYFTDHHAFLLAKMLARVEAIEADIADIDAKIDTEMAAIAPFADAADRLAQIPGLGRVSTHALLAEIGLDMGRFPTPGHLCSWLKFTPITSESAGKKKGKNATGHGNRYAGRILGEAAVAAGKTNTFLGERYRRIARRRGKKKAIVAVGRSILVIVWHLLSDPDTRFHDLGSDFYDRRINPDRRKHNHIRQLQALGYKVILEPAA

SEQ ID NO: 488994 - protein, 336 aa, unidentified
MRFIGVDLHTTQITVCYLKTVAEYRFEIYQLSEIKKFLKQLNETDEIAVEATGNTRWFCEQVKKKVGRVVIVNPREFEVTKKSVKKTDKRDALNLAKFLAVDMLPEVRSKSEEAETVQRLNETRTKLVRLKTCLMNKIHALAVSRGRKLKRESLSSKKGLEKVFAQEWTEIEKLELEIIVEQMESLNKSIKRLDTAIEEASKKLKGFDNLITMTGIGARSAGVLLAVIGDVNDFSDEKKLASYFGIVPKVKNSNEKVQTGKITKRGSKTGRTTLVQCTLVAIRYNEYLRTYYERMKARRGHGKAKIATARKYLGIIYNTLKNEWVFEDFNNFVLAE

SEQ ID NO: 488995 - protein, 348 aa, unidentified
MSKISQYVGLDVSLKETSICVIDEAGKIVWRGRTDTTPEAIASAVKQHAPNAVRIGLESGQLSTWLFHELKAVGLPVICVDARHAKAALSLKVSKTDANDALGLAQIMRVGWYREVSVKGLDCQAVRTLLVVRAQLVSQITTLKNCVRGVLKTFGLVLPKGLRSQFPGRVRAAIDGHPVLGAIIEPTLLVLEATRAQLIVYDRAIIQRARSDDTARQLMSAPGVGTVVALAYMTGVEDPARFKRSSSVAAYFGMTPRRYQSGEVDRAGHISKCGDGMVRGLLFEAAKVLLSRSARPSALKTWGEALGKRIGPKKATMAVARKLAVILHRMWITGTTFQWNAEAASLAA

SEQ ID NO: 488996 - protein, 385 aa, unidentified
MRRILKIGMDVHRTNYTLCAMEARFGEENRMLALRQYEPSWKHVVKFVETAERMINRDGKDEVEVECGYEAGGLGFSLYEQLTKAGLKCTVMAPTTMMVQQGVRVKTDRRDAKWIAESLIAGQYKAVHIPDDEDYAVQEYIRMRDDAKNALKQIKQQILAFCHRHGKPYDGTYWTGKHLTFLRGLDFGGILQETLAEYLSSYEEQEAKVQRYDRRISELSQQERYREKVKKLCCFVGIKEHTALAFVAEIGDFSRFERAASFAAYLGLTPGEHSSAERKERTGITKAGNSHLRRLLIESSEGICRGQVGQKSKELRARQAGNSAEVIAYADRANVRLRSKYYRGIHAGKARNPMKTAIARELACFIWGMMTDHIHRDQTSRGQTA

SEQ ID NO: 488997 - protein, 328 aa, unidentified
MKYLGVDVSKDKLDCCLLHDAAETKRKTKVVANSPSGLVTLLGFVEKEGILPDELHVIMEGTGVYHQLAAETLCDAGVTVSIANPAQVKAFGSGMAVRTKNDTKDSFVLARYGALLKPAPWTPPSPAARQLQAYIAREDAIKKDIQRERNRQETSVIGRAPEGVLASIEETIGFLDAQLAAIRKEITSHINKHPDLKDDMKLLTSIPGVGPETGHHMLSVMHTHQFRSAEQAAAYLGLVPVERQSGTSLHAPARLSKAGPKRMRAALYMPAVSAMTWNPHIRALKERLAAKGKTPMAIVGAAMRKLVHLCFGVLKTRTKYSADHVQPA

SEQ ID NO: 488998 - protein, 367 aa, unidentified
MKDSSTVVGLDVHKNSIQIVTADTDGAMEVRHFGRIGGTMDELDRAVRKLVSQGSTLRFVYEAGPCGYEIYRHLTGKGFSCKVVAPSKTPKKSGDRIKNDRRDAETLARLERAGELTAIYVPREEDEAMRDLTRAREDAGKALRTARHQLNAFLLRYGKRYPGKASWTPSHMRWLSDIALPHPSQQIVLQESILAVTGCTERTIRLTDQILKLLPEWRMYPVVKALQALRGVAPIVAATTVAEIGDLSRFENPRQLMAYLGLVPSEDSSGESTHRGSITKTGNGHVRRVLIEAAHAYGFPARVSRHLLKRHEGLPQPVLAIAWKAQVRLCGRFRRLMARGKLKTKVVTAIARELCGFMWAIAREVKV

SEQ ID NO: 488999 - protein, 339 aa, unidentified
MELYAGLDLHSRNTYIGIMDKAFNRVFKKRVPNHLEHILQTLAPFRDQIKGFVVESTFNWYWLVDGLMDAGYSSAHLANPSAIKQYEGLKYSDDQHDAFFLAQLLILGILPQGYIYPKKDRPVRDLARKRMFLVQHKTAHILSLQSLIARCCAMKVRANDMRHLTVKELEMWLEEEYLVLSAQANLDSINFLKQKIQGLEKAIIQKVKLNKEFKYLLTVPGIGNILAMTIMLEVGDIKRFPKVGNFTSYCRCAPSRRFSDGKSKGSGNRKNGNRYLSWAFTEAVHLGRRHNERFRRYYNRKVAQANTSLATKALGNKLARICYYIMRDRVPFREELFCQ

SEQ ID NO: 489000 - protein, 392 aa, unidentified
MVCVGIDVAKDKHDCFILSSEGEVLSDVFTITNNRDGFETLLRRIQSCTRPADNIKVGLEATGHYSYNILGFLLDKGLATYVINPLHTNLYRKSLSLRQTKTDRIDARTIASMLMSDVDLKSYTDTAYHNEELKSLTRYRFDKVKERAQLKQSISRLVNILFPELEMLVPTLHIASVYAMLSEFPGAKQIAGAHLTHFKAILSDASKGRYDRDKAVEIREAAKRSIGSAMPAKSLELQHTIRLIRELDKEIEEIEAAIKAIIDEMAPPILTIPGISYRMGAMILAEIGDFSRFDSPDKLLAYAGLSPSTYESGKLKATGAYAHMEKRGSRYLRYALFNAAKYVCIWEPSFAAYLARKRAEGKHYNVAISHAAKKLVRLIFALQTSGKAFQPA

SEQ ID NO: 489001 - protein, 349 aa, unidentified
MEQHEVILGVDTHLDTHVGAVISETGKLLGTLSVPAETAGYLKLLTWANSLGHLRRAGVEGTGTYGAGLARVLRDHEIEVLEVNRPDRAARRSRGKSDPTDAENAARAVLAGKATAIPKEQSGAAEAMRAVSVARRSAVKAKTQAINQLRALLVSAPQDIRERLLKTKTAECVANCSRLRSLGNTPMLQTLATTLRLLAKRYLALAEELTTLDAMLEQLTLKHARRLRERFGVGPQTAAVLVAVAGDNPERLKSDAALAALCGTSPLQASSGKTVRHRLNRGGDRAANNALWTIAMVRMRSDSRTRAYVERRTKEGMSNKEIHRCLKRYIVRELYPLILADLADSARTT

SEQ ID NO: 489002 - protein, 356 aa, unidentified
MSIVAHSHPFVVGVDTHARKHVYAIITPTTSELLETRDFPATSTGINRAIAWVARRTGADLKTLWVIEGAATYGALLAGAVGGAGYQVSEAARMNARTNRGVGKSDQLDAQRIATAVLPLQTGQLRQPRLNEGVRAALRVLVAARESMTVERTKAVNALTALLRVHDLGLDARKALTGAQIVEVSRWRAREEALALTVARAEAIRLAKRIGDLDDELKANNTQITELVEISEAAPLLEEKGFGPVTAAVCLLAWSHQGRVHSEAAYASLAGVSPIPASSGNTVRHRLNRGGDRKLNKALHMIALSRMTFDPETRKYVEKRQSEGRSTKEIRRCVKRYLARLIYRTLNSTSPTQGAA

SEQ ID NO: 489003 - protein, 403 aa, unidentified
MNNVAGIDVSKGKSMVSVLRPFGEVVAKPFSVGHTGSELKELADYLKSLDGETRVVMEHTGRYYEPVARFLHEEGVFVSAVNPKLIKDYGNNTLRKVKTDKADARKIARYGLDNWAELRQHTPMDTIRMQLKTLNRQQSLYAKTKTMMKNNLIALLDQTYPGVNALFDSPVREDGSQKWVDFATAFWHVDCVRNMSLTAFAERYRKWCKRHGYNFSQSKAVEVHTGAQDLIAMLPKDALTKTMVRQAIDALNAVSASLERLKAEMQALAAQLPEYPVVMAMHGVGDSLGPQLMAELGDVARFTHRNAITAFAGVDPGADQSGTHEAKSTRVSKSGPPELRRALFLVMDCLLKTQPQDDPVYRFMDKKRAEGKPYLVYMTAGANKFLRIYYASVKAYLESLEHD

SEQ ID NO: 489004 - protein, 320 aa, unidentified
MNSHRKTETIQTEINHVGIDVSKQHLDVSIAGSKNQRLANTPAGLRLLHQKLGRLAHPRVTCKATGGYEKLLVASMLDAGVEVCIAAPGRVRYLANAEGLLAKTDSIDGELIRRFAEKIPLPLQIKPDPDACKLRQMSDFRRLLSDDIVKTTNRIELAEGYLREQLQSQLAHLESLKKKVEVDIAAHIRNTTELAQKAARLQELKGVGPVLAATLLAHVPELGKVSDKTLSCLVGVAPHPKQSGNFKGQASIRGGRANVRHVLYMAAVTASRSNPILAAFYQRLRTQSGKTAKVALVAVMRKMLGVLNKLIAQPNFSLAH

SEQ ID NO: 489005 - protein, 310 aa, unidentified
MKKQVYVGIDVSKETLDVALGDKPFVVNNDPEGIAILSKKLRRSKPAIIAIEASGGYEYAVTAALAAAKLNVALVNPRPVRDFAKSMGVLAKTDRLDARVLARFAEKMQPECRSLPDEERRGLASLVKRRKQLVETIVEENNRRETAHAVVLPNIDKHIAWLKAELRDIDKQLRGKVEASPLWRSQAELLTTIPGVGAGMAMTFLGLLSELGSLSPKKIAALAGVAPFNRDSGRYSGRRSIWGGRSEVRRMLYMCALTATRRNPVIKEFYDRLLAAGKAKKVALTACMRKLLVICNAMVRDNTEWSYAPC

SEQ ID NO: 489006 - protein, 414 aa, unidentified
MERLYTCCAGLDVHKQTVVACLLHPDDAPERKEIRTFGTTTGALEELRDWLSAAGCTHVAMEATGVYWQPIYHVLEGHYELLVVNAAHMHAVPGRKTDVRDAEWIADLLQHGLLRASFIPSREQRELRDLTRTRTSLIDERSAAVNRIQKVLEDANIKLAGVATDIMGKSGRDILAALVGGESDAAAMADLARGKLRRKHEALEQALRGRMSDHHRMLIALHLEHVDLLDEQIDRLSANIAERLRPYEATLLRLETIPGVGRRTAEILAAEMGLDMTRFPSAGHLASWAGMCPGVHESAGKRKSGKRREGNKALRRALTEAAHAAARTKKPGRTYLRGQYRRLVIRGGKKKAAVAVGHTILRIAHYLLSHDTTYQEQELVYLDERRRARTQQRALDQLKALGYDVTLTPKAPAA

SEQ ID NO: 489007 - protein, 343 aa, unidentified
MTAYVGIDLHRRRSLAVCLDEGGERLWWRRFENSPQTLAEVVTAAGPDAEVVLEATWGWYWAVDVLADEGVGVHLAHPLGIKGFENRRVKNDLQDAEMLANLLRLGTLPESWIAPRSLRELRELVRYRHKLSQLRAGLKSQIHAVLGKEGVLPQLRDLWGPVGFEFLNQTRLAEAYEIRVESLRDLIEMYDREIVELDGWIHRRLRDDAGYRVIQQLNGVGRVHAAVFVAEIGDVTRFAHPRQLCSWAGLTPRLRESDTRTYRGHITKQGSTLVRWSAVEAVSRYHGGAPIRDSFHRIAERRGRNIARVAAARKLLTLVFYGLRDHEIRCLHTSDDDVEEGVA

SEQ ID NO: 489008 - protein, 337 aa, unidentified
MVYVGVDLHRKSSHVAVLADDGEVLASRRIASQPHEFLRVFGELEEEPVGVAFEATYGWGWFADLLQDVGIPAHMAHPLATKAISSARVKNDRVDAKTLAHLLRTNLLPEAWAAPPEVRDARRLARSRISLARISSRLKCQIHALLADQAITPPLTDLFGPGGRRFLQTVQLRSIPQARLEANLRLVDLIAPELASADAELRALFRGDDRIRRLIPIPGIGFTTAAVITAEVWDVSRFPSPRQLCSWAGLTPTERSSAEHTHRGHISKQGSRWLRWAMVESASRPRLNDPSLRRFRDGIARRRGAKVAKVALARRLLTLCYYALRDEGGCRAYPVPR

SEQ ID NO: 489009 - protein, 338 aa, unidentified
MTCYSGIDLHSTNSVVVVSDEADRVLYQRRLPNELAKILVALEPHRGELAGVVVESTYNWYWLVDGLQAAGYAVHLANPAAMKRYEGIKHSGDETDAAYLAHLLRLGILPTGYICPPAERAVRDLARKRSQLVRTRTAQVLAVENVFARETGGRMSANVIKRLEVAGLGEFGLGEDVTCALAANVAVIQALTAEIGKLEARLRERVRLRPQFRVLITVPGIGEVLATIIMLETGAIERFAAVGNFASYARCVDSKHLSNGKKKGEGNVRNGNKYLAWAFIEAANFARRYCPEARRFHDRKKAATNNIVATKALAHKLARACYHMLKEGRPFDVKRCFA

SEQ ID NO: 489010 - protein, 400 aa, unidentified
MISVGIDVSKGKSTVCILKPYGEIVSKPFNITHTQKDLRELSSMLFRLNDEVKIVMEATGIYHLPVLTYLQEKGFFVSVINPYLMKSYRNESLRKAKTDKIDSRIIANYGIDHWFKMKEFQISGVIYEELKLLGQQYRHYMKLHLLSLAELTHLLDLTMPGIKNLLASWNETNRKDKRSDFVERFWHYDVITSMSEQEFTEKYILWAKEKKYVPSQEKAKVIYTLAQESIPTLPSETSSVKMLVTEAVRVLKEVDATLGLILSRMQEIAKTLPEYSVVREMGGVGNTLAPKLIAEIGDVRRFRNGKALVAFAGIDPPPYESGQFVGCNRKISKRGSASLRKVGYETMRSLKMRSRPEDPVYRYVVKKESEGKSKKSAKIAGLNKFLRIYYARVTELYKNI

SEQ ID NO: 489011 - protein, 411 aa, unidentified
METIVRRCAGLDVHKESVVACARVIDDNGELQLSTQTFGTTMSDLLVLGDWLASHGVTLVGMESTGVFWKPVYMLLETEFECWLLNAQHLRNVPGRKTDVGDAAWIAQLVAHGLVRPSFVPPKEIRELREVTRYRKALIQERTREAQRLHKIIEGSGIKLANVATDILGVSGRAMLNALIGGTHDPEILAELAKGKLRKKLPALRKALSGWFSPTHRLLVGELLAHLEYIDESIERLSNDIATMIAPFAPVIDLLDTIPGVNLRTAEVIISEIGVDMSQFGSAGRLASWAGMCPGNNESAGKHFSGKTRKGSKWLRMALIESAKAASRTKDSYFAAQYARIKGRHGHQKATVAVAHSILVVAYHLLERGEPYKELGGDYFIERQQKDAYQRRLVKQLERMGYEVALTKHAA

SEQ ID NO: 489012 - protein, 444 aa, unidentified
MQYQKVLQMLNCIPYLSVGLDVGADFTWMSIMLPNGTLTGKPFKIIHSDPQSRELAVTKIKEAQEMYSLKSRCFLESTGIYHIPLLCFLHDKGFDCSVINPIITKNSTNSNIRKLHNDKFDSKKAAKVGLDASLKTSIVPDDEIIDLRNLVRDYYYYKDLQSAVVLKLNAELKVSFPAYLQVFSKITTLTSLKLLESYPLATDMLAAAKDEIVKTIRETAHFGEKYALSKYEAIFIAAEDAAVFGRALPSNALRIRLYIETYREYQKHLDSILEELHKAVDGLQGKPVHNQICLIQSLRGVGFLSAVVLIAEMGSFELFSSPKKLYAYFGLDPAVKQSGKFNGDRVHMSKRGSSLARRILHMAALNNLKVDRGTKMPVNPVIHSYYTDKCRSKKKNVAVGAVMHKICNIIFAMLRDNKPFEMITPQEHCKRYEVDHPSKPDNAA

SEQ ID NO: 489013 - protein, 370 aa, unidentified
MGNRSMFVGLDVHKETIDVSIAEGQRDGEVRHYGVIASDLEPLDKVVRALRAPDRQLHFVYEAGPCGFGIYRHLTKRGEHCVVVSPSMIPKRSGDRVKTDRRDSLMLARLHRAGELRAIYVPDDTDEAMRDLVRAREDAVGVGTQAKYRLKAFLLRQGRRYPGREGWTLPYRRWLADLSVPSAAQHISLQEYRDAIDETERRIDRLTEQLRQLAPTWRWAPVVAALQALRGVSFVTAVALVAELGDLTRFRHPRELMAYLGLVPSEHSSGPSVRRGGMTKAGNPHVRRLLAEAAWAYQGIPRIGRQHAYRQEGLPKVVCDIAWKAQLRLTARFKRLVARGKAKPKVATAIARELTGFIWAIAREVAPAPR

SEQ ID NO: 489014 - protein, 364 aa, unidentified
MNKCHLNTELSSLEGTRSEFNRSKAVIKLGIDVHQDFYVVVEQMEGTNPKPAQRFQKQVFLHWAAKLSKSGSKVHAVYEACGFGFGLQRQLTAQGIHCYVVCPQKLDERNKRVKTDGLDAKALCLKLDRFVQGNREALALVRVPTEAEEQKRAIHRQREQLVKARKGLEAQGRSLLVNHGMEPASNWWKGRTFVQLQVPEWMKELLSNSQPILLALEEKIRALTAQLQAAAISKQPRGLGLLSSVVIDREIGSWTRFKNRRQVGSYTGLCPGEYSSGNTRVQSCVTKHGNPRLRAALVETAWRLVRFQPNYKPVLKWRKILAKGALATGAARKKAIVAVARQLAVDLWRIRTGRVAIETLGLIN

SEQ ID NO: 489015 - protein, 475 aa, unidentified
MNIKGTKKKNQVVTANIFEQQELLKKSEVIKENLTASTWRELETNGKFDKNKKLSFISDDMLILGCDVGSETHYVRAIDTRGRELSKSAYSFNNDYEGFQSAKEWAVKIAAEHDKSQIVLGLEPTGHYWFCLATWMIANGISVVQVNPYAVKQTKEVEDNSQLKDDRKDPKLIANLVKDGNFGMPYLPEKIYAELRRLSMFRDQLNEDRIRTINRMHREMKIYFPEYKEALGKVDGAFSLELLKEAPFPDELTALGEEGIRQIWHAAKLRGRGYSRAREILQYAKASVGIKDGSIASKTAVKWFVQKIMELDVELAVIENQINQKCQEIPHTGNVLEISGIGENTLSGILAEMGDISRFDDVKEIQKLSGLGLVACSSGKHKGETKISHRGRKRLRYWLFQAAKSAVAHAEEFKELHMYYTTRADNPLKKMQSLIVIACKLLRIIYTILNTGTFYDPKKMLMDIRRPEKKEAIVA

SEQ ID NO: 489016 - protein, 345 aa, unidentified
MSKANTLFIGLDVHKETTDVAWVSDKSAETVHYHGTIPTNLRSFDKLIKNQTAKTSKLCVIYEAGPCGFWLYRHLLRRGIECWVVAPALIPKAPGDRVKTDKRDAMTLARLVRSGDLHSIYVPDERDEAIRDLIRCREDAMLDLRQARQRLKSFLLRHGHPCTGRQNWTEAYRRHLADINFPQSATKITFQHYIHIVTERYERLQRLELELQSLAESWRWYPLVQRLTVLRGVRFLSAMTLLAELGDLRRFASPRSLMNFVGLTPSEHSSGQRERRGGITKCGNSHARRILIESAWAYRFPARVSRELESRQQEHSIKLQTRSWEIQQRLCRRFHALKAKRQRIQ

SEQ ID NO: 489017 - protein, 317 aa, unidentified
MTATPRFVGIDVSKFRLDVATRPESDRFTIGNDEVGVRALIRQMNDLQPLAIVLEATGGLEMLVVSQLAAAGLPVVVANPRQIRDFARATGQLAKTDALDAEVSARFAEAVRPGTRPVKDKALRDLESLVTRRTQLSGMLTAERNRRTMASDVVACSLDANVQWLKRNLRDIDQAIAKLIRSTPLWRAQDALLQGVPGVGPVLSVTLLAGLPELGRLNRKQIAALVGVAPLNRDSGLFRGVRCVWGGRAHVRSVLYMATLAGVRFNPVLRTFYQRLRASGKKPKVALTACMRKFLTILNAMVCSGTPWHGQIGVGAS

SEQ ID NO: 489018 - protein, 340 aa, unidentified
MEKRYLGVDLHRNQFTVCVRLEKGRTYLRTWRLEALPQFVKQLRAGDELAVEVTGNTRLFHDAVAAHVARVVVVDTNQFRVITQSVKKTDAHDAERLALYLAKGLLPEVRMKDKQHSQIASLTQTRDTLVKQRSALKNKVNNLLSAHGINLAKEALSGEKKLEEVLGLSLDRLVQLELRVIIGQIRSLNQSIRELEKTIGEEGSQLEGHRQLTSIKGIGKITGAILLSVIEDVNDFPDEHRLASYFGIVPRVSNSNATEHSGHIHKRGSKLGRTALVQSALVAAKYSPYLKNFYQRVKNRRGAGRAIIALARKFLGIIYRTLKHRWVFEDFPNFVLAEGA

SEQ ID NO: 489019 - protein, 473 aa, unidentified
MSKGSGLSRSERRRNARKERLRALVPRGGAVIGIDLGEDRQALAVVDHDVRVLWRKTARVRAHGLGEALDLAVAAARAAGFASVTVACEPTGPRWMQVQRLCAQRGLALVCVQPLASHIAREQQDFTTHKRDESDAVLIARLACELHCYVPEQLDEGWALLRQLGRRRGQLVEAATAATARVRDFLSVAWPAAETAAAGPFKSVTWLACLEVVTGRCGGDPARVAGLGEEEFFALVTAAARGWGANRAFGRITRNILAVLDDPDAVGWSRRGLFRRIAGELGDLRRLRAQLEAVEAEMRAVLGGELGLSRLGDIPGLTLTGAAVILAEAGDPRRYETSKSLVKHAGLSPADTSSGAFEGTSRISRRGRPGLRAAAWRAVTPLLLHNPVMAAKYQAMTGAAEDAARAAAAAARPGSARAAQAGRAARAARAKARVACAAALLRWICFMTVHDAGWDPAAASGGRITSDDLPEAA

SEQ ID NO: 489020 - protein, 333 aa, unidentified
MAQSSTLYVGMDVHKESIAVAYVAPAYGADVVSLGPIGTRPCDIDKRIRQLQSKSKQLVCVYEAGPCGSWLDRYLTKKGYVCWVVAPSLIPQKAGDRVKTDRRDAMQLARLMRSGDLTPVDVPAVDDEAIRDLSRARADTRRDLKAAKLRLKAFLLRHDIRSTGRATWSPAHLRWLSEVVCPTPAQHIVLQESVQTVTEQTERLGRLALDLHEQGHPWRLSPVVEALQALRGSQCTVAVTTVADLGDLTRFANPRQLMHDLGLTPSESSSGGRRQQGSMTKTGTTHARRAFVEGAWAYRYPATVSRHLQLRLEKLPTAIQAIRWKAQVRLCKR

SEQ ID NO: 489021 - protein, 315 aa, unidentified
MSLQVASAVTYIGADVAKLSVAFQLLDQSWSLANTAQDHAVLIARLRSFTGPAHVVCEATGGYERALVCALHQAGIAVTVLNPRQARDFARACGHLAKTDGIDAQVLAEYGAKLHPQADPVPAPGEEAFAEMVQARRDLVGLLTAEAGRRDHTTLPALRKLAEARQRQLEKQLAKLDVLLDAHVAANTKLAAKAERLSAVAGVGRVTVLTVLALMPELGTIEDPKAAALAGVAPINHDSGQYRGQRHIAGGRSAVRRVLYMAALSASQHNPILGAIYRRHRQNGKPHKVALTALMRKLIVLLNRLLRNPDFVLVG

SEQ ID NO: 489022 - protein, 345 aa, unidentified
MKDSTKKNEIVRMGIDISKNLFQLHGVDCHDKPVLRRKVTRKNFPTVMVNIPKCLIGMEACGSAHYWARQLEQYGHTVKLIAAQHVKPYVQNNKNDARDAEAICEALSRPRMRFVEVKSVEQQDVQMMHRIRQNIVKARTAQSNQIRGLLAEYGIVIKVGAANVRKSLPGILEDAENLLSGIARECLSDLYNGLCQLDDRLETIDRKIMIIYKTNPLCILLGGIAGIGPLCATALYAAVGKSSQFKTGRDMSAWLGLVPRQYSTAGRQVNLGISKRGNRYLRSLMVHGARSVVRYSANKEDGLSRWLQRLQLEKGTNQAAVAFANKMARIAKAVLETGQPYKVAA

SEQ ID NO: 489023 - protein, 316 aa, unidentified
MPPLFVGLDVAKDHLDVHVRPTGETFMVAQDEPGLSRLGDRLRALAPTLIALEATGGYEATVAATLASAGLPVAVVNPRQIRDFARATGLLAKTDTLDARVIAHFAEAVRPIPRPVPDAQAERLGELVARRRQLVEMLGAEANRRRLTRDRALQRRLDAHVAWLERALQTLEDDLHTTLRASPVWRATENLLTSAPGVGPVTACTLIAELPELGQLDRRRIAALVGLAPFNHDSGTLRGRRRIRGGRGSVRHVLYMATLTAVRRNRVLTTFYQRLRTTGHPVKVALVAAMRTLLTILNAMVRDQRPWHTESQQQSA

SEQ ID NO: 489024 - protein, 402 aa, unidentified
MNAVGIDVSKGKSMVAIMRPFGEIVSAPFEIKHTASDIHSLVELINSVEGESRIVMEHTGRYYEVLAHQLSKANLFVSAINPKLIKDFDNDSLRKVKSDKADSVKIARYALDKWQNLKQYNVMDELRNQLKTMNRQFGFYIKHKTAMKNNLIGILDQTYPGVNTYFDSPARSDGSQKWVDFASTYWHVDCVRKMSLNAFIDHYQNWCKRKKYNFSQSKAEEIYGKAKELVPVLPKDAITKLIIKQAVDQLNSASTTVESLRTLMNETASKLPEYPVVMAMKGVGTSLGPQLMAEIGDVSRFTHKSAITAFAGVDPGVNESGSYEQKSVPTSKRGSSDLRKTLFQVMDVLIKTHPQDDPVYQFLDKKRAQGKPYYVYMTAGANKFLRIYYGRVKEYLSSLPES

SEQ ID NO: 489025 - protein, 358 aa, unidentified
MNATARIQKIQSSNGVIVGVDIAESVFQLCEADTSWRRLGSHRLSRTQFERWFDNREVALVIMEACGMAHHWARWLQRRGIDVELLPPHYVRAYVKRNKTDAADAAALLEAARCADIQPVRIKTEEQQALQALHRTRSMWMGWRTATINAMRGACREAGLRVSKGAKAGLAQMAKMIADDQSAIPALLRGTMKSMLEEVRNLEVRIDGIEKELTAVVRHSEPCKLLQSVPGVGLLTTTAMAAATGGDVTHFKDSRGFACWFGITPKEHSSGHNRKLGRISKQGDTYLRMLLVHGARSVLKAAATAQAQGKPLDALKRWALQVQARTCHNKAACALANKLARICYACLRDKVPYQAKMA

SEQ ID NO: 489026 - protein, 488 aa, unidentified
MKADKFMGRLIPRLKQANIPRIRDCVVERVWEIIPSQGKIICPYQAETRMKRRRDRVCGADVHKDLIVATITGDDVLPIRENFGTTKAELGRFRNWLVANKCEQVAFEATGVYWIPIYDALSQTLDTIVANPLQIKTIPNDKSDSKDSKRIAILCLNGQIKRSRVFAEEDRDLRTMTRARSGYVKTRTQFRNRIHKYLSSSGIKLSSTMDDIFCKSGRYILNGLAEEKPIEEILKGIPSGKIRKKQDLIREALENGLNDTNRMLVRDALEILDNLESKIEKLSHEVLKKVQQKSKDLAIVMSIPGIGFISASVILSEIGNYRDFQTPDQLAKWCGLNPGENESAGKKKKCGITKRGSKHIRVILVQAAQSISNMNKTALSRFFQRLNKKKEHNVAIIAVARKLICLIYHLLINQELYQEDDGRKRRSSQDKSCQAPSFHEEHLTDRVAAIVDAFYHLKESSRKNALMREIADISRIKVGQKRPSKGGG

SEQ ID NO: 489027 - protein, 421 aa, unidentified
MKKKAYKAVDVKKVNIDALSKMVEGQDIVFSTDVAKTVFVASIMNSNKEVLLTVKWKHPTESQLLIELILKHLRWHSLEVAMEPSGTYGDSLRALFIGHGINVFRVSPKRTHDAAEVYDGVPSMHDAKASAIIGYLHLEGCSELWPMPDDDQRALTAAIRTMEMYDEAYHRNINRLEALTMRYWPELTNILPLQTATLLELLIRYGCPEHVAQNLEEAEALMKKVGCCFLKDDKIQSVLASAPTSLGVKSIEAERLQVQELCQEIRRLQQQRRHAQQRVEELTQDVDGVKAMAKVLGKVTAAVIYLAVGGMHDHSGAASVIKALGLNLKERSSGNHTGQLRITKRGSGSARKYLYMAALRLIMSDKIIAAWYHKKTSRDGGTKMKAIVAIMRKLAAALWHVSQGVAFDASKLFDTRRLAVN

SEQ ID NO: 489028 - protein, 435 aa, unidentified
MNCVNDIRLEQFLQLKKEIRGSEKHLIVGIDAAKEKHNAFFGIARGKTLVKNLVFNNALEGFQKLLADVERIKVQYSLTSVVFGIEPTANYHKPLAEHLIKCGHMVVLVGGVAVKNNRQLLDGRWDKHDIKDAANVADLIAQGKCLFYEYPLMTLRNVRILIALKRRLKRREHGISVCIRNHLIAQYFPELDQHYGPAETLAVVRECLDPSEIAGMEYDAFCRTVAPGKMTLAKGRRVGTIWRAAVDSIGCTMGEAASFEAQVMVDSLKQIRQTIKAVEDKLEDACLKFPEYTYLLSIPGFGPDVSSKVLGAIGDPHRFTSAKQVLKMAGLDLCADRSGKKSNSAIPVISKQGKADLRYGLYQAAFIASLKNKDFIAYFTNKLRGRAKEKGIITKMRVKLAAKLLVIAWTLMKKKECFDPKYLKQEDQDAQEKAA

SEQ ID NO: 489029 - protein, 323 aa, unidentified
MKKRPARFVGIDVSKEHLDIACRPEPTRWRVANDGAGIGQCLAQLRQLKPALIVLEATGGWQGALVAALAVAKLPVAVVNPRQIRDFAKATGQLAKTDALDAGVIAHFAEAVHPTPRPLPDETTQQLDALLQRRRQLLEMLVAERHRVALAHPTGRDSLTRHMDDLQRLIDETDAEISTRIRTTPVWRETDALLPSTPGIGPVLSATLQAALPELGVLNQREIAKLVGVAPLNDDSGKRSGARHSRGGRAEIRAVLYMATLTATRCNPVINTFYHRLLARGKAQKVAITAAMRKFLTILHAMMKTRTPWNARIHHGPVLEPSR

SEQ ID NO: 489030 - protein, 331 aa, unidentified
MNLAGIDVANETFDIQKRCGKAIVHRTFVNTRSGHQRAIAWLKRGSKRVRVCLEATGIYHLQLALALDRAPDIELMVLNPRAARRFAEAQMVRGKTDKVDAMVLLHYLERMSFRPWSAPSEQRLVLQSMAHRLAQLTKEQTREGSRLHAAERAGPHTHEAQHDIRVHLRYLERRYRQLEAKAIALMKQHETMAEDLELVDTVPGFAKTAAMQVLAEVGVLPDDLQPQQWVAQAGLDPKPDESGTSLHSPRHISKQGNSKLRAALFFPSMSACRCDPNVQAFYEKLLARGKTKRAAQTAVMRKLLHSIWAIMKYRQPWDGNKFYRITEPINT

SEQ ID NO: 489031 - protein, 413 aa, unidentified
MVEVVYPRCCGVDVHKKTVVACLIVPGPQGRPVKEVRTFGTMTDDLLALVDWVVAAGCTHVAMESTGSYWKPLYNLLEGVLEVLVVNAARIKAVPGRKTDVRDCEWIADLLRHGLLQASFIPDRPQRELRELTRYRASLVHERAAQVNRVQKVLEGANIKLAAVATDIMGVSGRDMLAALIGGTADAATMAQFARGRMREKIPQLEKALAGTFGTHQRFLIAQQLAHIDFLDALIERVSAQIAERVRPFEEFIALLDTITGIGRYTAEVLVAEIGVDLRRFPSAAHLCSWAGVAPGNNESAGKRKSGKTRKGSPWLRAALVEAAHAAGRTPHTYLGAQYRRLVARKGKKRAAVAVAHSILTIVYHVLTDREPYADLGGDYFDRRDQQAVQRHLVHRLEALGYTVSLQPKEPAA

SEQ ID NO: 489032 - protein, 336 aa, unidentified
MSTQFFCGVDLAKHHFSLHAVDDHGKVILHKSVSRAKLLATLANMPTMCIGSGAHYWAREFNKLGHDTRIMAAKYVGPYRTKGKNDLNDAVAICDAVQRPNSRFIPVKSPERQAILATHRVREHWVNERTALINRIRALLAEFGIIIPTGRAAIHREVPLILEAAENGLPDIARAVVADCFDHLQTLNQRIADTEQCFDMVTKASPNAQRILNVRGIGPQTATAIIATIGKGEQFDSGRDFAAWLGLVPKQYSTGGKPRLGRISKRGDKYLRTLLVHGARAVITNLGDKQDRLSVWGRNVLERRGMNRAVVALAAKNARIVWALLHHQTDYQDYAA

SEQ ID NO: 489033 - protein, 325 aa, unidentified
MSQQVAWASDDVTIGVDISKDTLDVHLHPKGIARQFPNDRKGHAQLMAWAKLHQPTRIIFEATGRYHRALELALGKAGLPAVKINPLQVRRFAEATGKRVKTDPVDAATLARFGAVMRPKIPPAKDETIDVLAELLAARRGLIKDRTAASNRGKGLTLPMLKRHCQQHRQQIDSQIKAIDREWMSILAANPALRARLDILLSIPGIGPATAIALLVDMPELGTMDAKQAASLAGLAPVTRQSGTWKGKSFIQGGRASLRRAIYMPALVAIQHNPQLKEKYEALCRAGKVKKVAIAAIMRKIVIIANALIRDNRKWTPDLASAGAR

SEQ ID NO: 489034 - protein, 310 aa, unidentified
MKEELVYVGVDIAKTYLDAAIGNEKRRFANDALGHRELIKWVKQLSAPLVQVICESSGGYERALVQALARARVKISLVQANRVRQFARAAGILAKTDRIDAEVLCEFGKVMRPQTVTAAKLEQEQLRELESQRRHLTHLLVMEQNRGARLSDASVQRLHRSLINQIKKQIDQLDLFIKRHIDQSRELSAKAAKLTSISGVGARTAALLLAQLPELGQLNRREVAALVGVAPFNRDSGKMRGKRTIYGGRRPVRQGLYMAALVAARHNLILRNFYLRLRAAGKPAKLALTATMRKLLIVLNSALKTDLNYA

SEQ ID NO: 489035 - protein, 359 aa, unidentified
MKTQVKKIDFTGQNIYAGFDVHKNSWKVTIMAEDILYKTFTQPPNPEVLFNYLKSNFPGGNYHSAYEAGFCGYWIHDKLTSFGIKSIVVNPADIPTTDKERVQKEDKRDSRKIARSLSSGTLIPIYTPTIQTLRDRSLLRTRAMLVKDLGRYKNRIKSFLFFYGISIDEEFAEPKKHWSRRFISWLESLAIDGGSGKEALQILISECKNLRSSILKVTREIRELSKTKTYQEQAILLKTIPGIGLLTAMTILTELESIDRFTNLDKLCGYIGLVPSTKSSGDKDKTGDITPRGHSVLRSAIIESSWIARKCDPALMKSYVIYCKRMDSSKAIVKIAKKLLNRIRFVLINKKPYECLIEK

SEQ ID NO: 489036 - protein, 348 aa, unidentified
MLGTGIAGELDYKDGWRKADHTKHGVFAMDYLGLDIAKAKFDAHLLTATRKHSISLPNTETGFAQLAAWLARHRASAEAGLHACMEATGNWGLDLAAFLHAAGITVSIVNPKQIKLFGDCELSRNKTDKLDAGVIARFCCSQRPMAWAPPAAEIRELRELVRRCAALKANRTQELNRQKAGMVSPTVAASIERMLDHIEQEISQINTAIRDLIARHAALALNFTLLRSIPGIGEVTAVLVLAEIPNIAEFTPKGLGAFTGLSPQEDTSGKRRGKAGISRIGNATLRSAFYLCALTARRHNPNLAAFVKRMVEAKKPNKVILTAIARKLLVMAHAVIRTQTPFQAATAA

SEQ ID NO: 489037 - protein, 416 aa, unidentified
MTFKIVRFICGGMDVHKNLIVATIGTTDRQTLITEYIQQSFSTFYSDLIRLKEWFISHDCYDVCMESTGKYWIPIYNVLETELNICLTHPKYVKAIKGKKTDKRDSKWICDLYKCDLVKHSFIPKKEIREMREIARYRCKLVYMRSSERNRYQNCLTVSNIGLASAVSDPFGKTATNIMKELMQSEVIEDDKILKLIHKNCKDKDKILDSLQEYHIESDQRFKMDTVMNHIEYLDKQIQACEAELIKRAYPLRDYFQHITHIKGISALSAILIVSEIGTDMNQFESDKQLVNWAGLSPANNESANKKKSVRISKAGQYLKPLLVQCALSSIKDKNSYFGIKYCRIKKRRGHKKAIIAIARMMLVCIYHMILTGEEFNPCDYESLTNPKPKKEPIMTVESALQFLKDSNFDFSSIQL

SEQ ID NO: 489038 - protein, 370 aa, unidentified
MLDTTTFIGLDVHARSIKAVSLDVMTGEVRAATFGYDAGAVAGWVRSVDPRARCVYESGVTGFDLQKRLSGLGVDCAVGAVSKMIKPSADRRRKNDRNDAEFLARMLSVGNVVEVWVPDDECEAARDLTRALEDARDDLSRSKQRLSKFLLRHGLAFDERTPTGRRKGNWTRAHWSWIESIRFAEGADNEALAYYVDAVRRAAEEKARLEGLVEAEARKPRWRRRVDSLRCLKGVDTASAADLVFEAGEFSRFRNARSFAAWVGLTPSEHSSGESDRRGAITKAGNKHLRKALVEAAWHYLTCSGRPKGLARGQAPDRGARRHAAKGVRRLVERREALLARGVHGNKANVATARELACWVWAVGLMAEEA

SEQ ID NO: 489039 - protein, 347 aa, unidentified
MTTEIASLVTSVGLDIAKTWFQAHGADGEGKPVFRRKLRRDQVLRFFADLPATTIGMEACSTAHHWARQLTGLGNRVRLIPPQYVKPFVKRSKTDAADAEAICEALRRSGIRDVAVKAPEQQGSLMLHRARDLLVRQRTMLTNALRGFAAEFGLIVAQGAWNITKLRELLHGADASVLPDEARDTAQMLFGQLDELGHKVELLERRIMAWHRSNEVSRRLASIPGIGPINATLIAATVADAAQFRSGREFAAWIGLVPREHSSGGKQRLGDISKRGNPYLRRLLIVGAHAVLRWTRRGKGMQTAWLLGLIERRPANVVAVAIANKMARIAWALMARGGEYRSATVTA

SEQ ID NO: 489040 - protein, 331 aa, unidentified
MKNKELIGIDVSKKVLDVFILGVSYHFIVENNPGAYAKLLETCCLKLGCNKDHLFFCFEHTGRYSWLLSIFLSESSITFAKVPAMDIKQSRGLIRGKSDKKDAQMIANYAHRRRDELIPTLLHKPEVGQLRQLLSLRNKLLRHRTAYKNSIKDLQDYFIEGESEFIRTTQERLIEQLNGEIDNVEEQIDTIITSMPDWENNFKLMQSVKGIGPVVSRYIIIYTENFTRFTDPKKFACYCGIAPFEYSSGSSIKGKTRLHPCANKQLKSLLNIAAMGAVRLKGEYKTYYERRTAEGKNKMSTLNIIRNKLLFRLFAVVKRQTPYVDLTMFAA

SEQ ID NO: 489041 - protein, 338 aa, unidentified
MAIVMGLDQHRAQITAEWIDTETGELSRTRISPAHRTGVRRFCERFRGQELEVALEATTGWRFVAEELRRVGAVVHLAEPAETAARRGNKKRAKSDRADARHVRELLMIDRLPESSIPPDHILDLRARVRLRHTLSHQRGEWQQRIQAVLYHHGCPQRSNLMTGESLSWLAAQPLPGAAREQVTVALSMIDALDGQLAPLNKELRSYARRQPGCKVPMGQFGVGELTAVTILAELGDARRFTSSRDAVRYAGLDITVHQSDQRRAAGHLSRQGPPALRWALFEATMCAARAGSPDHEYYSQAAERLGANRARLSVARKLLKRSYHLLRELGEEALAPA

SEQ ID NO: 489042 - protein, 355 aa, unidentified
MEDTKYIGMDVHKDSISIAVLNSSGKLVMECVIETKAITILEFVHGLRGSLHLTFEEGTWAAWLYDLLKPHVAKLVVCDPRRNGYLKQGSKSDRNDARKLAELLHSNMLRPVYHGEHGVRSLKELARSYLTITKDQARVMTRVKAVYRSWAIPCVGKQVYGQRHRLEWLGKIEEPGVRRRAEFYYAELDALRSLRLVVLRELLLESKKHSVSTLLSQIPSIGPIRAALLIALLQTPDRFRTKRQLWAYSGLAIETHDSAENQYVNGQLQRSKKKQSIRGLNSNHNHDLKNIFKGASAVAAVKSGPFQRFYAAQISKGIRPEIARLSLARKIAAIILTVWKKGASFDASYLNPQTA

SEQ ID NO: 489043 - protein, 377 aa, unidentified
MKKVRFIGLDVHADTIAVAAAESSSEVRSLGIIPNRPESIRKLVKKLGPPAQLRVCYEAGPTGYVIYWQLTGLGVHCDVVAPTLVPVKAGDRVKTDRRDATKLARSYRAGDLTPVWVPDAAHEALRDLVRAREAAKKDQLRARHRLGKFLLRHGRRPTTAMTPWTQRHLTWIRQVQFDQSAQEATRLDYLHEVEHVAERIDRLARAIDQAVQTAPSSMRAVIEALQALRGIALISAVTIVTEVGELSRFTRAPQLMGYGGMGAREDSSGTRTRRGGITKTGNAHLRRIVIEAAWAYRHRPAVGGTLRKRQATLSEEVKAIGWKAQLRLHARYRKLLGRGKCQQHVVTAVGRELLGFIWAIGVAVEREQRKISPSIAA

SEQ ID NO: 489044 - protein, 430 aa, unidentified
MSKYLYSPTVRIDVSADFSMVAILAPNGDIYRKPFKVKHDVNGFNHLLKEIKKVEKEFSMKTATFMESTGMYHLSLFHFLSHNDLEVFVINPLITNSSKNKDIRKVKNDKKDAINIAKLGKFENTKAYSSFDVSIFTLKSLCRDYYKLVDTRSVYKKKLSADLRIIFPGYNAVFSDLSGITSINILKSYQTPECILGAPRDEIIALLGSSSLKNMDWCIKTYNKLIKAAENAKIIGIHSPSFSIKILGTIAIIESINDQIDILLAQINDLVKGDQLSDNFKHNINLLESIPGVGFLTAVTLMVEIGDFNGFIKPKQLVAFFGLDPSVNESGKFKSDKEKMSKLDTRFGRRALYTVALASIRTKRNGQVMNKVLLDYYQDNLKGKKKKVALVAIMHKIVNYLFAVLRDQRPYEQRIPKLHQQMYLRDKLVA

SEQ ID NO: 489045 - protein, 414 aa, unidentified
MESTVSFDQVVSRGCGIDVHQKLVVATISGEGLKKETREFGTFTRSLTELKDWLLDNGVTHVAMESTGVYWKPVYHVLEHTSIKVWIVNARHIKYVPGHKTDKRDSAWICKLLLAGLLKPSYIPPRELRELRDLTRYRTKLIQQAASEKNRINRVLEDCNIKLSSVVSSTHGAVATKLIDKLCEGRTITMDDIDAVYHKRLEASKEELYEACQGLMGEHHVYFLEMIRKNIATTEASIEDLNARIREMLSVYDNVLENLRAIPGLSKKTVEDLVAEIGLDMGAFPTEKHLASWAGMCPGNNESAGKKKSGKTTHGNKQVKSVLAEAAWAATRTKNTFYSARYHRLAARRGKKRALIAVGHSILKSVYHVLGGEEAYRELGATYVDERTEKRRRAYLKKELEKMGYDVQLLKPAG

SEQ ID NO: 489046 - protein, 411 aa, unidentified
MDRIYDNCCGIDVHKKLIVACFRKGSKQEVREFGATTRELLELADWLKDGGCEMVAMESTASYWKPLYNILESSDLNAIVVNARHMKAVPGRKTDVKDAEWIADLLQHGLLQPSYIPDKDQRELRELVRYRKSLVGERTRELNRLQKMLEGANIKLSGTVSDINGKSARSILEYLLTGKSIDGSKYDEMYEQKIIAHNLKATKEQIVDDLNGVMSPLQRRMMKELLVHLDELNIHIKNLDDEIDNFMKPEEKQASQAIQDVTGIGNTSAQAIISVIGSDMGRFPTDRHISSWAGLCPSDNESAKKRKSGKTRKGNALLRTTLITCAHAAVKNKKSYFYAQYVRISAHRGPKRAYVAVAHSMLISIYHILKDGVVFKDLGADYYNQFNKERKINAYLKKLKALGWEAPIVAA

SEQ ID NO: 489047 - protein, 343 aa, unidentified
MEYYVGLDVSLKQTSICVVDQTGSVVREGVVDSDPEAISVYVRSKAPGAVRIGLETGPTSTWLWTELKRLGLPVICIDARHAKAVLKMQINKNDRNDAIGIARIMQTGWFKEVHVKDIDSHSVRALLASRALLVKIKRDLENHVRGLLKNLGLVIGRATFNVFAARAEELIEDRPDLVAAVRPLLEARNAVEQQVSELDRKVMKLARRDAQVQRFMTVPGVGPITALAFKATIDDPARFARSRSVGAYVGLTSRRHASGEIDWSGRISKCGDAMLRSYLFEAAGVLLTRVPKWSTVKAWGMRLAKRNGLRKAKVAVARKLAVILHRMWIDGTEFNWPKKEIAA

SEQ ID NO: 489048 - protein, 344 aa, unidentified
MKITRVGLDIAKEVFQVHGVDEHGRARVCKRLSRTKVLEFFAQLPACLVGIEACGSSHYWGRELTKLGHTVKLIAAQFVVPYRKRDKNDANDAEAICEAVGRPNMRFVAIKSPEQQSVLMVHRARTLVVANRTAQVNQIRGLLGEFGLVVPKGVARLRRELPGILEDAENALTDLAREVFSGLLEQFHEFDARIAVYDRQIRALAEASEPARRLMRIEAIGPQTATALVASMGDPHVFNNGRAYAASLGITPRQRSSGGKARLGQITRQGDRYLRTLLVHGARAYLRVVDKKTDAKSAWARRLKERRHVNVAAVALAAKHARIAWAILAHGSEYRPAGPELVAA

SEQ ID NO: 489049 - protein, 359 aa, unidentified
MTANVQRKKINFKGKTVSIGIDMHKAFWSITALLEGEIVVAITLARPNYDSFKKILTQFEGNDVKIVYEAGPGGFDLYDKLTDDGIECIVTPPSLIPTESGNKVKTDKKDSYKLAKLLESNMLKKVWVLSPEQRAHRQLVRTRRQIVNHRSDVMRQIKSMLLFHGIEVPFPSRQQWSVRFIQWLHELDCGDEYLTTSLKALVQLFDYLSREKKRLTHEVLELARKDSYASRVKLLKTIPGIGALSALEILVEIQDISRFKTADELAAYLGLTPSQHSSGEHIRMGHITHMGNSRARTTLIECSWILIHKDPRMRQKYENISYRQGGKKAIVGVARSLSACIRRILLDQVAYKIDFRKAV

SEQ ID NO: 489050 - protein, 404 aa, unidentified
MQVGWDWASETHDVTVMDNAGQVVDRWSLTHDEVGLDQALGRLARHGRPQALPVAIETTNGVVVERLLAAGHPVVPVHPNAFNATRPRWGAARAKSDPGDSWKLADLLRTDSHRLHRLRPLDPATRHLQALARLRDDHLAAKTAATNQLGALLDAHWPGAKAIFARLDSPIALAFLERYPTPQAAQRLGEGRLAAFCRRHSYSGHRSPAALLARLRAAPVAVNSLDPKVLAACVGAQVQLLRALLASIADLERALLAALGAHPKTAVLAAMPRIGQVNLAQILAQIGPILDRANDPEHAAAEAGASPVTKQSGKATSVHFRWAANTRARDALATFADNSHHASPWAAALYRQARRRGKRHPQAVRILMRAWLRVMWACWHADTAYVVNHHGAERRLADQATAQG

SEQ ID NO: 489051 - protein, 357 aa, unidentified
MKYVGIDLHKQTISVCVVNEAREVLARRRFRCAEPESIRAYFAQLGPFRFVVEATASYEWLFQLLEPLAERGVLAHPKKMRVIAESFRKSDKLDAQVLAEFLADGRILASYRPTPRQRDHRRLLRHRVTVQRRIGGIKCRIRNVLADHNADIANLFTRQGLAYLASVSLSKAERFVVDGLVDEFTFQRGRLAAADRAIDDFAKTATEREREARLLLRSIPGVGRITAEVVLSELADPSRFRSQKAVVAYSGLSPGQRESGGKRHELHIEKEGSKQLRWILVEAAWRLRRRSTRWALIYEQLRIKLHSKKKAIVAVARRLLCLMKAILDSGRPYDPCHPATGSGNSRDVAGTAAASSS

SEQ ID NO: 489052 - protein, 338 aa, unidentified
MDHIGFDLGKVNSQLCIITAEGELIERRISTSRDSLTKLLGSRPPAHILIEAATESEWVARHLEGLGHEVVVADPNFAPMYATRSRRVKTDKRDARTLAEACRLGAYRPAHRTSDQQRHIRAKLAVREALVRTRAKYISLSRALLRRDGLRIAPGTARCFSLRLAELSLAVELRAELTPLLTLLEGLNEQIKQADEALSQMVIKDPLIKRLTTVPGVGPVTATCFVATLDDVRRFPDAKQARAYLGLVPTEYSSGERQQRGRINKAGPNRARYLLVEAAWSILRRRSPATADLYRWATAIRERRGTKIAVVALARKLAGILFAMWRDATELQTVCAPT

SEQ ID NO: 489053 - protein, 412 aa, unidentified
MNLVYERCAGLDVHKKTVVVCANIPDATGQRRKERQTFSTMTPDLLRLRLWLKGLGVTHVAMESTASYWKPIFNVLEGHVEVLIVNAQHLKAVPGRKTDVKDAEWIADLLQHGLLRPSFVPPAWQREVRELTRYRMTLSQERSRLINRLQKTLEDANIKLASVASDVMGVSARDMLSALLAGTVDSAVLAELARGRMRSKRDLLAQALQGQFKSYHRFLIAEQLAAIDTLDEAIGRMSTEIGGRLHPYEHQIQRLSTIPGIKRRLAEVILAEIGPDMSRFPSARHLASWAGMCPGNHESGGKRLSGKTCKGSPWLRSALVEAAHAAIHAKNSYLSAQYQRLVVRRGGKKATIAVGHTLLVIIYHLLSEDKDYQELGGNYFDEWDRQAVQKRLVHRLEKLGYQVKLEPTSPAA

SEQ ID NO: 489054 - protein, 332 aa, unidentified
MYHYIGIDVSKATLQVYIPIKDENISIENTQRAIKSLYGKLKKYYKNEYQNLVFIFESTGSYSSLLKQFCSEHNIYAYIINPRQSANFAKALDNRNKSDIIDAKMLYRFHILLNDTDITIPIIDHDKEAIGEALSYYQLIVKQRTALTNHLEAVKAKQSNGFIVKKLQQDIKRYQKQEAELLSQIKQIILSNDALHDKFNVIKTIKGIGDLSAMVLIHLFISYPEANRQEITALSGLDCIETSSGTSLQKKTKISKRGNALYRGMLFMPVMASLQHNPYIKAFYDRLKEKGKHSNAAQIAVMRKMILIAHSLYKSGQPFNPEFYEKRIGWNQ

SEQ ID NO: 489055 - protein, 460 aa, unidentified
MESYYMGIDISKGYADFVILDAKKNVVEPNFQLDDTFSSHCKLFEILKRFFDHHCESVIFAAVESTGGYENNWLHSLNGFHGSLNIRSARLNPLGVWANSKASLRRVITDKISARDVAEYLIAHPEKVTYQQEDSLASLRRQWGFVRLLVKQKTQILNQFESLLYTANPELITYCKSGVPAWLLKLLKQYPTAAKLAKAKASSVARTPYVTADRAKKLVDQAKKSIASATDETTGKLVSAMAEQIIRMKETIRIQTQQMVKQCAIPEIALLKTFPGISDASAIGLMLEIQSVKRFSSVKKLAAFFGLHPAFKTSGDGTSSVRMSKQGRKEPRKILFMVAMVSLTANPHIREIYEAHTEKGMKKMAAIGLCMHKILRIIYGMLKNNQAYDSQVDQENRKNRKNRTTREATHTAKNENRRYEMFNQQAPISRRQNNKRKEWEQSQGDNITQCGIDVSTPSAA

SEQ ID NO: 489056 - protein, 418 aa, unidentified
MKVVYPICCGVDVHKTFLVATIITSQGIIPHYSKKRFSTFNKSILQFKQWLIENNCFDVCMESTGKYWVPIFNLLEDTIRTTVANPKWVRAVKGNKDDTKDSKWIGDLFRLGLVPGSYIPPKPIRILREYTRYRFKLVSCRSSEKNRFQNAFTICNVALDAVVSDMFGKSASSITDYLISSDSFNPEYCSSLLQRSLKKKAVTVVESIEGYQMTKEQKERIVLVRSHLEFIEQSIAKLDKKLDKLIEPYESAITLLCTIPGVDRASAITIISEIGTDMSQFANSKRLCCWAGLTPGNNESAGKKKSVRITRAGVYLKPALVQVAHAAVKSNISPYYRVKYERISKRRGKKRAIIAIARMILTAIYNMFVTGEEFNPSDLYKIDMPHEMVEKQKEKAVKQAAKLLISLGLIKETDISMV

SEQ ID NO: 489057 - protein, 322 aa, unidentified
MHAFHLGIDVAKAKLDCALRLPDGKFFHKVVENKQTAFTQLLTFLGKHHAQGVHVCMEATGIYWEAIAEFLAAREGFTVSVMNPAQIQAFAASRLTRTKTDKVDAKLIAAFCAERRPEPWQAPSAPERNLRALVLRLENLQAIRIQESNRFEVARECVKDDIHEHLQWLDKKIEALIKDIRQLLHNDDDLGPKQKLLISIPGSGERTVAILLAYYAHPERFHNARQAAAFAGTDPRQHDSGSSVHGKPRLSKIGHAFLRKALYMPAMATLYKTAWGQRFRQRLAAAGKAPKLIIGAMMRKLIHVAFGVLKSGKPFDPARHGV

SEQ ID NO: 489058 - protein, 347 aa, unidentified
MTIMVDTQRALTGGVDTHADVHVAAVIDPDGGLLGVESFATDLAGYKDLSGWMGTFGTIGLVGVEGTGSYGAGLARHLHREGLIVVEVDRPNRQERARQGKTDSLDAIEAARAALSGRAFGVAKSRDGNVEAIRALMVARRSAGESRTKAINQIRQLVYTAPDELRERFVGVPSWRIAEGVAILRVHADADPVRMATKSALGTLGRRAVALGEEGKRLDVLIARLVDKVAPELVELVGFGPHTVALLLIAAGDNPSRLRSEATWAKLCGVAPLEASSGKVTRHRLNRGGDRQANHALWRIVLTRMACHEETKVYVARRTAEGKSKREIMRILKRYVAREVYHNLPRD

SEQ ID NO: 489059 - protein, 312 aa, unidentified
MTEIICGVDVSSETLDARIGRDGAERRFPAMPEGIEALATFCREHRVGLVVMEATGGYEKLVHALLWSHGVPAAIVNPRAVRRFAEAMGFLEKTDRIDAGVIAWYADTKRIVAQEPASESQEHLKALVTRLRQLTELRTMQSNQRRLIGDPDVNGLFSEMMALIARQTRELETKIAALIDSDPVWRKLDESFRSIKGVADRTVARIMAEMPEIGTLSNKAVSKLAGLAPLAKDSGKSQGKRGIHGGRANLRNILFVIAETVRRHNPVFAAFHKRLTDAGKPKKVIRVALAHKLLVQLNAKARDARKELAIAA

SEQ ID NO: 489060 - protein, 319 aa, unidentified
MRMHPVLNVGVDVAKDAVVVACAQRSFPVKSVPNQRAPLRAWLKTLPNGSRIGLESTGAYHELLADLAHTHGHTVFLLNPLDTRHYAKAMGTRAKTDRVDAELIARLIMQEHTRLRAYTPPTANQRKLDRLIRRRAKIVAIKGTLKMTRRHLGGFAAELKAVVGKLEALLAKIEATMNAIAACSPQHQEAQQRGETIVGVGPVVGISLTNTLERVPFRKADAFVAFIGFDPRANDSGRKTGRRRLSKRGPAELRRLLYNAAMSAITTKVWKPIYEHYRTRGWSTTASLVIIARKIARAAWSIHHYRTTFHPERITKGLT

SEQ ID NO: 489061 - protein, 326 aa, unidentified
MSNHTKENTTPRESNEPHFVGIDVAKDELVVHVLPTNQQLTVPNSTEGIKELVKQLKEIEPKQIVLEATGGLERELLTNLVAKGFATVVINPRQARDLAKGLGELAKTDAVDARILARFAQLQCLTVRPLPSLETQEMNDLVTRRQQLIAMRTMETNRLHAAKQKAIKKSIEKVIKAFNEQIDGIDARIEEMIGSNPDWNAKDKLLQSVPGVGAKTSQVLISALPELGTLNRQEIAALVGVAPFCQDSGKRSGARCIKGGRADVRSALYMATLSAIRFNKTFKEFYERLIANGKKFKVAMVAVMRKMITVLNVMVKTGNAWKEKEP

SEQ ID NO: 489062 - protein, 360 aa, unidentified
MHATTVAVDLAKSVFQIAVADEHWRVVETQRLTRTQFERWFLNREVGLVVMEACGSAHHWARWLNSLGVEVRLLPAQYVRAYVRRNKTDATDAAALLEACRCADLRPVRVKSVEQQALQGLHRIRSLWMGTRTSRINALRGFCREFGLAIPQGARTGLEVLGRVLADPNTAVPGLIRDSAKLLLEEVRLLEARIALVERELANAAKHSPACTLLLSVPGIGLLTATAMVAATSGDVTHFQDARHFASWFGLTPREFSSGGTRHLGRISKKGDRYLRMLLTHGARSVLRAASAAVEKGKVSSGVRHWALQVQARSNHNKATCALANKLARICYATLRDHETFDEKAALERKTQRQSFAMPT

SEQ ID NO: 489063 - protein, 389 aa, unidentified
MIILGVDPHKSSHTAAAVQARDTTTLDTITISSATSEYRRLLRWAQRWNERYWAIENADGLGHNLTQWLISHGERVVDVPPTATAKIRALSRGGRRKNDPIDAAAAACVAAIRGESRPVVVEGHTDALALLDERRHTLNRHRTRLLNQLHALLRELIPGGAKRSLSATAAESILRTVTAATIADRVRIQLANDLIDDIRRYDQQLTDNTAQMKQLLDEHTTSLPDLVGVGPVLAARVLASTRDPRRFPTAVAYANYTGTAPVQVASGDYNRHRLSRYGNRELNSAIHSITVIQIRTRTSAGRRYYDRKRAEGKTAREATRCLKRQIATILWRTMIKDAQARENTADPLRGSVLPGLRSSSGRCRTVRPDRGPAGSSCARTPREIDRLCC

SEQ ID NO: 489064 - protein, 441 aa, unidentified
MAKPKNKLSIVNKNTVGIDIGSRKIFVAIADKPVISFGTFTDDYLQCVNYLKENNISSVAMEATGVYWISLYDLLDQSGFDVFLVKPSQAKAIPGRKTDVADCQWIQQLHSYGLLRSSFIPPQHIRTLRTFVRQRRVNLQVASDHIRRAHKALELMNIKLQNVITQINGKSGMAVLNAIIAGNHNPEKLAALCEESILKKKKEKVILSLKGNYSDENIFLLKQAVEAYNFYMRQVDECDKQIDKQLSLLTHDLPAPQKINKPKVIRHHKPNIQDLHIKLVKLTGGKDPSQITGLTDSTMLQIISEVGTDLSRFPTEKHFTSWLGLAPNSYQSGLTNKKKKFKRHTSAGQIFRLAAQAIAQSKNLALTSFYHRMKSRKGSLGAIKATARKIAVIFYNVMTKGIDFVEEGIKQYEQKIKERQMKYLQKQAKRFGLALTPQLQE

SEQ ID NO: 489065 - protein, 313 aa, unidentified
MTLPVFVGIDVAKASLDIAARPSGERWQLANEEAAYPLLLARLRPLAPTLVVLEATGGFEHAVVAALAAAGLPVVVANPRQVRDFARATGQLAKTDAIDAQILALFAERVRPTPRPLPDAAAQALDAVLTRRRQLLEMLTAERNRLGLARPPVARRIRTHIRWLERELADVDRDLGRLIEQSPLWRTQDDLLQSVPGVGPVVSRTLLGELPELGRLTHKQIAALVGVAPLARDSGTLRGRRLVWGGRASVRAVLYMGALVATRWNPVIRAFYQRLRAAGKPPKVALVACMRKLLIILNAMARTGTSWRHAIIA

SEQ ID NO: 489066 - protein, 419 aa, unidentified
MDVLVDRCAGLDVHKDTVMAVVRRPTPDGTGRTQEVRQYRTFTAALRELRPWLLAERVTQVAMEATGSYWKPVWHVLEAEAGYELLLCNPRHVKNLPGRKTDVSDAAWLAQLLECGLLRGSFVPSPVMARLRDLTRYEKKLTEERTREIQRVQRVLEDAGIKLDSVASDLRRDGQVRAGDARGADRRRARPGGAGRLRADPDAAEDSRAAAGARRRVERAPRAAAAHAAGPHRPPHRCDRAARCAGGGRGRPFSTSVDLLRTIPGLGPRTAWVFLAGAGADMSRFPTAAHLASWAGLCPGNHESAGKRPSGRARKGDTALRTAMVEAAWAATRARTTYLGAQYQRFRRRFGRGGETKAIFAVAHTMLVMAWHVLAAQQPYEELGVDYFTRRQDPAAHARRLAREIEKLGFDVTLQPHAA

SEQ ID NO: 489067 - protein, 408 aa, unidentified
MNAVGIDVSKGKSMVAALRPMGEVALLPQEFLHTEVGLEQMAYAIIALGENTRVIMEATGRYHEPVAAALHEYGIYVCVLNPLFIKQSGGGSIRKVKTDKADAMKIAKYGLDNWVDLREYTPMDTVRQQLKLCSRQYNLYMKTVVSLQNNLISLTDKTFPGVNELFSSPERADGHQKWVDFVMTFYHCDCICCVSEKAFTERYQKWCKRKGYHFSAEKALDVYAGSGGHITTLPKNDNTKLLIATAAQQLLSGKMTLAALRAEMTRLAKQLPEYDTVRAMYGVGETTAAQLMAEIGDVRRFPRRSSIVGFAGVDPAVDQSGKHSAKSVPTTKRGSPHLRKTLYQIICTYLRKAPADEPVYQFLDKKRAEGKPYFVYMTAAQNKFLRIYYARVKECLEAFDAQQDTSQR

SEQ ID NO: 489068 - protein, 381 aa, unidentified
MTTAATHNEPGKTTEATLFVAFELSEKIWKLGFTTGHGQKPRERSMPARDHERVLDEIAQAKRRLGLPETAPVVSCYEAGREGFWLHRFLLAQGMTNHVVDSSAIEVNRRRRRAKSDGLDVRKLLSMLMRYAQGERQVWQVVKVPSVEAEDQRHLHRDLETLKRERASTTTRIKGLLSTQGIQVTTLTKLPEQLEALRLWDGSPIPPGLRDRILRVYAHHTFLSQQIAEIEAERRAQLQTSSDASLDKIRQLMQLKGIGINGAWLLVMEFFGWRAFKNRREVGGVAGFTPTPYQSGESAREQGITKSGNRHVRWMTTELAWSWLRFQPDSALSVWFRARFGGGGKRLRRIGIVAVARKLLIALWRFLETGVLPEGAILKAA

SEQ ID NO: 489069 - protein, 343 aa, unidentified
MQTVTTIGFDIAKSVFQVHGVDSAGQVLIRRQLKRRAVLAFFQKLPPCLVGIEACASSHHWSRELQALGHTVRLMPPAYVKPYVKRQKNDMADAEAICEAVTRANMRFVPTKTPVQQSCLMLHRTRHLFIRQQTAVINSIRAHLAEFGIVAPVGRKGVEELLRIVADPSDKRVPEAARVCLAALGTQLLSLKKQIVEFDRMITAWHRSNETSKRLRYIPGVGPILATALVASVADPRTFRSGRNFSAWIGLVPKQHSSGGKDRLGSISKQGDRYLRSLFVAGALSVIRYAKIHGTKHRPWLTALLARRPTKVAAIALANKLARMAWAMMAKGERYKNPAALSA

SEQ ID NO: 489070 - protein, 408 aa, unidentified
MNDSRKRYIGLDVHKHYLIALGVDADLNVVLPARRVELSRLEGWMKKSLTKQDEVVLEMTTNTWQLYDELIQYAGKVTVVHPPHVALITRSQVMNDKIAASILARLLAKGLLVGIWVPPQEIRELRGLVAQRQKMVRLATQAKNRLHAVIQRHHLVPPRGNPFGANNKEWWQSLSLGKLEKLNLQSDLETLQFAEKQVKDMTEIMEGMAAEQEEIGRLLHLGGFGGVTAVTVWAAIGDIRRFAEPKYLVGYAGLGTRVHDSGMTSRSGKITKAGRRDLRTALIEAANVAANSHPHWKAELARLEPRLGRNKAIVAIARKLLIAVWFVLQGKTDKYAEPEAVAQKMLKFAYAVGKANRPKGQTAAQFARIRMDALGVGKALTSIPWGSKKPIPLPPSKLIKGSDVPNTK

SEQ ID NO: 489071 - protein, 407 aa, unidentified
MDVIYPRCAGLDVHKQTVVACARIATEGPASLQVRTFETTTGGLLALADWLESFGVQHVAMEATGVYWKPVWHILEGHFELVLANAAHVKNVPGRKTDVNDAMWLADLLAHGLIRASFVPPTPVQELRTLTRTRKQFVRERASHVQRIEKVLEDANLKLSVVLSDILGKAGRAVLQAIIDGQSKPEQLAACVTTRVKASPEELLEALRGRIRKHHRFMLKLHLGHIDALDKAIADIEKEVGLGLEPFRAAAKLLSTMPGISTVAADALIAEIGIDMGRFATPGHLLSWACLCPRNDESAGKRRSTRLRRGGKWLKTTLVQAAWAAVRVKGGYLQAQFHRIRARRGAKKAIIAVAASMLTAAWHMLTDGTEWHDLGAAHFDRADATKTANRLIRRLQQIGYQVTAVPG

SEQ ID NO: 489072 - protein, 415 aa, unidentified
MDVLYERCCGLDIHKKLVVACMITPSSKGTPRKEVRSFGTMTADLLVLSDWLEEQGATHVAMESTGVYWKPLFNLLENRFTLVLANAQHIKQVPGRKTDVKDCEWIADLLRHGLLRPSFVPDRPQRELRELTRFRTTLVRERAREVNRIQKTLEGANVKLGDVASDVLGTSGRAILNALVAGTTDTARLADLAHGRLRDKHASLERAVDARMGAHQRFLLAEQLAHYDALNQSIERVSAEIAERVRLFEPIIERMDAIPGIGRRVAEILVAEVGTDMSRFPSAAHLASWAGICPGNNESAGKRKSGRIRRGSPWLRTALVEAAHAAVRAKNTYLSAQFRRLAARRGAKKASVAVAHSILVIVWHLLQHDCQYVDLGTNYFDEHDRQQVARRLVKRLEGLGYRVALDSLPASASAA

SEQ ID NO: 489073 - protein, 336 aa, unidentified
MVVGVDTHKDSHSAAAVDGQGRVRATLEVAASGSGYRSLLRWAARLPGSRCWAVEGTGSYGAGLASYLAAQGELVLEGDRPKRRARGAAGKSDQLDAIRVALEALSREHHAQPRSRGQREAIRVLLLARQGAVSGYKQGLNQLYALVVTAPEPLRERLIRLHGERLVSACSRLRPQGDLETSVTATTLHAVARRLGELRAEAAAYERQLAGLVASTAPDLLAEPGVGTLVGAQLLVSWSHAGRIRNEDAFAALAGVAPVPASSGRVVRHRLNRQGDRQLNRALHVVALTRSTCHRPTQAYIARRRGEGKSSREIRRCLKRYLSRRFFRLLQRLDKT

SEQ ID NO: 489074 - protein, 457 aa, unidentified
MRQRGRRTKGMEEAHPFGGMSQVNKDAAGVDIGAEEIIACVSGDEATQIVKAFGNYTVDLQNIGKWLQEHHVKTVAMESTGVYWIPLFEELERQGYECLLISSRSLRRVPGRKSDITDAQWIQTLHSYGLLESSFRPQAELVALRTLLRHRGQLLEHRALHIQHIQKALLQMNVQLSQALSDVTGETGLAIIRAIVAGEREPEKLAAMRDRKCKKSEEEIGKALTGTWREEHLFIVKQSLEMYDFYTEQVEECDAEIGRMYALIRRDWEGGELQPLPQKKRNAHSKNAPENKEEIRKHLKRISGVDISVVDGFGVSLAQTVIMEVGTEMSKFPSEKHFCSWLGLAPKHEISGAKVLRNKTMKTKNRAGQAFRMAAQSVKRADCVFGSLYRRLKSRLDKAQATVATAHAIARVVYRMLKYQVEYEKINVEEYEEKYKQAQIKYMKKKAEKFGFQLVPT

SEQ ID NO: 489075 - protein, 464 aa, unidentified
MTDKKLWRNRKERKEWTQRLQSEDPGLDVVHPHAAGIDVGNGAHYVAVRPDCDPEPVRRFECFTADLHSLADWLKRCGVKTVAMQSTGVYWIPIYEILEERGIQVYLVNARHTKNLPGRKSDVQESQWLLKLHTYGLLNNSFQPSSEIRVLRTYWRQRGEHVHGAATCVQRMQKALTQMNVQLANVISDVSGLTGQTIVRSIVAGEHDPWKLAELSDPRIHASREEVAKSLEGNWRPELLFVLQQEVAMYDTYQRRIAECDQQLQKHLASFADTVPLQPTEAEPKRKKTKPAKNAPRFELRTELQRITGVDLTRIDGIDVMVAQTLISEVGLDMSRWKTEAHFSSWLGLCPDNRTSGDKVLARGTRRVVNRAATALRMAAVTLMRSRTYLGAQYRRLRTKLGAPKAITAMAHRLARLVYRMLKYGQRYVDKGAEYYEHKYRRQQIEFLRKKAANLGLQITLAQT

SEQ ID NO: 489076 - protein, 346 aa, unidentified
MENIALDVHKKYTWARVEDSEGRELYASRLAHSRGCIKNFIGRWTPGCSVAVETVGNWYWVVDEIEAGGGKPQLVNARLAKLMMGNVNKSDKLDAKGMNRLQRTGTLPTVWVASSAVRDARELPRTRMVLSRQRTQLKNRVHATLSKYGHVVDEVSDAFGKRGREIINELLTKLPPHTGQALQHVLDQLDEVVKNLQAIERDMIGAFSPCSQTALLKSLPGVGEILAVVIWTEIGIIERFNRAEQLASYSGLVAREHSSGGTFYRGAVRRDVNVYLKWAFVEAANSSILNRERSNYQHIDRLYQRIKGRRGHQRAKVAVARHLAEATFWMLKKGEPYREPMLSTQR

SEQ ID NO: 489077 - protein, 371 aa, unidentified
MEHNNIFIGMDVHKKSIDIAIAYEGRDGQVVHYGKIDGTLAALDKVVRKLVSKGGCLHFAYEAGPCGYQIYRYLTAKGFDCMVVAPSMIPKQSGSRIKNDRRDALMLARLHRSGDLTAVYVPAAEDEAMRDLTRAREDAKEDEKKSKQRLSAFLLRSGYRYSGRTPWTLAHRRWLADIKMPHASQQIVLQEYIDAYEQCKLRVERITEQIRTLLPQWRMHPVVQALQSLRGVSLIVAATTVAEIGSFKRFGHPEQLMQYLGLMPSEHSSGQRIKRGPITKTGNRHVRRMLTEASWAYRLRARISRPLLKRQEDLPQSIRDIAWKAQVRLCARYRHFWAKGKAKQVIITIIARELCGFIWAIAVEAESAITN

SEQ ID NO: 489078 - protein, 323 aa, unidentified
MHPVPVFVGIDVSKARLDVAVSGVDEAWHVANDADGLVALVARLREMEPALVVMEATGGHEVPAAAALAAAEVPVVIANPRQVRDFAKSTGQLAKTDAIDARILALFAERVRPRVRTLPDEDARALDAIVGRRRQVIDMITAEKNRLGLAQPAVRKNIEEHIRWLDRQLDRVDEDLDRRIRKSPVWMAKHNLLRDVPGVGPNLARTLIAELPELGRLSNKQIAALVGVAPLNRDSGLFRGKRMVWGGRASVRAALYMSILSATKWNPVIRVFYQRLRAQGKPPKVAMVACMRKLLTILNAMVRDGREWDPSIPLDQLRIQHSC

SEQ ID NO: 489079 - protein, 411 aa, unidentified
MELLVARCAGLDVAKDEVVACVRTPDGRGGRAQEVRTFPTFTSGLEALAGWLAAEGVTQVVMEATGQYWKPIWYVLEEAGFELLLVNARQVKILPGRKTDVCDAAWLAELLEHGLLRGSFVPPAPIRELRDLTRYRKRLIQAHASEGQRIQKTLEDAGIKLDSVATDVLGASGRAMLTALINGERDPQVLAELAKGRLRAKLPQLRQALRGRFGDHHALLVRLALAHLEHLEGTIATLDTEVDRVLAPFARARDQLATITGVGKRAAETIIAEIGTDMTVFPTAGHLASWAGRCPGNNRTGGKRRSGKPTKGNRWLGEVLIECAWAAARSRDSYLSAQYWRLARRIGKKKAAVAVGHSILVIAWHLLTDDCDYADLGGDYFVRRDTDRQRQRAVAQLQALGYRVTLEPPAA

SEQ ID NO: 489080 - protein, 373 aa, unidentified
MHRAGLALASMSQNNNFTTTIYAGIDVAKATLELSLSGVCHSVDNDAKGHARILKLLSAAETARLGTKVHLILEATAGYEAALVRVLHGAGCALSVIQPSRGRHFAHAKNKRAKTDPIDAGVLAAFGEAIRPQPTAPPSAAQSRLAELVGRRAQLVETRTAELNRAAHYSDKLLCKQSAQLLALLDRQVAACNRAIAAQIEADEMMKARSERLQQVPGVGPVVAAVLQAEMPELGTLSEREAAALAGLAPYSCDSGPHKGTRRVWGGRAPVRCILYMAAMSAVRHDPILRVFHAKLLGAGKKPMLALTAVMRKLVVLLNRMLKNPQFKLTGAEDISSAQIAPGERLRLNKLADSWTAEPPFVEARAADSAKSK

SEQ ID NO: 489081 - protein, 356 aa, unidentified
MNTCVRSQTLYVGVDVHKETHTAVGVSPFGEKLFEVRIGNYQKDFAALVSQTETSKGILSPYFGLEDCHGYGERLAEYLVGKYPVIHVPSVMVDRLRKKATHPEKTDSLDAYGVAKVMMNDMDSLPIYTLTEEVKRTKQIREISLDREYLVLERARLKNQLHSLLYRIWNVGYQTKFKSPFNLKSLRYWLRARSVCDPFLLRTMKRKVKRLVDLHYEIIELEKEMATLLETGGYTLQTASGCGPAIASAIIGEVGDIARFKSPASLAKYAGCAPRECSSGKTKHHRKTWAGNRRLNCAFHRMALSQISRMGNEKARAYFARKVSEGKSKSQALVCLRRQMINLAWCMLKNKTVYHD

SEQ ID NO: 489082 - protein, 320 aa, unidentified
MQSVCGIDVSKDRLDIMVLPEQQCFSVRNDAAGWAELVERLRGFSISAIGLEASGGYERGAMRALLAAGMPARQINPFKLRQFARASGVLAKNDPLDARMIASFVAIMPTQQAQPRAPAIDRLTEILAVRRQISAEKVAAENASRLLEDVMLQRLSRRRIARLEADIDMLDRHLTEIVGTDAALSYRYRLLTSMPGVGLVLACTLIALLPELGRMSRKQVAALVGVAPYAFESGKFKGRRCIWGGRAPVRNVLYMAAMSASNWNPVFKAFHDRLKAAGKLPKVVIVAIMRKMITALNAMVRDDVVWADHLSGRHSVPTAR

SEQ ID NO: 489083 - protein, 343 aa, unidentified
MKLSRVGVDLAKNVYQLHGVDRFGKTVWKRRLKRHQWFEALLDKIEPGCEIGMEACASAHHWGRELQSRGYTVKLMPPQYVKPYVKSNKNDARDAEAICEAMSRPNMRFVTVKTVEQQNIQATHRIRSELMTQRTAKANQIRGLVAEYGLVAPKQLSSLRAAIPCWLEDAENGLTGDFRSLLQGVWNDLLMLDDRLCEMDKLIKRLAENNEACVRLQQLRGYGPMISTALIATVGDATPYQKSRQMAAAIGITPTQHSSGDRDRLLGISKRGDVYLRTLMIHGARSVVAHAKHKDDSLSRWVTGIATKRHPNVAAVALANKTARMAWAMLRNETDYDPDFAIR

SEQ ID NO: 489084 - protein, 450 aa, unidentified
MARKRKSVDNLPVIEPNAAGADVGATQIFVAVPSDRDAEPVRCFDTFTADLEALADWLQRCGIRTLAMESTGVYWIPLFQILEARGIKVCLVNARHVKNVPGRKSDVADCQWLQFLHSVGLLRSSFRPDQEICALRSLWRHRDNLIQMASALLQHMQKALDQMNLQLHHVISDIAGTTGLAIIDAILAGERDPKKLAGLRDWRIRATEETIMKSLVGDYREEHLFVLRQSLTAYRHYQKLIAEVDVKVQQLLGALPAQIDPAEQPIPAARNPRKSPWRNEPTGLREELYRAFGVDLTQVPGIDSLTAQRLLTEIGPNLSAFPTMGEFASWLRLCPNKRVTAGKVLSSRTGPTKNRVAVALRMAAQALHHSQTFLGEYYRRMRARLGAPKAITAAAHKLARIVYHLLTTRQPYDESIFTQEETRFRKRKERRLRAQARELGFELVLVDVVH

SEQ ID NO: 489085 - protein, 347 aa, unidentified
MTTVEAVRGVTGGVDTHRDVHVAAALDPLGGLLGSESFSVDPAGYKALLKWLHSFGDVTKIGVEGTGSYGAGLARHLRRSGVTVIEVDRPNRDERRRSGKSDPLDAVEAARAALSGRATGSPKSRDGAVEAIRVLVVAKRSARQARVKALIQMRHLGYSAPDQLRCRLKGLSVPALVAEGVKLRPTRSADTVTAATKASLSSLANRISSLDEELAELDERIEALLVATVPELLDRFGVGPDTAAALVMAAGDNPERLHSEAAWAHLCGVSPIPTGSGQKSGKVRHHQGGDRQANSALWRIVMVRIAHDPDTRAYFDRRVKEGRTKHEVIRILKRYVAREVYKYLPRG

SEQ ID NO: 489086 - protein, 322 aa, unidentified
MSTPTVTVGVDIAKAKFDAARLGADGKYKHKKFDNAPEGFAAFLVWLVAFGGDRPLVCMEATGAYSIPLAEYLAAQGWPVSVVNPAKISHYGKSETSRAKTDKADAKLIARYAREKKPRLWTPPPPEIRELQLLLRRIEDLAEMRQMEQNRLDTADDAVAGSIKAVLASLDQELEATQKRIRQHFDGHPGLKCRRDLLDTIPGVGQATAAQLLVALSEHYGFDNAKQAAAHAGLAPHIRESGKWKGQTRLSKTGDPMLRKALYMPAVVAWRHNPAIRAFCERLKAAGKNGKAVVCAAMRKLIHIAFAILKSGKPFDPNFALA

SEQ ID NO: 489087 - protein, 339 aa, unidentified
MKKVSTVVSKQGRNFSQPASPHEARALREVFGGVPRSRIALETGTHSPWISRLFSELGHEVIVAHARKVRMMGENRKKDDRLDAQTLARLARIDPQLLCPVRHRSAQAQADLTVIRARAGLVRARTGLVNTARSLAKSYGERLRGCNVRNMNPEKAERLSPELQRALEPLLSAIAELSDRICQYNQRIEALAEESYPRVALLKQIKGVGALIALTFLPTLEDPHRFRKSRDVGCYLGLQPGRRNSGQSEPQMHISKEGDPYLRTLLVQGAQHILGPFGIDCDLRRWGLKLAERGGKSGKERAIIATTRKLAVLLHHLWVSGEVYEPLHNREQVALPAAA

SEQ ID NO: 489088 - protein, 523 aa, unidentified
MATRFKSRTRRSRRYLTIVKPSGSLHPRVQKVGPEHFGIVAVDCAKARSKWMLADFYGRILIPPTVVEHNKQGFDSAIAEIRRAMESHSLGDMLVAIERTGIYHLPVKRAFSSQRFDTRIVHPLTTKQYRLPADPGNKTDDTDLFAIHRATTNGFGLIELPLDEIHGPLRLLARYRRSLVRKNASLRNQIIALLDVLLPGYTSLFDDVFDNQAALSIARSLKSASKVRSLGSEGLAQILKELKVRYQRCTLKKILDWANGIESTTEYFEMYHTILVHMDDERCARLQQIAKLEQEMASFLVRTAYVVLLSIPGLNIVTAAEFAGEMGPIVNYANDTAITGRAGIYPSRYQSDKVDRSDGPLVRRANRKLRGVIMMIADNLLSCNRFFQALKKPWVAAGMTEQAMSVRVAKRFCRIAYQMVAGGQVFRHPSCQKRDAILRKLSIFHAEHGSSMAQVMTDLQAATDHIPKSEHAPEAKSLYEELQPSNRRQQCGPRRLGEILPVVLAKLGVNAVDLSLKGENDLT

SEQ ID NO: 489089 - protein, 330 aa, unidentified
MEEHYIGVDLHKAFFQACAVDGFGGRCWEDRFPTTPAGVRAFVTRTRPEVTVGVEASGPTWHFVDQLHGQVARVVVVDAAKTRWKAGYPAKTDRLDARRLADALRRDSVVTIYYPPPAIRELRELCRYRRSLVRTATSLKHRLQALLLRQGVVGPDVSSLWQGRGARWLAALTLPGRAGESLTGLRHVLAEVAGQVAVVEAEVGREAAADPVASALQTLPGIGPVLGLTIRAEIGDIARFPDPPHLASYAGVVPRVRQSGLRHARPGPITKQGSPWLRWALIEAAIHGPNRADAVGRWGQQLARQKGALKARVAMARALCEEIFTVWPRR

SEQ ID NO: 489090 - protein, 327 aa, unidentified
MTTQTTAPDHFIGCDVGKASIVVFDSRTNQTRTIANRPADLARFAATLDETCLAICEATGGYENALLHALSKASRAAHRADARKVKAFIRSFGILGKTDAIDARALAVYGQERHADLARWQVPDPQRERLQAMVLIRRDLIADRLAYRNRLAAPGADAVKGPLGKLLKTYDQQIAAIDRDIAALIRGHKTLAAAEKTIRCLVGIGQTTAAALLALLPELGTLNRRQVAALAGLAPHPNQSGGKDAYRRTRGGRPEVKRVLFMAAMVAAKHDPVQKAFYTRLLAQGKKPLVALTAIMRKLVVICNACCETPRPNISHNQSSGHDQSGG

SEQ ID NO: 489091 - protein, 342 aa, unidentified
MNQYAGIDVSLECSSVCVVDASGKILREARVASEPEALIAWFRTCGFELERIGLEAGPLSQWLFAAMREAGLTVELLETRHVRKAFEAMPVKSDRNDARGIAQLMRLGWFRPVHCKSMSAQETRSLLTARKLVQSKLRDVENSLRGILRGFGLKVGKTTELRFAGRIEELVAGHPHLQVIARALLSVRAVLRSEFAAFQKQTRKMAQSDARTRLLMSTPAVGPIVSLTYASAIDDPARFRSSKQAGAHFGLTPKKHQSGETDYTGRITKIGDGSVRTALYEAAHIMLTKPLKGCSQLKSWAMRIARRAGMSKAKVALARRLAVIMHRMLADGTPFNAAAAAA

SEQ ID NO: 489092 - protein, 342 aa, unidentified
MDLGDKANRICVLDADGNELEKVEISNTARAIDGYFGRYRGVLVALEAGTHSPWISRKLEDMGHRVLVGNPRRLRAIWSSPNKSDMRDAEMLARIGRFDPKLMYPIHHRSEQAHSDLELIKSRDILVRIRSQLVNHVRGAVKTTGVRIPKCSLECFHRRAAENIPQILRSAIEPLLETIEKLTGRITVYDKKIARLSKERYPETARLLQIKGVGPVTALAFVLTLEEPERFQKSRAVGAYLGLTPKRDQSGETDKQLRITKAGNTYLRQLLVNCVHYIMGPFGKECDLREYGMRIASRGGKNAKRRAVVAVARKLTILLHHLWVSGEEYIPLHKEAIKKLAA

SEQ ID NO: 489093 - protein, 353 aa, unidentified
MKWDKYIGMDVHPAMTVIAVMDAEGKVIWETMVPTEAAAVIGFLQSISGAVHVAFEETTQAEWLYDVMRFFVADVVVCDPRHNKLLMEGSKADKIDARKLADLLRTGMLRRVYHGDEGRRKLKQLMRAYETLSVDTKRTMVRIKAIYRARGIRTPGRNVYQPNQRQQWLERLTEPGLRERVSWLYEELDLLKPLRRQAKQAMLSESRKHRAVELLRTIPQLGLIRAALIVATVDTPHRFRTRRQLWSYSGLAVVTHMSSEYEMKEGRVVRTRKPIATRGLNRDCNHRMKEVFIGAATAGSRTEPYRSYLQALEHRGIRKEMARLTLARKIAAIALTIWKKGETFDPKKLNWTT

SEQ ID NO: 489094 - protein, 386 aa, unidentified
MQKLNDLSRSLTPLDPDGTLIAVIEMSLSSWLVAGIVPGVERQPLKKLAVDESTLLKLLNRWREEAEKAGRRIERIAVAFEAGRDGFWLARWLRARGMEAHVIHASSIAVSREHRRAKTDRLDTELLKRAFLGWLRGERDHCKMVAIPTTKDEDAKRPNRERESLVGEQSRIVNRMKAALVRLGIRGFNPKLKKAAGRLEDLRTPEDEPIPPNTLAELRRDMERRRLVSDQIRQIEVARLDRLEHAPGDGPHAMVRLLARVIGVGIETADMLVQEVLSRNMRDRRAVARYAGLTGSPDESGRKRREKGLARSGNARVRRGMIQLAWRFLMFQKDSALAQWFRARTENARGTRKTMIVALARKLLIALWRLVREGIVPEGIVLRPAQ

SEQ ID NO: 489095 - protein, 348 aa, unidentified
MDDITTIGLDIAKNVFQLHGVDAQGQVVLRKALRRANMIAFFTKLPPCLIGMEACSTAHHWARTLMELGHEVRLISPAYVKPFVKRHKNDAADAAAICEAVVRPSMRYVSVKSEEQQATLMLHSARELLISQRTALMNALRGHFAELGMVVAQGARNVGDLLLILERMGQGSNEKALPETMRLALQPLATALIGIEAEIAKLDKEILAIHRKDAVSLRLASIPGIGPVTASFLSASIPDPGLFEGGREFAAFLGLVPRQYSSGGKPKLGRISKMGNRHLRKLLVVGAHAALYSIKSGKTKSPLADWARALLAKKSFKLVAVALANKMARIAWAIMTRAGHYQPNLATQ

SEQ ID NO: 489096 - protein, 397 aa, unidentified
MDSLESTRLEQFRQFKSEIRGSERYLIVGLDIAKDSHHAFFGTATGHTLWKRWLFDNSREGFQKLLLQTEALQVRHGLPQVVFGLEPTANYHKPLGEYLIRGGHQVVFVSGVAVKRNRELLDGRWDKHDTKDAANVADLLSQGKCLYYEHPDPRIRDLRILLSLKKRWKRQEQSLRVRIRNGLVAQYCPELDPSFSRLIAPGKERDLLSAMQQTCSIGCATHPEVGFAAKLMVQELQQARESLKAIQERIQKICFQFPEYPYLLSIPGFGPQVSSQVLAAIGDPFRFAKGSQVLKMAGLDLSADRSGKTSAAATPVISKKGKANLRYALYQAALIASIKNPNFMAYYTGKLRGRAQEKGIQTKMRVKLAAKLLLIAWTLMKRKEPFDAKRLVPSALF

SEQ ID NO: 489097 - protein, 370 aa, unidentified
MSQSSTLFIGMDVHKDTIAVAYVAQEHGAEVTSLGTIGTRQCDIDQLSRKMQSKAKHLIFVYEAGPCGYWLYRYLSKKGYDCWVVAPSLIPKKAGDRVKTDRRDAMQLARLARSGDLTAVYVPKVQDEAIRDLTRAREDAISDLKDAKFRLKAFLLRHDIRYTGRANWGPAHLRWLSEVVCPTPTQPSVFQEYVRAVHEHTERLQRLEQELHEHVKAWRLYPVVEALQALRGVQFTVAVTLVAEMGDLTRFDTPRELMKFLGLIPSEYSSGEQRRQGSITKAGNTHARRVLVEGAWAYRYSAKVSRHLQLRLETQPKIIQDISWKAQVRLCKRYRRLVSRGKHANVVTVAIARELAGFMWAIAREVPITP

SEQ ID NO: 489098 - protein, 368 aa, unidentified
MKQITTYVGIDAHKKDLFLTMLVGTEAAPVSWTAPNEPKAVKRLVRKLERDAPGPVRVFYEAGPCGYALQRQVTTSRVSCEVVAPALIPRKPGERVKTNRRDARKLAELGRAGLLTAVQPPTPEDEAVRDLARARDDAREDLQRCRHRLGKLLLRRGLHFAGRNWTRAHRQWIESLTWAHAAEQVVVDDYLLAIDHTETRLVELDRQLAQIAEREPYREPVGWLRCFRGIDTLTAMLILAELHDFRRFASAPALMAYLGLVPGEDSSGEKHRRGPITRTGNALVRRLLVETAWHYQHRPGVGVTLTRRRKGQPSRVIAIADKAQQRLCRRFRKLAAEHKPAPKIAVAIARELAGFLWAALQPAPATVN

SEQ ID NO: 489099 - protein, 343 aa, unidentified
MQTITTIGLDIAKSVFQVHGVDATGQVVIRRQLKRRSVLTFFQKLPPCLVGIEACASSHHWSRELQALGHTVRLMPPAYVKPYVKRQKNDMADAEAICEAVTRANMRFVPTKTPEQQSCLMLHRTRHLFIRQQTAVINSIRAHLAEFGIVAPVGRKGVTELLHVVADPSDKRVPEVARACLAALGTQLLSLKQQILEFDRMILAWHRSNETSKRLHYIPGVGPMLATALVASVADPRTFRSGRNFSAWIGLVPKQHSSGGKDRLGSISKQGDRYLRSLFVAGALAVIRYAKIHGTKHRPWLTALLARRHAKVAAIALANKIARMAWAMMAKGERYKEPIALAR

SEQ ID NO: 489100 - protein, 344 aa, unidentified
MEITTIGLDLAKRVFQVHGIDAEDNVVVRKALRRGQVLPFFAKLAPCLVGIEACGTSHHWARELIKLGHEVRLMPPAYVKPYVKRGKTDAADAEAICEAVTRPTMRFVAVKSREQQAALSMHRTRDLLVKQRTQLVNMMRGLLAEFGIDIPQGLERALLMARQIVDGDVPGVPLEAAKIVSTLSQQVLDIHVRLREIDRDLLTWQRENDVARRLMTVPGIGPVGATALAAAITDPHQFRSGRQFAAWLGLTPLQNSSGGKERLGRISKMGDKYLRKLLIVGMTSLVRRAKYRPDKVDLRLADLLARKPVRVATVAMANRAARVIWAIMTRGETYRAGHVPALAA

SEQ ID NO: 489101 - protein, 461 aa, unidentified
MRSYAGVDWASEKHDVLVCDETGEELLAATFAHDETGLRSLCRALMRHDVQLVAVERPDGLLVERLLDAGLRVLALHPNQVAATRARFRAAGGKSDRFDAFVLCELARTDSHRFRVLEPDSDQTKALRALTRGREELVQARVALCNQLRAELERFWPAPIGLFSELDSQISLAFLEHYPSPFEARTLGQKRMAAFLARNRYSGSQTPARLVAKLRSAPQGRAGAGEIHARRRLVLALIAALKPIVADIKALEREIAQALECHPDGRIFRSLFRDPKSVVTAATMLAEIGDCRARYPTADTLAGDAGQAPVAVESGKRKVACFRWACNKRLRDAFCTLADSTRQWHPWAQAHYARAIADGHDHPRATRTLGRAWCRVVWRCWQDRTAYDPARHRGLQQHCLVTIPGSSGPRPDLAATQRMLGATVTDPAARRAERAALDGKPTSANPLPLFRQPMVRNRAGG

SEQ ID NO: 489102 - protein, 399 aa, unidentified
MLEQAWAGVDVGKEHHHCVVIDAEGRRLLSRRVANDEAVLLALISDVTGLAGQVGWAVDISTGEAALLLALLAAHDQPVSYLTGHQVNRAASGYRGSGKTDAKDAAIIADQARMRRDLAPIRVSEEVIVELRMLVARRRDLQSDRVRAVNRLHETLLTISPALEKALDLTNQGPLILLTGYQTPAAIGQLGVTELREWLRARKVRRAGELATRAVAAANAQQIALPGEALAAHLAVQLAEGVIALDEQIKHTDKLIEGRFHRHHAAPVILSMPGIGILLGAEFLAAIGGDTAAFATPDRLAGYAGLAPAPRDSGRISGNLYRPKRYNRQLQRVFYTSALISIRCCPESRTFYDRKRAEGKRHNQAVLALARRRVNVLWALLRDHRPYQASPSVSTAAAA

SEQ ID NO: 489103 - protein, 413 aa, unidentified
MDLLHDRCAGLDVSKKDVKACVRSPGARANQRHSEVRTFATTTNALLELRDWLIEQRVTLIAIEATGDYWRPPFYVLEDDLNIILVNPAHAKGLPGRKSDVTDSMWLAQLAECGLLKASFVPPTPIRQLRDLTRYRTTLSREHTREAARLEKELEDAGIKISSVATDILGVSGRAMLEALIAGERDPQVLAQMAKGRMRTKITPLTQALVGRFGQHHAFLCRMHLDRLDALDQDIAKLSTRIEAALEPFRDTLARLDTIPGVGRDVAEVIIAETGADMSRFPTPGHLASWAGVAPGLNQSGERHKPAHTRHGDHWLTGALGVAAMAANRTKDTTFLGARYRRLARRIGKLKALVAIEHSILTATWHVLSENTDYHDLGGDYHAKRDPQRALRRITRDANRLGYTVRFDPIQAA

SEQ ID NO: 489104 - protein, 385 aa, unidentified
MTQAPGTGTVIDYERTLILAIELSNTSWVLAAQIPGLPGVKAKRSIDPTPEALMAAIENYRARAEKAGRNVDRVIAVYEAGWSGFWLVRWLAKHGVEEAHVIQPSSVPVDRRARRAKSDGIDAELLLRTLLAWLRGEPRVCSMVPIPAEADEDARRRIRERAELVSERIGLVNRIGAVLATLGAGEYNPLRRDRRQRLDELQTALGDSLPTNAHAKIARMLDRLELLLIQITELEQSRDAVLEDESPDRASSMIQQLAKLRGIGVQSATVLVREGFVREFANGKALGSYAGLTATPYSSGGIEREQGIGKAGNARLRTVMVELAWLWQRYQPGSAQVRWFRERCGTGRRMRKVMVVALARKLLIALWRFATQGVVPEGAVMKPAS

SEQ ID NO: 489105 - protein, 429 aa, unidentified
MSYRIAGIDVHKKMLAVVVCDVEIESEYEFERRKFSSNPEQLRSLAAWLLEQEAEEVVMESTAQYWKPVWEALERYWKPLCEKREGARRKSGTLHLAQALSNRGRRGRKRDFPDAERLVKRLVARELTLSFVPDAEQRLWRTVTRKKYQLRCDRIRLQNQLESLLEEAHIKLSSLVSDLLGLSARRMLKAIAEGETNPATLAALADERLRATPEQLCDALGACTELNAVYRRLVKMALEELRLIDEQIGRLDQEMASLLSEHQDAVQRLAEVPGLGVDSAQQIIAEVGPTAATFPSEKCLSSWVGACPGDDESAGVNYSHRSPKGNRHMRRLLNQAANAAARTKGSIFELAYRRSVPRLGHNQAIGAIAHRQCRLIWLILHQGVRYEERGPAVGKRSKQLRTWRMIRQLRNLGYRIEPPNPQPSQASAQ

SEQ ID NO: 489106 - protein, 402 aa, unidentified
MNCVGIDVSKGKSMIAVMRPFGEVVVSPFEVSHTASELSELARLLKNLDGETRVVMESTGNYHAPVAWLLHGAGLYVSVVNAMLVHDYGNNSLRRGKTDKKDAVKLANYGLDHWLTLPRYIPEEDTRLMLKTCYRQYQQYSKVQTMLKNNLISLLDTAFPDANRLFTSPPRTDGSEKWVDFVATFWHCECVCGLSKKAFTAKYQKWCRKHGYNFSEDKALDIYAFACAHFAVMPKTDTAKLLVEQAVSQLRTTSTALAALKHEMQSLAASLSEYPVVMKMFGVGPSLGPQLMAEIGDVRRFHSKKALVAFAGIDAPPYQSGQMDIHSRSISKRGSASLRRTLFLVMGVILQCAPMNEPVYQFMDKKRSEGKPYRVYMMASANKFLRIYYASVKAYLDSLGHD

SEQ ID NO: 489107 - protein, 309 aa, unidentified
MLSSVGIDTAKATLEICIKPQKIRFEVANNSAGFEALLERLKDFNISRVLIEATGGYEKDVLIALASAGLETICINPARARKFADAMGKKAKTDKIDAEVLADFAAHLSVPQSQPISPEREELRELVKQRAQFVQSRDDDKRRRLQCRSAMAMAHFDEHIEHLKVLIKRLDEEIDQAMVQLDDTRARQLLAVTGIGRVTAANLLASLPELGQLDRRQIAALVGVAPYNNDSGSHRGHRQIWGGRAHVRRVLYMSSWIIIRHNTEFKARYEALRARGKCAKVALVACMRVLIVRLNAMLRDNTPWRVQTA

SEQ ID NO: 489108 - protein, 387 aa, unidentified
MSLPNDLSRSLVPFEQESTLVAVVELSQASWLIAGVVPGVERQPLKKMAPDEDALLRLLHRWRDEAIRNGHPITRITVALEAGRDGFWLARWLTKHGIEAHVIHSSSVAVSREHRRAKTDRLDTAMLNRVFLGWLRGERGHCTMVAVPSLEEEDAKRPSRERENLVGERTRVINRLKAALARLGIRGFNPKLRKAPQRLDSLRTPEGFPIPPNTLDEMRRDLARLAILREQIKAIEQARLERLQQAPQTGPNAMVRMLASIPGVGLETADMLVQEVLSRNLRDRRAVGRFVGLTGAPDESGAKRREKGLAKTGNARVRRGMIQLAWRFVRFHKDSALAIWFRSRTEGPSAARKTKMIVALARKLIIALWRMVNTGEVPHGVVLRQPA

SEQ ID NO: 489109 - protein, 411 aa, unidentified
MERIVERPGALDVHKESVTACVRVWEGRELEEHMAEFQTTVRGLLGLRDWLEALGVKQVAMEATGVYWKPVWAILEDRFELLLVNARHVKAVPGRKTDIKDAQWLCQLLEAGLLKASFVPPKPIRTLRNLTRYRKTQINDRAREAARLHKILEDTGIKLGCVASDIIGRSGRDMLDALVSGTTDPRVLAELAKGKMRRKIPALREALEGRFDTEHSLIVSQILAHIDFLDEGIDRLSAEIEERIRPYAPQRDLLMTIPGVKQRAAEVLISEIGVDMSVFPTPKHLASWAKVCPGNDESAGKRRSGKTGKGNKWLRATLTESANAATRTKDAYLAAQYHRLRGRRGHSKAVTAVGHSILTAVWHMLQTGEVYNDLGGDYFTRQNPDRLTRRLVRQLEALGHTVTLEAREVAA

SEQ ID NO: 489110 - protein, 422 aa, unidentified
MKTNLKTKKINLEKALLFGCDIGKSEIDAYFRNETDSLFIAHSDRFRNTNSLILSKLQEYEGIAASKGYERICILCEPSGGYEKRLMRAARWRGNLAFYVSSEATAAMRTVESNDSEKSDEKDPRIIHLLGRMDKVLEFRKMDDSRSMLRELNGIYENESLKASELKNEISSLLERLFPDLDTARGFIYGKTGAVMALNFKLSPWRILECGYDEFIATIKRSGVKKPKALEKVWNSAKASVNQVMPDWEREMLENRFTELYGDWKRHESRKESIKTKMMETARLLPEFQKFQSEGLWVFPLVRVLAETGNPCDFSDSRQILRFAGLNIRRRASGKYKGKDKISKKGRSLLRKNLYQLVFAIMIKKGGLFHDYFEKKKKEMPSGLMAMVAVMRKTLKMIFGVARSNAKFDRERVFCSSGKIAA

SEQ ID NO: 489111 - protein, 349 aa, unidentified
MAVTIVEAPVGITGGVDTHLDTHVAAALDPLGRLVGTESFDADAAGYKALVAWLESFGQVDKVGVEGTGSYGVGLARFLRRRGIEVIEVNRPNRQARRNHGKSDPLDAVEAARAVISGRAFGSGKSKDGAVEAIRVLMVAKRSARQARVKAIVQMRHLVITAPDQLRCRLKGLSVTALVAEAAKLRATRAPDPMTAATKASLCSLAHRVQALDAELDELNTKIESLLHATAPDLMARFGVGPDTAAALLVAAGDNPERLHSEAAWAHLCGVAPVPADSGKNAGHMRRHNGGDRQANSALWRIALVRIAHDPETTHYFERRVKEGRTKRDVIRILQRYIAREVYRYLPRG

SEQ ID NO: 489112 - protein, 341 aa, unidentified
MNVKTIGIDLAKNVFQIHGVDEHGKRLFNKQLRRAQMASFFANIPPCLSGMEACASAHFWANKLISMGHNVKLMAPQFVKPYVKTNKHDAADAEAICEAVTRPNMRFVPVKTAEQQAVLALHRSRQSFIKQRTAQANQIRGLLAEFGIVVPRGIQQLQRRLPELVEDADNPLPVLFRTQLSLLQHHMAYLFDVIATLDKQIEQCYRQNALCQRIGKIPGIGPVTASALIATIGKANNFENGRQLAAWLGLVPRQHSSGGKQVLLGISKRGDTYLRTLLIHGARAVLQSAKHKQDAVSSWANQLMARRNNNIASVALANKDARTVWALLAKEREYCAPIISA

SEQ ID NO: 489113 - protein, 337 aa, unidentified
MIVMGLDQHRGQITAEWIETETGEVSRARVSPAHREPVRRFLSRFRGRELEVALEATTGWRFVVEELRAIGAGVHLAEPAETAARRGSKKRAKSDRTDARHLRELLMVARLPESWIPPDHLLDLRARVRLRHTLADQRGEWQQRIQAVLYHHGCPQRRRLMTRDGREWLAEQALPETAREQVTVAIAMIDALDFQLAPIEKELRAYARRQPGCRAIMGHYGIGELTAVTILAELGDCRRFSSSRHAVRYSGLDITVHQSDQRRAPGHLSRQGPPALRWALFEAAQVARRTGSPDRDYYTQAAERLGSNRACLAIARKLLKRSYHTLRELGEEALQPA

SEQ ID NO: 489114 - protein, 343 aa, unidentified
MQTITTIGLDIAKSVFQVHGVDAGGQVIVRRQLKRRYVLTFFQKLSPCLVGIEACASSHHWSRELQALGHTVRLIPPAYVKPYVKRQKNDAADAEAICEAVTRANMRFVPTKTPEQQSGLVLHRARHLFIRQQTAVINAIRAHLAEFGIVAPVGRHGVEELLTVVADPNDKRVPEIARACLLAFGAQLRRIKEQILEFDRLIRAWHRSNEMSMRLDEAPGVGPVLATALVAAVADPKSFRSGRNFSAWIGIVPKQHSSGGKNRLGNISKQGDRYLRGLFVAGALSVIRYAKIHGTKHRPWLTALLARRPTKVAAIALANKIARMVWAMMARGERYKEPVALAR

SEQ ID NO: 489115 - protein, 280 aa, unidentified
MNSTIFALDLAKHVIQAHWVEAETGEICRQTLKRGKVLEFFVNRSPAVIAMEACGSAHHWARKLMTLGHEVRLIAPQFVRPFVKTNKTDAADAQAIWETAQRPGMKFVPVKSVGQQSVLALHRIRSLLVKMRTMQVNELRGLLYEFGADIPQGRVKGMNCMPKELERLEDILPAMVIETMREQIKRIEALDKDIADTEKKLAAWKKDDQSATKLADIPGIGLLTATAAVATVGDAKAFSSGREFAAFMGLVPRQSGTGGRVKLLGISKRGDVYPAEQSPE

SEQ ID NO: 489116 - protein, 342 aa, unidentified
MDHYAGIDVSLECSSVCVVDASGKIVREDKVASEPEALINWLRSLGYELSRIGLEAGPLSQWLFAAMREAGLAVELLETRHVRKAFEAMPVKSDRNDARGIAQLMRLGWFRPVHCKSMGAQETRSLLTARKLVQSKLRDVENSLRGILRGFGLKVGKTTGLKFAGRIQELVAGHPHLEMIANALLAVHAVLRKEFMAFEKQVRKMARSDTRARLLMSTPAVGPIVALTYASAIDDPARFKSSKRVGAHFGLTPKKYQSGETDYTGRISKIGDGSVRTALYEAAHIMLTKPVKGCSALKSWAMRIARRAGMSKAKVALARRLAVIMHRMLADGTPFNAAAAAA

SEQ ID NO: 489117 - protein, 342 aa, unidentified
MNRVYVGLDLGSSNFHQVAISERGVSTLNRELATSEANLVKAFSGMRGEIHVHLEAGELAPWASEIIRPLVTRVVCSHPQKNAWIARDRDKSDRVDAYKLASLLRLNEFKEVRYPQSQLRRDFKAVVQHYDELTQQQARLKTKIKARLRMQGVITRGQLGFSARGRKAVLQAVKSVVVRTAIQQLYGMLDQSLESQAEARLLMLRAAQALPEISIMRTAPGMGPIGACRFSAYVHAPQRFSSTRKLWKYCRLSVSHRSSNGKPLRRPRIDRSGCGRLKDVSRKAFEAAMRRKDNNGFQRAYYRALEQTHDATHARLTVQRKIVSTLRAMWINQTPYGDQLMP

SEQ ID NO: 489118 - protein, 378 aa, unidentified
MSSVQSVPDDGVDGPRRHHQCQTGGVDTQPVKGPPMAKISMIGLDLAKNVFQIHGVDAAGKVVLRRQLRRGQMEKFFAELPPTTVGMEACSGAHHWARVFQKVGHEVRIMPPAYVKPYVKRNKNDGRDAEGVCEAMGRPTMRFVPVKSLDNQAVQVMHRTRRLLVRQRTMSANALRSALVEFGIVAAQGAKGLRSLMQALEDPASAIPEKARMPLLVLARQWDRQNADIDKLETQIVRAAKSDDVARRLMAVPGLGPLGATAILAAVPDARMFKTARDFAAWLGLTPRQFSTGGKQRSGHISKQGDRTLRSLLIIGATSHLRCQRGGDKDPWLRDLLARRPFKIAAVAYAAKMARIIWAMLVTGEYYRDRSAPMPQAA

SEQ ID NO: 489119 - protein, 419 aa, unidentified
MSFKIFKFNCCGLDVHKTWIYACIGITDSNNRTEYKQARFSSFTKGLNELCDWLAKYNCKDVCMESTGKYWIPVFNILEQHKIRVTLSHPKYTKPMKGNKTDRKDAKWIGDLYMCGMVKPSFIPPADIRELRDLVRYRFKLTCMITGEKNRAQNCLTVSNLKLDDVFSDVFGKSSRSITEQILQHPGEKFDVSPFVDSRCKTPIEEIQAAVDGNISKEQAVKLRQCLDHIDELQKHISEVEQEILRLSDKYEAALNLIRTVPGFNKNPLTAIQVLSEIGGDMSVFPTAKHLVSWAGCCPRNDQSNQKIKSTRISRAGSYFKPVLVQVANALIKSKKHSEFTSRYKRIKARRGHKKAIIAICRMILTAIWHILSDLKPYTPEGFLESRPVKEGKVLSTSQALNLLKQRGYIIKGEPLAVS

SEQ ID NO: 489120 - protein, 360 aa, unidentified
MSDGSKGRPKITAGLDIGDRYSYLCLLDSESGEVIEEGRLRTTPEAFRRRFASELPMRIAIEAGTHSPWVSRVLEECAHEVLVANARKIRLIYANKRKTDEIDAENLARLARVDPKLLYPLKHRGEDSQAHIAIIRSREALVGSRTQFVNHVRGAVKSFGHRLPKCPASGFHNKAPEHIPEALWPALGPILEQIGSLTERIRQYDRKLQKISKEHYPETGHLRQVEGVGPLTALTFVLTLEDPYRFEKSRSVGAYLGLVPARDQSGDRDPQKRISKEGDQMLRKLLVSGAHYILGPFGSDSDLRRHGQKMATRGAKNSKKRAAVAVARKLCVLLHSLWVSGEVYEPLRNTHRREQREEAA

SEQ ID NO: 489121 - protein, 430 aa, unidentified
MEEVVEQELYVERIAALDLGKAVLEACVRLPHPTRPGRRVQEVRTYPTTTARLLELADWLRCNQVTTVVMESTSSYWKGVYFLLEAEGFECRLANAREVKNVPGRAKTDRADAVWLAKVAERGMYRPSLVHPEPIRRLRDFTRYRRSLVRDRTRERQRVEKLLEDAQIKLGSVISDIFGVSGRAMLDALAAGQRDPKVLADLARASMRPKTGVLAEALTGFFTAHHGELLAMMLTNVDRLTEQITTLETRIEELVAPFCHQVEQLAEITGIGRTAAAEIIGEIGVDMTRFPSAAHLVSWAKFAPAVHESAGTKKNKKRPKGNPWLAATLGNTAGSLTRSRTFLGARYRRIARRRGKGKALVAVGNSILTIAYHLLSDPAATFHDLGPDYYETRINTERRARNLAAALEAVTGQKILIRNGKAIVIDREAA

SEQ ID NO: 489122 - protein, 401 aa, unidentified
MKRLHGGIDIGSESHHVIIMDDSGKVLYDRKVAHRFSEFHEAIGELRGLEERELGKITFAIEGKNGYGAPFDRILIENGFKLYNVDNLKLRRFRDVFGAEWRNDRRDAKMLAKMLKLRDHVDAEDEKAFIAVEKTPAVHEKLRILSRHQQGLIDEKVRIQNRLRKRLLEVCPDIFEYGDTNSKKLLQLLKKYPEFSRYKKITLGALLKIETIGKKTAVSLVEGLRNIQYVEELAGIYKAIISSYCRRILELKEEIEILDKELEETGQKSAEVMQLKSIMGVGTKLSSRLAGEIGDIKRFNRESQLAVYCGVACIDDDSGKKKQTKVVYKANKICKATMIEIAGCTIRYVQESKTYYEKKRAEGKDHNHALRCLARQLIKVIFKMLTENREYTYKEEIKKAA

SEQ ID NO: 489123 - protein, 343 aa, unidentified
MNRIIKIGIDTTNYTLCIFEPSFEHDGTVHCITQVKPEVKNIIHVIETFKKKYENEELNIVCGYEAGCLGYSLYHELKEKGIECVILAPTTMKTEKGGRKLKNDYRDAKMIAECLAYGGYSAVHVPTELDNSVKEFIRMRDDIKENLKSIKQQIIAFLTRNGKQFNGKSYWTRKHIDWINTISFSEPLLQDTLKEYMIEYNHLCDRVETLDKQIEEVSLKEEYVEKVQQLQCLIGIKTHTALSLIVETSDFNRFKKGKMYSAYLGLIPGDDSSGGHEKKLGITKAGNSHLRKLLVEAAQGYTRGKVGFKSKDLKARQEKCSSEVVAYADRANERLRRKYYRMT

SEQ ID NO: 489124 - protein, 333 aa, unidentified
MYILKYNFIITNSDGEVLFKAFTITNNLDGFNDLYQKIETVMKDITKVKVGLEATGHYSYNLLGYLIDKGLPTYVINPLHTNLYRKSLSLRQTKTDKVDARTIASILMSDVNLKSYSDISYHNEELKSLTRYRFDKVKERAKLKSSVSRLICILFPELEKLVPTLHMASVYALLSEFPGAKQVANAHLTRLTNLLSEASKGRYSKDTAITFRDAARTSIGSNMPAKSLELKHTIKLIKELDSEIDEIENEIKIIMDEINSPILSIPGINYRMGAMIIAEIGDFSRFDSPDKILAYAGFSPSTYKSSVPNNYLSLNLHLGHQHCGSACSSYSFP

SEQ ID NO: 489125 - protein, 355 aa, unidentified
MPSKADTAVARTIGIDTGKNTLHMIGLDERGAIVLREKISRARIAARFVNLPPCLVGIEAGMASHYVARELVALGHEVKQVPPAYSKPFRHGHKNDFRDAHAVAEAVERPSTRCVPIKTDGQLDLQALHRVRSRLIGNRTAVINQIRGFLLEHGIPVRQGHHFLRKQLPLILATRTDVLSPRMIRIIGDLMADWKYLDERIERVTDEIEALAHADEGCQQLITVPGIGPIISSAMVAAIGNGAAFCKGRDFAAWLGLVPKQMSTGDRTILGRITKLGNRYLRMLFIQGARAVLLRPASWAKHSFGSWLTAATRRLHRNVLAVALANKLARIAWTVLAQGRRYEARVEPRVEPAAA

SEQ ID NO: 489126 - protein, 410 aa, unidentified
MEVLYPHCAGLDVHKDTVVACVRHMVNGSVRREVRSFKTTTKELLALSDWLAGEGCTHVAMEATGVYWKPVWHVLSDGDFTLVLANAAHVKNVPGRKTDVNDATWLADLLAHGLIRSSFVPDGQTQQMRTLLRTRKQLVRECSRHVQRLQKTLEDANIKLDSVISDIVGLSGRRMIEALIAGETEPGALAAMAHRRIKATPDELEAALRGRVTRHHRFLLQLHLQQIDAVNAAIDQIDQEVDAYVEPFRATVRLLTTIPGIDELSACVILAEIGRDMSRFPTAGHLISWAGLCPKNDESAGKRRSTRMRKGAPWLKTTLVQCAAAAARKKASYLQAQFHRLRARRGAKKALGALAASILTSVYHRLISGELYRDLGPHHFDQRAKAVNTRRLVVRLQNLGYAVQITPLAA

SEQ ID NO: 489127 - protein, 346 aa, unidentified
MMIIGCDYHPSWQQICWLDTGTGETGEKRLEHASGEAAQFYRQLPAPALIGMESTGNCQWFVEMAAAAGHDVWIGDAAKIRASDLRQQKHDRRDAALILKLLREGRFPRIWIPSAEEKDLRQLLIHRYKLVRIRAQVKNELQHLAMNQGVTKKQKLWSKTGEKVLRELPLKPWASQRRKDLFRIREMLNAQIDLLDQAVVEVAEKNEKARLLMTQPGVGPITAMAFVLTMGDVKRFQRGKQVASYLGLIPREYSSGGHQRLGSISKQGNRFLRMLLVEAAQCAVRCDPGMRSEYLHRCHRKAKGVAKVAAARKLAIRLYWMLRTNTGYPGVVRVESSSWVPLVGAS

SEQ ID NO: 489128 - protein, 338 aa, unidentified
MEWTVAIGVDTHKQVHVAVALNALGTQLGSREIATTPAGYQSLLSWAQELGIPAFAVEGTGSYGAGLVRFLERAGVAVYECERPRRQERRRGKSDLIDAALAARRLVSGEGLSIPRGGGRREDLRLLLLERRSAMQARNAALNQLSALLVTAPDHVRESLGALSGERLAQAAARLRPHPDVLNGVLRRLGKRVERLSNEAADAERALAALLAEVAPDLLEECGVGPVCGAQLLVSSGDPSRMRSEASFAALAGTSPVDASSGKQRRHRLNRGGDRQLNWALHVVTLARIRHHAETTAYYQRLLAAGKTTREARRCVKRALARHFYRRLIEVRTLPLTT

SEQ ID NO: 489129 - protein, 315 aa, unidentified
MALLNDNRFFEKTIPNSPSGFKEILNFLRKHNALKAECFLEGSYSEAVADFLFDNKLVVKVVNPYKIKSFARSRLSRIKTDRKDSQLIAEYGSVSFNDPAYQKPSQIIRSIRSLYRTYLAQTKMSSQCKNHIEHSTGELDKNVWMETLNEFELRRKKIVNRIIDLINSDKKLKIQFKNLQSIDGIAEISAIAIIAEVQSVDKFMNARQLAAYCGLTPRICESGTSVHKKPRISKFGNSFLRNALYFPAIVAIQRCEQFRRYSQKLLSRGKAKKQIIVAVMKKILLASFAILKYDCKFNPDLIFKTHRIFVRNTLS

SEQ ID NO: 489130 - protein, 407 aa, unidentified
MDVIHAKCAGLDVHQKTIVACARVMTGKTVQHHLQTFGTTTDALLALGDWLAHHEVTHVAMESTGVYWKPVWYALEGQFQLLLANPMHVRNVPGRKSDVNDATWIADLLAHGLVRSSFVPPEPIQELRDLTRTRKQLTREIARHTLRIQKTLDQANLKLTGLLTDILGMSGRAILDALVAGERDPERLADLASGRLKASRAQLVTALHGRVTPHHIFLLRLHLTQIDALQAAVRDLEARLGDALTPFRAAVERLTTIRGSGPLAASGLVAELGVDMSRFPTPGHLRSWAGLSPRQDESAGKRRSTRTLAGNPWLKTTLVQAAWSAVRKDNTYFRAQFLRLKARRGPKKAIVAVAASILTAAYHVLQREVDYHDLGGDYFNRRDKVKLAKRLIARLHDLGVTVEVKAA

SEQ ID NO: 489131 - protein, 415 aa, unidentified
MALKIVYKICCGIDVHKTFVVACIASTDKQGVTSYERHRFSTYTKGLKDLLQWLLARNCKDVCMESTGKYWIPIYNILEKDCSIVLAHPKYVKAIRGKKTDKKDAKWIADLFKHDLVAGSFMPPADIRQLRDLMRYRFKLTCFKSSEKNRLQNCLTVSNIQLGNVVSDTFGKSAQAILDKLLENPEDTSFDLEPLVFKSLKKKLPELRDAIDGYITPEQAGKLKVIKAHYESLESRKAELEELILALAAPYQQELAILQTAPGISSDFTAIGIISEIGTNMEAFPSAKHLCSWAGLTPTNNESAGKKKSVRVSKAGCYIKPLLVQCANAVVKSSKHPEMRNRYLRLKKRRGHKKAIIAIARMLLTALYHMLKNGENYNAELYRKSDLPPADREITVEQAILIARNQGYKIKSATA

SEQ ID NO: 489132 - protein, 423 aa, unidentified
MDVIYPICCGVDVHKKFFVATLITTDGIQPKYKKRRSSTFNNQILAFKAWLLENNCRDVCMESTGKYWIPVFNLLEDSINVTIANPKWVKTVKGNKDDAKDSKWIGDLFRIDLVPGSFIPCKATRILREFMRYRFKLVSCKSSEKNRYQNVFTVCNVALDAVVSDMFGVSASSITDYIVNSDTFDPAHCVLLLKKTLKKKVDEVVASIDGFQMTDAQKVRARMVKEHYDYLLGHIEKLDAVVDELAKPFEPAIQLLCSIPGIGRHSAIAIISEVGTDMSQFDSSKRLCRWAGLTPGNNESAGKKKSVRITRAGVYLKPALVQVAHAAVKDKKNPYYRIKYEAIAKRRGKKRAVIAIARMILTAAFHMFSTGEVWNPSDLNQIDMPPELREKELQKSLRRAAKLLVAHGLINPDAVKIPQTVPA

SEQ ID NO: 489133 - protein, 434 aa, unidentified
MTASHSTSTPPVLVAIDVAKLKHDILVELPTGRRQKMVVRNQLTDFQQFAAYLRSLGAQCLIAFEPTADYHRCLAYFLGSQGFELRLASSLSVARTREALHNSWDKNDPKDAQVILHLLRTGATQRFYDPVVEGTNDLQELSKTHHQVSLRKTRIQHSLMNHYLSLYFPEAERFLCTTRAGWFARLLISFPTPAAVTALPEAEFVSTAARLVRTKHSKEAVLRSFHAKARHSIGIPVGLESQAVATFRLLLEEHTELCRKRAALERTAHELLKGRLDYQVLRSIPGIGPIIALTILAEAGDLRRFHHERQFLKFCGLDLATAQSGAYRGRTQLSKRGNSRLRAALWMAATVAARMTENGFRRKFDRYVERDPANADLKRKAYTACAAKMARVVYGLIKYEQFYRAYHEDAVPVPDGRTRSDGPWRRVAEAAVTS

SEQ ID NO: 489134 - protein, 347 aa, unidentified
MSITMIGLDTAKSVFQIHAVDNAGKAAIRRKLRRSELIAFFEKQEACTVVMEACGAAHHWARVLTGLGHEVKLIAPEVVRPFVKKSKKNDAADAAAICEAASRPDVKFVPIKSLEQQGVLALHSARSLLVKQQTMLANAMRGLAAEFGLTVPLGLDKLVELMVLVDADEAIPEPARQAVRGLLDHRNALAESTKTFEAAIVVHARHDETARRLATIPGIGPITASLIAATVADIGVFQSARHFAAWLGLVPRQHSTGGKTRLGRITKTGNREIRRSLVLGATSMVHRAARWNSAAGVWTRGVLERRPVRLVTVALANKMARIAWAVMTRKEVYHAKGRVAAASEAVA

SEQ ID NO: 489135 - protein, 441 aa, unidentified
MPAWLWREHCFIRSLIVLRLATCGGQLEGRVDVLLFVGDDWAEDHHDVEVMDAAGRRLAKARLPEGMAGMTRLHAMIARALGDAVEDDAVEVRIGIETDRGPWVQALVAAGYIVYPVNPLQAARYRERLAVSGAKSDGADAHMLADMVRTDSHQLRPISGDSVEAEAVKVVTRMHKTLIWERTRAGQRLRHALREYFPAALAAFEDLDAGDTLELLAKAPDPAAAARLSISQISAALKRARRRDIAAKAVAIQAALRVEQLGQPAVVAAAYAVTVRALVALLVTLNEQVKALQGQVEDHFGRHPDVEIILSQPGLGVILGARVLAEFGDDHDRYVSAKARKNYAATSPITRASGKKKTVAARFVHNDRLVDALMTQAFSALKASPGARAYYDRQRERGVSYNAALRQLANRLVGILHGCLKTGTVYDETTAWSHHLNQAAA

SEQ ID NO: 489136 - protein, 335 aa, unidentified
MWHIGIDLHRKTLVIAAVHDSGEVRPPVSFECSDIQGIIECVSQLQPFRAVVEATGTYRWLYRLLRPLGTMLLAHPLMLRAMIQRRCKTDRLDAQLLANLLRINQIPLAYIPSDEYQLLRDITRHRARMGRGLAQVKTSLRAILARHNMPSLYKCPFGPRGLYWFSKQDFDLVDNAVRDELLERFQHYSRQMEALDARLLELQPKYPQVEVLVELYGIGLFSALLIVGELGDVERFRNAKQAGAYTGLTPRISQSGEHSHHGHVSRQGSAWLRWILIEAAMKLVRQDVALANFYTRIRKRSSAKIARVAAARKLAEICWKRLRRWHRQHNNQVAA

SEQ ID NO: 489137 - protein, 375 aa, unidentified
MPSVSHLGPIHLGLDVHKDTISVAILAPDRDGPDVERIPHDEASVRRLVGRLGDPRWLRACYEAGPTGYELARLLHSMGVRCEVIAPSLIPKAPGDKVKTDRRDCRRLARLHRAGELVAIRVPTVQEEAVRDLCRARADMVEDRTRARHRLSKFLLRHGRPWRGGNAWTLTHERWLLGQRFHEPALAATYGHYRAVLAGRDAQLEAIQADLAGWYDQAPFADAVHRLSAYRGVTRLGALTLASEVCDWRRFGRAAAFAGFCGLVPSEYSSGTSTWRGHITKCGNAHLRAQLVESAWADQHRPAVGLELHARQQGLDPQVVARAWAAQLRLCGRFRRLAARKNSKNVVATAIARELAGFLWAEMTAERCLLSNGHR

SEQ ID NO: 489138 - protein, 415 aa, unidentified
MTASMEVVYERCCGIDVHKKEIVCCLITGQNKTQTKKFGTLTKDLQALTCWLLDNNCQMIAMESTGSYWKPLYNIFEMEALESIVVNAQHMKTIPGRKTDVNDAQWIAKLLRHGLLKASFIPDRHQREYRELVRYRTSRVEERAREKNRLQKMLEGANIKLSNVVSSIVGVSALTLLEMAIAGQELSLESVDKVRHGHCKSSSEEFLDALTGIITPLQRELFTQVLRTIREQSSQIERIEALIKAHTTQEYDNAAKALEPIPGIARQSAESILAEIGTDMSRFPTSGHLCAWAGIAPGNNESGGKRKKSKSRQGNKALKKTLVQCANNAILCKKGFFFAQYQRLVVRLGKNKAKVAVAHSMLIAIYHVLSGKCFVDLGSDYYTQFNRDKKIKSYLKQLEKLGWKQNSPDSDVLIA

SEQ ID NO: 489139 - protein, 343 aa, unidentified
MKKITTVGLDLAKSVFQVHGIAEEGDVIIRRALRRSQVLDFFRTLRPCLVGMEACGSAHFWAREIQALGHTVRMMPPAYVKAYVKRNKTDAADAEAICEAVTRPTMRYVPAKTQDEQAAGMVLKARDLLIRQRTQAINALRAHLAELGIVRSTGLVGIISLAAIVRDDSDLRLPGAARMALEELVEQIETVTGRIERLDRKILEAVRKDDCARRLTAIPGVGPIIAATVRAVVPDPAGFRTGRDFAAWIGLTPRARSSGGKERIGSISKRGNQQLRTLLVAGATSVLKVARRGLQLSPWIAAMMLRRPFKVIAVALANKIARIIWALLVRGDSYRETKMIAQA

SEQ ID NO: 489140 - protein, 340 aa, unidentified
MSLYGGIDLHANNSVIVLINEQDEVIYQKRLPNDLPTILEQLAPYHTEMQGVVVESTYNWYWLVDGLMEADYRVHLANPAAIQQYNGLKYTDDRSDARWLAHLLRLAVLPEGYIYPKAARAVRDLLRKRAHLVRQHTANVLSVQNIMVRNTGVRFSVKRIQELTKQELTTLLTEETQVLAVTSSLVVLDCLQHQIKMLEKTVHTRLKHTPAYEQLLTVQGIGTILAQTITLETGAISRFPSVGNYASYCRCVDSTKISNGKRKGTGNVKNGNLYLAWAYMEAAQFALRFQPAAQRFYQRKLAKSRNNTILARKAVAHKLSRACYYMMRDLVPFEATKAFG

SEQ ID NO: 489141 - protein, 480 aa, unidentified
MAYPTKNPPDLQVVPMLKYESLYVGIDVGKQRHVAGFVSTTLLERHQRFEACPALAFEQSREGFRSLMERIRSYVPLEQVSVLLEQTGHYHRTLVQYLQEFDIPVYIMPVQKRPPGMLKTDKRDALSLANHLFNQLERGIQLADKTHLVRRLLTPTETALQLQGWMRHRYELVQECTRRKNKLTAICDELFPELTQVLKDPNLPTALALREHFPTPHALATAPFSALIALRAKSRPTLGQLEHLQQVASQSIGTKEMTRQRGLVLEQSQLIRELRMLQEHIEQLDTEIRRSIEQSREGKILTSIPGIGSIQAAAIIAAMGNVLNFERASRLKAYFGWAPQEERSGTSLDRVHLTRRGTRSMKQMLFLCVASAIQLDCEWARLYNRLVPKKCPYDERTQRYRGKVKVMGRIAGQMIEMIYALLKQDAEILSQLAPGETPPDPILYDPEVHKRHRNGEYGPIKNVPSQRKVIRLPGRVLPKQ

SEQ ID NO: 489142 - protein, 427 aa, unidentified
MSYRIAAIDVHKRMLAVVVTDVEGTGEYQFERRKFGAAPGELHVLAQWLVELEVEEVVMESTAQYWRPVWGTLELFWRPARQQREGANQKSGTLHLCQAKSNHGPRGRKNDFLDAERMVKRLVAEELVLSFVPDEEQRLLRTVTRRKYQLTRAKIGFKNQLESLLEQGHIKLSSLVSDLLGVSARRMLKALAEGETDAGVLAAMADHQLRATPEQLHDALGASSHLSGAFRRLLKLSLEELQLIEAHIEQLGREAMKLLKGHEDVIQRVAEVPGFGPDCAVQMIAEVGVEAATFLTAKKLSSWVGVCPGNEESAGESHSTRSPKGNRHMRRLLNQAAQSAVKVKGSIFDVTFHRLLPGLGYKQAIWAIAHRLCRLLWVILHKGVRYEERGPAVSAKSKRTRAARMIRELKKLGYRVEGGPLPAVARA

SEQ ID NO: 489143 - protein, 352 aa, unidentified
MEIVSGLDLHRSQITFRTADLRTGEVERGKIYPGTRGAVREWLDRFEPGTDAHFALEGTTGWRFVVEEIQRRGFAAHLADPAELSERRGPKRRAKTDHADCELMVNLLIEGRLPESFIPPAHILELRTLVRLRKTLVDQRTEWQQRLQAQLFHQGVVPGLKLCRAEDRRRLADVEISQAGRQMIETGIVMLDGFDAKLKPLSAQLVALAKAQPGCRGLQRGLYGVGWLTAVAIVAELGDCRRFHSADQAVRASGLDVTVYESNGKRPGGHLARQGPQVLRWALFEAAQCAARKSSPDHADYRSVRDRIDHNRACLSVSRKICRRACHILKELGDAAMAPPEPASASRRPKAA

SEQ ID NO: 489144 - protein, 341 aa, unidentified
MGKRSVLSCAVLYCGIDVSAVSLQVAVQADGSDTFEQREFTNSTAGHRQLIAWLGRWRAPVRVSLEATGIYSLDVAMALDAADGIEVAVLNPRTVHQFAESLRRSKTDAADAVALAEYSRRMRFVAWVRPSEAALGLRAISRHIATLTEEHARLKNRLHAACGSASTPRCVREDLKKSMAGVEKRLTRLRREALAAIARDAGLQRKFEHLIRITGIGEVSAVQLLGELAGLDPEMTVRQWVAHSGLDPVHQVSGTSVHKRSRISRRGNRHLRRALYMPAVSATRFDPYMKAFYHLLQARNKTKMQALIAVARKMLHAIFGIFKTGSAYDAAKLFPQLIPTS

SEQ ID NO: 489145 - protein, 362 aa, unidentified
MSIYGIDLHSDRFTVAKMVVKEDKLHEVVATYSFKEESYQKFLGSLCEGDYVLVENSTNAFWFHDQVAERVKACFVYDTNDIRSSGNKNDKIDARHLVRKLSFYVMMGERKTDLARVYVPDAEIRELRGLFTTYRLYNKMKVQLKNRIHSILKQNGICIDRGNIGKKGFESSIAGFQISEVWKLQIRSAYRELQSVQKEQEQIMNMIYLRGSKRFPREVELLMGIRGFSAFTAIALMSDVVDVARFQNAKSFCSYLRATPKVRSSNQTTHVGQLNRQSRPLTCTLLTQSIYQLAQAGDHMAKFYARVRVGKSAGKSRIALIRKVLVSAYHMLKRNEPYLWAEEELYSSKLRSFQRALEKIAA

SEQ ID NO: 489146 - protein, 482 aa, unidentified
MKKKNIYVNQSQELLSLFEEAGNNEKIMCVPIDYAKKDHIVMFCNGYGHILRKPFSVKNSPEGIEYLTEQVTRSCSHRRIDPKHVFFGGEDVGSYAENFANTLRSGGWIVAGVNAHDAKEQRANIQASTDRLDLMGIASMLLNRRANCSPAQSGIYRNLRTLVRHRRNLVSMSTEEKNRIHTVVDRLFPGFLDEKKTGILPFSKSSLYLMEGRFSPLQIRRRKRHTLIEVLHRYGTVKPENTAAKLQEYAVRVLNTPDEYITTLQLSLVQHVKHLRCLQDSINQLENEIAVWLAQTQGAFLTTVRGIGIVLAAGVSAEIGNPYEQKPLNNLVSYSGIIPRVKQTGGSEGKTYTGKVAKRCNRILKNYVVQSANHMGLHGPEDLMADYKRREADGQHADFGIGRRYLRMAMCLMRTSQIYMPQRLRNREVKPEERAGYYLMTWPYLRDKWNKAGALEIAFEKDRPLGQWRNMVQELYEIKLRL

SEQ ID NO: 489147 - protein, 408 aa, unidentified
MRVVGLDIHRVFAEAVMLDDGRITRLGRVGMTRDHLAAFAQTLTHDDDVVIEATGNASAVAEVLRPHVGRVVIANPRQVRLIAEARIKTDVIDATVLARLHASGFLPEVWIPDEHTLGLRRQVTRRTQIVRQRARLKTIVQSILHAHLIPQCPHADLFGPRGRAWLLRQPLPADESDAVERHLREYDRLTDDLRVVERELARDALTNPKVKRLMTIPGVDMVVAVGLMAAIGPAERFPGPDRLVAYLGLNPTVHQSGEGRPRHGRISKQGRIHARTMLVEAAWQAVRGPGPLRAFYQRVARRRGNHIAAVAVARKLAVIIWHLLRREEDYAWVRPALHAKKLRDLELRSGEPARRGQRGAAYAYNLSRTRVEEKRRAEQAETAYRRLTEGWSRRGRRVPTGPAKEERP

SEQ ID NO: 489148 - protein, 450 aa, unidentified
MKVVYPRCAGLDVHKKGVHVCVRIRPTGSNKIRTEFAQFATFYEDVERLHEFLRKHKVRRVVIESTGVYWMPIWNVLERMTWKYDLVLVNPQHVRALPGRKTDQQDCERLAELGQYDMLRGSFIPPAEIRALRDLTRRRAALQQDWNRLVNRVGRLLETANIKLGSVMSSLTSKTGMAMLEAIARGVWDRERLADLAQGSLKDKKLELIRALPERCSDHFRWLLRELLDELDTLENRRLKVEARIRHDMEPYAVQIRNLCTIPSVSEITAWTLIAELGVNMSQFPDPAHCASWAGLCPGNSESAGKRQSGRTRKGNRYLRRALVQNAWAVAHIKDENPLTDLFYRIAGRHGMKKAAVAVAHRVLVIAYCVLRDGSCWKGPAVGRRKHVQKARRLMRRLARMGFPVQPARRADAASPDECKKCAAWGIPCMHAWNPIFQRRKMGNVENQTT

SEQ ID NO: 489149 - protein, 388 aa, unidentified
MIYVGVDIAKLNHFVSAISSDGEIIIEPFKFTNDNDGFQLLISKLESFDKNSLIIGLESTAHYGDNLVRYLVAGNYKVCVLNPIKTSTMRKNNVRKTKTDKVDTYIICKTLMMQDSLRFVTYYDLDLMDLKALGRFRQKSIKQRTRLKIQLTSYVDEVFPELQYFFKSGLHQKSVYALLKEAPTPEAIASMHMTHPAHLLKVNSHGHFDKEMAQQLRVLAQKSVGASDSALSIQITHTIAQIELLDSQLERVEAEMTDIMKFNDSVIMTIPGIGYINGGMILGEIGDIHRFSSPNKLLAYAGLDPSVYQSGNFQAKKTRMSKRGSKVLRYALVNAAHNVVKNNATFKAYYDAKMAEGRTHYNALGHCAGKLVRVIWKMLTDEVEFNLE

SEQ ID NO: 489150 - protein, 347 aa, unidentified
MRILALDLGKFKTVACEYEAETGRHRFVTVLTTPKALHDLMVDREPQRVVIEICSIAGWVSDLVRSLGIELQVANTADERWRWRNVKQKNDRNDALKAAQLSAVNQLCSVHVPEQTMRQWRALIAYRSKLVQRRTKIKNHIRDLLLREGQLLPRGRSAWTEAGMAALAEMAKPLAEVGGDELWRGELGVELVQLKELQQQILIVHAKLDELAAADPRVALLRTIPGVGPRLSEAIVTMFDDVTRFRTAGQVGSYIGMVPKSFDSGEMTRSGRITRQGNRLVRSLLVEIAWTALRHNPWARQTFQRISGRKKSRRKIAVVAVGRKLLVRCWAMLRDRTSWQCPPARAA

SEQ ID NO: 489151 - protein, 338 aa, unidentified
MITYIGVDVGEEHLDAWDEGQRVFRRFRNSPEGVRNLCSWLARSHPRGTFQVVLEPTSVYHHQVVLALHQRGVAYTVINPRRTASFAQGEGSRAKTDKADARALARMGAEKQFPPTVSLDAEREELKYLRRQVEWLQAQLQAARNRRDTLKRSPFVPDPVVANLDGVIRDLEQGVQAMEEAIKAWLKQHPHLQAEVRLVATVKGIGWRTAVLIVGEFPGVQHCQDAKDWVAYAGLHPEIRQSGKSWASVLSRMGPAVIRKGLYWPAIVALRANPSIKSLGERLGANGKRNKQIIVAAMTKLVRQAFAVLKAGTPFDPQWHLQGRRQKPHPTLDIQYGI

SEQ ID NO: 489152 - protein, 354 aa, unidentified
MKSTSYLLMTPKTIGIDLAKNVFQVHAVDSRGKVVLRKQFRRDRVVTFFANLSPCLVGMEACGSAHHWARKLESLGHTVKLMAPQFVKPYVKSNKNDAADAEAICEAVSRPSMRFVPVKNVEQQAVLSLHRVRQGFVKARTAQANQIRGLLSEFGIVVPQGIAYVTQRVPQLIEDASHELPGSFRCLIDRLLEHLRLLHHQVEEIEAQIQAWHRENVLSQRVEKIPGIGYLTASALVATIGDAKNFDNGRQLAAWLGLVPRQHSSGGKQNLLGMSKRGDAYLRTLMIHGAQSVIYRVVQKADPRSWAFSVAIRRNKNVAAVALANKSARIVWAILAHDRSFRPDYAVASAAVAV

SEQ ID NO: 489153 - protein, 343 aa, unidentified
MQVVTTVGLDLAKSVFQVHGVDAAGQVVIRRQLKRRYVLAFFQKLPPCLVGIEACASSHHWSRELKALGHTVRLMPPAYVKPYVKRQKNDAADAEAICEAVTRANMRFVETKTPEQQSGLVLHRTRHLFIRQQTAVINAIRSHLGEFGIVAPVGRNGVEDLLDVIADPSDKRVPEIARACLAALGAQLRKLKEQILEFDRMIRAWHRSNEMSLRLDDCPGVGPVLATALAATVADPKAFRSARNFSAWIGLVPKQHSSGGKNRIGSISKQGDRYLRNLFVAGALAVIRYAKIHGTKHRPWLTALLARRPTKIAAIALANKIARMAWAMMAKGECYKQPVALAT

SEQ ID NO: 489154 - protein, 364 aa, unidentified
MIVIGTDTHKRTHTCGAVDAATGRQAGELTAAAREPGFRELLTRGRGLDEERIWAVEDCRHVSGPLERFLVAAGERVVRVPPKLMGQSRRGERAAGKSDPIDALAVARAALREGPETLPVAHLDEGALQIKLLLDHREDLVKARSQDQCRLRWHLHDLWPDLEIPAGALDRMVWLDRVARRLSRADQGTRVRIARELVVEIRRRTRRVTELGREIAALVEARAPELLGMEGCGPLTAARLIAETGGAARFSSDAKFARLAGVAPIPASSGNRTRHRLDRGGNRRLNCALHRIAVTQGRCHAPAQEFLARKQAEGKSRREALRCLKRHLARRVWRLLLKIERGRYKDTVDAQRDLQRPDRGGGLT

SEQ ID NO: 489155 - protein, 409 aa, unidentified
MMEQNIVFGIDVSSHSSTVCVVIDRIKQGKPFTISNDSFGYQKLLDHLNRYLITPLVVFESTGVYSLSLQAFLEENHIKYLKLNPLKAKKLMDNNLRHNKTDKLDAYHLALIEFCAPQKLREPQPKEYHEMQNASRYFEELTKNLIVAKNQLHRNLQSTFPQIESIMATPTGKIYWTIVSLFPHAQYVLESNETRIYQELLSIPGIGKQRARYLTARLYSLAEQAYPYDSKDSITVRAIQRNISDLFSLSEERDNVINYLEKLAKIVNSRALTIYQSIPGIARTTALRLIAELGDLRRFDTSARIDAFIGIDPGRYQSGEMDNHLGITKHGNHIARKILYRVIGQMESTKLSQPCHITDYYDNKKQSSHSRGYKKIAIASVHKLIRTMFALIKQNQLYDYNVATKNKRL

SEQ ID NO: 489156 - protein, 334 aa, unidentified
MQVLFERRAAVDVGKDVIAVAVRKPGRGPGRRVTVRRTFKTFYGVLAEAARCLSSEGVTHVAMEATGIYSMPVSHALLEHGDFEKVLVCNAAHVKNVPGRKTDLADAEWLAQLPECGLLAGSFIPPADVKAVRDVIRYRAKVAQQRVSEIARLGNVLQDAGIKTGSVASSIATKSGRLMIEALIDGERRGDVLAGLAIGRMRSKIPDLSMALQGRFGDHHALMCRLHLDHLDHLEAMPGKLDEQVEVMMQPFRAARDLLITIPGLGPLSAAAVISEIGADVREYFPDAAHLASWAGLWPGNHESAGKRAPVPAPAREQEPPARPGGVRLGRRPP

SEQ ID NO: 489157 - protein, 343 aa, unidentified
MEHYAGIDVSLESASICIVDDKGNIVREGKAASEPAVLCKWLKDGGIELARVGLEAGPMSQWLYAGMAKAGFPVELLETRHVRAAFQTMPVKTDRKDARGIAQLMRLGWFRSVHCKSLPAQELRALLTARKLMQGKLQDVERSLRGILRGFGLKVGKTSPRTFEGRILELVAGQPVLQEVADALLAARTVLAREFRGLDQRIHKTARQDERVKLLMSVPGVASIVGMAFVVAIDDPARFKFSKNVGAHFGLTPGRYQSGETDLTGRISKCGDAGMRALLFDAAHIVLTKPVKQAGALKRWAMAIEKRAGRRRAKVALARRLAVIMHRMWVSGTPFYATKAAAA

SEQ ID NO: 489158 - protein, 462 aa, unidentified
MRPPCNVDAGAGRHDRPPTGTRRPERTDRRETNVQPGDIDVWLGLDVGKSSHHACALDHDGNTILDTPVDQDEKQLRRTIVKLQRRGTVLVIVDQPNTIGSLPLTVARDMGARTAYLPGDAMRKAAQLLPGGSKTDRRDARIIASTALRMPETLRDCEPDDETMAALRLLSGWDEDTAHELTRTVNRLRGLLLHLHPALERALAGDRIKSDTALGLLEHHKGPDGLRRAGAARIREYARRHGLKGTAITDAVADAIGEQTVTVPGTRAAESLIPQLVSDLRRLRDRRTDISRQVEELLADAPLLTVLTSMPGIAARTASQILLAIGGDIGRFKDAAHLAAYAGIAPVTRQSGTSIHGERPARGGNKRLKNALFQTAFAAIRLDPESRAYYDRKRAEGKRHNAAVMCLARRRCNVIYSMLRNGTLYQPGGTHTTTTTPPRTETTPAHAPRPRQDTTHPGTRRT

SEQ ID NO: 489159 - protein, 377 aa, unidentified
MRKVRFLGLDVHAETIAVAVAEPNGDVRAVGIIPNSPESIRRLVKKLGPAEDLRACDEAGPTGYVVYWQLTALGVRCEVVAPTLVPTKAGDRVKTDRRAAATLARSVRAGDLTAVWVPDAAHDALRDLVRAREAAKQDQLRARHRLSKFLLRHGRRPPVGTKAWTQKYLAWVKQTVRFEQPAQEATLLDYVHEVDHAADRVARLERAITDAVALAPPAMRAVVDALQALRGIALISAVTIVAEVGALARFTRARQLMGYSGLGPREASSGGRTWRGGITKTGNAHLRRIVGEAAWAYRHRPAVSALLRKRHAGLSEPVKALAWKAQHRLHGRYRKLLGRGKCPQQVVTAVGRELLGFIWAIGVAVEAEHPPATSVAA

SEQ ID NO: 489160 - protein, 356 aa, unidentified
MEIIAMDSHKHYSLVNVQTTGGQLLTERRIEHQRGQIRAFLSHYAPGTPVAVETIGSWYWIVDEIEAAGMIPRLVHARKAKLMLGSINKTDKLDVRGLNKLQRIGTLPTVWIPPASIRDQRELPRTRMVFGTARTRLKNRLHSVLDKYGLQDQFGGISDLFGKKGRAILQEVLGQLPPETLYTTQRLLERLDQLEQTIKQIEKRMATIFTPTPPMTLLKSLPGVGDILSVVLGLEIGDIRRFQGASGLASYAGTVPRVHSSGGKTYYGRTRPDVNHYLKWAYAEAGNSVALNHKRFPYRHVSQLYQRLKTRRGHAKAIGAVSRHLAEATYWMLTKDEPYQERGLKEVQGAVSAMLS

SEQ ID NO: 489161 - protein, 366 aa, unidentified
MQKLSTRRVMGTKIFKGHQLTIGLDLGDRWSFYCVLNERGEVVREEKLATTPEAMKRTFEKFPASRIVLETGTHSPWISRLLTELKHEVIVAHAQKVQLITKSSRKDDRHDAQTLARLARIDPQLLGPVRHRSAKAQIHLTVIRARAELVSARTALINAARGLAKSYGERLPKRGTQQAGRELAAALSTALREVLEPLLREVESLNERIGEYDQRLEQIAKEVYPEVALLKQVKGVGTQIALTYLLTIEDPHRFAKSRDVGCFLGLRPGRRNSGQSEPQKSISKEGDRYLRTMLVQGAHYILGPFGEDSDLRRWGLKLAERGGKDAKKRAVVAVARKLAVLLHRLWVGGEVYEPLRNTNRAMSAAA

SEQ ID NO: 489162 - protein, 346 aa, unidentified
MLHAGLDLSRKRLDVCLLSDQGELVEELACPPDRDGLRGLARCAGAHGEPVVGVIESMTGARFVHDTLESLGWAVEIADAAKVKGLAPLAAKTDRIDARVLALLSQRDLVPAIWLPDPRVREERELARFRLHLVKHRSQLKHRIHSTLMSFGRPCPVSDLFGVKGRELLARLEVPEPWAGNVLASVCLIDGLEEQISEINARLQAGGADHPYVPKLLSVPGVGSVLAFTIAAEIGDISRFASATKLTGYTGLCPRVVQSGESDRRGPLTKQGPRYLRWALLEATMHALRHPAYAERYQRNKRRLGKQRGAKVAQVDIARKLTVAIWHMLTRNESFAPKGAACRLAA

SEQ ID NO: 489163 - protein, 368 aa, unidentified
MGEITRALIARVGVDLAKRVIQVHAVDAAGRRMVARALRREQFIAWCAQLPPGCVVAMEACSSAHHWARKLRALGLQARLIAANFVSPYRMEGRSGKNDMTDAAAICEAASRPSMRFVAIKSCEQQGVMSLHRVREGLKEERTACINRIRGVLAEFGLVFAHSPKALRAELADVIEDAGNELSAMARLALQRAFDHWRELDEHMRWCDRQVGQHVRTSAAAKRAAKITGIGELGASALTAGVGDFKQFKGAKQFSAWLGLVPSQNSSGGKTSLGHITKRGDDYLRTLMIQGAKAAVMSAGKRNDATSLWVAQLAARVGWQKACVAMANKNARILWAVMTRDQGFDPRHVSDKPPGKVPAHQRSLAAVA

SEQ ID NO: 489164 - protein, 376 aa, unidentified
MKNVRFIGLDVHAETIAVAVAEVGGEVRSVGTIANRPESVRRLVGKLGKPGQLRVCYEAGPTGYVLYWQLTELGVHCEVVAPTLVPVKAGDRVKTDRRDAEKLARCYRAGDLTAVWVPDAAHEALRDLVRARLAGKRDQLRARHRLGKFLLRQGRRAPEGTTAWTGKYLAWVKQQRFEQGAQEATLLDYLHEVEHAAARIVRLERAIDVAVEGMPEKLREVIAGLQSLRGVAKISAVTLVAELGQISRFDHARQLMGYAGIVSREHSSGQSVRRGSISKAGNAHLRRIVTEAAWSYRHRPNIGGTLAARQSGSSEAVKAIAWRAQHRLHARYRALLAKGKNKQRVITAVGRELLGFIWAIGCELEHAQHQEVRRAA

SEQ ID NO: 489165 - protein, 348 aa, unidentified
MNNVHYIGFDVHKKSISYCVKTAAGEIVEEGTIPAQRNVLRAWAAARRQPWRGALEATLFSGWIYDTLKAYSGGLEMAHPAKMKAISSGKKKSDTIDARTIADLLRCNLLPACYVAPARIRELRRLLRYRSLVVSEAVRMKNKMAGLLMETGAEYVKEKLHGKKYFATLLEELEEVPESVIDLLRLSRGALEMFESTQRRLIQELLADAELRERVERLRSIPAVGEITALTWALEIGDPERFGSAGEAMSYCGLTAALKSSAGKQQRGPISKQRNHWLQTTLIEAAKLAPRWNPQLAALHARESERGHRNRATLAVARKLVSYLLAVDKSGLPFQVRSPSQEPTQKAA

SEQ ID NO: 489166 - protein, 329 aa, unidentified
MTARTVSNLPAAMHVDTARCLFAIELSKQNWVIGFITPLSAKISRRILSGGDWKALLDLIEEVRGRVSRETGRTVDVNSCYEAGYDGFWLHRLLEAHGIRNYVIDPASLQTDRRARQVKTDRIDTERLLRSLMAYLRGEPKVWSVVRVPSVAEEDARRLHRERHRLVSERVQHVNRIKGLCALHGIYDYQPLRPQAMARLEQLRTAQGISLPPRLKSEIKRELQRLELVVEMIATLEAERDAIVEDEASTHVNAKKIQNLHQLKAIGPEFAAVLVGEIFHRDFNNRRQLASYVGYAPSPFQSGNVATARGEPPGSNSPGCGCATSPTAI

SEQ ID NO: 489167 - protein, 362 aa, unidentified
MQIIGCDLHARQQTLAMLDTGTGEVVNRTLRHEGNSVREFYSALPGPVRVGIEATGSMKWFLQLMEELGIDCQVGHPATIRAAEPRRQKHDQRDAELLLKLLVEKRFPSIWQPSKELLDLRGLLLHRHQWVRLRTRIQNALQAIALANGLRRGSSLWSESGQRDIASLPLATHTAHRRSELQAMYARFEAEIEQLNQQVLEQAGQRPTAELLMSHPGVGPITALATDVFLGDPKRFNDGKALASYIGIIPRENSSGGRQRLGGLSKQGNPLLRFLWCEAAAHAVRRDPELRRFYRRKLVQKGLGKARVAAARKLGIRLWIMLRDQIDYNEFCRRGQMQQKSGDACAGMPGARYGAKSHRLID

SEQ ID NO: 489168 - protein, 445 aa, unidentified
MRVMHERVAGIDVHKDMIKVAIRFPGEKGTRKTEVLEFRTFWGVLQEVARELRRRGVTHVAMEASGVYTEPVYHALCEQDFTGVLVINPKHVKALKGHKTDARDCRRIAELLECGLLRGSYVPSAEQKEMRDLTRYRKKLVQARTSEIQRMQKALESAGIKLGSVLTDITGVSATAMIDALIDGERRPQVMADLARGTLRAAGKQADLTMALAGRFTAHHATLLRMHRDQVKLNNHAIAGLDGQIAAAAGRWQREMDLLMTIPGFGPVAAATWIAEIGPGPHKYFDSHDKLGSFVTLAPGNYVSARKRRHGRTGDAGTYIKPALIEAAWGAIRVRGRLQARYNRLVRRFGGDKNPGAKKKAITAIAHTLLKIAYQVLRSGEPYAEPGADFYTRRNSPGSQQAWLLRKLEQLNPGATITITLPGAAPPDGGAAPAAPPGTALTLPR

SEQ ID NO: 489169 - protein, 426 aa, unidentified
MTQTDSSAEPQFAAFIAIDWADQKHAWSLQAAGSDQRESDEMKHTPEAVGAWVSMLSARFAGQPIAVGLEQSHGALVFMLSQFANLHLYPIHPRAAAQFRAAFYPSGAKDDPVDADLLLDMLVLHRKHIRPLRPDNEQTRLVQHQVEARRRLVNEKTRQVQRLTAKLKLYFPQVLDWFDKVDSPLVGALLLRWPTLPDLQRARPDTIRSFCTQHNCRDSKRIEERIQKIRQAVPAISDQAVIQPAVTMTRNLVALIATLRAGIAKFDQQIAKAAAVHPDFLVFDSFPGAGPVLAPRLLAAFGSCRERFLNAAEVQKLSGIAPVVNRSGKAESVHFRRACPKFLRQTFHEWAGHSIAFCDWARVFYQQQKQQGHDHHAAVRALAFKWIRIAFRCWQDGVPYDDARYVASLRRHGSPIAAALAASVQD

SEQ ID NO: 489170 - protein, 321 aa, unidentified
MNSTQQPLNIGADIAKDEIVVACAEQSFTPRKIANRRSALLAWLNKLPQGSRIAMESTGSHHERLAELAHKLGLTVYVLNAKDVRHYAKGVGLRGKTDRIDAQLIARYLAKEHAELHPFVPPSAQQRELERLLRRRTKLVRIRAAVKQSLNGMRGFAVELKCLLARLDALIKRIDIKMRASIEACPHSQEACARLQRIPGVGPVVGGGLLNTLQRVAFGRAAAFVAFCGWDPRPYDSGRKSGRRRLSKRGPSLLRYLLYNAAMAASRTKAWRPLYQRSLAKGLSRTEALVILARHIARTAWSIYTHKTLFDAQRISQQVLT

SEQ ID NO: 489171 - protein, 387 aa, unidentified
MSQTFAAPIPAAVDYERTLVLAIEVSNKSWVLAEQVPGLPHTKAKRTINPEAEALLAAITGYRTHAAASGRSIERVIAVYEAGWSGFWLARWLMRRGVEVYVVQPSSVPVDRRMRRAKSDGIDAELLLRTLLAWLRGEPRVCSMVPVPDEADEDARRCVRERTELISERIGLTNRIGAVLATLGVSDYNPLLRNRCRRLAELRTGLGEPLPANAHAKIKRLLARLELVLTQIAELERERDAVVETEAPDKASKMIQQLTGLRGIGVQSATVLVREAFVRRFANGKALGSYAGLASSPYSSGGIDREQGIGKAGNRRLRTVMVELAWLWTRYQPDAAQVCWFRERVGSTGPRVRKIMVVALARKLLIALWRFVIDGVVPEGAVLKPAA

SEQ ID NO: 489172 - protein, 390 aa, unidentified
MTKRKTETVNDLSRCLNPLDMDATLIAVIEMSQSSWLVAGIVPGVERQPLKKLAIDERALLKLLGRWRAEAEKKGHRIARIAVAFEAGHDGFWLARWLTAQGVEAHVIHASSVAVTREHRRAKTDRLDTGLLKRAFLGWLRGERGHCKMVAVPTLAEEDAKRPSRERETLVGEASRIITRIKAAFVRLGIRSFNPKLRTADASLEILRTPEGEAIPPNTLAALKRDLERHRIVKQQIRQIEQTRLEHLDKASAEGPHAMVLLLARVVGIGVETADMLVQEVLSRNMRDRRAVARYAGLTGSPDESGAKRREKGLARSGNARVRRGMIQLAWRFLMFQKDSALAEWYRQRTANAPSARKTLVVALARKLLIALWRFARDGVVPEGVRLRPA

SEQ ID NO: 489173 - protein, 345 aa, unidentified
MEITTVGLDLAKNVFQVHAINGAGEVVARKAMRRAQVLRFFERLDPCLVGIEACGTSHYWAREISKFGHEVRLMPPAYVKPYVKRGKTDASDAEAICEAVSRPTMRYVAIKSCEQQAALTVHRTRDLLVKQRTQLVNMIRGLLAEFGIEIRRGITHALSLAERIATDGMPGIPVLAAKMIACLAGQILDLQARLREIERELLAWHRSSDIARRLATIPGVGTICATAFAASVTDPHQFRSGRQFAAWLGLTPLQHSSGGKERLGRISKMGDKYLRRLLVVGMTSLVRRAKYKPDAVNRWLAALLSRKPARVVTVALANKAARVIWAIMARGGIYRAPQPAGAAVA

SEQ ID NO: 489174 - protein, 356 aa, unidentified
MSHDVKYIGMDVHKEAIVIAVLNGSGKLVMETILETKASSILQFIHGLRGELHVTWEEGTWAAWLYDLLQPQVQEVVVCNPRRNALLKEGSKSDKVDARKLADLLRTGMLRPVYHGENGLRTLRELARSYQTIGKDLTRVMNRLKALYRGWGIACAGTQVYAPRYREEWLNKLPQAGVRRRAELLYQQLDGLQALRRNLRPEFLAESRKHKAAKLLRQIPCIGPIRAARLIALMQTPHRFRSKRQLWTYSGLGIETHDSAQYRYVGGQVQRSKKPQQIRGLNQNHNHEMKEIFKSTATRASCGMGPFHDFYAALLAKGMEPEMARLTLARKIAAITLTLWKKGARFDAEQLKTQAA

SEQ ID NO: 489175 - protein, 403 aa, unidentified
MLFCGVDWASDHHDVCIVDADGTVRWRRRITHDPTGIAELRAAITTAEPDPAQVCVGVETSHGLLVGALVNAGYVVYPINPKAAERFRDRRKPSGGKNDRLDAEVLAQAVRTDRASLRALLPDSALASEIATLARDRHALVREHTRLLNQLRSALSEYFPAALVAFDLDADSTLAFLERYPAPEAAAKLSALQIAAFLRARRANRDLAAKAAAAKDAFRAPALRARPEIARAKARLVRVVCGQLLALRPELRAYEHELERLLKTHPEGELFQSLPGLGVILASRVLAGTGDNPKRFRSAAGLCAYAGTAPILQQSGKRVVVKARSACPKEFRDAVQQWADQARRPARSAWAAEFYRRHRERGHNHNESLRALGNRLLALLFDLRRRGLRYDEAVHAANIRWAA

SEQ ID NO: 489176 - protein, 322 aa, unidentified
MILSMGVDISKKKADIIIYNDVVKKNYVITNSVSSIKRFLKKHSDVDRIVMEATGTYYLKFATIANELGFYVSVVNPYIIKKYGEYKFKRSKTDKIDAELIAKYGYENTPKKYKITDKLRSKLKSLLTTITGLKKQITQNTNRIEALSQFPNNETKYSIKALQKVIKAIKREKSNIEKEIQAIIKNNFKKTYELLDGIKGLGPGCNAAIIAYYGDFSDFDSAKKAVAFAGMDPIKHESGSSVRKKSKISKRGNKVLRALLYMGGMSAIQYNKQCIKLNKRLKDKGKIGKVRIMASAHKLLRLAYGVVTSGVKYDPDYLKKSA

SEQ ID NO: 489177 - protein, 343 aa, unidentified
MEHFAGLDVSVKEISLCIVDDTGKIVREVKIASEPDALLPVLTNPAYHFKRIGLEAGPLSQWLFSVLAEAGLPAICVETRHMRAALKAQINKTDRNDARGIAQMMRAGLYRPVHVKTLRSQKLRMLLTHRKLLQSKAIAIENDLRATLRNFGLKVGVVGAVRFEARIKELVESAPDLVVLVEPLLTVRRALREQIGILHRRLLAIVRDDDVCRRLMTIPGVGPVVALTYRATVDVPARFRNSKAVGAVFGLTPSKYQSGEIDRTGGISRCGDEMMRAMLYEAAHILLVRTTKWSWLRAWAMTIARRRGLKKAVVALARRLAVIMHRIWVDGTEFRWTRETAAA

SEQ ID NO: 489178 - protein, 406 aa, unidentified
MQVYTGIDWSENKHDVVFMNQAGAVFAQLTIAHTVEGFLQLDAARQQLQVTPAECPVCLETAHNLLIDFLWSRGYVHVYVIPPSVVKANRGRQGQSEARTDPSDAELIADILRTDRGRLQPWHPDSMLTQQIRAQVSLVRHLTRDVVRTSNRLRAALVRYYPAALHVFSSVRTQVALAFIRAYPTPQAAAALSFAEFEAFARAHRYPRPSQLRHNYARLQEPYPEPMPGTVAVFQTEAVQLAGLLLEELQANKEAKRRLKTLFDQHPDAPIFASLPGTGDLLAPALLAKFGDDRQRFPTAASVQALAGTCPVTVSSGKRRSVRFRFSCDRTFRDIAQKWAMCSLSQSLWAAAYWQQTRPRCHSNSHAYRCLANRWLSIAWAIWQKRECYDESYHLQQRALRSKKRP

SEQ ID NO: 489179 - protein, 316 aa, unidentified
MEGRELFVGIDVSKARLDVAVRPTGQEWSFPNEEGGCAALATQLQALGPALVVLEPTGGMEVLLTAVLAEAALPVALVNPKKVRDFAKAMGKLAKTDRIDAQVLAHFAEAARPTPHPLPDAQTKALEALLARRRQLVSMLTMERNRLTGALPRVRSQLQAHIDWLEKASEELNDELGRMLRDSPLWREKEALLRSVPGIGPIVSLTLVAQLPELGTLDCKKIAALVGVAPFNRDSGTFRGKRTVWGGRAPVRAALYMATLVATRYNPVIRAFYTRLCKAGKPKKVALTACIRKLLIILNAMLKHHTSWQTNHALNS

SEQ ID NO: 489180 - protein, 346 aa, unidentified
MKQLFIGLDVHKKSWSVTLQEGQAVLKRFSMEAHADTLIAYVQKYYPDYEIECCYESCCLGYHIYRNLSKAGWNVVVVNPGDIPRINKQNSSKTDKIDSRYLCQQLASGHLKGIYVPDEKQEQFRSLFRRRADLVKSIRRIKNHIKAMLLYYGITLPEHYDNINWSWAMIGWIEKLKWLYPPAAATMQSRLEEYGFLKKQYLHICNELRGYARKHYKRDYYLLRSVPGVGPVIAVGMLAEVGDLRRFKGIDRLSSYIGLVPSLYSSGTKSYTKGITVRSKHLLRSYLIEGAWIAAKKDPELMQYYQERKGSDHKKLIIKIASKTLSRMYSVIKRGEPFQSKEAIGI

SEQ ID NO: 489181 - protein, 411 aa, unidentified
MEVIHARCAGLDISKRDAKVCVRVAGAGRRKTVETVTTWGSMTSQILALRDHLIAERITCAVMEATSDYWKPFYYLLEGAGFDVLLVNARHVKNLPGRKTDVADATWLAQLGAHGLVRGSFVPPEPIRQLRDLTRARTAITRERSREVQRLEKLLEDAGIKLSAVASDICGVSGRAMLEALIAGNNDPAALAELAKRRLRSKIPALTEALTGRFTEHHAFLARVHLDLIDQHTAAIDDITTRIEEMIAPFDGFRDLICSIPGISTLTADVIIAETGADMTGFPTAGHLASWAGTTPGNNESAGKVKSSRTRPGNPYLQGALGAAAMACAQNPRTYLGARYRRIAARRGPQKANVAIQHSMLIAIWHMGTNGCLYDDPGADYFNRLHPERAKKRAIHQLETMGYNVTLTHAS

SEQ ID NO: 489182 - protein, 430 aa, unidentified
MNYKQNMRLNQLTDRTLIIGIDVSKEFHVARAQDIRGLEFGKPIKFENSLSGYQEFERWIREIRLAEDKQRVIIGMEPTGHYWLNIARYLKNREGYIVVTVNPMHVKKIKELDDNNQTKTDKKDAKIVAQLVKDARYSTPNLLEGKYEELRNAKNLRQVITKDLNRTKNQIYNWLDRYFPEYKEAYVNWESKSFIRIIKKYNFPSEIEKVSPNQIYEMLPPKMRRGVGHRKIEKLVTASKNSIGIKEGLSFAKLEIQYLLEKYEGFKQQIEEVDKQVVEICGSLDETEKITQIKGIGIVTASGIVAELGDIRKYENPKQMIKMAGLSLTENSSGKIKGKTTISRRGRKDLRRILYQVILGMIRTNTAFRDMYLYYTTRNKNQLTGKQTIIVLCRKLLRIIHTIIVKDTDYDENKMKSEIRYPEEFLISVA

SEQ ID NO: 489183 - protein, 339 aa, unidentified
MSLYAGLDLHSSNTYIGVLDPQFNRIFKKRVCNDLDLILQTLEPFRDRLRGLVVESTYNWYWLVDGIMDAGYSCVHLANPSAIKQYEGLKHSDDQHDAFFLAQLLILGILPQGYIYPKEARPVRDLARKRMFLVQQRTAHILSLQSLLARCCGQKVSSSQLRKVTGQDLKRWLKEEHLVLSAQANLDNIVFLKQQIGRIEAAIQKQVKLSEAFNCLLTVPGIGKILAMTIMLETGDIHRFANVGNFASYCRCVSTQRLSDGKSKGSGNRKNGNRYLSWAFTEAAQMARRFNSRFRSYYDRKAAQTNSILATRALSNKLARVCYYIMRDRVEFREELASH

SEQ ID NO: 489184 - protein, 354 aa, unidentified
MKYYTSTTEFNCGIDLHARQMYVCVLDRTGKKLVHTNIKNNDFAYFLKLVAPYRHDLTVCAECMFGWYWLADACADAGIHFVLAHALYLKAIHGGKNKNDRLDSEKIAHLLRTNFIPPGYVYPAAKRPLRALLRQRLLYVWNRSELLARLQSHQLAYNRPTHRQTLYNRESWSEQLLTAEPDPVRQFALQNDLALVGHYDTQLASLEKELLKLTKQTSSRDFTLLQTTPGIGDYLGLTILHEIGDIARFPTVKDFLSYCRLVKGTVASAGKIKGLRGAKLGNPYLRWAFGEAAVIAKRDPLVIGPLAQRLEARLNNKFKANTVLAIKLARAVYFMLKTKTVFDPERLVAALSHN

SEQ ID NO: 489185 - protein, 342 aa, unidentified
MEHVAIDLGGRESQICIRNAEGKVIKEKRCQTIKLGDFLKTRPPSRVVMETCAESFAVAATVQSMGHEVRVVPATLVRSLGVGARRLKTDRRDAQVLSEVSTRIDLPSVHLCSERSRDRKTLCGMRDGLVQARTQLTNTVRGWLRTQLVKVKSGQVESFPERVREAVLSRPEGMPAFVERQLQVIESLTPQINAATQELAAQAVQDEVCQRLMSVPGVGPITAVRFVATLDEPKRFADAHRVESYVGLVPSESSSSGRQRRGSITKAGNSAMRWLLVQAAWCLWRTQPHDPMVQWARRIAERRGRSMAIVALARKLCGVMYAMWRDGARYSPKLAAQPVEPV

SEQ ID NO: 489186 - protein, 341 aa, unidentified
MRLYTGIDLHSSNSYLAIIDETGKRVFKKKLPNNPEQILSALAPYKDSIVGIVIESTYNWYWLVDALMSDGYSVHLANPTKIQQYHGLKYSDDQHDAFWLAEMLRLGILPEGYIYPKEDRPVRDLLRKRSHLVKLRTSLIISLQNIICRNNGFRLKTNDVKALNTDRVAPFLDQNEDLALAGKISKESIDFLTRQIKTIESIIEEKMELREPYKNLLTLQGVGKTLGLTIMLETGPISRFTQVGNYCSYCRKVSTKWISNDKKKGKGNKKSGNKYLAWAFSEAAEIARRYYPEARAFYQRKMQKTNAMIAHQALAHKLARAAYYIMRDGVPFMPEKIFRSS

SEQ ID NO: 489187 - protein, 401 aa, unidentified
MKDPCIALDVSKGKSHCQGFIAQDEPLGRAVMITHDLTGLESLMAMKNRLLKHHERVIFVFESTGIYHKSIQSYLDERHESYIILSPLEAAKIRKSRLRSAKTDVKDCRSIAEAYFLRDYRIHGKLDERDEKARALNRHYGFIVRQIRHLKIQFRSVLDVVFPRFDLLYENPYRTIPFTLLKHYRHPGLIKSKRIGTIAKTLMKETTHREAFCLAEAGKILDYAQRTQSGCLPEQQEVIILRNLALELEKKMKEAQSVLDDLEACVKENEVYKRLMTMPGVATNLASRITAEIGNINRFEHKKQLVAYAGTDPKIYQSGQKTGEHLPITKKGNKHLRSLFYLAARAAVDSKKPNTIKRFYASKTTQANPLERNAAIIASSNKMMHVLFSLCKNHQDYRNQA

SEQ ID NO: 489188 - protein, 344 aa, unidentified
MDHSAGLDVSVKETSVCIVDDTGKIVREVKVASEPEALLAVLKNPAYHFKRVGLEAGPLSQWLFSALAEAGLPVICVETRHMRAVLKAQINKTDRNDARGMAQMMRVGIYRPVHVKTLRSQKLRLLLTHRRLLHPEAIAIDNDLRGTLRNFGLKVGMVGTVRFEARIRELVENLPDLAALIEPLLIVRRTLREQFCILHRRLLAIVRDDEVCRRLMTTPGVGPVVSLTYRATIDVPARFRKSKSVGAVVGLTCAKYQSGEVDWDGRISRCGDEMMRTMLYEAAQAMLRSKKWSWLKAWAMQIARRRGMKKAIVALARRLAVIMHRIWVDGTEFRWTREQATTAA

SEQ ID NO: 489189 - protein, 316 aa, unidentified
MAQIVRTVGVDVSKAELVVTSWPERKRLVVKNNSAGWREVSAWLTAEGIERCGLEASGGYERDAATFLADAGHWVSILNPERVKRFRQAQGWRAKNDGIDSAAIALFVAQTENHRFVPDAVRRQLGEWLATRSALVDAWVRLAGMLEHCTDAVAKRLLGVEILRLKHMTRILERRMAAVLAAAPRLAALKRLLTSVVGVGAVTATTTIAHLPELGQLTRRAIASLVGFAPFDDDSGPRHGGRHIEGGRERLRRALYMATLAAIRHANPVLRSFYRRLRRKGKAAKVALIATARKLLVILNAMVRTGQLWRHASAQA

SEQ ID NO: 489190 - protein, 343 aa, unidentified
MQAVTTIGFDIAKSVFQVHGVDSVGQVIIRRQLKRRQIIAFFQKLPACLVGIEACASSHYWSRELQALGHNVRLMPPAYVRPYVKRQKNDMADAEAICEAVTRANMRFVPTKTAEQQSGLMLHRTRHLFMRQQTSVINAIRAHLAEFGIVAPVGRRGVEELLRVVADPSDKRLPEIVRACLAALGSQLLSLKKQILDFDRMIMAWHRSNQTSKRLNCIPGVGPLLSTALVASVADPKTFRSGRNFSAWIGLVPKQRSSGGRDKLGSISKQGDRYLRGLFVAGAFAVIRYAKIHGAKHRPWLTALLARRHTKVAAIALANKLARMAWAMMATGERYNYPASLKV

SEQ ID NO: 489191 - protein, 408 aa, unidentified
MLKIVYPNCCGIDVHKTFVLAVIAITDEHGVTQYFRHRFSTFTKGLGELKQWLEYYSCTDVCMESTGKYWIPVYNVLEDSCSICLAHPKYVKAIRGKKTDKKDAKWIADLFKHDLVAGSFIPPLPIRELRDLVRYHFKLTNFCSSEANRLQNSLTVSNITLSSVLSDVLGVSGSRIIDAILEKTTDEIDLSALIHGRLKSKLSDLELAIDGKITDEQAIKIRIIKSHYDALTLCKSDLEKAIIEVAEEFRAQQELIQTVPGCANQFTAIKIISEIGVDMGQFPTAGHLCSWAGLTPTNDESANKKKSVRISKAGHYLKPLLVQIANGIVKSEKYPEHRNKYLQLKKRRGHKKAIIAIARRILTAIYHVLLQREPYDSSYYSIEIVHPNRVMTINEAISFAKSHGFVVS

SEQ ID NO: 489192 - protein, 366 aa, unidentified
MQKISTMQASGSKNFQAGQLTIGLDLGDRWSFYCVLDEFGKVLLEQKLPTTPEAIKQTFAKIPPSRIALETGTHSPWLSRLLAELGHEVIVAHAQRVDLITKSTRKDDRHDAKTLARLARIDPELLGPVRHRSAKAQIHLTVIRARAELVRARTALVNAARGSVKSYGERLPKRGTQQVSRELGAGLSQELREVLEPLFQEIESLNERIKEYDRRIEKIARQEYPESELLKQVKGVGDLIALAYVLTIEEPHRFRKSRDVGCFLGLQPGRRNSGESEPQMHISKAGDEYLRTLLVQGAHYILGPFGEDSDLRRWGHKLAERGGKNAKKRAVVAVARKLAVLLHRLWVSGEVYEPLRNSQKVMSAVA

SEQ ID NO: 489193 - protein, 475 aa, unidentified
MARQAAHSDPDLVPMFPHETLYVGVDVGKFRHVAGMLSRTLLKRHERFEGCPTFTFDQSREGFRAFVERLCELVPIEQITVLLEHTGHYHRLLEQYLLDLDITVYRIHVQERPKGMVKTDKRDALSLANRLYTQLELGAQVEDKMQLVRRALPPTQAASQLRGLIQHRYELSHQCTQLRNKLTSICDELFPELVQIFRDPNREVALAFREKFPTPHDMATADMAALRQLRPRSFPSQAQLLKLQQLASETIGIKDRHRQQGLLIEQALLIKELRMVQEHLEILGTTITEIVTSSREGQILLSIPPMGPIQAATILATVGNIANFEKACELKSYFGWAPKRSQTGVSFDRTKLASRGVRPMKQMLFLMAARATTLECEWAHIYQRLLPRLATYDERTKSYRGKMRVLGRIAGQLATMIFALLKTDYETLSQVAPGEAPPPPMLYDPAIHRKHQEGHYRSLKPGTRPRTIIQLPKRT

SEQ ID NO: 489194 - protein, 415 aa, unidentified
MYYVGIDIAKSFHVVSIIDDEETKVINKPFKINNDAKGFEKLLTILDSITLDKSEFTIGLEATGIYGENLQEFLKSKGYSVKLLNPFQTTRYREQITLKKVKNDEIDSLVIALLLKSGKFSSGYITDDEYQSLRTLYRNRATIQADMKDVKKRILTQITVTFPEFENFMKPFSVSGLALLDKYPTAHHYKHSSVDRIMKLFRHIQGNNFTQSKALQLLELSKESIYSGKAKDARAIAIRSTIRLLQMYLSELDIIEAEILSLLQNSSVKTTVDEVGIEIQKTDTLLHNLKTIPGVAEKTIAALISECGDLTRFPSIPKFIGYLGLFPTENSSGNSKYIGHLSKRGSPLAKHALYMSAVSCLIHNTQLKQLYDTKRSQGKSKKEALIAVSRKIATIIYSIFKYNVPYDPNRVFAKS

SEQ ID NO: 489195 - protein, 531 aa, unidentified
MVKGCRKERGRNLGLEDRIPDMFPKVIHQRGKRPAQGARPKVVNNFAAGYNDGGEQLATAETRLVVPHPARVTRRLPTPPAAPGPSAKRTPPHEGSDIRSRPSQAPAPLRAARPMNANWNQQPYFAALDWAKDHHDLIVVDRVGTIVADFQFAHTAQGWEEFSQKMQPFGKCPVTIETSAGMAVDQLLQRGYTLFPINPLAAKEYRKRKAPSGIKTDRQDAWCLADALRTDGHAWRALRPQDEATATLRLLCRDEIGLIEHRTALVNQLQATLGEYYPLALESFEEWAKPFTWAFVRAFPTPAALSAAGKRKWQNFLHLHKLWRTETATERLSCWARGQQLNASPAVVNAKSLLALSLVNVLETLQRQIQEYRSRITAAFAKHPDHDVFGSLPGAKQTLGPRLLSLIGSVREIFPDPDSLMCQAGVSPVAYESGKIRKARIRFVCDHFLRHTVHLWVDESRKTCDWAQTYYQTKRDKGHNHASALRCLGKRWLKVLWRMWQDHAPYDESKYLKALHQHGSFVWKSLQNQLP

SEQ ID NO: 489196 - protein, 481 aa, unidentified
MAQENKHKKTRRPKAKGPSRRKQRKGMCLEDRPALEPNAAGIDIGAREIYVAVPPDRDPHPVRVFHTFTEDLQAMAQWLKRCGITTAAMESTGVYWIPLYDVLEAHRIEPCLTHARHMKNVPGRRTDWHECQWLQYLHSVGLLRAAFRPDAEVCAVRAVLRQRQELVEMAGQHVQHMQKALTQMNLQIQHVISDITGTTGLAIIDAILDGERSPTVLARLRDPRIQASAETIQKSLVGTWQPEHLFVLRQSRLLFRTYQQEIVKCDQEIERRIGTFPPRVDPQQKPLPPDHKRHRNAQKKRKKQGRSENEFDLRTEAYKLFGVDATQVPGLEMSVLPLFSEVGRDLSHKWPTSAHFASWLGLCPDNDISGGRVLWKGTRRIQTRAGQIFRMAAYALHRSPTPLGSYLRRMKSKLGPRAATTATAHKIAVIFYTIVTKQVEYNESIWAQRDLHREKRLADKIKRQAQQLGYKLVPLEEKPAA

SEQ ID NO: 489197 - protein, 455 aa, unidentified
MQQPVEVSVEEGAEIVQRVCGIDVAKASGMICTRAPHDRLAARRVTKVWEVKATTKAISELADHLAAERVERVVLESTSDYWRPFYYLLEAAGLTVWLVNARQVKNVPGRPKSDKIDAVWLAKLAERSMVSPSFVPAEAMRHVRDLARARFDLVEDRTRVKQRVEKLLEDSLVKISSVLTDIHGLSGRAMMEALIAGERDPKRLAGLAKGQARARLGALEEAADGHFTDHHARLARLLLDQIDDLSRRITTLTSLLDEAITTLPQPAPDDRTSVEKATVDAATGEITTAAARFSTAVERISAIPGGGPDSARAVIGEIGLDMTVFGTAGRLCSWAKVSPRTVQSGRKTGRGATGKGNPYLKAALGQMATGAAKTDTFLGQRYRRLIRRMPKAKALAAIERSVLVIIFHLLADPTTTFNDLGPDYYTKRLDMQRRTRNLVNQLEALGHHVTLTPAA

SEQ ID NO: 489198 - protein, 314 aa, unidentified
MAMHATRPVIGIDTAKEELVIQHDDEKRHLAVDNTAAAIRQWLAGLPEGCDIAIEATSTYHMEVTERAHAKGHHVYVVDGYRLKNYREGVGGRAKTDLTDAQLLARYLRKEKDELRRWAPPPKAYRTLQSLLRRRAALVKARTALRQSLSAEPLLKAALATLLKQIDRIDRLIQKRLREAVHAAGLRDQVQRCQAIDGIGELTATALVMAFLRGDFQNSDAFVAFLGLDVRVRDSGKLKGKRRLTKQGDTEVRRLLHCSAMSGARHPTWKTFYQRYQDRGLKTTQALVILARKLARVAFALMKYQENYCAPRLS

SEQ ID NO: 489199 - protein, 327 aa, unidentified
MSFATLGIDISKDTLDVALYQDDSYRLATFTNEKDGYRRLAKWLKKHKAKECRVGIEATGRYGEAVAMYLYERDYSVSVVNPARIKAYGASMLKRNKTDREDAKVIAHFCATQNPGVWAPPPPEIQELQALTRRLEALKADRTRELNRKQSGVQSKTVLADIDAHIDFLKNQIAIIEQRIRDLLDQHPDLREQHDLLTSIPGIGDITAARLIAEIPDVNDFQSANQLAAYAGLTPRNHNSGSSVHRRGRLVKTGNKRFRTALFLPALAAMRFNPIVQALVERMQTNGKNRMTIVGAVMRKLVHLAYGVLKHRKPFDPDYLVNVQVSA

SEQ ID NO: 489200 - protein, 375 aa, unidentified
MKVVFPTCCGVDVHKTFVVATIITTPADSLQPHYQKKRFSTFNSDLNRFATWLLEHNCLDVCMESTGKYWVPVFNILEKRGIRVVIANPKWVKAVKGNKDDTKDSKWIGDLFRIGLVKSSFIPDLNIRILREFTRYRYKLVSMKSSEKNRFQNAFTVCNVALDSVVSDMFGKSATAITDYLTSDESFDPKHCVSLLQRSLKKKAEQVLESIEGYSIADEQKARIQIIREHYDFIEKIITKVDTCVNEMVEKYEGEINLLCTIPGIDRYSAITIISEIGTDMSQFGSSKRLCCWAGLTPGNNESAGKKKSVRISRAGVYLKPALVQVAHAAVKDKANPYYALKYERIAKRRGKKRAIIAIARMILTIFSKSICLNI

SEQ ID NO: 489201 - protein, 409 aa, unidentified
MSTAIRDAVFVGLDWATRTHAVCVIDAAARVLDRFVINHDREGLAELLRRLARFGASLRIAIERPSGLIVDALVEAGHQVVPIHPNAVKASRPRYRSHGAKSDASDAYLLADLLRTDGHRWAALSPQSDSIRALRALVRARDDLVASRLALTNQLNSTLDAFWPGAANIFAAVDSPIALAFLSRYPTPASAARLSEAQLRRFCRSSHYSGHRSSTELLARLRAAPQGHTGELCTAAMADVVRALVAVLERLVEQLAKLTRRIEHFVESLPDGQIIMSFPRAGRVCAAQILAEMGDVRERYPSDERLAAEAGVVPLTYESGKTRCVGFRWACNHRLRRAITTLADNSRHANLWARGIYIAARQRGCDHPHAIRILARAWLRVIWRAWFDRKPYDPALHLGALKAESSSGG

SEQ ID NO: 489202 - protein, 349 aa, unidentified
MRFYTNQHRHYCGIDLHTKTMYACILDRDGQVLVRKNLPSNPEAFLEAVAPFRDDLVVAVECIFTWYWLVDLCAAESITFILGHALHLKAIHGGKAKSDRIDALEIAMLLRSGMLPQAYLYPAGMRATRDLLRRRLHLVRKRGQLLAHIQMTNQLYNLPAFAKRIAYPSNREGVADHFEDRVVRKSVAVDLALQGRYDTLLTDLESYLVRQAKQHDPQAFALLRSIPGVGKVLALTILYEIHDVHRFDRVQQFASYARLVKCAKESAGKKHGPSGAKMGNVHLKWAFSEAAVLFVRHNEPGKKLLAKLEKRVGKGKALSILAHKLGRAAYYILLRGKAFEIDRFVATVN

SEQ ID NO: 489203 - protein, 397 aa, unidentified
MFYLGIDIAKHKHYASIIDQAGKPITKPFPFQNHKEGGQTLLNQIYQYIESPTEILIGMEATGHYWLAVYSFLLDHGFSVIVLNPIQTNAWRKGTEIRKRKTDAIDATMIADIIRFGRFVETPLVDEKMFALKQMSRFRNALVSNMSDLKRKALVVLDQTFPEYQSIFSDVFGKTSSQILLEYASPSDYEQISIDDLTQIIEQTSRNRLGKKTANKLMELASNSFGVTFCKNAFSFQLKMLMEQIRFIEDQIKECEDEMSQLLIDLDTPIMTVPGVGPILGATILSEIGDIHRFDKPSKLVAYAGIDASVSQSGQFESSGMSISKRGSSHLRRALFQAAITAHKHDPVLKAFYEKKRKQGKHYYVCIGAVARKLCYIIYAILKNNKPYEIPQYSKEV

SEQ ID NO: 489204 - protein, 466 aa, unidentified
MPHARSHRARRVRPARLPPELRHVHLNAAGIDVGAGGHYVAIPPGRDPEGRDVREFGAFTADLYTLAEWLRRCGIETIAMESTGVYWIPLFDLLAERGFEVRLVDPRQLKNVPGRKSDVLDCQWIQQLHTFGLLSAAFRPDDQICALRSYLRQRAMLVTYASHHIQHVQKALEQMNVKLTRVVSDVTGVTGMRIIRAILDGQRDPRALAGLRDRRCQHDEATIARSLEGSWRPEHLFALRQAVELLDFYQQQLAACDREIEAYLGRFDAKHGGETLPTRPRTTKPSRTAPTFDVRTHLYRLTGVDLTRIDGIDAHTALKVVAETGLDMSRWPTEKHFASWLSLAPGTKVSGGKKLSGRTTPSANRAAAALRLAARSLYQSKSALGAFFRRLKARLGTPKAITASAHKLARLIYRMLRFGTEYVDQGQDYYEQRYRARVVSTLTRRAAALGYTLVKTEGLSSAPSEI

SEQ ID NO: 489205 - protein, 400 aa, unidentified
MLSIGIDVSKGKSTVCGMKPGGEIVYAPFEVQHTREGMSELVSLLRSSGEEVRAVLESTGSYHCPVVAALLENGIFVSVVNSLRMKRFCSQSIRKVKTDRIDAMQIALYGLAYWQELQPTKLPEDTYRELQLLARQYYQMTSLLIKAKVDFNAICDQVLPGMQELMSDHAGRHKLSDFVLRYCHTTHILEMGETRFRKDYCKWAEKKGYRNCERMAALIFATAQNGIPVLPNAPSTQIVITEAIRVLHTVEASRDAILTQMQALAKTLPEYSLVREMPCIGDTLAPRLIAEIGDVRRFHSKRALIAYAGIDAPPYQSGKFCANNRHISKRGNRYLRKTGYEVMQSYVMHKPANDPIFTFIEKKRGEGKSGKLAMVAGLNKFLRVYYGKVTELYRSLPAIE

SEQ ID NO: 489206 - protein, 380 aa, unidentified
MTDIAEIIGGADTHRDTIHVAVISATGQPRDDREFPTTEAGYRAAIEFLGHHGAPRVVGVEGTSSYGAGFTRALAATGIPVVEVCRPDRAARRCRGKTDTLDAYAAARAALSGHGVSEPKDERTGAVRALLNARRSAVKARTASINQLKALLVSAPESLRGRLRGLSTRDLVTEVTRRRPSTHADPTIAGTLTAAKALADRIVFLDQQIAALTAELDELTSMLCPALRSAYGVGPDTAAQLLVTAGDNPQRLKGEGSFAALCGVAPVPVSSGRTSRHRLSRGGDRAANNALERVPSSGAGSVVSRRVVDRTPTDRRGGLVPLTIAIVALDEGPWVYISLEGEIPRSPNGAVRVRFQPHPWEDRFPVFAVSADPRARHIGP

SEQ ID NO: 489207 - protein, 482 aa, unidentified
MKKRNIYQNQSQELLSLFEQAANNAKVMCVPIDYAKKDHVVMFCNGYGDILRKPFSVKNSPEGVDYLTDQVMRSCRQRAISQQHVFFGGEQVGSFADNFVSTLRSQGWLVAGVNAHEAKTQRENLQASTDCLDLLGIAKSLLNRRANCSPAQSGIYLNMRTVVRHRRKLVVITTEVKNRIHAVVDRLFPGFLNESKSGITPFSNSSLWLMKERFSAPQIRRRRRSTLIESLRRLGTKKSECTADTLQQYAAQVLKPPQDYVHMLQLSLAQHVKHFCCLQESIDQLEKEIALNLAQTQGAFLTSVRGVGIVLAAGVSAEIGNPFEQKAINNLVSYCGIIPRVKQTGGPQGETRTGKVAKRCNRILKDYAVQSASHLGLHGPADLMSDYKRRDAAGQHADFGMARRYLRMAMCLMRTSQIYLPSRLRKAQAQVKQRADYYLMTWPYLRDKWQKLGTLETAFKADHPLGQWRTIVQQFYGIKLSL

SEQ ID NO: 489208 - protein, 341 aa, unidentified
MDYFAGLDVSVKETSVCIVDDAGKIVREARVASEPEALLQVLTNTIYRFKRVGLEAGPLSQWLYSVLAEAGLPVICVETRHMRAVLKAQINKTDRNDARGIAQMMRVGLYRPVHVKTLRSQKLRMLLTHRKLLQSKAIAIENDLRATLRNFGLKVVGTVKFEGRIKELVENLPDVAVLVEPLLVVRRVLREQVGILHRRLLAIVRDDDVCRRLMTVPGVGPVVALTYRATVDVPARFRNSKAVGAVFGLTPSKYQSGENERTGAISRCGDEMMRMMLYEAAQSMLVRSAKWSWLKAWAMKIARHRGIKKAIVALARRLAVIMHRIWVDGSEFRWTREVAAA

SEQ ID NO: 489209 - protein, 318 aa, unidentified
MTQPLIFVGIDVSKAQLDVALRPTGRFVVPNDDSGIAQLLEQLQATAPTLIILEATGGIELPLTGVLATAGLPVVVVNPRQIRDFAKATGQLAKTDALDAQVLAHFADVVRPTPRPLPDAQTQELAALVTRRRQLIEMLTAEKNRLASARLVVRKPLRAHITWLERALDQADTNLAEAIRQSPVWREKEELLRSVPGIGPVLTTTLLANLPELGTLTHKQIAALVGVAPLNRDSGTLRGKRTVWGGRAQVRAALYMAAIVAARFNPVIRVFYQRLCAAGKAKKVALVACMRKLLTIVNAMLKHRTPWRQGVDPARAGA

SEQ ID NO: 489210 - protein, 349 aa, unidentified
MNRTTYGLDIAKNVMQLHWVDNETGEIGRKKLGRAKLSDFFARLQPARVVMEACGSAHHWARVLGALGHQVELLPARQVRPFVRSNKDDAADARAIWLAAQQSDIRRVPQKSVEQQAALALHRTRQHWVSVRTATINALRGALYEFGVTLPGGKRVGLKALATHRAEIDAKVPATIQRLIDGQLATLKDIGCRIDKLEAEIGMQLEQLDNAATLREVPGIGLLGATAFAATLGDGKAWKSGREFSASLGLVPAHRGTGGKARVGHLSKRGDPYLRTLLIHGARSVIAHAKNKPKWLEQLLARRPMNVAVVALANKMARTAWALVAHGRDYQREWKSTPPKGCTAQAAAA

SEQ ID NO: 489211 - protein, 437 aa, unidentified
MIMQNVIHPDAAGIDLAAEVHYVAVPADRDPQPVRNFGTTTDQLIVLADWLQKCGIRTVAMESTGVYWIPLFELLEARGLEVRLVNARHVKGVPGRKTDVLDCQWLQFLHSVGLLHASFRPALEVCVIRTLLRHRDSLVQVASAHLMRLQKALDQMNVLLHRAVTDITGTTGLAILDAIIAGERDPQKLAAHRDHRCKKSVAEIAAALKGDWKVEQLFALRQSLAAWRFHHELADECLQEIHRLAAKLESRTEAAPPPPTKRGKQPDEAVRTLLFQKFGVDVTAVDGVNTHVGYTFLTEVGPNLSRFASPENFCSWLGLCPNNKVSGNHKLSVSTRPVSNRLATALRMAAQSLNRVEAPLGDWFRRMRAKLGPTGAVTAAAHKLPRILYTMIKTRTAFDPAKLGNPALIRQRKERSLRKQAAQLGFSLQPANASAVS

SEQ ID NO: 489212 - protein, 366 aa, unidentified
MNRKRTSVGLDVHARSVVACAVDGVTGELWERRLTPDHAELLGWVRGLPGPVEVVYEAGPTGFGLARFLIGAGICCRVAAPSRLQRPSGDRVKTDRRDARHLARLLHLDEIVAVTVPSVGQEAARDLVRAREDVRRDLLAARHRLSKLLLRQGIVYYGGKPWTAQHDRWLQARRGLAVFDQRGLGLAFDIGYDTVLATVARRDRLDTAIGEMATDSQYAPVVTRLGCLRGVSTLTAFGLAVEIGDWQRLTGRTIGSYLGLVPTESSSGQSRSQGSITKTGNAHARRLLIEAAWHHRRPDRPSVGLRRRQDLACPAARDRGQRANRRLHQRWVRFDARHKLPVVANTAIARELAGWCWSLAVLDDGG

SEQ ID NO: 489213 - protein, 599 aa, unidentified
MPLRVDEENGDVLLMSLTGLVSQNSEEDVVVQGSGLSRGDKRRNAKLARLRALVRADHAIVAIDLADKKQAVVVCDHDSQVLARKTVKARAWELGPVLDWALRTARRCGFAGVTVGCEPTGHRWMVLNQLAAQRGMTLVCVNPMLVGRAREAEDYTRDKSDDKDAMLIARLVAQLHCYAPECAEETWARLRQLGARRERLVTEATACVQQLRDLLECAWPGVLEAAAKPFESTNWCAALAMVLDRCGGHPERLARLGLARFEAAVIRELARWGGQRRRRPIIEAVFVALVDPSGVMTQRWGALERAAWVLADWRMTKTRLTEVETRMTAVLDELGLTELVTSIPGVSAVGAAAILAETGDPARFDSPRALVKHAGLCPRDNSSGAFSGRARISRRGRPRLRLAAWRAAWGAMLHNPVMAARYRYLITREHNRLTDGQARAAIAAALLRWMHVIVTRRVHWDAAVAGAAVAVAATTETGGAPELVTATGGFASAPADTGSQDGGTPTGIVEWPPTQEGWTIALATLPQSGGKKAATARAREARGSGLETVGLLDTSLFASLHPGYWLVFSGVYSSEAEATSSLAPARKFARTAVVRHVVP

SEQ ID NO: 489214 - protein, 399 aa, unidentified
MSGTRSTYRQKAMAISSTLCWNRNLTCCTTGAQLRQRAGGGKVAIAIEQRKGAVIHALLMYDFLVLYPVNPKSLARYRQAFHTSGAKDDPADSELLLDLLSKHRDKLRAWIPDTVPVRKLQLLCEQRRKIVNQRVALTNRLTSLLKQYFPQALDWVGDIASIQGCEFLMNWPDLAAVQRARKTTLEKFYHCHNCRKASVIEERIRQIASARPLTSDPAIVEPLSLSVQTYATQLRSLIRAIAEFDKRIAHVFAQLPDHDLFDSFPGAGAVCAPRLAAAFGSDRSRWNSAIQLQSHSGIAPVTERSGKALWVHHRLACPKFIKQTFHEFADQSIRFSQWARAYYDQQRGRGNDHHAALRALAYKWIRILFRCWKDRMPYDEQKYIQSLRRHGSVLVEHFA

SEQ ID NO: 489215 - protein, 366 aa, unidentified
MWEAPVRNQRTSIGLDVHARSVVACGLDGETGELFERRLTPDHQEILGWIRSLPGPVAATYEAGPTGFGLARFLLAQGVECVVAAPSMLQHPSGDRVKTDARDARHLARLLHLGEIVAVAVPSVETEAARDLVRAREDVRGDLMSARHRVSKLLLRQGIVYYGGKAWTGTHDVWLRGQRFDAPGLQLAYDTAYDTVLAAVDRRNRLDTAIAEMAAAGPYTQVVARLGCLRGVSTLTGFGLAVEIGDWNRLDGRRIGAYLGLVPTESSSGGTRAQGGITKTGNGHARRLLIEAAWHHRAPYRPGVGLRRRWDAASPAARARGQAANRRLHTRWQNFDARKKRPVVANAAIARELAGWCWSLAVLENN

SEQ ID NO: 489216 - protein, 313 aa, unidentified
MTKTTNTNLIDYIAIDVSKATLQIQDDQRTFAVDNDSEGHRKLLKHIKTRQNPLVVFEATGGYERGLCEFLHIKAIPLTMVNPARVRDFARSEGVRAKTDPIDTKMILAFAKSKALRAMEAPSETCTKLAALLDRRGHLVEQLAREKNRLQNSEKLILRSIQRMIKILEKEISALDKAIDELVSSEPTLQSRSKLIQSIQGVGKITAWTLLAYLTEIEHLNRNRLVALAGIAPFNRDSGKFSGKRSIIGGRAKVRRCLYMAAQSAANCNPIISAYVQRLRERGKPYKCAIVAAMRKLLLHIQSLIKNPKLSPC

SEQ ID NO: 489217 - protein, 421 aa, unidentified
MKEWKEFTHFAGLDWARKHHAVVVVDAQGEMVADLEFEHSLEGWKSFHQKMAPWPNLAVAIETNQGAAVDQLLQHSYSVYPVNPAASAGYRKRKSPSGSKTDHIDGWGMSDALRTDGHGWKVLQPMDPLTQQLRLLCQDEVALIEQRTLLVNKLQQALVEYYPAALEAFDDWTCPFTWDFLIQFPTPQVLVKAGQRRWEKFLHIHKLWRPETTQVRLAIFARADQFKASEPITKAKSQLALSLCKLLRLLDQQLDLYRQQIEALFKDHPDHDLFGSLPGAKKILAPRLLAAIGTDPQRYGTQNVLQCFAGTAPLSYESGQLKKARIRWACDKFLRHTVHLWANCFRKSSAWGQTYYQKKRDQGMSHACALRCLGQRLLKILFKMLTDKKPYDAELHARNQHEHGSWVLQLMNENPTPKACE

SEQ ID NO: 489218 - protein, 316 aa, unidentified
MNAFQNNEINVGIDTGQAQLDFNVRPSGEYFSCLNTPKEALAAARRLAGLKPTRVLIEATGRLESNFVKAAQKAGLPLVICNPSQVRDFAKSTGRVAKTDKLDASDIAHFGEALKPRLTLVKSATLQQISDLVAVRSQCLDMSTMQKNRLTRMPKAVQGPIKRILKSIQDEVKKIDQQLDKLIESCPEWSEKRELLLSAKGVGKVLAFTLLSELPELGQLNRKQIAALVGVAPMNRDSGKFEGKRIIRGGRHKVRTVLFVSIMSAIQCHPTLKPMYQRMVAAGKPKKVAMVACMRKQLTILNAMMKTGTHWQEQIA

SEQ ID NO: 489219 - protein, 406 aa, unidentified
MNAVGIDVSKGKSTVAILQPFGVVVAAPFEVSHTDSELDQLAKNIKKLSGETRVVMEATGVYYEPVARRLHEHGIFVSVVNPMLISDYGGNTLRKAKTDKKDAIKIASYALNSWLDLTEYKPEEDIRRSLKTLNRQVKKVIKVTNMLKNNLISLTDTAFPGINKLFSSPARASDGHLKWVDFVAKFPHRNTVARLSLNAFKKKYKSWCEKNKYHYQDSKAEEVHAHARKCVAGVSAEETFCLMIAKAAEFVNAACENENALKKEMNRLSSTLPEYEVVMGMYGVGESTGPQLMAEIGDTRRFHNRRAITAFFGYDTEPDDSGQHISKSRPITKKGSSSLRRTLFIIIRAISTQKPIDNPVYVFLDRKRSEGKHYYSYMTAAAAKFLRIYYAKVNEVLNEKGTSMCT

SEQ ID NO: 489220 - protein, 433 aa, unidentified
MKVKYEDRLKQKLIAITTDTLVVGVDIAKNYQWARFVDFRGIEHDRALKFKNSKGGFETILARIREICKKENFAKAVVGMEPTGHYWKAFANWLEKQEGITVVLVNPYATKQAKELDDNSQTKSDKKDALTIAKLVKDGRYFELYLPHDVYAELRGLSTARTGLNKRKSALKNTITAVMDEFFPEYAEVFKCPLSGKASRHILKNCPFPKFTLALGEGGVTDEIRKAVRKTVGRKKAVQLVKAAKDSIGVDYGEEPARLKLRLMLEELELLEKQTEELEGQMSAALQETDYAEFLLSIKGIGIVTLATCLGELGDPTRFDDPRQMSRMAGYNLVEDSSGKNKSGTKISKRGRKNLRGVLYQMALTMVATNDEMKQLYHYLKTREKAPLRKMQALIVVSKKILTLIHTLAKKKESYDPEKVFGHVRREQLKAAA

SEQ ID NO: 489221 - protein, 345 aa, unidentified
MDKIIRIGMDTSKHVFQLHGVNAGEEPVLRKKMRRKEMIDFFTTCPPTSVAIEACGGSHHWARLLASFGHEVKMIAPQLAKPYVKRNKNDAAHAEGLCEAMARPTMRFVPVKTVDEQAALMLISVRTRLIANRTQLANAIRGYANEFGISAAKGLAHIPMLLERIKVEKTVPELAQELFMSQAEEYAELEKKIADVEAKVKAWQRNDERSIRLNTIPGIGPIGSALLIMKTPAPELFQSGRQFAAWIGLTPKDHSTGGKLRLGGITRAGDEALRAILVNGATAVIHHARRSGKASRWLAELLRRKPPKLAAVALANKMARIAWKLMVSGETYSAQSVPALNGCAT

SEQ ID NO: 489222 - protein, 347 aa, unidentified
MTQAQIYIYGIDLGKNWFHLVAMDRMGHVLAKQKLTRSQLKQFISTTPPCRVAFEACPGSQYWGRLFQQAGFEPKIIPAQFVKPYLKSNKNDFNDATAIAEAGSRGTMRCVPLKSHEQLALQATHRVRQRFIVERTATVNQMRALLLEYGLTVPVGRKVFERSLPTILEDAENGLPDFIRALVLRLRERWQQLDIQIDDMSLMLGQASSASGLCQKISTVPGIGPIVSTALIAAIGNGSQFKKARDLSAWLGLVPRQYSTGGKSSLGGISKRGNSYLRQMVIQGAKALKIHMKRDKSSLGEWVARLEAGHHHHVVLIALANKIMRICWKVLTSGRDYRPYPNASAAV

SEQ ID NO: 489223 - protein, 308 aa, unidentified
MVYVGVDLHRKRSHVVALDPTGEVVLSRRIGNAPAEFLRIFGELEPQPIEVVFEATYGWSWFADLLADVGIPAHMAHPLATKAISAARVKNDAVDAKTLAHLLRTNLLAEAWIAPPDAREARRLVRTRAGLVRMRSRVQSQLHALLADLGIIPELTTLFGPAGRRWLAELPMAASARSRLDAGLRLIDAITVEVAQADADLRACFAGDHRVRRLLPIPGVGLVTAATVVAEVWDIQRFPSPERLCWMLVEAATTAVRDPQLGRFTAQIAQRRGPKIARVALARRLLTLCYYALRDDGGCRAYPAPSRS

SEQ ID NO: 489224 - protein, 351 aa, unidentified
MEEYIAFDSHKHYTWVEHEQVATGRVRQYRLQHAPGAIRRVLAGCEPGTPVALEATANWYWIVDEIEQAGLRPQLVHPRKAKLMMGLINKTDKLDAHGMNRLQRNGTLPTVWIPPGRLREFRELTRTRVVLVAQRTRWKNRLTATLAKYGAPSSEYSDPYGKGAREELDSRIERLPEQTRWAARQMLAQLDTLSEQILQFEGRLKELVEVTPEMQRLMTLPGVGVILAATIALEIGEIERFPSAEHLASYAGTTPRVHSSGDRVRYGRTRPDVNRYLKWAFAEAGNSVAVNHTRCPARHVSQLYLRLRLRKGHGKAIGAVARHLAEAAFHVLSRQEAYQDPTVRPGRTREV

SEQ ID NO: 489225 - protein, 378 aa, unidentified
MYRILKIGMDVHTTNYTLCAVEPILGAEENVLAQIQIEPDYRLVIQFIKRLKERLRVSDKDCDILCGYEAGCLGYSLYHQLTDAGIKCVILAPTTMISEKGKRIKTDKRDAHLIAKCLCYGGYHAVHVPTADDNAVKEYIRMRDDHKITLKQKKQQMNALCIRHGCIYEGNNWTQAHLKWMRKLELPELVRETLNEYLATYDELTAKIERFDKRIQELADQTQYQEKVKKLECLLGIKTHTALSLIVETGDFARFSKGNVYAAYLGLAPGEHSSSDDTNRLGITKAGNSHLRRLLIEASGGICKGVIGQKSKALKARQSGNTAEVIAYADKANVRLRRKYYKLIHRGKKRNVAVAAVARELACFVWGMMVDDIHGHAA

SEQ ID NO: 489226 - protein, 349 aa, unidentified
MKPTSQMTLDVYFRQCVGIDISKDKFTACLYMYDRASDVGCCTKSIDFANTKPGFNQMVRWSRKEAVKSHPLTYLMEPTGVYYERLAYHLHKIGQTVYVVLPNKARKFCESEGIKTKTDAMDARCLALMGCVSRKLKPWSPPAAIYRELRQMTRFHADLCQVRASVANRMEALDHMEGTAKSVHKNCEKLLQEIDTLMEKNGKAIMKKVAEDKELEAKVKRIATVKGLREPTIVCVIAETEGFHYIENRKQLVGYAGLDVKAEQSGNEDPKHRISKKGNANIRTALYMPALVAVRYNRQIKAAYGRICQKHPNEKMIGVTAAMRRLLLLIYTLWKNGEEYDETRGTMPL

SEQ ID NO: 489227 - protein, 324 aa, unidentified
MIDGVLGIDVSKNTIDVSMSGSNKVRARSFANSAEGWRHLLAWLISQKIQRVHACLESTGRYSIGIASALYEAGHIVSIVNPAQIRDFARTKLGRNKTDGVDASHIREYCELFKPQLWAPASEAHRRLGELQTIRAGIIAGLTEWKNRKNSGMIDAVAQSLADVTISHFTSQLGAVDEAITQTIDNDPVLRRKRDLLLSISGVGETLAGVVLAELPGPDVLRSGAEVVAYAGLNPRLHQSGTSIDRITRISKIGNAVLRAALYMPAMSAMQHNPAIVALVARLKARGRLKPKQIVVAAMRKLLVLCFGVLKTGKPFDPAIAMGC

SEQ ID NO: 489228 - protein, 467 aa, unidentified
MTLTLGIDIAVRAAHQATLSRDGKTVWRGRKFMTRPDELERVWADVGAEDPAELTVVLEPTRNAWIVIAEWFRRRGAKVVMVPTTQSADLRKYYSKHAKNDRIDSELLARLPLLHPEGLREYSGQGPADPLRRLVKQRSTMVKRRTAVYARLDALIELLGPAWYAVLGSNYGNAALQFLARYAHPHAVIRFGQARLARFLIARSGGNWRDDHAAGLIAAARETLALWNVEGTDGMDFAELSADVAHEAEQALFLTRQIKEIDERIANLYADADPQGIVASAPGVGPTISAVIAGRLGDPHRFTSLAAMRADTGLVPRVSQSGVVKTESSITKAGDPLLREMLYAAADQARKVDPQFAAKYHRLMAGDRHHDSAICHLATMLITRIAACMRNGTPYQLRDIDGTAITESEGRTIVKHRHQLDPRQRDHVRHKLMRERRKKAGQESQKSPSAPTSQPAKPKPTTSPQVA

SEQ ID NO: 489229 - protein, 403 aa, unidentified
MFCGWDWGSTVHGVCLIDDQGAVVKRWMVQHTEDQLMNVFCELAQLVEGGDVAQVPIAIERGEGLVVGLIAGAGHPVWMVEPSAFKAARPRWGAAGAKSDLSDAFMLADYARTDGHRLRRVEPVGQATRELAALVRARIALVEARTAASNQLWAILAEHWPGAAVVFQKLTSQIALAFLTDYPTPQAAAQLGEGRMAQFCRRHSYRGGKSPAELVGRLRAAPASANPIAPTILASIVQGSTAHLQLLNTEITRLERDLAKVLAAHPKTPLLQTLPRIATVSLAALIAEIGPLLERCENPEQVAAMCGAAPVTRASGKSRTVAFRYTANKPARVAITSFADNSRHSSDWASDAYRRARARGARHPHAVRILARGWVRVIWACWTTDTIYDPSRHRGQQLLAAVS

SEQ ID NO: 489230 - protein, 346 aa, unidentified
MEHYAGIDVSLERSSVCVVDAQGKIVKEAKVASEPEAVVAFFETLGIAVKRIGLEAGPLSQWLHAGLKRAGFETVLLETRHVKAALSAMTVKTDRKDARGLAQLIRMGWFRPVHAKSMASQEVRALLVARKQLLGRLIDVELSIRGILRGFGLKVGPVTRKGFEARIRELVMGQATLERIAAAMLSARATLKTEYDKLHKTVLAIVREDAVCRRLMTVPSVGPLVAITYKSAMDDPNRIVKSKAAGALFGLTPKKYQSGEKDVTGGITRAGDEMVRTALYEAANVLLARITRFSKLKRWGMDVAKRRGSKRAKVALARKIAVILHRMWVDGTTYRWAAAEPIAAQA

SEQ ID NO: 489231 - protein, 338 aa, unidentified
MTYGAIDLHMRYSQIRVVDGEGQVLRDQRVPTTAERLVAACAGYPELRILVESSTESEWVAQVLEAAGHAVIVADPNYAPMYGEVRRKVKTDRRDAAALAEANRRGWYRAVHRVSATQRGRRQVLRSRRHLVQQRSGTISLIRTLLRQDGHRLPRCSAPAVPDRVAALVLPPARQATLAPLTRVVRMLNAEIAALDRELAATATSDPVVRQLMTAPGIGPVVALTFRAFVDDVRRFATAAQVSAAIGLVPREDSSAERRHRGHITKAGPRELRSLLVQAAWVCWRRAKASGTLAAWTEHLAARRGRRIAVVALARRLSRILYALWRDETEFNAATLAA

SEQ ID NO: 489232 - protein, 390 aa, unidentified
MPEDAFRPAQAAIRTELGAIFVSLELSRRAWLITSLSPGGGEKMSKHSVPASDVSALLRRFAEIRRKATARTGRDFPIIVIQEAGLDGFWIHRVLQSEGIESHVVDAASILTSRRRRRAKTDRIDGETLVRTLMAFKRGEPRVCSMARAPTPQEEDRRRVCRERRTLVGERVRHVNRIKGLLFAQGVFGYEPLRKGRRERLEDLRTGDGRPLPVHLKAQIIRELDRLEVLLKQLKAVEAERDALLKPATDKAASPAAMLARLKGIGPETAAVLWSEGLFRPFDNRRQVAAYAGLAPTPWQSGSIDHEQGVSKAGNPRLRTTMVELAWLWLQNQPTSALSLWFHERVRLGGRIRKTLIVALARKLLVALWRYTTAGVVIEGAVMKAAPATI

SEQ ID NO: 489233 - protein, 341 aa, unidentified
MNYYAGIDVSLECSSVCVVDGSGKIVREAKVSSEPEALIGWFGSLGFRLERIGLEAGPLSQWLFAAMREAGLAVELLETRHVRKAFEAMPVKSDRNDARGIAQLIRLGWFRPVHCKSMDAQETRTLLTARKLVQSKLRDVENSLRGILRGFGLKVGKTTELQFAGRIKELVAGHPHLEMIAKSLLAVHAVLRNEFKVFEKQVRKMARSDTRTRLLMSTPAVGPIVALTYASAIDDPARFKSSKQVGAHFGLTPKKYQSGETDYTGRISKIGDSSVRTALYEAAHTMLTKPVKGCSALKSWAMRIARRAGMSKAKVALARKLAVIMHRMLVDGKPFNAVAAE

SEQ ID NO: 489234 - protein, 423 aa, unidentified
MDVIFERVAGLDVHKAMVVAAVRIVCGGKVKRECQTFETTTAGLLEMLAWLTASQCTHVAMEATGVYWKPVWSILSDGAFELVLANAAHIKNVPGRKTDVNDATWIADLMACGLIKASFVPGEDIQHLRSLQRARKQLIHEQTRYTQRIQKTLEEANIKLDSVISEIMGLSGRKMIEAMIAGVRNPAKLAALADRRIRASPKELYDALHGRLTDHHRFMLKLYLGQYDALDKSVIEIDQEVSAAIEHMDAEVEAGEATFRSLINLLSTMPGLSALSATSILAETGTDMSYFPTAGHFVAWAGLCPGQNESAGKRKSSRLRKGAPWLKTALVQAAWSAVKKKESYYRAQFQRLKARGGAKTAICAVAASMLTAIYHMLKNQVAHADLGADHFDRRPTAFKARRLVNQLTKLGFEVTLQPLQKVA

SEQ ID NO: 489235 - protein, 347 aa, unidentified
MEVFIGFDISLQSTHACAVDGGGNIVREGVAASDIDALESWLRKNSRDWSIQRIVFETGQLSTHFYHGLRASWPVTCIDARHANGTLKAQRIKTDKNDARGLAQIARTGWYKAVHVKSHEGQALRALVGGRKQLVELRLEVENHIRGTLKTFGIKLGAVTAVALAAKVKTAISGKDTLVQETFIALLNARDGILAQIKALDRRCATIARKSPVTKRLMTVPGVGIVTALTYQAEIDDPLRFRKSRDVGVHVGLTPRRYASGEVDRSGGISKCGNGALRTLLFEASVTMLTRSGKWSRLKAWGVRLAQRNGFKAASTAVARKLAVVMHRMWVDETNFAYGEPPAAQAA

SEQ ID NO: 489236 - protein, 370 aa, unidentified
MRFYTQEHRFYAGVDLHTRTLHLCILDHTGAVVYDRNLPCRPDAFLQAVAPFRDGLVVGAECMFAWYWLADLCAQQGIPFVLGHALYMKAIHGGKAKNDKIDAGKIARLLRGGTFPLAYAYPKGMRETRDLMRRRTYLVRKRAELLTHLQILNAQYNLAPFPKKLACAANRTEMNVAERFADPSVQKSAAINLALIDRLDELIGDLELYLVRTAKVDDIQTFYRLRSIPGVGKVLALILLYETHDIGRFDTAGQFLSYARLVRCAHESGGKKLGTGGKKIGNAHLRWAFAEAACLFLRSSERAKKWKQKQAAQRGEGKALAILAARLGRAVYHMLRKGEAFDEDRFWSGARRTRTGSSSLSRKEARDAGH

SEQ ID NO: 489237 - protein, 338 aa, unidentified
MDHFAGIDLHSTNSVMGIIDKDNRKVFKKKTKNDLPTVLHFLEPFQEQLRGVVVESTFNWYWLVDGLMENGYKVHLANPSAIKQYEGLKHADDVTDAFHLANLLRLGILPEGYIYPKEQRPVRDLLRKRLMLVRQRTAQILSFENLFTRNHGSRINSNAVNKLIEQDVENIFEQEYVVLSGKASIATINFLRGRIIQLEKAVLKVAKLKDEYKMLLTAPGIGKILALTIMLETGPIERFAKVGNYASYCRCVQSKWFSNSKAKGKGNSKNGNKYLSWTYVEAANHAVWHYDYVKHYYQKKMAKTNNVVAIKAIAHKLSRACYYIMRDNKEFDPKRVFV

SEQ ID NO: 489238 - protein, 368 aa, unidentified
MKIKQTKTDKEEEKMNKKIVAQNERVTIGADVHMRTHVVTAMIGKEIVDRRILPSCRGGWRGYLEKFPGCELNVIYESGPQGYNLYDWLTEMEKQEGQTVRVYVAPPGNVPKAPGKKRVKTDRRDSLALIHAYQSGAFEPVVVPEKDTRAERELVRTKEQLSEDVTRCKNRIHSLLKFHEIEPDEGKAFSEGWRKEALNKAKSSDPTGEIAASLKLKFKMLKQTQEALDSVKARIRKLFSKGTRSHLAQKICKQVGIGIESAMVIATEVADFHAFRNSDSFASYVGLVPGAHNSGETFRPGPITKEGNPRLRHVFVECAWTWVRYDKEAARRYAALKARRGAGRAIVAMARRLAVIVYHLVAHPAPAC

SEQ ID NO: 489239 - protein, 406 aa, unidentified
MASTLYVGIDLGKGYHQVAVVDGRKEEVGRPFRIRRGSAGVEVLLGQLRLLGAQPRDLVVTVEATGNYWNELVGVLTARGCRVYLAQPKKAHDLRKFYADHTKTDITDAGALARMPLVDEGLRPVWMASPSAQMLLRLCRLRWKYRCRIADLKRRISTFSEMIIPGIDQVMPVRYSKSARLFLRRYLAPGKARRLGRRRLVEILSKAAWGKFSAEKSEQLWRCIENAPDLGWQPDDLLLEVGVQLDELEMLERQVERLDQRIAELYGEVDPEQRLMRIPGLGEFLAAALTACIGDVSRFPSPKHLVSYAGLAPRVKSSAGRTKSEQAITKRGSPFLRAWAYLGASCARQYDPQLKEYYHRLKDRKKHYNVALCATAARLLERAYEVLSQGGENEMESLDQKICSGQ

SEQ ID NO: 489240 - protein, 353 aa, unidentified
MFYSGVDLHKDNCFITTVNDVGEVVKQDRVLNDVLAITTYFRSLPGPHKAVVESTAGWYWLRDLLIELNVEFVLAHAKYLKAISYAKVKTDKVDSITLAQLLRMNLIPEAHTISPKLRPIRDLLRTRLRLVQKRTACYNSIHRLGEKFNCDHFPNLNEGKLPAQLPDLYKLQVGYFLEQVSLLKEQIKQIEQSLGRQLLDNDDIQRLLWIPAFGRITAFSIYLEIDGIERFPSEKQLFSYARLVPGAKNSNASRRQKSGNKDGNVYLKIAFSDAAVHAIRYYPEIRAFYLRTRRRSNEAIARAIVAKELARIVYHVLKDRAPYRGFKGIPIQRQKSMNWPRRRVANTNVAQQG

SEQ ID NO: 489241 - protein, 310 aa, unidentified
MEQSFVGIDVAKDRLDVHVRPSGDTFALARDGEGVAALVERLRTAIPQLIVLEATGGFEQVVAGQLAAARLPLVVVNPRQIRDFARATGRLAKTDRIDAAVIAHFAEAVRPPVRPLPDKKAHVLDEIVTRRRQVIEMMTAEGNRARQIDNKRLKKRIERLRSILQAELTAIDADLDEIIRGTPIWRESEELLKSVPGVGNVVARTLIAELPELGTLDRRKIAALVGVAPFSRDSGTMHGRRTVCGGRAPVRTALYMAALVASRRNPVIAAFYQRLVAAGKCKKLALTACMRKLLVILNAILREHAPWQAA

SEQ ID NO: 489242 - protein, 365 aa, unidentified
MLHRLNSAVTLIQRTTTEAPGRHMYYIGLDVHKKTISYCVKDVSGRIQQEGKVGSTRRELDCWMKTLPQPWSVGMEATIFSGWIYDHLLPHAAQIKVAHPLMLRAIAAAKKKNDQMDASKIADCLRCDFLPESHMMPREIRDRRRTLRYRHLLVRQMVQMKNRVSGLLMETGVEYNKQRLHKVSYFRELLATNTEVHSSIGPLLRLSRETIERCQKTEYALVSSLQRDPVLADRIKRLRTVPGVGPITALTWALEMGDVSRFRTIKNAISYCGLCGDERSSGDKMMRMPLSKQRNKHIQRTLVEAAKLAPRQSHELAVIYEQAKQKGNGNRATLAVARKMVSYLLAVDRQQRDFVPAEESRTGAA

SEQ ID NO: 489243 - protein, 356 aa, unidentified
MVMVLGVDVHKDTHTVVAVDEVGRADGERTVRATDTGHRQLLDWARRQVPQDRMWAVEDCRHVSTRLERALLAAGETVVRVPPKLMAGARSSARTRGKSDPIDALAIARAALREPDLPLARHDDTSRTLKLLVDHRDDLVIERTKMANRLRWHLHELDPELDIPARGLNRLNLLDRLITWLAEQSRPDRLGQVLARLAAELLTDIRAATVRINALEREINTLARQAAPRLMTLPGAGGLTTAKIVGETANITRFRSEACFAMHAGVAPIPASSGRTQRHRLARGGNRQLNAALHRIAITQVRITASPGQLYYQRRRAQGDTAMEALRALKRRLARVVFNLLQADTTIAINDLSTAT

SEQ ID NO: 489244 - protein, 352 aa, unidentified
MYYIGLDVHKKTISYCVKDASGQVHQEGQIGATRRELNGWMKTLPQPWTVAMEATIFTGWIYDHLLPHAEQVKVAHPLMLRAIAAAKKKNDRIDAGKIADCLRCDFLPECHMASTQIRDRRRTLRYRHLLVRQMVQMKNRISGRLMETGVSHNKQRLHKVGYFRELLSSNEEVNESIRPLLRLSRDTIVRLQKTEYALVSSLQRDPLLAERIKRLRTVPGIGPITALTWALEMGDVSRSPSIREAISYYGLCGDEKSSADKVTRTPLSKQRNKHIQRVLVEAAKLAPRQDYQLALVYETEKQKENANRATLAVAGKMVAYLLAVDRRERDLVPFEDPRSAAAQKPRPPGEKQ

SEQ ID NO: 489245 - protein, 356 aa, unidentified
MDNRKYIGMDVHQASISIAVSDAAGKVLLECIIETKAATVLEFIQGLRGSLWVTFEEGTSAAWLYDLLKPHVTKVVVCNPRKNALLKAGNKNDRVDARKLSDLLRAGLLTPVYHGESGVRTLRELSRGYLAVSKDLTRVMNRLKAIYRSWAIPCAGQQVYSPRHRAAWLEKLREAGVRRRAEQTYQQLDFFDGDTEGNAEGVVGGEPEASCRKLLEQIPRLGPIRVALLIALIQTPHRFRTKRQLWNYCGLGLRTRSSGEYRYTGGQLQHARKPPALRGLNINHNHELKNLFKSAATQAGTSKDDPLGEFYQNLLASGMEPPMARLTLARKIAAIALKIWKKGERFDPAKLKQQAA

SEQ ID NO: 489246 - protein, 368 aa, unidentified
MAVSVTRKSDDRVVIAVDPHKASWTAAAVDGSLQPVATVRVPVSRDGYRALRRFAHSWPHARWAIEGAAGLGAPLTTLLRANGIEAIDVPAKLAARVRVLSSGHGRKNDDADALSVGIAALTSPALRTAEINAATKALRAVVEHRDDLVKTRTQTVNRLHVVLTRLVPAGARRQLSADHAAALLRGVRPRDAAAKTLRALAMDLISEVRQLDRRIAKAANDIQMAISASGTTLTQLHGLGVLTAGKILGRVGDVRRFRSAAAFASYTGTAPIEASSGDVVRHRLSRAGDRQLNFCLHVMAITQVRQDTPGRAYYLRKRSEGKSHNEAMRCLKRRLSDLVYRQLIHDADTQKTGPGGHSGAALSSRAAG

SEQ ID NO: 489247 - protein, 431 aa, unidentified
MIKINPLSTLYVGIDVSSKSNYVCALDFYKNKYLSEPFSNNQPGAEELVQKILDCLKEHPDLNTVIAAIESTSVYTVHIANYLSSCEQLLKFKTYVFVLNPKCTANHKKSFIGLGKTDPIDAFIIADYARAGNIETDPWRGSQFLALKRLTRHRLHLVECMTREKAYLASNLYLKFSQLQLLEKDEQPFSSIFGATSSSILTEYLSPEDILNSPEEDLVAFIAEKSHNRISDISRTTKLLKKAARDSYRLDKALYEPINVSIASSFNCIETFKKEIKAIDVAIEREIKGLSPNAFTILQSIDGIGPVFAGGIVAEIGDIHAFHSADALAKYAGLYWRHNDSGGYTSEDNPMSKAGNRYLRYYLGEAANSLRQHNAEYGAYYRKKYNEVPKHQHKRALALTSRKFVRLVYGLLAKNQLYSGVSLDKTIEPSS

SEQ ID NO: 489248 - protein, 345 aa, unidentified
MEFVGIDWSYRRAAWCALGEGGGVVGEGAVPADEDGLARLVIERGVEVRGVVEMMSGAIWVRDRLAAAGWEMQIAHARKVRDVAPLACKTDKVDARVLAELCRRDLIPELWVPSLSDRELRERLRRRMHLVRLRASAMNRIFGLLTQWGSRCSLDRLRGPDAMTLLADRGIPAVWQRSIQEALDLIDLLDARIAPLEQELRPLARSDPRVVLLDTIPGIGDLLGLTLASEIGEVSRFASPRKLIGYAGLSPKINQSGDRSRTGALSKAGSRTLRWAAVEAAQHAWRPSNPWHRLYTDLAERHGKNPAKTAVARKILIAAWHVLSRQQPFKPPTVVSASSSRFLAA

SEQ ID NO: 489249 - protein, 343 aa, unidentified
MDQYVALDVSLQKTAVCVLNASGSVVIEAELPSEPAALTAFIQTHAPRAARVGLESGPTSPWLWHSLKAAGLPVVCMDARHAHAALSVRPSKSDRNDARGLAEMVRMGWYREVQVKSLAAHERMALLGVRRQLVDMRVEIDGQIRGILKTFGLVVGSGNKGAFAQRARMLVQDHPVLSALVDKLIEVRAVAVAKVAALDKEIRGFVRDDPTLRRFMTVPGVGPVTALAFRSTIDEPDRFKRARDVGPYLGLTPRRYQSGETDRQGRISKCGDRFTRTCLYEAANVLLTKVQRWSPLKAWGTRLARRIGSKKARVAIARKIAVILQCIWTDGTEFWWTKEPATA

SEQ ID NO: 489250 - protein, 355 aa, unidentified
MQRHRQHRQGMSELVSLLRGSGEEVRVVLESTGSYHCPVVAALLENGIFVSVVNSLRMKRFCSQSIRRVKTDQIDAMQIALYGLAYWPELQPTRLPENTYRELQLLARQYYQMTSILIKAKVDFNAICDQVLPGMQELMNDHAGRHKLSDFVLRYRHTTHILEMGETRFRKDYCKWAEKKGYRNCERMAVLIFATAQNGIPVLPNAPSTQIVITEAIRVLHTVEASRDAILTQMQALAKTLPEYSLVREMPCIGDTLAPRLIAEIGDVRRFHSKRALIAYAGIDAPPYQSGKFCANNRHISKRGNRYLRKTGYEVMQSYVMHKPANDPIFTFIEKKRGEGKSGKLAMVAGLNNVE

SEQ ID NO: 489251 - protein, 311 aa, unidentified
MSNICGVDVSKKVLDAFVASSGTYCRFANDMDGIAALSRFCGSQDVDLVVMEASGGTEQMAYLMLWQADVKCAVVNAASVRFHARSLGLLEKTDRIDARVIASFAAATGVVACDPPSVDQIHLKALVTRLSQITGDMTINKQRLSSCTDGEARASLAEVVALLKRQARCIEGEIASMIDDDPLWAKLAEAFSSIKGVAGRTIATLMAELPEIGLISNKAVSKLAGLAPLADDSGKRRGKRHIKGGRTRVRTILYVISRGASQYDDGLKAFHQRLTEAGKPKMVVRIAVAHKILVRLNAKAREARMELQNAT

SEQ ID NO: 489252 - protein, 359 aa, unidentified
MRYVGIDYHKRYSVLCATDERGQELKQRRISGNSATGFAQFFSELGEESKVVMEACWNWGWLYDLLAKIDGIDEVMLAHPYKTRLIAEAQIKTDRLDAQMLAELLRGDLIAQSHAPSAATRARKHLLRQRLFWVRLRTMLRNGMHAILDRQHGLERPQLKNFFSRRGQTWLEEVQLPCAEDQPLLTQDLEVAELLEEKIKQLDRSIGQSQSEEEKLLESIPGIGPLFSSVIATEIDGVGRFNSATKLAAYAGVVPTTHASGGRVFNGRLLWQCNKWLRWALIEASWSAIQFSGYFGSIYRCARARGKNKNIAITMVAHRMIKIIWLLLTERRPYTETLPDRSEDGMTVVVRRKVLGLAS

SEQ ID NO: 489253 - protein, 402 aa, unidentified
MNCVGIDVSKGKSMIAVMRPFGEVVVSPFEVLHTDSELSKLAGLLKSLDGETRVVMESTGNYHAPVAWLLHDAGLYVSVVNAMLVHDYGNNSLRRAKTDKKDAVKLANYGLDHWLTLPRYIPEEDTRLMLKICYRQYQQYSKVQTMLKNNLISLLDTTFPDANRLFTSPPRADGSEKWVDFVAAFWHCECVCGLSEKAFTAKYQKWCKKHGYNFSEDKALDIYASACRHFGVIPKTDTAKLLVEQAISQLRATSAALAALKQEMQSLAASLPEYPIVMGMFGVGPTLGPQLMAEIGDVRRFHSKKALVAFAGIDSPPYQSGQMDVHSRSISKRGSASLRRTLFLVMGVLLQCAPMDEPVYQFMNKKRSEGKPYRVYMMASANKFLRIYYASVKAYLDSLEHD

SEQ ID NO: 489254 - protein, 357 aa, unidentified
MVVVGADVHKRTHTFVVVDAVGKKLGHKTVKADGPGHDQAIAWVQAEFAEQIAADPEGLRWGIEDCRHLSARLEIDLLDAGQAVVRVPAKLMAQTRSSARTRGKSDPIDALAVARAVLREPDLPVAAHDEASRELKLLVDRRDDLVKERTAMMNRFRWHLHRIDPTVDPKPKSLKQAKTRRQLNEFLADKVGIDARMAREVLADIDRTTPVINDLEREVTALVTALAPALLELQGCGGLSAAKIEGETAGIDRFAHEAKYAMHAGVAPIPVWSGRTEGRVRMCKAGNRQLNAALHRIAITQIQRPGLGRTYYEKRLAAGDSKTEALRCLKRRLARVVYQTLKTTTSTPAADLTPAAA

SEQ ID NO: 489255 - protein, 350 aa, unidentified
MKKIVKQVVGIDVAQKVLVVCLGRMYDDWSPELYANKTFANTAKGIEALVLWVKKQTAQHIAVRFVMEATGVYHEMLAYFLEGKGYETSIVLPNKISNYMRTLDVKTVTDSTASQAITMFGLERKLDTWKRPKEIYRKLRQLTRERDQLVGERTMVKNQLHAEQAEAYPNKSSVKRIKDRIKMLDKQEKEIMKEVAAMIAQDSELQKMILIICSLPGIGLLTAAVVLAETNGFDLVRNRRQLASYAGFDVIEKQSGTSVKGKPRISKKGNKYLRKVMHCPALTAIRHNERFKAIFARIVSRHGIKMKAVVAVQRKLLEMIFILYKTGKRFDQDYLMKTKAEKSEQELIKN

SEQ ID NO: 489256 - protein, 338 aa, unidentified
MKIATVGLDIAKQSFQVHAADSEGRAVLRKRLRRNQVAEFFANLSPCVVGLEACGGSHYWDRVLSRLGHTVRLIAPQFVKPYVKSNKNDANDAEAICEAVSRPQMRFVPAKSIEQQDIQSLHRVRSRLVSLRTGLANQIRGLLNEYGIVLPRYVSQLRRGLPLVLEDAGNELTAFSRRLFAGLYEELVQLDEKIAGLDEQVRTVYRANEACQRVAAVEGIGPLIATALVAAISDGKSFKNGRQFAAWLGLVPRQHSTGGKTRLLGISKRGDSYLRTLLIHGARSVVYRASRKSDPRSLWIADKQRRLGASKACVALANKNARIVWSLIARGECYRRAA

SEQ ID NO: 489257 - protein, 338 aa, unidentified
MNITTIGIDLAKNTFSLCGTNPYGKVVWTKTVSRKKLLLALANIPPCLVGMEACSGAHYWSRELIKLGFEVRIMAPRFVQPYRKGGKNDNNDAAAIAEAVTRPTMRFVPVKSADQQAVMSLHRIRQGLIEHRTALVNQLRGLLSEFGIIMPKGRYQTHSHIPSILEDAENGLPDLARQLIHELWQRYRVAHDQVLQADRSLAALVRDSEPAQRLMTIPGIGEQVATAVVASVDATQFANARQLAAWIGLTPRQYTTGGVVRLGRITKRGDKYLRMCLIHGARAVIANLRDKQDRTSVWIRALIERRGYKRAIVALAARNARLIWTLMMKQEDYRVMPA

SEQ ID NO: 489258 - protein, 381 aa, unidentified
MKQDNKAKQNRGNQISAEAPQGTFDLGRRRWRVQREGLTVGLDVGDKISHYCVLDEEAEVVQRGKLKTTPAGLQPWMEALPASTRVVLETGTHSSWISRLIEQAGPETLVAQPRKIPQIYAGKRKNDRRDAEKLARTGRLDPNSMGPIRHRSAEQQADLAVIQARDALVRARTQLINTVRGLVKSTGERLRGCSARSFARQAEEQIPQRLRAALLPLLSQIAALSEQIERYDVHVEQLAQRKYPETELLRQVSGVGPVTSLAFVLTVADRWRFRHSRDVGPFLGLVPGQDESGESSPQLGISKAGNGYLRRLLIGSANYILGPFGPDCELRRWGMKLSERGGKNGRQRAKVAVARRLAVLLHKLWVSGEVYEPLPEKRAAA

SEQ ID NO: 489259 - protein, 402 aa, unidentified
MNAVGIDVSKGKSMVAIMRPFGEIVSTPFEIKHTASDIHSLVELINSVEGESRIVMEHTGRYYEVLAHQLSEANLFVSAINPKLIKNFDNDSLRKVKSDKADAVKIARYALDKWQNLKQYNVMDELRNQLKTMNRQFGFYMKHKTAMKNNLIGILDQTYPGVNTYFDSPARSDGSQKWVDFASTYWHVDCVRKVSLNAFIDHYQNWCKRKKYNFSQSKAEEIYGKAKELVPVLPKDAITKLIIKQAVDQLNSASTTVESLRTLMNETASKLPEYPVVMAMKGVGTSLGPQLMAEIGDVSRFTHKSAITAFAGVDPGVNESGSYEQKSVPTSKRGSSDLRKTLFQVMDVLIKTHPQDDPVYQFLNKKRAQGKPYYVYMTAGANKFLRIYYGRVKEYLSSLPES

SEQ ID NO: 489260 - protein, 358 aa, unidentified
MTTMTQHPVEVTGGVDTHNDTHTAAAVDSAGRMLGSAQFPATGAGYGALLVWLRSFGALVLVGIEGTGVYGAGLARYLREQGVVMVEIDRPDRKARRWQGKSDPVDAQAAARAALAQVRTGVPKHRDGRVEALRNLRVARRSAIAQRATAQCQVKALIVTAPEQVRVQLRGLSTRALVITCAALRPDRTRCDDPVTAVKIALRSLARRHQRLTEEIADLDELIAPLITQISPALAQTHGVGPDVAGQLLVTAGDNPERMRSEAAFAMLCGVAPLPASSGKTQRHRLNHGGDRDANCALWRIAITRMATDPRTRDYVQRRTKQGKDKKEIIRCLKRYIAREIHALLKPPTTQNDLAPAA

SEQ ID NO: 489261 - protein, 312 aa, unidentified
MAPTIFVGIDVSKDTLDIAVRPSALRWQLANDDAGIRDLVSRLAELSATLVVLEATGGYEHPAAAALAGAGAGVVIANPRQIRDFARATGQLAKTDAIDAGILALFAERVRPEPRALPDEARQMLEALVTRRRQVTEMLVAEKNRLGHARRPVRRGSTAHIRWLERQLSDVDRDLDEAIRQSPLWRSQDDLLQSVPGGGPITSRTLLAQLPELGLLDRKEIAALVGVAPLARDSGTLRGRRTIWGGRATVRAVLYMATVAAARCNPLIRIFYQRLRAAGKPAKVALIACMRKLLTILNAMARTHTPWRPAHA

SEQ ID NO: 489262 - protein, 453 aa, unidentified
MQPSTSTTNPEQEWPLVCPDAAGLDIGASEIWACVPAGRATPAVRCFATFTPDLEALADWLKACGVRTVAMESTGVYWVPVFEILEARGFEVYLVNAGHIKNVPGRKSDVQDCQWIQRLHSYGFLRASFRPEAEMAVLRSYLRHRGMLIEHRAAHIQHMQKALQLMNLQLPRVLSDITGTTGMQIIRAIGDGERDPKVLATYRHGRCQHSEAEIAKALTGNYRAEHVFALKQALALYDAYTEQLQACDAEIERQYAAIRPRFDPEAPDQPLGPDPKPETHSKNAPHGDIRRQLFQLVGVDLTAVAGIDGATAQVLVSEIGTDMSKWRTEKHFCSWLGLAPHNDITGGRVVRSRTLPTHNRAAQVLRMAAQSAGRGKSALGAFYRRLRARVGPEQATTATAHKIARIVYHMIKHHQPYCAVSAAEYDEQQHQRELKSLQRRAAKLGMTLTPNPA

SEQ ID NO: 489263 - protein, 341 aa, unidentified
MGEVSTIGLDIAKSVFQVHGVDVAGSVVIRKRVSRAKLLEYFGGLPRCLVGIEACPSAHHWGRELQALGHRVRLIAPSYVKAYLKRSKNDANDAAAICEAVTRPSMRFVPIKTKEQQTVLMLHRTRQLLVRQRTMLSNALRGHLAELGIVSAKGRNGTAELLRIIADRRLSPAVCGILEVLARQYGAIGTEIASIDKNIMVLHRACEASRRLAEIPGIGPISATALVAEIGDWKAFGSGRSLAAWIGLVPKQYTTGGKDKLGRITKQGNRYLRWLLVVGAMAVIRYARNHGTEKRPWLGRLMQRRPTKVAAVALANKIARMAWAIMVRDERYKEPTLLLAA

SEQ ID NO: 489264 - protein, 343 aa, unidentified
MKSYVGLDVSLKQTSICVVDETGSVVREGVVISDPEAIAAFVRLNAPGAARIGLETGPTTTWLWTELKRLDLPVICIDARHAKAALKMQINKSDRNDAAGIARIMQTGWFKEVRVKDIDSHLVKALLVSRALLVKIKRDLENQIRGLLKNLGLVIGRGKFNVFAVRTEELIEDRPELVAVIRPLLAARKAVEEQVHNLDRRVLKLARHDMQVRRFMTVPGVGPVTALCFTATIDDPTRFKRSRSVGAYVGLTARRHASGEVDWSGRISKCGDAMLRMYLFEAAGVLLTRVPKWSALKAWGMRLAKRNGLRKAKVAVARKLAVILHRMWIDGTEFNWSKEEASA

SEQ ID NO: 489265 - protein, 436 aa, unidentified
MDKGVDSWSERAGFVGFDWASDHHDVIVVDQGGKIVEDFRFDDTAEGWELLRNKLSKHPDPAVAIETSSGATVERLLEAGYAVYPVNPKAAKRYRERKAPSGTKTDRLDAWSLADALRLDGHTWRPLKPNDPVTAELRLLCRDEIALIEQRTALICQLRAALREYYPVALKAFDDWTLRSAWAFIEAFPVPEALTKAGKRKWEKFLHTHKLYSPATYQKRLDLFAQAEAFCGSQATTNAKSMLAVALAGQLRVLQSHLDKFRDKIEELFVKHPDHDVFGSLPGAGEKLAPRLLAELGDDRERFDSHEALQCYAGTAPVSYQSGQLKKVRFRRACHKILRHTVHLWANLSRHKCPWADAYYHKKREEGQSHACALRCLGQRWLKILWKMWKTHERYDPELHQRNQLKHGSWVIGLLSTQNAQSTAAGTAAATARNGL

SEQ ID NO: 489266 - protein, 340 aa, unidentified
MIDTPPSSSQPVCSPFIGIDVALDKLDLARSDTDQLLTVANDAGGIRQLVDLLVGLRPTLIVVEATGGIERPLVDALLDAGLPVALVNPGHVRHLAKGVGILAKTDGIDARVLMHFGRLAAPRLTQKRSANQAELDALVTCRRQLTHVRTEQTNRRSRTGSKAALRAIDAVLKTVAKQIEELDRQIRKLIESDDRSGIRRLPRDDFNSTDRLLQSVPGVGPVLSSTLLADLPELGSTDRRQVGALVGVAPFNDDSGRHKGRRAIRGGRTAVRGVLYMATLAAIRFNAVIRTFARRLRAAGKLKKVVITACMRKLSTLLNAMLRDRLTWDQLDVVKNLQTA

SEQ ID NO: 489267 - protein, 404 aa, unidentified
MRFIGLDVHLDFCEIAIVEDGKVRSAGRVLTTPAGLGVLAESLGPDDQVALEATGNALAIARRIEPHVACVVVAVRKELRAITEAKVKTDRLDARMLARLLAAGLLNGCWLPDEGTRSLRRRLARRAQLVRHRTRCKNEVHAVLLRNLKGRPPMTDAFGKSGRVWLSGIELPDDERQTVDGCLRQITFLDEEIALLEREIAKHALGSPHIKRLMTVPGVSLMTAATFMAAVGDVDRFHSPRKLVSYLGLDPKVRQSGSEKARHGRISKQGASQTRAMLAEAAFVAVSTPGPMRAFYQRVSARRGKQIAIIAVARKLTVLFWHMLTREQDYAFARPSLTAHKLRELELRAGAERRVGSRSLKYKSGYHQQANRDREREIAAQAEAAYRRLVNDWKKANPKSTAVT

SEQ ID NO: 489268 - protein, 345 aa, unidentified
MKYIGLDVHSTHINYAIINDSGRILKQNSFKTSLENIISLKDLVKPPIKIVLEEGELANWIYQETYSFFDQVIICDPMENKQIYKSDKKSDKIDALKLAQLFRGGFIKSVFHTKDKNRSNFKQLVYTYHDMSRQTTRVKNKIKAFFRKQGIIIKTSSVYHPEKRNEFIQDSMTPEIILDYYEQLDHFNQLKEKYRQNIIQAKSHYPIINKLMALPGVGIVTASTFFTIIDTPERFHHVQQVWAYTHLGKAIHESAQSSINKKSKRGNRMLKGAIMKSVANAFLSKSNYFQQVFTFMTEIQHKDPRMARRIVARKMVSTMWSMWLKNTDYIPKNFIEERKAHGLMV

SEQ ID NO: 489269 - protein, 410 aa, unidentified
MRIIALDVHRSFAQMAILEKGKIRDAGRIDLERSRLLQFAMKLKPDDEIVIEATGNTSAIVRLLSPFVGRVVIANPILVRAIAWAKVKTDKIDAAVLAKLHASGFLPEVWMPDEETETRRRVVAERTQLVSQMTRLKNRIHSVLHANLIPPYKGTLFSKRGRAWLEAQPLAEDQRRVVLRHAGELDRLGGELAQVDKSLAQTALQEPRVKRLMTITGVNVTVALSIVAAIGDVERFSSPEKLVSYFGLNPRVRQSGDKPAYHGRITKQGRAHARSMLVEAAWVISGVPGPLRAFFMRIRDKRGKHVAAVATARKLAVIVWHMLTKDENYIWSRSALLDWKLRKLELTAGYPSLRGGKTKGSAADYSNKSVRESERETIGNAEEVYRRFVATWKQQSPKGRSGAAHEVRRS

SEQ ID NO: 489270 - protein, 408 aa, unidentified
MDLLYPRCAGLDVHKDSVVARIRCVSEPLHDEVKTFATTTSALLELNEFLSGHGVTHVAMEATGVYWKPVWHLLEGDFELILANAQHIKNVPGRKTDVSDAGWIADLLAHGLIRSSFVPPAPIQELRDLTRTRKQLVREVSQHSSRIQKVLEDANLKLGSVLSDVLGKSGRAILQALIKGETDPEKLADLALGTARKKRAELIEALHGRIRSHHRGLLKVHLELVTALQQAIAEIDATVGKALASIHKSARLLTSIPGISEVTAHVMVAEIGVDMTRFASDAHLRSWAGFCPRSDESAGKRRSTRVRKGAPWLKTTLVTAAWAAVRVKNSYLQSQFHRLRARRGAKKAILAVASSMLTAAYHMLKNGVEYKDLGADHFTHRDREKMILRLVRRINDLGCKVQLTPQAA

SEQ ID NO: 489271 - protein, 466 aa, unidentified
MKEAAMKHNPKREANKGRVSISLLERIQPDAAGIDCGQNSHFVAVPPDRDPQPVREFRTFTADLHRLADWLTQCGVKTVAMESTGVYWIPLYEILEQRGFQVVLVNARDVHNVPGRKSDVKDCEWLRELHSVGLLRASFRPSAAIVPLRAYLRQRETLVQETSTRIHRMQKALTEMNVMLHVVVSDITGQTGLKIVRSILAGERDPERLAQHRDHRCRASPAEIVAALTGNYRAEHLFALKQNFAAYEFLLKQTAECDSEIEALLSTLADRQPPPTAPLPDARRKQVSKHAPAFDVRGPLHRLTGGADLSQIDSIGPHAALQLIAEIGTDMRRWPSEKHFTSWLSLAPSNQISGGRLLSSRTRPSANRAAAILHRCAMSLSRTSTALGAFYRRLAARVGKAKALTATARKLAVIVYRVLSGNLIYNDPGATAYHQLHHARELKSLRKRARLLGFQLVDQTTGEVTA

SEQ ID NO: 489272 - protein, 375 aa, unidentified
MEGAPMLDTTTFVGLDVHARSIKAVSLDVMTGEVRCATFGYDAGAVAEWVRSVDPKARCVYESGVTGFDLQKRLSGLGVDCVVGAVSKMIKPSADRHRKNDRNDAEFLARMLSVGNVVEVWVPDDECEAARDLTRALEDARDDLSRSKQRLSKFLLRHGLVFDERTPTGRRKGNWTRAHWSWIESIRFAERADNDVLAYYVDAVRRAAEEKARLEGLVEAEARKPRWRKRVDSLRCLKGVDTASAADLVFEAGEFSRFGNARSFAAWVGLTPSEHSSGESDRRGAITKAGNKHLRKTLVEAAWHYLTCSGRPKDLAKGQAPDRGARRHAAKGVRRLVERREALLARGVHGNKANVATARELACWVWAVGLMAEEA

SEQ ID NO: 489273 - protein, 402 aa, unidentified
MFYLGIDLHRKQMTTSLRDRSGDVRLRRQVSTRWSKLEEFRTQLHEMMAADEKYVAVVEVCGFHHWLVKWLRQDERCHQVLVVQPLGRSATKTDRRDAHGLSELLWVNRERLQREDRVHGVRTVQIPTEQEQEERHLTQMRERLVRRRTQTLNQIHKILRRQNLEWEQPTKTFQTVKVRQWLKTLQLEPTDRLVMNQLLAQWQLWDEQLVAADGWIAERFQANQDARLLASMPGVSMFMALAITSRIKPIARFRRGRSLANFLGLTPGCRSSGDTERVGSITKIGSRMVRYLLAQAIQHLLRRDGTLRTWYLRIKRRRGSKIARVAVMRRTATIMWRMLSTGEPWRPGKASSEKPSVAGDGGQTNSPRGKSSGPMAGGSEPGGSSTGSSSLLAGEEVAPCPA

SEQ ID NO: 489274 - protein, 398 aa, unidentified
MGNKPWRRATYEREPVVKKTIRFLGLDVHAETIAAAVAEANGDVRFVGTVPNRPEAIRRLVRKLGPVEELHACYEAGPCGYVLYWQLTELGVKCDVIAPTLIPTKAGDRVKTDRRDAEKLARGLRSGDLTAVWVPDAAHEALRDVVRARLAAKRDQHRHRQRLGKFLLRQGRHRPEKMKAWTQKHREWIRKEVCFDRPAQAAVLLDYLNEVDRAGERIKRLEQAIDEAAAAAPEALRDVMAALQALRGIAKVSAVTIIAELGQLSRFEHPSQLMGYSGLVSREHSSGEKVRRGAITKTGNAHLRRIVIEAAWAYRHGPSRGATLRKRQEGLSEEVKAIAWKAQHRLHDRYRALLGKGKEKQKVVTAVGRELLGFLWSIGVTAERESRGAAAAHRRRVA

SEQ ID NO: 489275 - protein, 346 aa, unidentified
MKYYAGIDVSLESASVCIVDERGLIVREGKVASEPEALIGWLAKPGAKLALIGLEAGPLSQWLHAGLSQAGLAVELLETRHVRAAFKAMSVKTDRKDARGIAQLMRLGWYRPVHCKSLPAQEMRALLTARKLLQKQLHAVEMSLRGILRNFGAKVGQTTARTFEGRVRALVEGQPTLQPVADTLLAARTTLARELAALEKRVRSASRHDDRVKLMMTAPGVGSIVGLTYVAAIDVPERFRSSSSVGPHFGMTPRRYQSGQTDVSGRISKSGDDTVRSALYEAAHIILTKPVKNAGALKRWALAIVKRAGKKKAKVALARKLAVILHRMWMTWKPFDPTKAVGAATA

SEQ ID NO: 489276 - protein, 359 aa, unidentified
MYDATTTEETKVTVGLDLGDRYCQVCVLDEAGEVTDEGRVATKPEALRRRFSGSEPVRIVLECGTHSPWVSRLLAECGHEVIVANPRKLRLIYQNDSKSDRVDALYLARVGRLDPTLLAPLEHRSAETQADLALVRSRNVLVRARTRLISHARGTCKSLGFRLPTCASDAFARKAGPSVPEELAPALSPVFTIIESLSAEIQALDVRIEELARERYPETALLSQVPGVGTLTATVFVLTVEDPSRFPKSRAVGSYLGLRPRQADSGTLSPQLRITKAGDEHLRWLLVAAAHYILGPFGPDSDLRRWGLKLAAQGGRRGKKRAVVAVARKLSVLLLRLWQTGEVYEPLRNARLGGEVLLA

SEQ ID NO: 489277 - protein, 360 aa, unidentified
MQAQKYELNFEGQNIYVGIDLHLKSWTVCIMTEHLEHKQFTQPPEAEVLKNYLSRNFPGGTYYSVYESGFSGFWAHHRLAALGIHNIITNAADVPTSQKEKLQKDDPVDSRKLARSLRSKELEAIYVPLNSTLEERALVRMRYTMVKDMTRLKNRVKSFLYFFGIRYPDQFNKSSTHWSKNFLRWLKEDVQLCEESGKQTLNILIQEIEELRKLLLLLNRQLRTLSRQTKYASRVKLLQTIPGIGLISAMTILTEIEKIERFENPDHFAGFVGLVPNRHNSGDVKRDGEMTFRGQDKLKKCIIESAWIAARRDPALSLAYNKFVQRMEPNKAIIRIARKLLNRIYVVLKNKTEYVTGVVK

SEQ ID NO: 489278 - protein, 325 aa, unidentified
MTVYVGMDVHRKRSQVAIIDAAGAQQRNRNLANDPAKLVPVLGALPPGTPVAFEAAYGWGWLVDLLEELELEPHLVHPSRCKAIASARLKNDKVDAATLAQLLRADLLPEAWIAPQQVRDLRALLRHRASLVRLSTSCKNRIHAVLADRGIPDHSSLWTGPGRAWLADLELPATPRGIIQDCCGLLDALATPIARLEREITTLAKPDPRVQALMALPGVGKLTAMTLVAEIGDIARFPTARKLCAWAGLTPQVRNSDRKVRHGHITKQGSPWVRGILQEAAQTAKRHPMFASTYAQLARSFHILTQLETAPAPEKASTGRARVSA

SEQ ID NO: 489279 - protein, 344 aa, unidentified
MNSTTIAVDVAKSVFEVAVSSQPGHVRDRHRLSREGFARWLSEQPPATVLMEACGSAHHWARHAQRHGHRVVLIPPHVVRPYVHGNKTDRTDAKGLLEAFRNDEVRPVPVKSETQQALAALHRLRSTWQAPRTARLNTVRGLLREFGVVIPVGARQVVPHVRALLEDADASVPGLLRPALAEAVQEIGEREARLRAVEHQLEAAAAASLVVGHLRTIPGIGMLTATALVATVGDVQRFPSARHFASYLGLTPREHSSGARRHLGAISKRGDTYLRMLLIHGARAVLWHAKRPRALPLDRLRTWALELERLRGHNKAAVALANKLARIAWAVWKHGTGFTTVPAA

SEQ ID NO: 489280 - protein, 374 aa, unidentified
MDEISKIHVGLDVHKDSISIGVAQPGREPGRLLSKLGHHLPKLLKLLDKLGTPAQLHVVYEAGPTGFGLARSLLAKGYGCEVIAPSKTPRRPGDRVKTDTRDCIMLAEYSRSGALHAVWIPDAADEAIRDLSRAREDAINARHQARLQLKSFLLRHDVHYAGKTSWGKAHHHWLAEQSFGASAAQTAFTEYCLTVQAADQRVERLTQALEGAVTQWRFAEVVAALQALRGVAMVTAIGLVAEIGDFSRFEHPRKLMGYLGLVPCEHSSGERTSRGSITKTGNAHARRLLTEAAWQYRHPARISRAAQLRQEGLSEQVRVTAWKAQLRLSRRFAALNKRGLQVNKACIAVARELAGFVWAIGQRAMVESATKTTH

SEQ ID NO: 489281 - protein, 408 aa, unidentified
MNPLFVGIDVSSKNNVAYLMKPDGSKHSSFSVQNNLGGAKLLSERIVSALGSMQLERVVIGLEATSIYGDSLVYALREDGRLGRFQRKIHVLNPKQVRKFKEAYSDLPKNDWVDAFVIADHLRFGRINREVYMDDYRYKALQTLTRARFDVIQNLTREKQRFANYLFLKCSGMAQDKDIQNTSATTIALMEHFETVDDLANADLEELTAFITETGRGKFADPDATAKAVRAAAKGSYRLPKTVNDTVNQAMAVSIASMRALKGQVKVLDKAIEQQFEIIPNTLTSIPGIGKVYSAGIIAEIGDIHRFDSQASVAKSAGLVWNRSQSGDFEAEHSRMIKSGNRYLRYYLLEAANSVRRCDSEFRRYYDLKFKEVNKYQHKRALALTARKLVRLVFRLLKDNRLYIPPEG

SEQ ID NO: 489282 - protein, 391 aa, unidentified
MWVEDENTTKIASRIVPQTAEGLSEWGRWLDERRAEGIELWAALENPEGRIVDFLLDHGVLVFPVNPKALDRARDRFRMSGAKSDPFDAYVLATFLRTDHGHLAPLRPSSEAAQELKGLTRDHARQVRQQTRLLNQLTATLKAYYPRALEGCEDLKSQWARAFLREDSTPAAVAALTARQWQRWARAPRLSAERIAELWAILQRPQLPVPAHVVRVNARLVGALLAQLETTITAVEAYREAIPDFFASMPAAEWATSLPGGRSGTTVPQLYAELGDAPGRWQTFRHLPGHAGSVPVTDRSGKQVTVQFRFACNLHLRQAVHQFAFQSLGKSEWARAYYDRCRKRGHSHHHAVRALAAKWLKIIFVLWTRQVAYDETYHLATMARQHLRQTA

SEQ ID NO: 489283 - protein, 400 aa, unidentified
MLSIGIDVSKGKSTVCGMKPEGEIVYAPFEVQHTREGMSELVSLLRSSGEEVRAVLESTGSYHCPVVAALLENGIFVSVVNSLRMKRFCSQSIRKVKTDRIDAMQIALYGLAYWQELQPARLPEDTYRELQLLARQYYQMTSLLIKAKVDFNAICDQVLPGMQELMNDHAGRHKLSDFVLQYCHTTHILEMGETRFRKDYCKWAEKKGYRNCERMAALIFATAQNGIPVLPNAPSTQIVITEAIRVLHTVEASRDAILTQMQALAKTLPEYSLVREMPCIGDTLAPRLIAEIGDVRRFHSKRALIAYAGIDAPPYQSGKFCANNRHISKRGNRYLRKTGYEVMQSYVMHKPANDPIFTFIEKKRGEGKSGKLAMVAGLNKFLRVYYGKVTELYRSLPAIE

SEQ ID NO: 489284 - protein, 346 aa, unidentified
MMIIGCDFHPSWQQVCWLDTATGESGEQKLVQASGDAERFYRQVAAPALIGMEATGNCHWLVDLLAEIGHELWVGDAAQIRASYVRQQKRDKRDAVHILKLLVEGRFPRIWMPSSQVRDLRQLLLQRYKLVMIRARVKNEVQHLCLNQGVQRKRKLWSQAGQQVLRELPLKPWAGRRRDDLLKLMAMLDQQIGPLEEAVKAEAQGDKMARLLQTQPGVGPITALAYVLTMGDVGRFPRGKQVARYLGLIPREHSSGGRQKLGAITKQGNRMLRMLLVEAAQIAVRYDPEFRRQYLHRCHQKPKAVAKVAAARKLAVRLYWMLRTQVAYPEIVRIESSPRVPLVGAS

SEQ ID NO: 489285 - protein, 334 aa, unidentified
MKRTQSTTKSRAAKPRKSAAKTKTRISAGVDVGKAWLDAAVHKASGKLLRQPNTPQGQAAIIGFFLEHEVTRVGIEASGSYEFEMVDAMREAGLEVIVFQPAQVRAYATFLKLRAKTDAIDAALIAQCAAAQEEARDEPDPRLVPMAEHLTYLDQIAEDIARLHTRLDRYRDQRFIAGIKDEIDRLTRRQRVELALLRKQVRIHADLVERLRLLLSIDGIGEPTALTLLIRMPELGTISRERASSLAGMAPFTQKSGRWVGQTHVSGGRGRVGKALFAAAQAASQRWNKALIDLYQRLRAKGRHHSVAVVACARKLVIFANTVLARGTPWVAQN

SEQ ID NO: 489286 - protein, 309 aa, unidentified
MDIVVGIDVSKDRLDVAVAPSGLAFAVVNTQAGIDELIARLQSVKADVVALEATGGFETPAVAGLSSAGLPVIVVNAAQVRAYAHAIGRKAKTDPIDAGLIAAFVMATRPALRPLKDAETQALSALVARRRQIVQMIVAEENRARMALAKETQKSIRRLLSALRHELESLDADLDDHIRKSPLWCVREGLLTSVPGVGPATARTLLAEMPELGRLDRRQIASLAGLAPWTRQSGTWKGKSFTGGGRGKVRSALFMAALVASRHNPVLKAFRERLVAAGKPKIVAIVATMRKLLTILNAIIRDQKPWKSA

SEQ ID NO: 489287 - protein, 332 aa, unidentified
MYNCIGLDISKKLIAVYIPINKVNLEIENNSKAFKALYSKLKKLYKKEIASLVFIFEPTGSYSFALTKFCKDKNIKCFLINPKQFSNHAKALGQRNKTDEVDSLVLSKSLHLARDNEIKVPYINEEAESIKELMGYYKFTSKQKTKTSNHLEALCAKDGSSFVIKELKKSMKNLKNTQEDILNHVMNIIEQNEELLVKYNNIKTLSGIGRVGSIVLLHLFIKYPKANQRQIVALSGLDPIVKESGTSIHKKPKISKAGSKLYRGTLFMGVMTAIRFDENFKRFFERLKENGKHTTVAQIAVMRKMIIIAHSLYRNDKQYNKEFYAKACGVQE

SEQ ID NO: 489288 - protein, 384 aa, unidentified
MDQTTSTLSANTLHCALELSKNSWLLAIQFRDREQPSLYPIEGGNTDKLMAKLAAARDCWAKVNGALPAITLCYEVGHDAFWLARFLKARGIECLVIDPGSLQVNRRARRVKTDRVDVKMLLRTLIAWCRGERHVWSLVRIPSVDEEDLRRSHRERSRLVRERTAHINRIKGLLFAQGVRGINIKSQYKTLAVDQLVTGDGHRLPPRLVCEVAREIQRLAMVQEQIAKIERERDTAPTPCEATERKRRLLLRLKSIGPAISALLSREVYYRQFANRRQVGSFLGLTPSPYSSGEEERCQGISRAGSGHVRAIMIEAAWLWIRHQPKSALTRWFLERTAGQSTRMRKTLIVAVARKLAIALWRYVEHGLVPQGAILNPPTTGNAR

SEQ ID NO: 489289 - protein, 423 aa, unidentified
MKNSAAKKRKQVPAGYLVVGVDPHKKKHAAVFMTQDFMTHSKLKFDNSREGFETVLERARTEMLKTECRGVIFAIETGAHHWRNLAYFLDEKGIPLRLINQFTLKRRREGKDLNHRKNDYRDSEVAAQLLCTGEFNAARLSQGVYAELRAAYGSYRRLVKEKTRTVNLVKSLLDGLFPEFTQVFKNPCGQTAASVLCTCAVPQAIAGMTESEFAGAIKAACQGRVMKGKLRILHHVAMTSIGIGAGAQSVSSEIAFLIEKLRLIEQQLRQINEALTRLVHETMEGKYLLSIIGLSYVSVAGIIAELGSFSSYQNAKQLIKMAGSNPTESESGGKRHSHTPISKQGRPVLRHCAWTAVIPMLRFNPDFRDWAKKLRERPAGANPLSGREVMVAAVNKLLRLAFALVKNQALYQIPESQPVEIAI

SEQ ID NO: 489290 - protein, 428 aa, unidentified
MNQTELSRVKEFRQLKIEIQASDTYLIVGIDVAKERHHAFFGTGTGKTLLKKLIFDNTSAGFSELLARVEAVRAQNGLSDIVFGLEPTGNYHKPLGRYLISKGCHVVLVGGKAVKNNRELLDERWDKHDTKDAANVADLVSRGKCFYYDTPSREIEELRDLLSLRARLKKEEHSLSLRIRNNLLAKHFPELDSFYSACEKETLAIVRWCLNPQKIAAMPFDQFFKLVATTGRGIARKLRLQKIHRLAHESIGCPVGCAVELQAALLVEKIKQVREQIAEVEQVIQRLCTQFPAYEYLLSIPGFGPYVASKVLATIADPWRFDGAKQVIRTAGYDLCADRSGKRSDQAVPVISKKGNSQLRYALYQAAMVASSRHRFFIAYFARMLQGRERERGIKTKMRVKLAAKMLVIAWTLMKKGEPFNPEYLNLQ

SEQ ID NO: 489291 - protein, 319 aa, unidentified
MDAHFVGIDVSKDKLDVHIRPGGEEFVVSRDADGLDELIKRLDPVHAVAIGVEATGGFEQVVAAAVAGASLPVVVVNPAQVRDFARALGQRAKTDPIDAGVIAHFIEATRPEVRPLRDEQTRLLAQLVTRRRQIIQMLVAERQRQQHPLSQAMKKSLARLITALEKELNALDKDIDETLRGCEAWKEKQDLLKSVPGVGAITARTLLAEMPELGTLDRRKIAALAGLAPYTQSSGKWKGKSFIAGGRSKVRAALYMAAMTAIRANPLLKAFYQQLLARGKAKLAALIAVARKLLTILNAIIRDKKPWTPIQIIACPSFW

SEQ ID NO: 489292 - protein, 352 aa, unidentified
MSKEEIFPNVTIGLDLGDKVSRVCEIDAGGKIVKTAAVATTPGAMERYFGGRPRCRVVLEASTHSPWVSRQLKELGHEAVVANTSEVYAKRPRKRRNDRTDAEFLARQGRADVELLHPIEHRSVEAQQDLALLRARDQLVGARTKLISHVRGAVKSLGGRINKCSTEAFAKQAAGQVPEALRPTLTPLLEVIADLTRRIREMDKQVERMTEEHPEAVRLQQLRGVGPVTSLAFVLAVEDPARFKRSRQVGAYFGLVPKLDDSSDSSPQLRITKAGDALVRKYLVNAAHYILGPFGTDCDLRRYGEAIAARGGKNAKKRAAIAVARKLAVMLHRLWVSEADYDPDWTQRRRAA

SEQ ID NO: 489293 - protein, 364 aa, unidentified
MNDCITWVGLDDSAKRINGAILVGNEAECREPFAVENNDSGLGRMIKRLKSLPGEVRCVYEAGVSGYHLQRFLHKHKIKCEIAAPSLTPRRPGDRVKTDSRDARKLAGLYRAGELTLITIPAQEQESLRDLVRAREDALEDLQRSRHRLNRYLTRKGLRYLGSKNWTGKHLQWIQSLQFEDPRDKFVLDEYRLSLNEGMTRLKRFDEEILALAKSPEYQPRVSYLMALKGIKELTAMTIIAEVFDLKRYKDARSFMAAIGVVPSEYSSGGREHRGCITKTGNSHLRRIFVESAWHYQSRSVPGRCLQKRRAGIPAAVLEIARKADLRLSKKYWRMVGRGKDSRTAAVAVARELAGFVWAIGHVE

SEQ ID NO: 489294 - protein, 391 aa, unidentified
MSLYFVGIDISKYKHDCCIISATDQKVISKFSIKNDKVGFEELITTFNSLSSPEDIRIGFESTAHYALNLELFLENANHSFMEINPVLIKEYKKSTTLRRTKTDSVDCESIARWLMTVEYKPHSKGFYHAYSLKSLTRLRDRLIRQRSFYLVKITNVLDHTFPEFKPFFNERLSKTALYLLENYGSAEKMARMNSVSYEKLRSISRGKFSPQQFIALKELASNTVGVNNSIFDVELNSLLTLYKTLVTEINTLEKEINLLIEEVHPHYLSVPGIGPISAAIIYSEYGDISNFDNPGQMLAFAGIEPGINESGTESHGGRMVKRGSSQLRYALINCCLPLIRFDMTFATYYAKKRAEGKPHRVAITHVAKKLIRVIYALERQDTDFCVQKLR

SEQ ID NO: 489295 - protein, 356 aa, unidentified
MSSKKKEIKIEALMSVGIDIGKDVFHLVGFDPDGNVVVRKKIKRMALEMTFRELPSCIVGMEACLSAHFVSRSLRKMGFEPRIIPAIYVKPFNKGQKNDYNDAEAIAEAALRPNLKIVPEKSQDQLDLQALHRVRSRLVSRRTATINQIRAFLIEQGITVRKGLRALKNSFLIILEERKDEISPRMRKILIGLYGDWLWMDDRIDAVSSEIEGISRTEENCVNVMTIPGIGPMISTAMVAAIGTGDAFDRGRDFAAWVGLVPRQYSTGGRTVLGRITKRGSRYLRMLFVQAAKVILMRPHRWPDFSFGEWLIRAEPRMHRNKLAVALANKLARTAWSVLHHGTTFDAPRDEVAVGV

SEQ ID NO: 489296 - protein, 378 aa, unidentified
MNAILQTNDTALASALYMAMELSNKKWKLGFSNGEKNRIITIDAGDWPALSAAIDLARTKLYCAPDCHVVSCYEAGRDGFWIHRSLTADGIENYVLDSASIEVSRRKKKVKTDRVDVVALLRLLMRYMHGEKEALHAIRIPTVEAEDQRRLNRERDRLIKERGAHSARIKSLLIAHGIRLEKMSDLPLLLPKAKAAVIGYDLPADLKAELEREYARYDLTNKHIKKLEKLQIERTEAEGVPATRNIQHLRSLKGVGWQSSWVLSMEFFNWREFKNAKQVGACAGLTPTPYDSGDSTREQGISKAGNKRVRKLMVELAWLWLRYQPDSKLSLWFQKRFGSGGKRMRRIGIVALARKLLIALWRYLETGVIPEGAILKEV

SEQ ID NO: 489297 - protein, 410 aa, unidentified
MEAIVECCAGLDVHQATVVACLNNGPAGKRSNKEVRTFGTMGHDLREMRDWLKASGCTLVAMESTGVYWKPIHAELEGHFEIIVGNAHHIKNVPGRKTDVKDCEWISDLARHGLIANSFVPLRPIRDLRDLTRYRRKLVEAQAAERNRLIKLLESAGIKLSGVISDVFGVSGRAMLRALIEGDQSPAEMARLAQRRMKRKQPEIARALDGHIDEHHRFILRLQLQRIIAAEADLAQLDERLSEKLAPYDQELGLLMQIPGVDRVIAGAMIAEIGVDMSVFHGAAHLASWAGLCPGNHESAGRQRGGKTRKGNVWLKTAMVTAAIAAGKTRRSYFAEKYRRLGARRGKMRAAVAIAHKILVAAYHMLANRSDYRELGPDYLDKLNHHRTAINLTNRLRAMGYEVQITAKAA

SEQ ID NO: 489298 - protein, 341 aa, unidentified
MGEVITIGLDLAKSVFQAHGSDEAGAVVFRKKLRRGQILPFFAGQPRCLVAMEACASAHYWAREIGALGHQTRLIAPAYVKPFVKRQKNDMADAEAICEAAQRPTMRFVTPKSAETQAAATVFRVRDLLVRQRTQLINALRGHLAEYGMVVRQGAENAHQLIELVADPTSDLPEEARSTLQVLTQTLQALQTRIAVLDVEIARRAKTNALAKRLMTIPGVGPVVATALVALAPAPQTFRRGRDFAAWLGLTPLQHSSGGKERLGRTSKMGERTLRRLLIIGASSAAKAAATKGAPTDTWLGRMLSRKPRMLVVVALANKMARIAWALMAHGGLYKAPATAA

SEQ ID NO: 489299 - protein, 369 aa, unidentified
MKDSITIVGMDVHKNSISIALAETGENREIRSYGAIGGTMAALDSFVKILIKKGVNPRFVYEAGPCGFEIYRHLTKKGFPCKVIAPSLTPKKAGDRIKNDKRDAMTLARLERSGDLTGVVVPSEEDEAMRDLTRAREDAVKAQTIARQHLKAFLLRHGKRPPRSERWGRDHMRWIEGISMDLPALQVVLEDYITAVITATERVKQLEEEIERMLPGWRMGPVVRALQAMRGIGPVTAATIAAETGDMNRFSSPRQYMAFLGIIPSEHSTGDSIRRGKITKTGNSHLRYVLIESAKQYIHKARVTRVLMKRQEGLPKEVLAIAWKAQKRLCKRFTALIMRGRHRNTTAVAIARELAGFVWDLARQVPITA

SEQ ID NO: 489300 - protein, 338 aa, unidentified
MQAPRHIGIDLHRDKFTCCVRLENGRNYVTDWKLEDLPQFVKKLRPSDEIAVEVTGNTRLFRDGVARVVAVDPNQFRVISHSVKKTDPNDARNLALYLAKDLLPEVRMKDKTQAQLASLAQTRDTLVKLRTALKNKINNILSAHGTNLEKEALSSEKKLKEVLAMAFDPMIRIELKVLVEQIRSLNQSITELDKTIEDEGRKLEGHKNLTSIKGIGPLTASILLSVIGDINDFADEGKLAAYFGIVPRVSKSNETEHAGRITKRGSKLGRTALVQCALIAQRYSPYLKRYYEKIKARRGAGKAIIALARKLLGIIYRTLKNKWVFEDFTNFVLAEEAA

SEQ ID NO: 489301 - protein, 390 aa, unidentified
MPKFDGLSHSLTAFDQDSTLVVVIELASTSWTVGGLVPGVSRQPTKKMPADKFALARQLEDWRAQAEAAGCPIKRVCVAMEAGRDGFWLARWLWARDIEAYVIHPTSIPVPREHRRAKTDRLDVGMLLRAFLGWLRGERKHCSMVKIPTREEEDAKRPLREREGLVSDRSSLINQLKSLLALHGIRGFTVTKKKAAAQLQRLLTEEGLPLPEYILAALERTMARLALIKAQIADIDRGRVQRLKAAPEEGLHPMIRIIAQVKGAGLMTAELLVREILSRPMRDRRAVARYGGLTGSPDESGKRRREQGLAKAGNGRVRHVLIELAWRFLRHQKDSALAQWFFARTQDGRGQTRKVMIVALARKLLIALWELATTGKPLEGIHLHSRLPVA

SEQ ID NO: 489302 - protein, 348 aa, unidentified
MHGKSITYENKRVFIGIDVHKKTYSVSSISDGALLASVTMRADKENLVSYLISKYKGADIYSVYEAGFAGFGLHRRLIKEGINNIVVHPAAIGVSSNDRVKTDKRDSKKLAMHLSGGLLSGIFVPSQNQELSRLLCRSRYQYLRSRTRLRNQIRMRLHQFNFIPPEMDQKLTKGFIQSTIGLLPKDLRFDIEQKMETWEFLDNRLGTYNKKILSSGNSSDLDARYLTLPGCGTLTARILATELGDMYHFSNEKALYRFTGLTPSEHSSGTKLRRGKISKQGNPVIRHTLIQLAWRAVGKDSFLAAKYKTLSLRIGRNKAIVAIARKLIGIARSMFINNTTYKAPVKMS

SEQ ID NO: 489303 - protein, 352 aa, unidentified
MGIVVALDVHRNQITYKALDRETGELRRGRIVPATRAEVRAWLRQFTDGQAEFALEGTTGWRFVVEEIERAGHRAHLADPAETAARRGRKRRAKTDNADCDLQLRLLLAGELPESWIPPANMLELRTLVRLRKTLIDQRTAWQQRIHAQLFHQGAPGGLRLRTHAGREALRRAELSPAGRELVALGLRMLDSFDRELAPLDRQLRAYARRQPGCRALVEHLYSVGPVSATAILAELGDCRRFSSSDDAVRHAGLDITVHQSDDKRAPGHLSHEGPAVLRWALYEAAVSAARASSPDRCYYLQVAERIDHNRARLSVARKLCRRAYHILRELGEQALAPIEQPIDEEALAAAA

SEQ ID NO: 489304 - protein, 425 aa, unidentified
MKITQNLREIKPNQGLDVSVDVHKDTLNFFFSLEGKEYRDECPNHTRSIEKRLSKYYGIAQEQGIQRLRLICEPTSDYQNKLLCTARRQGHLTCLVNAESVYKFRVVETNDTGKTDTKDPKVIATLGRLNKVIRHRVLSDDYLVLRKLGRIYDELESEITSLRCRIDKLLIELFCDFSFTKDFLYGTSGNALIDMFGCNPYRIIDTGYEAFSATMRQAVPRIRRESLQRLWQDAGSSVLNELPAGYRDVLEEQFRDLVAAFRNRETRMEQIVEQMKIVLQRIRDDDPRIPPPTAGVISEKNLARLLAETGPIGDFRHWRQLMRYGGLNIRMRQSGKYMGKNRISKKGSPLLRKVLNHIVLPLVRQNCLYGTYYHKKREVDKMPGTKAMTIVARHFLRKFYGWYKSGAVFDEKRFFASEREYLKAA

SEQ ID NO: 489305 - protein, 371 aa, unidentified
MTSILYIGMDVHTTNYTLCAFSPNGQKVYAQTTIDPDIDQLLKYLSTIQARFGGKDCKLICGYEAGCLGYTLYHQLTYHKYECIILAPTTMPATAKEIKTDRRDALKIAKCLAYNTYSPVYVPSDKDNAVKEFIRMRDDAQTLLKQTKQQINAFCIRHGYIFEGSSRWTPKHLKWLHSLKLDEPILQETLAEYLVTYEQLANKVERFDKRIEEIAQQKEYRERVNQLVCFKGIRVHTALSFVVEIGDFKRFPTAGQFASFLGLVPGEHSSGMSRHQGGITKAGNSHLRRLLIESANCYNRVRVGRKSADLKQRQEGNTPEVIAYADRANDRLRRKYMRIMTHSKANIAKAAVARELACFIWGMMNGKLAQP

SEQ ID NO: 489306 - protein, 358 aa, unidentified
MQRNKKTFKGQNIYIGIDVHKKNWQVAVITESGYTERLSTAADAKALFKFLKSHYPDGNYRAVYESGFSGFATHYALSELGISCVVAHAADIPSSQYELTMKSDRIDAEKLARALRAGLVRGIYVRPKDNLDDRGVLRIRKTIQIQVGGYKTRIKHLLHSNGVELPERFSRSGTHWSRAFIAWLREDVRLLSDTRRSLDLLLLQVETLRANLLEATRRVRALSMTDRYREDCALLMGIPGIGLTVAMTILTEVCDIGRFGNERLFASYLGLVPTSHSSGERVSHGEMTFRGDKHIGPLLVEASWVLIVRDRELGRMYTEYRWRMAGQKAIIKIARKLSNIIFAVLKTRKAYEPYRRDA

SEQ ID NO: 489307 - protein, 338 aa, unidentified
MNRQYVGIDFHRRRSVIVRLSAAGERLAVTRVGNDPFEFAAVIAEAGNSPAVVIEATYGWYWVVDLLQDLGATVHLANPKALNWGDRRVKNDVVDATDLADMLRMGRLAHAWIAPPAIRELRELVRYRAKLVQLRSGLKAQVHAVMAKEGVLPGTLDMFGQAGERQLDQMDLGRNYAIRVASLRELIGAYDREILTLERDIHQHLKADRGYRAVQAINGVGRTIAAILVAEIGDVSRFPTPAHLCSWAGLTPRHHESDTKTRRGKISKQGSRLLRWALIEGISRYHGGEVLAHSYHQIAKRRGTNKARVAVARKVLTLAYYGLRDGEIRCLAPAQVAA

SEQ ID NO: 489308 - protein, 366 aa, unidentified
MLQKAGLSEEADPENYLGGSSETMYYIGLDVHKKTISYCVKDAAGCVLSEGKINASRRDLDVWVRTLPQPRMMAMEATIFTGWIYDHLQPHAEKVKVAHPLMLRAIALAKRKNDRIDAAKIADCLRCDFLPECHMASTGIRDRRRILRYRNLVVKQSVQMKNRISGLLMETGVTYNKRRLHKVGYFADLMATNAEIHDCIRPLLRLSREHIERAQKLDYALVTSLERDPLLKERLRRLRTVPGVGPITALTWALEIGDYTRFHSIKEAISYCGLCGDEKSSADKVTRMPLSKQRNKHIQRVLVEAAKLAPRECHELAVVRERELERGNPNRATLAVARKIVCYLLAVERGQRDFVPAEEFSRTAAA

SEQ ID NO: 489309 - protein, 344 aa, unidentified
MQSELFVGLDVHKKTVGATVVDHEGNRVDQSSFGPRDSELISYLDRLPGRKHVVLEACNVWEHYYDAALSTEAEVTLAHPYRVRLISEASLKSDKVDSETLAELLRLRGIPVAYAPDPETRALRQLVRDRWFYKREEAGVKSHIYSALLRKGIPYDDGILGRTRNREELRSHQIPEVDRGLDVLHRFDELTKDLNEAIHQAFLKSREAQLLKTIPGIGEFTAVALVAEVCPIDRFPNIEKLCSYAGLVPTNRQSGESSYQGHLKTDANRMVKWLLVEASWSHRQWAGKGSDVTKVARRVARRSGKQSGNVAGAHKLLKIVYAVLKRGTPYTPDRPSFGGTAAES

SEQ ID NO: 489310 - protein, 319 aa, unidentified
MSNIILGIDISKLTFDVALLIDNKVKTKKFSNTSKGFSELKQWLKNKGIDNAHVCMEATGSYGAKLAEYLYDNNFKVSVINPARIKGFSMSKLSRVKTDKADSELIARFCQAIKPDFWQPTPLHVQELQQWVRRLDSLIANKNQENSRLDGVSEEVAINISTHIEFLDKQINEVKELISHHIEGHADLHDKRKLLDSIPGIGEKTIAVILAFLTVENFDSAKQVAAFVGLNPRPKQSGSSVLGVGRISKMGDADLRKAFYMPAVVSIKFNPIIKDFAKRLSDSGKTKMVVLIAAMRKLLHIIYGVLKNKTTFNKNIKTI

SEQ ID NO: 489311 - protein, 413 aa, unidentified
MDVLHSRCCGLDVHKSSISACILLREAGRVQKHQRRFGAVTQELQELAEWLRQFGVTQVAMESSGVYWKPVWNILEGRFTVVLANAQHIKNVPGRKTDQKDAEWIAQLLQYGLLRASYIPCEIIRDLRDLTRMRASLSQEASRISSRIQKVLEDANIKLASVASNVLGKSGRAMLEGIITGEDDPEHLASLALGHLRVKIPQLKLALEGKIRSHHRFLLRRLLDQIQFLEHEVALLDERLEEIGRQRPDLAQAVVRWDTIPGIDQVAAWALLAEIGDNMAQFPSAGHLASWAALCPGNHESAGKRLRGTTRQGSPWLCRMACQCAWATARTKNTYLSSQFRRLAARRGKKRAIIAVAHTLIVIGYHVQKNQSNYEDLGGNYFDRIHSDGLKRYLVKRLQQLGHKVTLEPIEAA

SEQ ID NO: 489312 - protein, 350 aa, unidentified
MSSTSTLTTIATIGIDLGKNTFHLVGLDRRGAIVSQLKLSRGQVERRLANVPPCLIGMEACSGSHHIGRRLTALGHDVRLIPAQYVKPFLKGHKNDYRDAEAIAEAVQRPTMRFVAIKTPEQMDLLALHRVRSRLVGQRTGLINQIRAFLIERGITVRQGVMPLRKALPDILRSNTEALSPRVVRLIADLMQDWRRLDERIETVSAEIEALARQDDSCQRLMTVPGVGPIISSAVVAAIGNGSGFKQGRDFGAWLGLVPKQESTGDRTILGKISKRGNKYLRTLFVQAAHVVLARRPATAKRGLWPWVEQASKRLHRNMLAIALANKLARIAWAVLARGRAYEPRVPAHA

SEQ ID NO: 489313 - protein, 366 aa, unidentified
MKKVSTAVARQSKNFSDRKLTIGLDLGDRSSWYCVLDEAGEVLLEQKLGTTPKAMKEVFGGMPRSRIALETGMHSPWVSRVLGELGHEVIVAHARNVRLIGESRRKDDRLDARTLARLARIDPQLLAPVKHRSAQAQAHLTVIRARAGLVRARTSLINTARGLTKSYGERLRGCNPRNMNPEQAQGLSPELQAALAPLLAGVEALSEQIREYNGQTEQLAQTSYPEVALLKQVKGVGTLIALTYLLTLEDPHRFGKSRDVGCYVGLQPGRRNSGQSEPQLHISKEGDPYLRTLLVQGAHHILGPFGADSDLRRWGLKLAERGGKNGKKRAVIAVARKLAVLLHRLWVSGEVYEPLRNSKRALPAAA

SEQ ID NO: 489314 - protein, 341 aa, unidentified
MDKVISVIGIDLAKNVFQVCAANNSGKRLFNRSVSRAKILPMLANIPKCIVGMEACSSSHYWAREIEQLGHEVKLMPPQYVKPYVKTNKNDATDADAICEAVVRPSMRFVAIKSVEQQALMLLHRDRRGLVRDRTSLVNRLRAMMGEFGVIAPVGLHKFRSWLKEEYGAVESQLPELLRRHIHVMVSRLWETDEHIALLESEIHGNSSSAEDCKRLGEVPGIGPLTASALVASFGDIKSFSNGRAFAAWLGLVPKQHSSGGKSKLQGISKRGDSYLRSMLIHGARAVIRHLNPKRTVSRWLRDLLCRRHKNVVIVALANKLARIVWALLSKGTKYQESYSC

SEQ ID NO: 489315 - protein, 419 aa, unidentified
MSYQIAGIDVHKRMLAVVVAEVAAEGEYQFERRMVGTSPGHLRALAEWLVAAEVDEVVMESTAQYWRPVWETLERYWQPIRRTREGAGALSGTLHLAQAQSNRGARGRKKDFPDAERLVKRWAAHELTLSFVPEIEQRLWRTVTRRKYQLTCNRVQLQNRLECLLEEAHIKLSSLVTDLLGLSARRMLQALADGETNPDTLVRLADRRLRATHDQLRDALGACTDLNPVYRRLLQLALEELRLIEQQIEALDQELARLLRPQQEAVERLAAVPGLGVDSAQQIIAEVGPTAGTFPSPKQLASWVGSCPGNDESAGVNYSRRSPHGNRQMRRLLNQAANAAVKTKGSIFELVYRRLVVRLGHAQTIGAIAHRLCRLVWKILHQGVTYEERGPSVTKERAHRRAAKMIRELRSLGYRVEPA

SEQ ID NO: 489316 - protein, 367 aa, unidentified
MLTVGLDVHFRKSSLCLLDEHGKVLGQKQLTGTWSAVIDELKRIEQPFQICYEASLGYGHLFDQIKTLPHAKAIQVAHPGQLRLIYKSRRKNDRVDSRKLATLCFLDQVPQVHVPSIDTRSWRGLIEWRQKIVGRRVMVKNQIRSLLKGCGIVPLKKTTLWSQKGTDWLKEQVFAMAVDALRRDMLLEELAEHDGRIKKLDKALNDIGRKDPRVALLQTIPGVGPRTAEAFVAYVDDPKRFRNVSCIGSYLGLVPSQDASGSTNRLGHITREGPATLRKLLTEASWQGILRDPTIKKHYEAIYRNDPTRRRIALIATARWLSVVMLSMLRSNEGWRTSEPADQKPTAATPRTTNEAAPATRAAATTT

SEQ ID NO: 489317 - protein, 440 aa, unidentified
MKLKIVNPNAAGIDIAYGEMQVCVPEDRDGENNRCFGSFTCDYEEIASWLKACGITTVAMESTGSYWVGLYFFLEEKGFDVLLANAKDVKNVSGKKTDEADAEWIMLMHSYGLLKPSFHPDAAARNIRELARHRDNMLRSAGKEIQHMQKSLVLMNIKVDTVISDILGKSGKAIIEAILEGNHDPKSLAQLADRRCKASRETIEKSLEGTWDAVHLFELKQSYDLYKYIHTQIADCEAEMDRMLSDYTDGCGTDMTGYKATEKRVAKKNAISFDAEKHAFSMWGVNIMEMPGMSLGGLSVLMGELGSGFVEKFPSAKSFCRWCNLVPNNKISGGKLLSSKVPKQKNRVGQVFRLCANSVKGVKSGLGVYFRRQKSKGGHLQAIVATANKMARIFYTMVVSKKPFDETKVGLDEKTLLQRKISIAQRSLEKLNLRLSVAQG

SEQ ID NO: 489318 - protein, 427 aa, unidentified
MPYKIAGIDVHKRMLHVVVSDVQVDGEYDFTRRVFGSLPEALRSLAAWLVEQQVEEVVMESTAQYWKPVWGTLERYWKRICQTREGALATSGTLHLALALSNRGRRGRKKDFRDAERLVKRLVAHELTLSFVPDVEQRLWRTVVRTKYQLTRNRVQLQNRLEALLEEAHIKLSSLVSDLLGASARRMLEAIAGGETNRETLAALADRGLRATQEQLQDALGVCQELNPVYRRLIKMVLDEVASIDKRIDQLNQEMASLLRPHEDQVKRLAEVPGLGVDSAQQIIAEVGATAATFPSEKHLSSWVGACPGDEESAEVNHSRRSPQGNRHMRRILNQAANAAAKHKGSIFQILYGRYVPRLGHNQTIGIIAHKLCRLVWKILHRGIRYEERGPEVSKASKQKRTRKMILQLRRLGYRIEPSPSPSAITA

SEQ ID NO: 489319 - protein, 315 aa, unidentified
MVVGIDVAKDSLVVAVHPSGETWTTGTTAKDLRALAKRLHRLAPTLVALEATGGYEIPVLGALAAAALPLSLVQPGRVRKFAGAQGRAAKTDVIDAHVIAQFAAQMAPTPYTLPDAVQRGLMLLVARRRQIDEMLVAERQRLDQQQLFPDSPVRADVEETVAYLEAKRHDFDQQLHAYVAAHPRWTESAALLRSVPGVGPITTATLLAFLPELGTLTRQEIAALVGVAPMNADSGKWRGQRHVRGGRAMVRRVLYMAALAATRHNPWLRSFFERLCARGKTGKQALTACMRKLIVLLNSILRTKQPWQAPTPATA

SEQ ID NO: 489320 - protein, 355 aa, unidentified
MNQEKYIGMDVHAATISAAVKNAEGKLLMECVLETKAATILEFIQGLRGTLALTFEEGTLAAWLHDLLKPHVNRLVVCDPRKNALLRDGNQNDRVDARNLAELLRTHQVHAVYHGKHGTRALKELGRSYLTLTKDSTRVMNRIKSVYRSWAIPCAGTSVYSRRHRAEWLAQLVEPGVRIRAEHLYEQLDSLQPVRQAARRELLRESRKHAAVKLLRQIPAIGPIRSALLVALLQTPHRFRTKRQLWAYSGFAVQTYDSGEFRFVRGKLHRNRERITVHGLNHNHNHDLKNLLKGAAISAIERPGPLQDFYAALVEKGMRPSMARLTLTRKIAAIALIMWKKGVSFDPKQLPRQAA

SEQ ID NO: 489321 - protein, 343 aa, unidentified
MDLHRRRSVLVRMTEDGRRLGTVRITNSPAELRREIARAGKGPRVVLEATYGWYWAADVLAAAGAEVHLAHPLGVKAFTYRRVKNDVRDSADLADLLRMGRLPEAWIAPHQVRELRELTRYRAKLVRLRTSCKDQVHGVLAKLGIPVTCSDIFGTAGSAWLDGLRLPQPYAGKVTSLRHLAGEFTAEIDMLGEVIADLLAGHRGYQVIQQLPGIGPVLAAVIAAEIGDITRFKNPAQLCSWAGLTPRHRESDTKVARGHVSKQGSRLLRWALIEAIQRIPKDSVIGAVKDGIITRRGKEARNIAKVAAARRLLTLVFYGMRDHQIRCLARPAGPAAAAPARAA

SEQ ID NO: 489322 - protein, 316 aa, unidentified
MVTKTVEHCYGGIDVSMDRLDVMILPERRGFSVDNNAAGWTELIERLHGSPVAAIGIEPSGGYERGVIRALLAASLSVRRINPNKLRQFARARGVLAKNDRLDARLIAEYVAIMPTRIVQRDVAAERLAEVVTMRRQLCDERVTVENQAAHVEDAMLRRLNKRRLARLEADINLLDKRLAEMVAADPTLAQRYELLTSMPGVGPVLAFTLIALLPELGQMSRKQIAALVGLAPYDFDSGRLRGHRSIYGGRMPVRNVLYMAALSACRYNPALKVFHNRLAAADKKSKVVIVAVMRKMITTLNAMLRDRAEWQPKPA

SEQ ID NO: 489323 - protein, 328 aa, unidentified
MSKRSFFVGVDVGKDELWVAIDGYRPRRFVHCTSGIRLMHQWAEEAAEGSPLHFCMEATGVYSLSVAYQLYTYPDTALSVVNPAQINAYAKAQLKRTKTDQVDARVILSFAQSQRLPIWSPESKSLRQLYQLVVQADAIRTDLRQWANRRHAQEYTPDVPEAVKKTQQAIVRSLTQQLAKVEEAIAILCRTDHELKEQVELLVTITGIAHLSAVKVLAYGGNALTQRNRKELTAHAGLASCHHQSGTSVRGKSHLAKQGDQRLRTALYMPTLVGIVHNPVLKQFYQHLLQMGKPKMVALVACMRKLLLIIRSMLINKKSFNPEILPLT

SEQ ID NO: 489324 - protein, 342 aa, unidentified
MQITTIGLDIAKNVYQVHGIDAAEKVVVRKQLRRSQVLGFFKALPPCLIGLEACATAHYWARELTKLGHQVRLMPAKDVKAYVKRNKNDAADAEAICEAVRRPTMRFVQIKSAEQQGRLMLHRTRDLLMRQRTQVINALRAHLAELGTTSAQGREGLKELLKIVASDADERLPADAHASLVVLAAELQAMQTLIGSIEKRIVTQHRENKASKRLLTIPGIGIIGATAIADTVTDPKAFRSGRDFAAWIGLVPRQDSTGGKQKLGPISKQGDRYLRRILVVGAHSVLRRAKLNPQKHPWLTQLLARRPFKVVAVALANKMARMAWALLAKGGAYRAPALAATA

SEQ ID NO: 489325 - protein, 347 aa, unidentified
MIYLGIDHHKQWDQVAAINVVGEVVLECRVPSTREAWEQLKSALPAGEPVCSVLEAGWNWGKLYDALEELGLNPKLANALKVRLIAESRIKTDKRDALALAQLLRMGWIPEVHVPGRETRDSKNLLRQRAWLIRQRTGIKNRIHAILDRNHLELPEVSDVFGARGKAWLKAVELREPDDRLLEAHLGLLDTIQNQVRETETWIDGALKEHPDLKILMSLPGVGKLLGALIALEIDGIERFSQPEKLSAYAGLVSSLHQSGETVNHGRLISGCNRHLRYAFIEAAWTAVRVSPYFSAFHRRVKSRKGSQKAIGAAARKLCVIAHHCMTQRRNYVEKVYRFRSAALVVS

SEQ ID NO: 489326 - protein, 344 aa, unidentified
MRYFAGFDVSLEETAIGIVDETGRLVREGKVATEPEALDAYMRAGGLPIERVGLEAGPLSTWLHGELTAGGWTMVCIETRRLRAVTRAMPVKSDRKDAEAIAQAMRTSWYRAVHVKSAESQRIRVLLRNRKILQAKRLDIDNEIRGTLKAFGLKLGKVGRAGFAGRVRELVAGEAVLEAIMPPMLQARSALIAAFDKLHRQVLAIVRQDPVCRLLMTAPGIGAVTALGYKTAVDDPHRFRHSADVGPHFGLTPRRYQSGETDYSGRISKCGDAMVRALLFEAAMAVLYRVKAASRLKTWGRALMRRIGARKAATALARRLAVVLHRMWLDGKPFNPKPLHAAAN

SEQ ID NO: 489327 - protein, 412 aa, unidentified
MRIVGLDVSRSVAEIAYLEDGVLHAGGRAGLRRDELERFAASLRSTDHVVLEATGNTAAIVNVLRPRVARVAIANPLLVRLIAEARVKTDKIDAAVLAQLYASHFLPEVWMPDESTLALRRQVSRRSQLVRQRTRLKNEVHAVLAAHLIERCPATDLFGRKGRVWLTAQPLPMDERLGVEQRLRELDRLGEDLHEVDKALAQASIGDERLRRLLTITGVNATVAIGLLSAIGAVERFPNPEKLVSYFGLNPSVYQSGPTPARHGHITKRGRSYARGLLVEAAWGAAQAPGPLRAFFLRVRDRRGQQVAIVATARKLAVIVWYVLTRNEPFAWDRPALTAHKLRALELQSGMPAQHGSRKGSAAAYSLKSVRDQERAIAEQAERTYQRLFSRWKQTRPNKREVPLVWPGTPTS

SEQ ID NO: 489328 - protein, 430 aa, unidentified
MKSNTQNAKIEAITEKTLVLGIDVGSETHYARAFDYRGIEYSKKPFKFSNTEAGFVTFKEWILDIKERHEKDKVVLGMEPTGHYWFNLGKFLHDNEMKPVLVNPHHVKKSKELDDNNPTKNDRKDPKVIAGLVREGRYMIPYLPDGVYADLRTASNIRFQLQAELTRIQNRISRWFNIYFPEYKTVYGKPDAKSGILILKTAPLPIDILTLGIDGVNQIWRDAKLRAVGKARAKTLIEAAEHSVGSKEGAVAARMEIRMLLEDYESRSIRLQEVMTLIEGLVKQIPMAEKLLEIKGVGIRTVSGFLAEVGDISRFNNPKELQKLAGLALVENSSGKHKGETTISRRGRKRLRYLLFEVAMSLVAKNPEFRELHNYYTTRRLNPLKKMQSLMAIAAKLIRVFYVMLTKGVNYDPKKMVNDIKRPAVYLQTA

SEQ ID NO: 489329 - protein, 381 aa, unidentified
MQASTIDTPTIGHTGTICAAIELSQKTWLVTLHSPDRDRISRHTIEGGDSAGLLALLEKIRARVADKLGYSPKIVTCYEAGYDGFWLHRLLLAAGITNLVVDPASIPVEQRSRRAKTDRIDGELLVRTLMAYLRGEPRVVRIVRAPSVEQEDARRASRERDRLVKEQTAHTNRLKALLRLVGMAIGNPRRSDWLGWLAKQRDRQDRAVPPQLLAEITREHARLMLVREQLAALEQAPAADDPATASMIERRNLLLRLKGMGPVFAATLANEVFYKDFRNRREVAAYFGLAPSPWRSGSIDREQGISKAGNPRARLKAVELAWLWLRHQPDSKLSQWFRTRTANAGSRARRIAIIALSRKLVVALWRYLTTGMIPAEATMKA

SEQ ID NO: 489330 - protein, 476 aa, unidentified
MIVLQNLDQNGNRKQRKELARRLRSDHPGLEVVHRHAAGIDVGSEEHYVAIAPNQQEEPVQRFGCFTGELLRMATWLKERGVRTVALQSTGVYWIPLYDLLEEHGFEVYLVNARDTKNLPGRKTDVQESQWLLKLHTYGLLRNSFRPTAEIRVLRAYWRQRDQHVKTAAQCIQRIQKALTQMNLQLANVISDLSGKTGLQILRAIVGGERDPERLADFRDSRIKASRAELVASLQGNWRAELLFQVKQELARYDFCQAQIEECDGELQKQLQSLPDLRRGEGEKDKTKNQPSRPKRKRRKHHHNPQFDLRSELQRISGIDVTRLDGMDTMTAQTVISEVGLDMSRWPSEQHFTSWLGLCPSNECSGGRLLKKRTRKVVNRAATAFRMAASNLRASQSYLGAKFRRLRARLGPPKAVTAMARTLAALFYRLLKFGQDYVDRGTEFYEQRQREQQRQYLNKKAAQLGLQLVALPATRS

SEQ ID NO: 489331 - protein, 318 aa, unidentified
MLRTFIGIDVSQDHLDVHVRPAGLRRRFANTTAGIAELLAWVRPQAAERIVFESTGPYQKAAVGALLAEGLPAVVVNARQVRDFAKAMSYLAKTDTIDAAVIAHFAEVATTTVRPLEAQEIRDLRELYDRRSQLVHMLAMEKNQRHSATVAQASPKLLKSIEQHIAYLQKRIEDLEERMDQIIESSATFRARDAILQTITGIGPQVSRTLLAYLPELGTLNRQRLAALVGLAPFNDDSGTHSGQRHIRGGRSKVRVGLYQAAIAAIRHCPRMKAVYAALKARGKASRIAIIAVARKLVVLANAMVRDMQPYKAPPNSV

SEQ ID NO: 489332 - protein, 353 aa, unidentified
MRTYYVGMDVHGASIVIVVLNGAGKVVMQYVAETSAERVRDFLKQLRGKVYVTFEEGTQANWLHDIVRPLVTEVVVCDPRQNKLLLSGNKSDRIDAQKLAELLRNGALKAVYHGDHGMRMLKELVRTYDCLVSDTTRVMNRLKAIFRGRAIPCGGHDIYRPDRRPQWLAKLKEPGARQRADFLYRQLAALKPLRHEAKRLMVKEARRQTASPWLLSVPRLGVVSVAQLLAIVGTPHRFRSKRQFWTYVGLAVVTRTTADHEVVNGVLQRSRRPLATRGLNRNHNHVLKRVFKNAATTACHSGPFKAAYDARIKQGMDPSLARLTIARQLSAITLALWKRGQQFNPERMKQQAA

SEQ ID NO: 489333 - protein, 355 aa, unidentified
MLFVGVDTHKSSLAVCLVDELGRQLAVEEFRNDRVGHRRLHAWVKRQAPGERRFGVEGSGWLGHGLSLYLLERGEDVRDVRGHLTERERGRLRGNGKSDPRDAYAIARVTAREELAPVRTATLDRDLKLLCDYRAQLLSERTRAQNRLHADLVTLHPGYEQRVPSLAKPACLEAAERLLGRDRSVQARLARRRIERIRAVDSERTELEQEIRRLVRERGTGLVDIVGVGELIAARIIGEVGDVDRVPSRRHFASLNGTAPIPASSGQTQRHRLNRGGNRRLNQAIHMIALTQARMDPRARAYMARRLAEGRSRRDASRALKRHLSDVVYQQLRRDANSSKTPRDADAREREVRLT

SEQ ID NO: 489334 - protein, 316 aa, unidentified
MNIVGIDISNETFDCCFIVDNKPHYNTFSQDTNGYFSFLSTFKMLNIDTVGFESTGVYHKAFQKYLIDNGVTPIVLSPRSVSLFIKSTTNNKGKTDKTDSYFIALYIMKNSDLVTLYFPIRDEFKPLTTTLIQYEKQIRQLKNLYHSISKVGDDFVLLASVDSMIKNAIVFRDELKIHAVSKLYSSIPEALLIKSEIKGVGDMVLLSLLPLIYDHFDKFTIKQIVSFIGISPVPFQSGTSVKKFSHISHRGDTNTRKILFMSAISSVRTNPIMKEKFLRMVADGKPKKVVLIAVMAHLLRAIVSRLSHHTGRPIKK

SEQ ID NO: 489335 - protein, 391 aa, unidentified
MVYVGIDVAKDKHDCCIVNSDGEVLAEVFTISNDLDGFSLLFRKLQSVAPDLSNVKVGLEATGHYSYNILGFLLDKGLHPFVINPLHTNLFRKSTSLRRTKTDRVDARAIAAMMMSDVVLMSYTATSYHNEELKSLTRYRFEKVQERARLKQSVARLVSILFPELEKLVPTLHMQTVYTLLAELPGARQIASCHLTHLKALLADASKGHYGRDKAIEIRDAAQRSIGSAMKMKSMELQHTIRLIRELNAEIDEIEDAIQEIMDKMAPPILTIPGISYRMGAMILAEIGDFSRFNSPDKILAYAGLSPSTYQSGKLANAYPHMEKRGSRYLRYALFNATRFVCNWNPSFAAYLAKKRAEGKHYNVAISHAAKKLVRLIFALMKSGKPYCPAT

SEQ ID NO: 489336 - protein, 346 aa, unidentified
MEHYVGLDVSLKLTAICMVDRSGKIEREGVVTSDPETIAAFVKSHAPHVARIGLEAGATSTWLWTELNKMGLPVICIDARHAKAALKMQINKSDRNDAVGIARIMQCGWYKEVRVKDLDSHAIKALLVSRALLVKIKRDIENQIRGLLKNLGLVIGRAKMNVFAVRAAELADARPAVAAAVEPLLKARDAVGRQIADLDRKVLRLARNNAQVRRFITVPGVGPITALCFLATIDDPTRFKRSRSVGAYAGLTTRRYASGEIDWTGRISKCGDKMLRTYLYEAANVLLTRIEKWSALKAWGIRLAKRSGLRKAKVAVARKLAVILHRMWIERTEFKWSSKEAANQPA

SEQ ID NO: 489337 - protein, 352 aa, unidentified
MESKNSLRGSTHSAYHAASSMPVLGIDVSKRTLDACLLTDGDRHHCTVPNDDAGHHRLHAWASNVAAVYCACLESTGSYGEAIAKHLFAEGVAVSLVNPSQTAAFARAQMLRTKTDRVDAESIARFALAMLSQGELPRYEPRSPEQEALQELVRHRDALVAQRLQLTNRDQDAELKAVKRSNKKLVEAIDREIKEAEREIKKLLEQHERLGRQYELLTSIPGVGAVTAAVILSELPPVERFEHPAQVAAYAGVTPRIRHSGSRKPLSQPITKTGNAFLRRTIYMAALTAKRLNPHLKAMAERLHSKGKAPKKVIVAIMRKLMHLIYAILRDQVPFAADHITADHKKVIAPAN

SEQ ID NO: 489338 - protein, 348 aa, unidentified
MKKIVKQVLGIDVAQKELVVSLGRMCDDWSPEVYANNRFANTQKGFMTLVSWVKKLSDPSCSVRFVMEASGVYHESLAYFLDEKGYELTIVLPNKISNYFKTLDVKTITDKTAAHAIAMFGLEKKLETWKRPKKIFKDLRQLTRERDQIVQERTMVKNQLHAEQAEANPNPSSVQRIKKRIEFLNKQEKEIKTEIATLVNTDQELSSAVKITSSLTGVGLLTSATILAETNGFELIRNKRQLSSYAGYDIREKQSGTSVNGKPRISKRGNKYLRKAMHLPALTAIRHDERFKAIYARLVSKHGIKMKAAVAVQRKLLELMYVIYKTNIPYDKNYLQKHQVAEVDAARQ

SEQ ID NO: 489339 - protein, 435 aa, unidentified
MSNILFKNLFISVGIDVGADFSWMSIALPNQTFVGKPFKILHSDLNSLSLAVSKIKEAEELYSLESRIFLESTGIYHYPLFCYLRDKGFNCSVINPIITKNSTNINIRKVHNDRFDSKKAALVGLKPDLKVSLIPSDLALNLRSLSREYYDLMDNRSAYVNKLQGELRMVFPQYLKIFSKITTNTSLTLLEKYTSPEAFLNASKDEIIDSIRSTARFGLTYAETKYNAIIQAANDASTFGYSLSSNFQRIRLYIRFIRNYDDEISSILSDMHELVDANESTDFVKQIHLIESYKGAGFLSAVSLMGEIGDFSSFHSPKQLFAYFGLDPAVKQSGKYESTKISMSKRGSRIARRVLHTMALVSISKNKNGSAKNPVLRDYYLKKCQSKPKLVALGAVMHKVCNIVFAILRDEKEFIIITPKEHQTNYLKAKCDKAA

SEQ ID NO: 489340 - protein, 453 aa, unidentified
MPESKKTRGRSSGRLSTINPEAAGIDVGSTFHVVAVPGDRDDNPVRTFRTFSGDLHRLADWLAETGIKTVAMESTGVYWIPVFEILEARGFEVLLVNARDVKNVPGRKTDVNDAQWLQQLHQHGLLRGSFRPRDGVVRLRAYLRHRERMVDYAAAHIQHMQKALMQMNVQLHHVVSDITGVTGMRIIRAIVSGLQAPERLAEFRDVRCSASEATIREALTGNYRPEHVFALRQALELYDFHQVKIAECDTEIEAVLHTLNEERTTPEQPLPSVRHAKGRNEPGFDARPALYTLLGGDLTQIHGFGPYTVLRLVAECGDDMRKWPTAKHFTSWLCLAPGNKISGGRLLSSKTRRSSNRAAALLRIVAVNVGKTQTALGAFYRRLAARTGKAKAVTATARKLAILFYKALRFGMTYVDSGASYYEERYRQRVIQNLHRRARDLGFTLVTDSAANG

SEQ ID NO: 489341 - protein, 355 aa, unidentified
MTGHQPEGEVFAGVDTHTDTHHAAVVDPLGRPLADREFPATTEGYRALLAWLDTFGIVRVVGVECTGSYGAGLTRVLTTAGLVVVEVNVLDRGTRHARGKSDPIDAYAAARAAASGRAHAIPKARTGMVEALRQLRVVRASAVKARTQAMNQLIGLRVTAPEPLRQALTGLARTALITTCLRLRPGADLTDPAHASRFALRQLARRIRRLTEEIDELEEHLTALTTAAAPDLAALFGVGTETAGQLLVTAGDNPERLRSEAAFAALCGAAPVPASSGRTDRHRLSRGGDRQANRALHMIAVVRMRYCPRTRAYVARRTQQGLTKKDIIRCLKRFIAREVYHALTRPHRDRLASVA

SEQ ID NO: 489342 - protein, 316 aa, unidentified
MTQSTKSVAGIDVAKSHLDLALGPEGEVRRFPNTLAGWRAIAELVDRHGVERVGLEATGGHEAGVAAHLRAAEIAVTILQPIQVRAFARVRLRRAKNDRLDARLIAAFLAEVDPPQRVHHPKTAALLARLTFLEQTEDDMARLKIRREHVVEDDLKALVAEDLARLKARRAALLADLVTRLQDDPDLARRLELLVSIPGIGRRTAVALIVRLPELGDVSREEIAALAGLAPYDRDSGASSGARHIAGGRARVRKSLFAATMPAAYRWNEALVTFRDRLLARNKPPKVALIACARKLLIFANAVIARGSPWTQKIPA

SEQ ID NO: 489343 - protein, 315 aa, unidentified
MDHNKAVYGVDVAKRNLVIAEYDAQTPVVVPNLAESIAAWLAQLARGATVAMEATGAYHQVLAHLAHTAGMQVYVLNPQTLKHYAAAIGQRGKTDGCDARMIARYAVHEQAKLRRWLPPAPAADRLSQLLERRHTVVSTRQTLAQSLAVPMLKAPRQSLLANVDRILRRLEILIRHEIARLPGMAALYERLKGIVGIGPVVAAQLVAVFSTLNFAKADSFIAYTGLDPRPDDSGDWRGRRRLSKRGPPLLRCLLYNAGMAAANSRLLKPVYKQLRARGLQTTEAIVILARKIARIAFALYKSGHCFDAQKHLKTA

SEQ ID NO: 489344 - protein, 356 aa, unidentified
MTSTKYVGMDVHKESISIAVMNSAGKIVMECVIETKASVLLQFFNGLRGDVRVTFEEGTWAAWLYDLLKPRVSEVVVCNPRKNALLKDGSKSDRIDAHKLAELLRGNHLKPVYHGEHGLRTWKELGHSYLTITKDVTRVMNRLKALYRGWGIACAGHEVYVPRHRSEWLGKISEAGVRRRAEHCYQQLDVLRLLRQQVRRDLLLESKKHQAWRLLGLIPGIGPIRAALLIALIQTPHRFRTKRQLWTYCGLGLETHDSAQYRVVEGQLQRSKKPVTLRGLNQDHNHDLKDIFKGAATKVSSSNSGPFHDFYEHLLAQGRKPTMARLTLARKIAAITLIVWKKEVRFDASYLKSQAA

SEQ ID NO: 489345 - protein, 420 aa, unidentified
MSPLSDQPFTAYIGIDWADLKHDICLQAAGGTRREFDCIAHQVAHIDEWANGLYRRFGGPIAVALELASGPIVAALQKYDFFVLFPINPLTLARYREAFQPSGAKDDPTDAELALDLLLHHPERFSRLRPQSAGMRSLMSLVVQRRQLVGDKTRFTNRLCDTLKQYYPQALEWFEDRDTVLFCDFLTRWPTLAAVRRARTTTVEAFFHAHNSRCARLIEARLASIRAASPLTEDPGIVVPCRLHVLALVAQLRTVLTAIDWFDRETAAVAGTLPDYALFQDLPGAGRQLAPRLLVAFGEQRDRFHGADELQKYSGIAPVTERSGKKSWVHWRWQCPKFLRQTFVEWAGQTINKSFWAGAYYRQQRARGSSHPAAVRALAFKWIRILYRCWQTRTPYDETTYLNALRKRGSPLLRNLGLPG

SEQ ID NO: 489346 - protein, 384 aa, unidentified
MKVTRIGLDIAKQTFELHGVDQRGRAVLRKTLKRERMLEFFTQLEPCEVALEACGGAHYWHRELSKLGHSVRLVPANKVKPYVDGNKNNAHDAAAICEASSRPSMRFVEPKTVAQQDLQALHRAREVAVHHCTLLANHIRSLLLEYGITVARGYPALHRALPELLGHDEQRLSPLLKQLLAQQWRMLKLHQNQVRAYDRRVNRIARGETTCSALLKIEGIGPITATAVVAAAGKGHQFKNGRHFSAYLGLVPGHRNTGNKTVMLPITRRGNRYLRTLLIHGARSALYAARNKHNPRSLWLQRLKARRGSNIAAVALANKNARIAWAVLRFGEAYQPAKAHRSERSATPSPRLQRQPPSRLTLKPQGGSSRVRNSAFSRPALIKP

SEQ ID NO: 489347 - protein, 355 aa, unidentified
MNDEKNIGLDVHQATIVVAVMDSTGKLVMESILETEAATILQFFAGLRGTLSVTFEEGTWSVWLYDLLNPHVDKLVVCNPRKNALLKDGNKSDRIDARKLAELLRGNQLKPVYHGETGVRMLRELSRSYLTIVKDLSRVMNRLKAVYRSWAIPCAGRDVYYRRHRAQWLAKIREAGVRRRAERLYEQLDMLQQLRQQARRELLAEGRKHAITAQLRQIPYLGPIRSVLAVALIQTPHRFRSKRQLWAYSGLALETRISAEYRLVEGQVRRSKKLLSIRDLNKDHNHDLKGLFKGAATMASVRPGPFQDFYQAALAKGIKPTMARLTLARKIAAITLTLWKKGENFDAEKLKSQAA

SEQ ID NO: 489348 - protein, 387 aa, unidentified
MDVRTVNNLPPAAAHDEAVRCLLAIELSKKSWIVAVNTPLSEKISRYRLKGCDWKGLLELIEKIRARVARELNRPVEIISCYEAGYDGFWLHRLLEAHGVRNYVIDPASIQVDRRARRAKTDNIDVAQLLRSLMAYLRGDPKVWSVVRVPSVAEEDARRLHRERDRLITERVQHVNRVKGLCAVHGIYDYEPLRSNRMLRLEQLRTGDGRKLPPYLKAEIVRELQRLELVLTMIKTIEAERKAIISAKSPHLNVKKIQDLIKIKGIGPGISTVLVGEVFYRKFNNRQRLGSYVGLTPSHFQSGPMSRDQGISKAGNPKARTVMIELAWIWLRYQPNSPLSVWFHQRVGTAKGRIRRIAIVAVARKLLIALWRYLETGLVPTSAVVRG

SEQ ID NO: 489349 - protein, 342 aa, unidentified
MYYIGLDVHKKTISYCVKDVSGRIQQEGKIGSTRRELDCWMKTLPQPWTVAMEATIFSGWIYDHLLPHATQIKVAHPLMLRAIAAAKKKNDQIDASKLADCLRCDFLPECHMMPRAIRDRRRTLRYRHLLVRQMVQMKNRVSGLLMETGVEYNKQRLHKVSYFRELLSANGEVDPSLRPLLKLSRETIERCQKTEYALVSSLQRDPVLADRIKRLRTVPGVGPITALTWALEIGDVSRFGSIKQAISYCGLCGEERSSADKAMRMPLSKQRNKHIQRALVEAAKLAPRQSHELAVIYDQERQKGNSNRATLAVARKMVAYLLAVDRQQRDFVPAEERRTTAA

SEQ ID NO: 489350 - protein, 403 aa, unidentified
MNYFAGIDWGGSQHAICVVDEAGKIVLALQVAHDDEGLRSMCQQLSRVSPAESLPIAIERPSGLLVDTLMQAGNPVVPIHPNVVKACRPRYRAAGGKHDPGDAYLLADVLRTDGHRFRRLSPSSDAIQALRAMVRTRDDLVAERIGLANQLRALLESFWPGAAALFAEIDSPIALAFVERYPTPHSAARLGEKRLASFLASEHYCGRRPVSELLQRLHEAPKGRVGAAEEEAKGELAKTLTRILTPLVGEIARLSARIEHEVAQLADGTLVMSLPRTGRLNAAQILAELGDVRDRFATDDQLAAEAGVAPVTYQSGKTKAVTFRWACNHRLRRAITTWADNSRRASPWANAIYAKARARGCDHPHAVRVLARAWVRVLWKIWTDRVTYTPHAHRGAKPFLAAD

SEQ ID NO: 489351 - protein, 311 aa, unidentified
MTDHNIGADISKSHLDAFLLEDGAAQRFDNSAMGFRALTKWLGKAPVARIVFESTGPYHKAFEAKLGETFPLVKVNPLQARQFAEAHGTRAKTDAVDARMLARMGVAFDLVPQVPCSKEILVLKDLNVARTGLIKDRTRLRNRAQTQDIAVLKRQTKARLAQVERHVVELDAEIAALIAAGQTPARNRDILCSMPGIGTATAAAMLTLMPEIGTLERKQVASLASLAPITRQSGQWQGKAFIGGGRKPSRDAIYMPAVVAMRCNPDLKAKYEQLRAAGKPAKVAIVAVMRKLIEMANALVKADRTWTPKTA

SEQ ID NO: 489352 - protein, 310 aa, unidentified
MAYIGVDVSKDRLDVHILPERTAFAVARDGKGLSELIERVKEAGAERIAVEATGGFETVVAAALAGAGLPVVVVNPAQVRHFAQAVGQRAKTDPIDAAMIARFVEATRPELRPLPDEATRLLADLVARRRQIIEMIVAERNRERRVSVKRIRKSIARLIAALEKELAEIDAEIDLGVRGSPAWRAKEDLLASVPGVGSITARALIAELPELGSLDAKRIASLAGLAPFTRQSGQWKGKSMIAGGRKTVRSALFLATLAACRCNPVLKAFRQRLLDAGKPKMLVAIAAARKLLVILNAIIRDNQPWRSQNA

SEQ ID NO: 489353 - protein, 429 aa, unidentified
MQKALQEKIKRITPTTIIVGIDVAKEVHWARITDYRGIDLMKPFKFYNSIDGFESLLLKVEKSQTKHTCDQVIIGMEPSGHYWRALGWYLKQHESKPVLVEVNPYHTKQAKELDDNSQTKSDPKDAQVIAHLIRDGRYFDMYLPEGEYAELRQLNTERQRIMKQISRANNTLVALLDEFFPEYSTVWGKVTCQTSLKLLKTYTFPSDILSAPHEQLLADIKEASSGTEGVKLMNKMIEVARRSVGVKEGLRVVRLRILSLIGELESYKEKKALITAELDDVMDALELGNRLKGVSGVGTVISSAFLGEVGDVSRFSNWKQVRSLAGMNLVENSSGKHKGKTKVSKRGRPYLRHMLYMAGECGCRCNPEMREYYRYLINRKKNPLKSQQAFVATGLKVMRILFYLAKTGETYDPSKALGPVRLQQIASLG

SEQ ID NO: 489354 - protein, 436 aa, unidentified
MLPNKNHTHKKEDAMKNVTDSGQKVKGQKLLMALERASWILGIDVGKEKLSCALLSKDETFRCRFDVEASFHGFQMMLERVKTETKGDGTVVFALEPTGHYWMVLGQFFEDHNQSYVLVHPLVVARSREVKQLNRGKTDAFDARLIAELACRGAVTRTQIPEDDWATIRFYAREYMDREKEIAREKNRMMSYLETTLPGFLEIFPKPLGMNSRACLRVLANFREVLQGDIVQFESQARKQITGKRLMTSRVRRLFEMLQRGDALGLRAGRKTLFWRIINSLDRLELYEKQQEMASKALISLYEQCEFKPYLDSVWGTSPLTNSLVLGFMGNPTSYATPASLIKMAGCDPVPNESGKFKGKASISHRGRNLLRKVGDRTSFLLEKRNTVFRNFLHHLTARPKNKLTKRQARIACINKYFRIIWVLCNHRVFFNPALA

SEQ ID NO: 489355 - protein, 412 aa, unidentified
MLFVGDDWAEDHHDVEILDGEGRRLVKKRLPEGLEGLSKLHELIATAMPPEWSQLDPVEVAGRVKIGIETERGPWVAALITAGYEVFAINPMSTARYRERHSTSGAKSDAGDAHVLAEIVRLDRAHHRPVAGDSDDGEALKLVARAHQSLIWDRTRHLLRLRSALREYFPAALQAFEDLDAPESLELLAAAPDPDLAAKLSKARIVVALRRAKRRKIDQRVEDLQAVLRAPALRQSTAVQNAFSAIVVAEVRVITALVSEIDALGVVVAERFGRHPDAEIFTSQPGLGVILGARVLAEFGDDPDRYADAKSRKNYAGTSPITRASGTKKVVLARYARNHRLADAVQQWAFSSMRGSPGARAYYLSLRARNIGHQAAIRQLANRQVGILHGCLKHRTLYDEQKAWPHHATAAA

SEQ ID NO: 489356 - protein, 305 aa, unidentified
MINIGCDIGKTNLDVYVEGKSRRYKNDKTGIENFVKLCLKNESNRVVLEPTGGYERVLLTKLHEQGIATAVVNPYYVRNFAKSYRDLAKTDKIDAKMLSEYGEKMNPRNQERKAEYCFELEGLTSRRDALVETMKEEKQRLEKNLEERIVQSIELHIKFLQSEIKEIESEIRAIMETKAKKITEVLLSEKGIGEQTAAILVAYLPELGKLENRKITKLVGLAPMARESGKIRANRHIRGGRTQVRKALFMASASAIRSNPKVSEFYKKLRAKEKPAHVALVAVAHKLLIILNSKMRRFFLNKNIF

SEQ ID NO: 489357 - protein, 343 aa, unidentified
MSNDTRIAVDVAKAVFEIGISDRPGHVSRRERLPRAQFLAFMAQQPAATVVMEACGSAHHWGRKIQSLGHRVVLLPPHHVRPYVRRNKTDRTDTKGILEASRNEEIRPVPIKTVDQQVLTSLHRLRSGWMTERTARLNALRGLLRELGVFIPMGAREVVPAVWSLIEDADSDLPEALRPIFAEACREIREIEARIKQVERQLEATAEQLPAVEYLRTIPGIGLLIATALVAFLGDIRRFPSGRHLASYLGLTPREYSSGLKRHLGRISKRGDGYLRTLLIHGARSVLIHARKQQPDRLREWANKLAKTHVHNKAAVAVANKLARIVWAVWSHARPYGLMTTTV

SEQ ID NO: 489358 - protein, 370 aa, unidentified
MRKKVLYVGLDVHKKTIDVAITNNRINGKVRSYGKIPGSLDALSKLIKKLQTEETTLQFVYEAGPCGYQIFRYLQSKGISCSVVAPSMIPRRSGDRIKTDRRDAINLVRLFRAGELTSIYVPSAEDEAIRDLIRCRDDVRRFEKKARQRLLAFLLRHGYHYAGKKHWTKGFYNWLGTIKFPHRAQQITLQEYIDATNECSERIKRVTQQLQAQVEEWDRWPMVKAYQALRGVSFIVATTVVAELGDMKRFATPKQLMAYLGLIPSEHSSGATVRRGPITKTGNSHVRRVLIEAAWTYRMPARVSIVLLRRQQGLPQSVRDISWRAQTRLCARYRRLIARGKSRQTVITAIARELSAFMWAIDKQINVASA

SEQ ID NO: 489359 - protein, 348 aa, unidentified
MIVWATSFLVTIKTKVMKKVQFFVGIDVSKATLDVFIHGLNLYFVVENSLQGFVCLLEKVMTGTKCKKEELFFCFENTGKYSRMLSVFLQSENILFTMESALQIKKSLGITRGKNDRVDAKRIAHYAYEKREILAPTILPGAKIDQIRSLISLREKLLKHRTAYKNGISDLHDCYEDGESELIKEVQLRLISNLNDEIIKVEQKIESIIESEESISTNYKLILSIRGVGKILGFYLIGYTANFTSFANARAFACFAGIAPFSYSSGIMKGTPRVHPFANKMLKALLNLAAMSAIKYNGEYLQYFNKRVNELGKNKMSTLNIIRNKIVYRVFAVVQRQTPYVDLLKFAA

SEQ ID NO: 489360 - protein, 345 aa, unidentified
MVVGVDTHKEIRVAAAVDWQGTLVGEECFPTTRQGYRQLESWARSLGEVLRVGVECSGSYGSGLARHLAKNGFAVLEVTFPDKTVRRRRGKDDFIDAEMAAEAAFTDARTVAPKSRDGMVEALRMLQKTRSTAVAARRVALQMIRADVISAPEELRDQLRGMTRMRLIRHLVATRPDATDFRTPLGAAKIALKRLAKRYVDLDDGVSELDDMIAAILADAAPLLVQLKCVGAQSAAQLMVTVGDNPERLRSEASFAMLCGVAPVPVSSGMTYRHRLNRGGDRQANSAIHIVAIGRLRTDERTKEYVAKKMAEGHTKMEAIRCLKRYIAREVYYTIKKQSELVNCS

SEQ ID NO: 489361 - protein, 476 aa, unidentified
MKLPINQDQNPFSVQEQRLESSNASHLAQINENAAGIDLGSAEHWVCVPPLRDEKNVRRFGCFTPDLMAMADWLSQCGVTSVAMEATGVYWIPVFQVLETRGFEVKLVNAHHLKTVPGRKTDVKDCQWLQQLHTYGLLSGSFRPEDQICILRSYIRQRECLIKSAGTHLQRMQKALIQMNLHLHQVISDISGLTGMTIIKAIVAGERDPQKLAALKDPRIKSSTTDIAKALTGDYRLEHLFVLNQELTLYEVYQQQIAAIDKEIEKCLNTFETKVQDEPPTSKRKRRKKPVGNNPNFDLRKYLYHISGLDFTLIDGLDVLTVQTILSEVGLDPKRFPTVKHFTSWLGLCPGQKITGGKVKSSQTRRVVNRAASAFRMAAFSLTQSRSALGAFYRRLRSRLGAPKAITATAHKLARLFYQMWATAGQYTDPGMDYYEQKYQELILKNLRNKAHTLGLEIVPISPEQQNTLSSPTLAT

SEQ ID NO: 489362 - protein, 355 aa, unidentified
MSQTANTAIAVIGIDIGKNSFHVVGHDARGAIVLRQKWSRGQVEARLANIPPCLIGMEACVGAHHLSRKLASLGHDARLMPAKYVRPYSKGQKNDFNDADAIAEAVQRPTMKFVATKTAEQLDLQALHRVRERLVSQRTGIINQIRAFMLERGIAVRQGIGFLRTELPTILATRTDALSPRMLRVIEELAGDWRRLDQRIDGLSGEIEALARQDQACSRLMTVPGIGPIISSAMVAAIGTGDVFSKGRDFGAWLGLVPKQISTGDRTILGKISRRGNRYLRVLFVQAAWVVLVKIKNWERYGLKSWIEAAKRRLHHNVLAIALANKLARIAWAVLAKGRAFELTRTDDAGIVRPA

SEQ ID NO: 489363 - protein, 413 aa, unidentified
MDILHVCCAGLDVHKDTVVATVRRRQDNGKVQQQTRTYATMTEQLLELADWLEARGVTHLAMESTGVYWKPIWNLLEDRFEILLVNAQHIKHVPGRKTDVSDSEWIAQLLQCGLLRGSFVPPPPQRELRELTRQRRQLVHAKASVANRIQKVLEDANIKLGSVATDVLGVSGRDMLGALVAGQTDAAKLAELARGKLRAKIAALRLALHGRMTEHHRFLLGLLLDELSHLEGLIQRLTTRITEVLPAPFAEAINRLVTIPGIDERAAENILAEIGVNMELFPTQKHLPSWAGMCPGQRESAGKRQSGRTRKGNQWLRTTLVQVAWAASHTKHSYLSAQYRRLASRRGKKRALMAVGHTILVIIYHLLKEGKTYQDLGGDYFDRVDKERLTRTLVRRLERLGHEVALKPKEPAA

SEQ ID NO: 489364 - protein, 371 aa, unidentified
MSSIIYVGMDVHTTNYTICCYSITTDKIFAQTTMEPDYKNIVKYLEKLERELGGDCHFLCGYEAGSLGYSLYHQLTGQGLECIIMAPSTMAVSRKKKRIKTDMKDASNIAKCLAYNTYNRVYIPTGEDNAVKEYIRMRNDTKEALKRIKQQTLALCTRHGKRFTEGRTYWTRKHLDWLKRLDFGNAILQETLQEYLTLYHQAVDKVELFDKRIEEFSRTERYDEKVRKLSCLIGIKTHTALSAIVETGDFTRFPTAQQYASYLGLVPGEDSSGDTVRRTGITKAGNSHLRKLLIEAGQCYSRGAIGAKSKTLKARQAGVDAKVVAYADRANERLKRKCYRIMFNSKRNIAVTAVARELACFMWGMMTDNVA

SEQ ID NO: 489365 - protein, 353 aa, unidentified
MKYVGVDWAYRQAQWCALAPGGEIAGEGRIAADRDGLARLALELGDEVKACLEMMSGALWVRDQLVACGWQVEVADARKVKTVAPLAAKTDKVDARLLAELCRRELVPGLWLPSLDERALRERLRRRMHLVRLRTSAKGRIFGLQTQWGVRVSLARLRRADGLTLLERAGVPEVWRRSVGECLALIDFLDARIAPLDAELRPFAKADPRAVLLDTIPGVAELLALTIAVEIGEINRFTRPEKLVSYGRLAPRVRQSGDGRARSGPLSKSGSRLLGWAAVEAAQQAWRETNPWHELYLDVGHRSRNTNAAKAAVARKVLIAAWHMLSRNEPFKPAPRTTAGTSVPASSRLALAA

SEQ ID NO: 489366 - protein, 344 aa, unidentified
MDHFAGLDVSVKETSVCILDDAGKIVKEVKVASEPQALLKVLGNPTYRFKRIGLEAGPLSQWLFSALAEAELPVICVETRHMQAVLKAQINKTDRNDARGIAQMIRVGLYRPVHVKTLRSQKLRMLLTHRKLLQSKAIAIENDLRGTLRNFGLKVGMVGKVRFEARIQELVENIPDLAVLVEPLLIVRRVLREQIVILHRRLLAIVREDEVCRRLMTTPGVGPVVALTYRATVDVPARFRKSKSVGAVFGLTCSRYQSGEIDWSGKISRCGDEMMRTMLYEAAQSMMHSNKWSWLKAWAMQIARRRGMKKAIVALARRLAVIMHRIWVDGTEFRWTREQAAVAA

SEQ ID NO: 489367 - protein, 359 aa, unidentified
MDVRDQAKRHVVGGVDTHKHLHVAPVVDERDRVLGNQSFARTRQGYRQMLAWMGSFGEVQRIGIESTGSYGAGLLRFVQTVGIEVLEVTTPDRHDRRRRGKNDDLDAQNAAHAAFAGQRTVTPRSRDGMVESLRVLSACRKTAVAARRVALQLIQNTIVCAPDGLRDVLRSMTRMQLIRTLAAWRPDLTAYRDVEAAYRITFKSLARRYLELHDEIADLDIMIGAIVDELAPDLVARNSIGHVGAAQLLLTAGDNPDRLRSEASFAALCGTSPVPASSGKTIRHRLNRGGDRHANSALHIIAIGRLRTDPKTKTYVAKRIAEGHSKLEAIRALKRYIAREVFTLIMRRHKTINQTQIAA

SEQ ID NO: 489368 - protein, 412 aa, unidentified
MDVIHPRCAGLDISKKDAKVCVRINGAGRRRTSETVTTFGATTRQIMAMRDHLAAQQVTCVVMEATGDYWKPFYYLLEDLSGVELMLVNARHVKNLPGRKTDVADATWLAQLGAHGLVRGSFVPPEPIRQLRDLTRTRTAVTRERTREIQRLEKLLEDAGIKLSSVAADLNGASSRAMLGALLAGETDPAAMADLAKKRMRVKIPQLTEALYGRFTSHHAFLTRMHLDLIDQHTAAIEQLTDRIEVVMEPFRGFRDLICTIPGVGGYTADVVVAETGADMTRFPTAQHLASWAGTTPGNNESAGKVKSRRTRPGNPYLQGALGTAAMSISHTRDTYLAAKYRRIATRRGPMRANVAVQRALLVAIWNIATTNTAYHDPGGDYFTRLNPQKARNNAVRQLEAMGYRVTLEPAA

SEQ ID NO: 489369 - protein, 387 aa, unidentified
MAQVNDLSRSLTAFDPISTLVVVVEMSKASWLVSGVVPGVERQPLKKLEPDATALLRLIERWRNEAVRAGRPINRIALAYEAGRDGFWLARWLVARGIEAHVIHSASVAVSRERKRAKTDRLDAAMLMRVFLGWLRGERGHCGMVVIPTMEEEDARRPSRERESLINERSRITNRMKSALARLGVRGFKPHLRKAPERLAGLRTAEGTGLPANIIEEFRRDMARLSLVREQISSIEKTRAERLERAPDTGPHAMVRLLARVIGIGIETADMLVREILSRKLRDRRAVARYAGLTGSPDESGLKRREKGLAKAGNARVRRGLIQLAWRFVMFQKDSALARWYRMRTEGPSGARKTTMIVALARKLLIALWRLVTTGEVPDGVELRPAA

SEQ ID NO: 489370 - protein, 398 aa, unidentified
MTDDSNLSILNRLSVANDLNGASEIKALILKHHAEVSFEQIVIGMESTSLYSFHPAMFFQEDADLNALPTVVTVENPFKIKQYSRVFDEDKTDTNDAMRIADYLRIQRFTTSPIKEEKYMALQRLTRTRYQLVTELVTVKQHFLENLTYKCNTLSKELKSESTGIFSATIVHLMTENYSLDELANLPLEDFVQLIQNVGRSNFKNPEKLVKTIQRAIKNSYQLPRLMNESIDIILSTLVVQMRSLQQSIKQIDKGIEKLVEIIPEYQCLTSVPGIGKVYAAGILAEVGQIERFDDQAKVAKYAGLSWKVKQSGNYQSEVTPLTKQGNHYLRYYLVEAANSVKNHLPEYTAFYKKKYTETPINKHRRAIVLTARKFVRLVDALLRNHQLYTPPKSVLKE

SEQ ID NO: 489371 - protein, 357 aa, unidentified
MRQQSNEISFKGQNIYVGIDVHLKSWSVTVLSENSVLKRFVQDPDPGALHKFLTRNYPDAEYHSVYEAGFCGFWIHERLTALGINNIVINPADVPTTAGERIQKTDAVDSAKLARSLRNKELTGIYVPDSTSLEVRSLIRLRSAIAKDMTRQKNRIKAHLRFLGYEIPVEYCNRDWPKRFIVWLRELDMKTQSGRQSLDFMLDLLENLRKEKLDMTRALRELSRTEQYEKPLELVMSVPGIGQQVGMALLAEIVDIRRFKSAESLAKYVGLVPMCHGSGEKDGVGDITIRKHAFLRTLIVESSWVAIRQDPALTLAFETYCTRMKPSEAIIKIARKIVNRIYFVMKWQKPYVTSVVS

SEQ ID NO: 489372 - protein, 501 aa, unidentified
MHLRYIQIITDLTVGKKSEVHEVHTMNAKAKFNKNQVNQVNIFMQDEIAKQAELIGQGLKAYSWKELETVGKFAKNEKISFISDNILVAGCDIGSETHYLRAIDTRGREISKKAFAFSNDAEGFASAKDWLLKLAVANGKDQIVVGLEPTGHYWFCLAAWLVTNGISVVQVNPYAVKQTKEVEDNSQLKDDRKDPKLIANLVKDGNYGMPYLPEGVYADLRHFSLLRDQLTEDRIRAVNRLHRVLTFCFPEYKDALGKIDGAFTLELLKVAPFPEDLKALGVDGIKDIWHAARLRGCGYNRAKTLVEYAEKSVGLTDGITASREAVIWYAEEILRLDMKLEQVEAQLEASCRDIPYAENLLEISGIGDKILSGIASEIGDISRFDDVKEIQKLSGMSLVACSSGKHQGKTKISHRGRKRLRYWLFQAAKSSVAHAVEFKEIHEYYTTRDVNPLKKKQSLVVIACKLLRIIFTILRNGTRYDPAKMLRDIRRQEPQTVPTAA

SEQ ID NO: 489373 - protein, 402 aa, unidentified
MNLSIGLDWASQTHAVCVLEATGQVGWQGTVEHSAAGLAELLRRLARFGPPAALPVALERPSGLLVDTLLAAGHPVVPIHPNALKASRPRYSAAGSKSDPGDAFILADLLRTDGHRFRRLQPLSDETRALRVLVRGRDDLVAERTALANQLRALLERVWPGAAALFAEVESPISLAFLTRYPTAQSAERLGEKRLARFLGQHSYCGRRSPAELLARFRSAPASDVSDLEAEASRDVVHALVAVLTPLGAQIQQLSAAIVAALAQHPDGPLLQSFPRSGGVNAAQILAELGEDRTRFPTDEQLAAEGGVAPVTRESGKHRQVAFRWACNKRLRQALTTFADHSRQASPWAATIYTAARRRACAHPHAVRILARAWVRVLWRCWQDRRPYDVTFHRAAQRVAAA

SEQ ID NO: 489374 - protein, 346 aa, unidentified
MLYVGLDLSRQKLDVCVLDEDGRTVETLAVRPDADALRTLAARIARYGELVNAAIESMTGARFIHDQLELAGWDVEIADAAKTKGLAPLAAKTDKIDAHVLAELARRDLVPAIWLPDPSVRAERERARFRLHLVRHRTALKSRIHATLMTFGHPVPVSDLFGLRGRELLTSLAIPEPWATTLARSLALVDELDGEIGRCEAELRRLGADHPYVTLLTSIPGISWILGYTIASEIGDISRFASPKKLAGYTGLCPRVYQSGAIDRRGALAKNGPKYLRWALIEAATQAIRDPRYGARYQRTKRRLGKQRGSKIARVELARELTTAIWYMLTRQEPFRAVGPTCGLVA

SEQ ID NO: 489375 - protein, 364 aa, unidentified
MKKSIKKPQAKETKPNRTMGIDIGDRWCHYCWLNEDGEAVETGKIRTREKDLREFFEGEKRMRIAMECGTHSPWISRLLEALGQEVIVANARKIEAITGSESKDDDHDAEQLAVFAHFDPRLLYPIQHRSAERQRDLSLIQARRTLVQARTMLINSARGLVKSMGGRLPQCSSESFGQKARAAVPANLVGLVTPLLEQVTLLNQQIKRMDQQIEELEKRYPEIIRLRSTPGVGPLVAAAYVLTLNGAHSITHSRQAGAFLGLRPKRKQSGDSDPQCRITKTGNNYLRALLVQSAQHILGRFGPDSALRRWGLKLAASGGKRGKKRAVVAVARKLAVILHRMWASGQNYQPFPPATAGTKTVIAK

SEQ ID NO: 489376 - protein, 397 aa, unidentified
MSKCYVGIDVSKDASTAQGIDEKGKKLFYFEFTMDAEGFSKLLGVIRSHCKDFSMLKAAMESTGCYHTNLLCFLATEGIPCFVINPLLIANFAKLSLRKTKTDKKDAMVIAQFLLIHKDVLVKVEPSQGLQDLKDLARERESLTVLMSGLKNDIKRMLQITFPELESLCNVFSESMRDIIKQFPSARLVRIANFVVVKKALTPSDARRTSPFYPEDFIKAARDSVATNSIAKELILPEKYATLEHLMKQRERITEALVEACQAMMIKDIEIITSIGGISDTTASAFLAEVGDYKAFSSYKHLIAFAGLDPSIHQSGKFEGRSKISKRGNRHLRHLSYLMTTCVVRLDNIFREYYLRRRAEGLPYKKAILATAHKLLRVIFTMLTNRTTFQVKEVISK

SEQ ID NO: 489377 - protein, 356 aa, unidentified
MQTKITKKIDFSNHNFYIGLDVHKKSWYVTILTDGMELKTFSQPPSAHLLFDYLNNNYPNGRYFSAYEAGFCGFGAHRELLNLGINNIVVNPSDIPRMDKELSYQTDKSDSRSIARELRNKQIHGIYVFNQANEEFRALFRYRIILAKEIRKTCNRIKAFLFYRSIAIPLQFDNANWSNSFLHWLEQLPLEQAPAKFILGQMVMDYRQLHIKKLEVEKQLRAMAKLKDAQLLIVLQSVPGIGPITAIALMSEIGDINRFKTFKQFASYIGLIPRISQSGEKLYTGKMTYRNNNYLRPLLVEAAWQSIRSDPAMLAYYKHACGKTMSKKAIIKVARKLLSRIMYVMKNRKPYQNNIK

SEQ ID NO: 489378 - protein, 417 aa, unidentified
MTHPKMQYTYVGIDSHKDTHTAVFIDCFFEKLGELTFDNRPSKFEAFLQSAQSFLMEGTSFLFGLEDCSQYGRTLTTFLTKNKCDIRHVNAFMVASERKSQNVTQKDDSIDAECTARVLLSKFAELPTPSLQDKFWVLRSLVIRRDSLVDTSKRLKNHLHTLLTQHYPNYRSFFSEIEGDTSLAFFMQYPSPGTLRNTTLEELTAFLEIPSHGHIGMDRAKMILDTLENTAVEFQEVRDGAVQSAIRQLQFNMKEIEQLEENLEYFLPKLDCTLTSMAEISTVSAAQILSCIGDIRRFSTPAKLARYAGIAPVTYASGKTATQFANKRGNRELNALLFWLAVRVTMVAGRNRKVMNSFFYEYYHRKISEGKTKRQALKCVQRRLVNIIWTMLTNNEEYVNPPTFDEPKHEPGHKPEE

SEQ ID NO: 489379 - protein, 342 aa, unidentified
MQVTTIGLDIAKNVFQVHGIDASEKVVVRKQLRRGKLMAFFEALAPCLIGMEACATAHYWARELTKLGHEVRLMPAKDVKAYVKRNKNDAADAAAICEAVRRPTMRFVRIKSPEQQGQLMQHRTRDVLIRQRTQLINAMRAHLAELGIVAAKGDAGVTELLTIVADETDTRLPIDARASVIALATQLEALQTVIGALEKRIKSQHRANEASRRLETIPGIGVIGATAIAATVADPTVFRSGRDFAAWIGLVPRQDSTGGKQKLGAISKQGDRYLRRILVVGAIAVLRRAQENPGKYPWLTQLLARRPFKVVAVALANKMARMAWALLAHGGTYRAPELAAAA

SEQ ID NO: 489380 - protein, 347 aa, unidentified
MIIIGCDFHTRSQQIAMLETETGEVVEKRLEHESGEAKRFYEGLKKEALVGIESTGYTRWFAEMLAELGHELVVGEAGKIRAKQTRKQKYDRRDAQHLLNLLVTGDFPKIWLPPAEERDVRVLVEHRHQLVELRTRAQNGLQAIALSYGLRRRQRLWSAAGQEELQKIPLREGMARRREDLVKLVRQLSTWIKELDQRIEEEVARRPEAQRLMTHPGVGAQTALATVLVLGPVERFPDDRHLTSYLGLIPEEDSSAGRQRFGHLTKQGNRLMRFLLGEAAQTASRYDPGLRRTYRRLAFRKGAPVAKVAVARKLAIRLYIMLRDRIDYAEFCRRGSHAGMLVSKPLV

SEQ ID NO: 489381 - protein, 457 aa, unidentified
MSQRKRDRKSRELPRVHPAAAAIDIGATMHVAAVGPDRDQEPVRTFRTFTDDLHRLADWFAECGVKTVVMESTGVYWIPVFEILEQRGFEVMVVNARDAKHVPGRKTDVSDAEWLQRLHEYGLLRPSFRPQAEIAGLRAYLRQRERLQDYAAGHIQHMQKALMQMNLQLHHVVSDITGVTGMAIVRAIVAGERDPTVLASHRDRRCHASVETVCQALIGNYREEHVFALSQALELYEVYQTKVMACDKQIEAILTRLRQAAPRPVHKLPPARRRGDQKNAPTFDARAALHAILGVDLTQINGLGPYLALKLVGECGTNLAAWPTAKHFTSWLGLAPHNKISGGKVLSSKTRRTDNRAASLLRLAAGTLGRTDTALGAFYRRLSARIGKAKAITATARKIATLFYNTLRHGMAYTDPGAGYYEDRYRERVLRNLRRRAKSLGFVLVEPDPHAGQVVVS

SEQ ID NO: 489382 - protein, 454 aa, unidentified
MSNDLYVGVDIGKRRHAVALLSQSLLSRFHRFQDCPVFFVEQDRAAFEHLYAELTKHAEPAHIHVLMEHTGHYGAAIEQYCYERGISAYRIHPHEHLAKRKTDRRDAQLLALRLYNQIELQMHVAEKHERVHRLVPPSETATLLRGLVQHHIELSRETTRHKNKLVAIADELFPELTHCYKDVNAPSALALRVAFPTPEAVSTAPLDALVATRTYRRPGRKALANLQELARHTIGTKNVQRIKSLVFEQSQLIKELKLLEEHVDALEKEITPIVQASRDGQIYTSFTGCGPIHAATLIAFTGSIANFASEGDFRSFCGWSPHEFQTGETADYSTLKKGGHSQLKRTVFLITTVAIKQNTRFRQLYERLVPRMCPYNERLGDYTHKMKPLGRVAGQMLGVMYTLLKKDHDILASLKEGDEIPAPVLYDPAKHHLGSGKRVQHSNLTTPPVEQADG

SEQ ID NO: 489383 - protein, 424 aa, unidentified
MRKRTYRAVTVKQLDMAQLSVGHDRLILGCDAAKEIWYGAWMNPQGEVLQTIRWDQVGETRELLTRLGALHAAGVAVEVAVEPTATYADAVVAQLLAQGVAVYRINTKHSHDYQEIYDGVPSGHDAKAAAIVAKLHLERGGSSRPWPVTPARRRELRVRVAALDWIKQDEQRAISRLESRLARHWPELLRLLPLTGVTSARLLAAYGGPAAVAADPDGANAALRQWSRGQLSAAKRGEVVASAATTLGIPLLEAECHQIEQLATTLCTLRRRRREAEQELTTQAATDPALASISSVVGRTTAAVLYACLGDLRAYTSVRALYRAPGLNLREHSSGKKKGRLAITKRGSAVARRWLFLATLRWLKADPIARAWYLRKVRTNGGVKLKAVIALMRKLLAALYHVVRGATYDPYRLFDTRRLQITAA

SEQ ID NO: 489384 - protein, 344 aa, unidentified
MQISTIGIDLAKTVFQVHAVDADGATVLRKRLRRAEVLSVASGLEPCLIGMEACATSHYWARELAKFGHTVKLMPPAYVKPYVKRGKNDTTDAEAICEAVTRPNMRFVPVKSADQQAVLMLHRTRALLIRQQTMLANAFRAHLAELGIVVPQGIRHVRALIERVFGEGADAIDLPDLARIALRPLVAQLMELRLQIKAIEKELLAWHRTSQESRRLETIPGVGFITATAIAATATDPSHFRSSREFAAWLGLTPRQNSSGGKERLGRVSKMGNAYLRSLIVVGATAMIRYAREKGAVSARWINALLEKKPARLVSVAVANKTARIAWALLVRKEDYRVPVPVAA

SEQ ID NO: 489385 - protein, 416 aa, unidentified
MKIVRPICCGMDVHKNIIVATIGITNKKTRITEYIQETFSTLNPDLLNLKQWLINHKCFDACMESTGKYWIPIFNILEDEINIYLTHPKYVKAIKGKKTDKKDSKWICDLFKHDLIKFSFIPPKEIRALREISRYRYKLVGMRSSERNRYQNCMTVSNIGIGSVFSDPFGKSAQAIMKEVLESDIIEDEKILKCIHRSCKNKDKILDSIKHCNIETDQRFKMNESMTHMEELQVHINNCEIEMMKRAAPMFDQFMHITQLPGISTLSAILIISEIGVDMKQFESDKQLTCWAGLAPANNESANKKKSVRISKAGQYLKPLLVQCALGAIKDKEGYFGIKYSRIKKRRGHKKAIIAIARMMLVSIYHMILTGETFNPSDYESFRNPKPPIKQQDLTEESAIEFLKKSGFDVSKLTKP

SEQ ID NO: 489386 - protein, 419 aa, unidentified
MNKLYVGMDVSQNDVKVYILDQEGNEATHRFCVDNNPQGAETIVNNILKCCRSLSINKVFIGLESTSVYGWHLQFYLADHQELKPFDPMIISFNSKIVNAFKKSLGEQPKNDWFDALTVAERLRFGRLPKSCPVDFRYLALQRLTRHRFHIVDNIVREKNYYLSNLFLKFSRLCQNQVFSTNFSATATQLFDEFLTLDDIAARPLDELVDFIVEHGKELFSDPKATALALKDAVRKSYRINASVENSLNFVIKSCLDNIQALEKQKKATEKAIAQEILGFNNQYLCLTSVKGIGPTIAAGLISEIGGISRFEDDNALAKFSGLYWSEYQSADFTAEDTYLKRTGNEYLRYYFIQAADQLRKYLPEYSQYYTRKYNEAKTHKHKRALVLTARKAVRLIFALLREEKLYKPPAPKGGISEK

SEQ ID NO: 489387 - protein, 353 aa, unidentified
MKSRMESKMSSPMVIGVDIGKEVFHLVGFTADGKIAFRRRIRRLGLKDVFEKLPPCIVAMEACLSAHFVSRTLRALGHEPRIIPAIYVKPFVKGQKNDYNDAEAIAEAALRPNLRFVQEKSQDQLDLQACHRVRSRLVSRRTATINQIRAFLIEQGIAVRTGPRALRKSLFSILENRKEEISPRTAKLIRGLYEDWCCLDERIETVTGETEILSRSEAKCRQLMSVPGVGPLISTAMVAAIGSGEAFERGRDFAAWLGLVPRQYSTGGRSILGRISKRGSKYLRTLLIQAAKVLLMRPHNWARYSFGPWLNAASERLHRNKLAVALANKLARIAWSVLRNDKAFDTHLEVAAI

SEQ ID NO: 489388 - protein, 370 aa, unidentified
MRKNITETPKKNRQSRSQLSGNLTVGIDLGDRSSRYCILNQEGEVVAASAVATTKKDLSRVFGTLRPSRLALEVGTHSPWVSRHLKAMGHEVIVANPRRTRLIAESSNKQDRLDAETLARLARVDPKMLFPIRHRGEAAQADLAMIRARAALVEARTRLINTARGLTKSFGERLRACDAGYVDGRLAQDLPAALREAIEPLLEQAAELSARIQQYDERIQQMARKQYPETALLTAVAGVGVLIALTFILTLEDPHRFPKSRAVGAYLGMKPRRRQSGGRDPELGISKEGDVYLRKLLVQGAHVILGRNGSDSDLRRFGQRLISRGGKGAKKKARVAVARKLAVLLHHLWVTGEVYEAVHRKPAQPVPAAA

SEQ ID NO: 489389 - protein, 386 aa, unidentified
MKRNDLSRSLVAFDQASTLVAVVELGLRSWLVAGLVPSLTRQPLKKLRSDPDALLGLLLRWRDQATKAGGRIKRMVVAFEAGRDGFWLARWLRARGIEAHVIHPTSIPVSREHRRAKTDRLDTGLLMRAVLGWLRGEPKHCSMAAIPTIAEEDSRRPNREREKLVGEQTRAINRIKSTLVRFGIRAFKIKLRQASKHLEELRGPEGEPLPPNTMAELRRDLARLQIIRAQITEIERARLERLKRVPRQGTNPMIRMLTKVMGIGIETADVLAHEVLTRKLRDQRAVARYGGLTGSPDESGIKRRERGLARAGNARVRRSMIQLAWRWLMYQKTSALAQWYQARTAGAKSGLRKAMIVALARKLLIDLWRYVTIGKVPPGAVLRPAT

SEQ ID NO: 489390 - protein, 423 aa, unidentified
MRIIYRRCCGMDVHKKKLTVCVMSTDGVSPVQVRKRAFGTYTRDVKKLRHWLLACKVTHVAMESTGVYGKPVWNVLEGKFTILLVNAAHYKGVDGRQTDQIDCEWLAELLQCGLLKASFIAPQEIRELRDLTRMRVPVVQEENRVQNRIEKVLESANIKLSVAVSDTLGVSGKLMLKAIIRGQEDPGWLADYARGSLRSKRKELELALAGKVTDHHRFLLQECLDPIEFLEGKVARLEGRIGEMLQPHADLIRRLDAIAGVDEITAWTLLAEIGWNMDVFQTSERLASWAGMCPGNRQSAGKRSSGKTRKGNRWLRRALVQCGWAASRAQDSYLRSVFWRIAGRQGKKKAAVAVGHRILKIAFYLVRDGVEYQDLGPAYFDRLNPVRTAQKLVHRLERLGFAVNILPASAQAIAEGGSNIANA

SEQ ID NO: 489391 - protein, 338 aa, unidentified
MNYVGIDHHRQYSHMTVMDQMGQVLRSGRVPNLQNEIGKFLEGFEAVEAVIETGRSSYTMVDVLEEMGVTVKIVHPNEVKAIARAKIKTDKRDSEVLAHLLRMNMIPEVYRRSPENRRAQRILRQRAFYVRAMTALKNRVYAFLAQQKEEVRQEVARETNIFSAKGQKTLLGLDLTQGEKRLLEALLKTYRHLETRIAESTALVEKLYEEIREAQLIRTIPGFGKYLSVLVAVEIADLARFADAAHLHAYAGVIPSVHSSGDKTYYGKIIRAGNRWLRWAAVEAVWPAIRADFDLRCFYERLARRKGANKAKVATARRLLTIIYKVWKEQRNYIPYRR

SEQ ID NO: 489392 - protein, 349 aa, unidentified
MRFYTEIHQYYCGIDLHARNMYVCILDADGKKVVHRHIPCRPDRLLELLDPYRDGLVVGVECLFCWYWLADLCADEDIPFVLGHALYMKAIHGGKSKNDRIDSYKIAALLRGGNFPVAYVYPRHMRSTRDLLRRRLFFARKRAELLGHIQNTNTQYNLEPFEKRIDQPCNRHELLEHFADDENVQMSIAANMAVMETLEETVTELKIFLTQQVQVHDASAFYLLKTVPGIGRILALTLIYEICTIDRFPSVQDFLSYARLVKGDRSSDGKRKAGGGAKMGNAHLKWAFSEASALFLRDNPEGQMLRQRLERKHGKAKAMGILAAKLGRAVYYMLRRHQPFDFNRFITAC

SEQ ID NO: 489393 - protein, 409 aa, unidentified
MDVVITRCAGLDVHQATVVATVRVPDDQGGRRVVTDTFGTMTADLLALRDWLHAYGVTHVALESTGVYWKPVYYMLEDAFTLLLINMQELKRVPGRKTDVKDSEWLAQLLECGLLRPSFVPPPPIRELRDLTRYRVQQVRDRSQEVNRLCKVLEDAGLKLTTVITDVMGKSGRAMLQALVDGTTDPAVLAELARGKLRKKLPELRRALQGRFRPHHAFLIEQIFAKIDFLDEALERLTTEIDVRLVPFEPMLTALDTIPGVDRIGAISIVAETGGDMTRFLTAGHLCSWGAMCPGQNESAGKRRSGKTRKGNRYLRGTLIQAGLGAMRKNGSALQARYHRVARHRGHKKAVVAVGHQILEIAFYIMRDGVTYDELGADYFNRRHAEKAVRRHVRQLEALGFHVTVEKAA

SEQ ID NO: 489394 - protein, 355 aa, unidentified
MLYLGIDQHARQITVSLRDENGDVIEARQVSTKPEKIHDFFQRLTAERLKAGEKFVAVLEVCGFNEWLIRMLRDYRCEKVILIQPEQRTKRKTDRRDAAALSELLWVNRKRLLEGKAIRGLRQVEIASTTDQENRRLTTLRKEAGQTRTRIVNRIRQILRRHNLQWDMPTKLFPTQRAIAWLKKLVLPEIDRLDIQYLLADLELIRQRLQELEKAITDRCGASEDARLLLSMPGVADFTATSLACRVGNVKRFPRSSSLANYWGLTPGCRNSGEKSQRLGNITKAGSSMARWLLAQVTINVLRKDARLREWFKRIKRKRGSKIARVAVMRKLATIIWHMLSKRKTYVECRAFGTA

SEQ ID NO: 489395 - protein, 337 aa, unidentified
MLIIGCDFHPGFQQVAIFDNRTGEMEERRLRHREEAEQFYRSLMGQVARVGMEACGHYPWFERLLAECRIELWVGDAAKIRAMVVRKQKTDRRDAEHLLDLIRQDRFPRIWVPSLEERDARQLLVDRHKQVQARTRVKNQLQAMALGQGVQKKRKLWNESGRAELEKLELLPYAAQRRQRLLQALQQLDTEIMRLNRQVEEEVRRRPQAMKLMTHPGVGPVTALAMVLTLGPAERFENARKVGSYLGLIPSEHSSGGRQQMGPITKQGSPFLRFLLVEAGQSAARYDSELGRFYRRLAVRRHRALAKVAVARKLAARLYLMLREDWTYAQLCKAVCR

SEQ ID NO: 489396 - protein, 415 aa, unidentified
MLCVGIDWADDHHDVCLTNEHCPEVSGTLDRFRIDQSAAGFDELHARLRQHEPDPQQILVAIETKHGLLVHDLLRQGYVVYGLNPKAVNRYKDRHTQSSAKDDARDALAMAHLLRTDRHLLQPLKLLPDDYRLLDEFCRDLRQMVDDRTRLLNRLEACLKEYYPQAVSIFSRLDALIATAFLSAYPDPEALQKASSVEFKAFLKQHHYPCPGRADALYDKTRIPAPKADPVITRAAKLRMLALVDQIATLRAHIADYERQIEELFETLGDHQNITTLPGVGERLAPELAATLGPRPKEGPPRFGCARDLEKLGGCAPVTKQSGRYKNVFFRRACNKRLRRTMRDWTQASLLRSRWAKAYYDYHKAQGHRHNTILRNLGAKLLAILFKLWHTGEDYDEQTHIDNLKANNVVWAMAL

SEQ ID NO: 489397 - protein, 391 aa, unidentified
MIYAGIDVSKDKHDCFITNSDGEVLFKAFTIQNNRDGFDELYQKITSVTDDLTNIKVGLEATGHYGYNILGFLLDQGLSTFVINPLHTNLYRKSLSLRKTKTDKVDAHTIATMLMSDVNLKSYSDISYHNEELKSLTRYRFDKVKERAKLKSSVSRLVTILFPELEQLVPAIHMASIYALLSEFPSASAIAHSHLTRLTHLLSTASKGHYGKDTAILFREAARTSIGSHMPAKSLELKHTIKLIQEITSEIDEIEADIKSIMDSIHSPILTIPGISYRMGAMIIAEIGDFSRFDAPDKILAYAGMSPSTYQSGQLESSYSHMEKRGSRYLRYALYNATKYVCHWDTTFATYLEKKRTEGKHYNVALSHATKKLVRVIFQLEKSGQDYIKSA

SEQ ID NO: 489398 - protein, 407 aa, unidentified
MQVIYPRCAGLDVHKQTVVACVRIAGDGPLLQEVRTFATTTSGLLALSDWLDSFGVDHVAMEATGVYWKPVWHVLEGHFELVLANAAHVKNVPGRKTDVNDAMWLADLLAHGLIRASFVPPAAVQELRTLTRTRKQFVRERAAHVQRIEKVLEDANLKLSGVISDILGKGGRAVLQAVVDGHSDPELLASRITTRVKASRAELLEALRGRVNAHHRFMLKLHLGHIDALDKAIAAIETEVGAGLEPFRAAAELLSTMPGLSAVSANVVVAEIGIDMSRFATPGHLLSWACMCPRNDESAGKRRSTRLRRGGKWLKTTLVQAAWSAVKVKGSYLQAQFHRLRARRGVKKAIVAVAASMLTAAWHMLRDGTEWHDLGAAHFDRADATKTANRLIRRLQQIGYVVQATPA

SEQ ID NO: 489399 - protein, 449 aa, unidentified
MSSRASRQKRKPSAMERINVDAAGIDIGASSHFVAVPEDRDERPVREFAAYTADLYQLADWLKACGIKTVAMESTGVYWIPLFQVLEERGFEVRLVDARRVKNVSGRKTDVSDCQWLQQLHTYGLLSSAFRPDDDTCVLRSYMRQRDGLVIQAGQHIQHMQKALELMNVKLTEVLADVSGQTGMAIIDDILAGQRDPMVLAKHRHTRCKHDEATIARALTGHYRAEHLFALRQAVALYRQCQDLLRECDTEIESFLEDRGPKDDGTPTPPERTSARSKNALGFDAHGHLFRLVGVDLTAIPGLSTASVLALLAETGPTMDRWRNSKAFASWLGLCPNNRVSGGKVLASKSKQCVNRAARIFRMAAYGLHHAKSALGAFYRRMRSKLGAPKAITATAHKLARLFYSMLKTKKSFADIGQDAYDRTYNQRRLKGLTKVAEQLGFKLVPSSA

SEQ ID NO: 489400 - protein, 406 aa, unidentified
MELVTLYKRVVGLDVHQAKIAVCAIIEDETGDVTVELAEFGGFKRDRQALAEWVATRDPEVVVMESTGIYWKSPYAALEKVGIVATVVNARHVKTVPGRKTDWADAQWLATLARSGLLRASFVPPAKLRELRHVARQRQQLVGILSGEKNRVHKVLSDGGIRLSVVVSDIHGVAGRAMVKALIEGQSPAEVLMLAGNRLKADRGELLDALDGDLTAEHRFVLRELMAHVQELEQRIDRFDRHLLHELEPYRTTLALMQTIPGIDAIGAALLLVEIGNDMEAFGSVDRLASWVGICPGNNESAGKRKSGRIRKGNPWVRRLLCQFAHAASRTQCAFKSKFEALRLRRGHKRAIVAIAHKILKTVFLLIRRQTHYRDSAVDFEAMSVTRNAPRWLKMLKKHGFIPAAA

SEQ ID NO: 489401 - protein, 319 aa, unidentified
MTVNLAQEYVGIDVSKTQLDVAIGQKGEYWQANNDAVGIIRTVEHLKALQPALIVVESTGGLEVALITELFAAQLPFALVHPKRVRDFARSIGLLAKTDKLDARLLSRFGETIKPPVSRLPGVAEQNLNAFMLRRRQLLDILVMEKNHLFSTRLSMRLDVEKHIAWLEAEIADLDQQIDDQVHQIPIFKEKEAILRSAKGVGPVLCAKLLSGLPELGLMDRKKIAALVGVAPYNDDSGRHRGKRSIKGGREDVRRVLYMATLAASRSNPVIKPFYQSLRKQGKLHKVALVACMRKFLTILNAMVRDMLPFNPAFVPHYS

SEQ ID NO: 489402 - protein, 340 aa, unidentified
MVNCTAVGVDIAKTVFQVHYVDQETGEIVNKPSKRAKFLEFFVNRAPCLIGMEACGGAHHWARQLTKMGHEVKLMAAEFVKAFNVRNKNDAADARAIWLAVQQPGKAVAIKAEMQQAMLALHRMREQLVKFRTMQINGLRGLLTEYGEVMSKGREKLNKEIPEVLGRIAERLPAVVVDTLREQWNGLAQLDEQVAQIERRMREWKKEDKAVKAISEIPGVGLLTATAAVAMIGDAKAFKSGREFAAWVGLVPKQTGSGGKVNLHGISKRGDTYLRTLLIHGARSVLTNAKEPGLWVEQMNKRRPKNVVIVALANKMARTRWAVLAHERSYQKDHVSVKPA

SEQ ID NO: 489403 - protein, 482 aa, unidentified
MKTKNSPTLAVGIDVHKKRHYARVKIRETREIISPILKIYNSKRGLDFLLEKVNHLMEKYQAKKVIFALEPTGIYWKPLGYALHDRGCLVHLVNPVQVHYKRKEEDPAANKNDKIDPGLICDLVCDGKSNPARFMLGIFRLLQKTVRSRRDIVLELSSKKIKLKTVIYELCPELVDAFTDIAGRVSMAILRFSPSIDLLESTPLEELSSIFRIYGSHKTKISPEKLLSQVRFSLGIRNDNQAHIKQIQMILEQIDLLKRQISILEKDINGYLKELGQTLTSIKGIGPILAAEVIAEVGDINTFSSGRQLVKLAGLDTVESSSGETKRRRYISKKGISSLRTTAILAAFSLIKSCPPFTDYFLYQTKVLAKKPMQAIIAVADKFLRVCFYMLKNKTSFDPKRIGTGNLRTKAKFLNQSLEVSLDSKEIANLDLNLLEIFSKSPKVVLFDEEDPTWVKIRVNSKVETFDLGEPRGRILALLNAL

SEQ ID NO: 489404 - protein, 354 aa, unidentified
MVYIGIDLHRKRSQVAALDDQGELLFNRRVPTRPAELFEVLASTGEAPVEVVFEATFVWGWLADLLADAGIPTHMAHPLATKAISSGRVKNDSVDAKTLAHLLRTNLLPEAWLAPPPAREARRLVRMRAALVRIRARLKNQVHAMLAEHGVAVEMSDLFGSSGRRLLSELRLPPISQQRLEACLRLIDRVSEEVALADQHVKTLFARDPLVERLLPIPGIGITIAATIVAEVWDVSRFSTSDQLCSWAGLAPSEHTSADNVRRGHISKQGSRWVRWVMVEAATHALRDPELRQLFLRVAKRRGVKIARVAVARRLLTLAYYALRSENGCRSYPVNPTSTVEARSLAVMASADGR

SEQ ID NO: 489405 - protein, 416 aa, unidentified
MEKSKPPKGRFVNDQMIVGIDVAKWKHVAKILFPDGSESPPFPFSNHRRGFEAFLSWLFSYQKRAHCHSLLVGLESTGHYWEPLAFFLEPIPEIRLVQVSPRHVKKTKEVYDNSPGKTDRKDAGVIAMLIQMGRFQRLVLPRGPFAELRCYARLRERKIVELGVQRNLLHSLVDVVFPEYGSLFPKMESKTSLTLLKHYTTPEQILHAGRKSLSQLLHRASRGQLSAASAQRLIEAASTTVGLQEGMEATTFAIRNIVASLERIQEEIITIEKALAQVLDQIPYAPQILSIPGVGKITLALLLGEAGDLRRYHKAEELIKLAGLNLFEISSGAHQGRRHISKRGHPLLRKCLFFAALRTVKSGGAFREVYLRWTETNHMQKTKALVAISRKLLGLLFALVRDHVAYQPRRAELRAA

SEQ ID NO: 489406 - protein, 284 aa, unidentified
MKIVGCDLHTRYQQIAMLDTETGELIERRLEHANGEARAFYAGLQGPVRVGIEATGHTRWFERLLAELGHELWIGDAAQIRASMVRKQKTDARDAAHLLQLLLDDRFPRIWRPTMAERDLRQLVWHRQKLVWMRNAVGNQLHALAMGEGVCRKKQLWTKQGRAELQALNLGAWASYRRQELLEMVDQLDGSLEKLDRAVEEQSQQNEAAVLLRTHPGVGPVTSLAFVLTLGPVERFKRSKQVVSYLGLNPREHSSGGKQRLGAISKQGNPMMRSLLVQRPISSL

SEQ ID NO: 489407 - protein, 415 aa, unidentified
MSSQQEVYVGLDVGKESLEAVWINGEGERINSLSFSNDNTGYEEFFHKLQEVSEEGNRVVVGAEGHAGKLTPLDQYLTEEDFKFISIHPLKVRRFKDVLGQPQKTDSYDAYVIADFLRSRGGQLENKPQFDPTIQKVKKLSRTYKDLQKQANRYTNQLDEVLAEYFPELLDDSFPDLTTKTTLRLLNEYNSLEELREAEVEKLGEFLDDTSRGYYGEELATRLIETVRRINRSPIAEAAYRVKLETLTDVLLTIKEHTKKIKKKISKLLDDWEDAQIVLSLGGAGDITVGRWLGEVESIDRFDGSDPLSLYCGTSPLPYSSGKYSKDRSSKRVNKRAKDAIMQIAKSSVQHNPESRRYYNKKRDEGKSHWHAIKCLARQLIRVIYAMLRDRTYYQPNKNSNQNEEQKKEVAGAPA

SEQ ID NO: 489408 - protein, 476 aa, unidentified
MSQRKRSRSKPEPSPRKPKPSSPAPRQQPVMLTIRHPHAAGIDVHSDMHMVCVPADRDPEPVRRFGGNTCDLEAIADWLQQCAITTVALESTGVYWIPLFELLEARGFEVWLVEPGQLSHCGARPKTDVLDCQWIQRLHSYGLLRPSFRPPESIVALRSYWRQRQMQIRYAASHVQHMQKALEQMNVKLTEVLADITGVTGRRIINAILQGERDPRKLAALRDPNCKNSPATIAKALQGTWRPEHLFALRQAYELYQFHHRQIAQCDGMIQAELAKLPSRSGGKTFTAKPRRCGRKANDLHFDACGPLFKALGVDLTEIEGIDVGTALVILAEIGVDVSRFPTEKHFASWLGVCPRVYESNKTQRKKGPRKGKNRVAIALRMAAQALGRTQSPLALFYRRIKSRIGGKGAITATAHKLACLVYRMLKYGREYVKQSMDEYEKKLRAQQERSLQRKAAALGFDLVAKKPAAPQPVSV

SEQ ID NO: 489409 - protein, 318 aa, unidentified
MAEGSYAGIDVAKETLELALGASGAVEHFANEPSAHEAIVSRLREVQARLVVLEASGGYEFALACALQAAGLAVALINPRQGRDFAKAMGHLAKTDAIDARVLAQLAQVLAAQPHRERFVKVLADAEQQRLQALVLRRTQLIGMLAAERQRLAISHAAARKSIQKLIGAIRKQLEDIEAELTSHIAQHHADVAALLQSIGGVGPATAAMLIAELPELGRLERRQIAALVGVAPLAHDSGKMRGKRMIGGGRAQVRRSLYMAALVATRFNPVIARFYQRLLAAGKPKKLALVACMRKLLTILNAMVRSGKPWDASLHTT

SEQ ID NO: 489410 - protein, 402 aa, unidentified
MNAVGIDVSKGKSMVAIMRPFGEIVSAPFEIKHTASGINSLVELINSVEGESRIVMEHTGRYYEVLAHQLSKANLFVSAINPKLIKDFDNDSLRKVKSDKADAVKIARYTLDKWQNLKQYNVMDELRNQLKTMNRQFGFYIKHKTAMKNNLIGILDQTYPGVNTYFDSPARSDGSQKWVDFASTYWHVDCVRKMSLNSFIDHYQNWCKRKKYNFSQSKAEEIYGKAKELVPVLPKDAITKLIIKQAVDQLNSASTTVESLRTLMNETASKLPEYPVVMAMKGVGTSLGPQLIAEIGDVSRFTHKSAITAFAGVDPGVNESGSYEQKSVPTSKRGSSDLRKTLFQVMDVLIKTHPQDNPVYQFIDKKRAQGKPYYVYMTAGANKFLRIYYGRVKEYLSSLPES

SEQ ID NO: 489411 - protein, 350 aa, unidentified
MKLTAIGLDIAKNVFQLHGEDDHHKPVLRRQLRRSQMLEFFANLQPCLVGIEACAGSHFWARRLREFGHDVRLIAPQLVKPYVRGQKNDANDARAICEALQRPDMRFVAIKSVEQQALSHLHTNRSQLMKRRIAQTNAIRAMLAEHGLVLPRGMKALRQGVPELLEDASNELAGITRVLIQEEMLMLAQLQQRIDELDRQIKSQAAANPACRQLQQLPGVGPVSASALVAQVDRAQHFKDSRQLPAAVGIVPRQHSSGGKNVLLGITKRGDEYLRWLFIHGARAFLKAQQLKPAEQRDPWIERMLQTKHPNVVAVALAARTLRRAWAILRYGTDYQPGYRGAGSALAGTA

SEQ ID NO: 489412 - protein, 351 aa, unidentified
MKTQTTAVPKLFIGMDVHKKSWTIHFKTDLFDNKTVTMPADILSLTSYVEKNFVDHEVSCCYEAGCCGYWIARGLKEKGWKVSVVNPADVPRSNKQDWQKTDRIDSRNLCKHLSDGNLKGIYVPGEEQEQLRALFRRRIHLARNLRSIKNHIKSQLLYFGIKLPDQFDNPNWSHEMRTWIGSIKWKYSSAAESMKSRLKQLEFMWYEELHISNELRAYCRKHYKKDYYLYKSVPGIGGITAAAMIAELGDIRRFNRLDELAAIVGLVPGIYQSSENKINLGLTKRSNHQLRSLLVEASWVAVREDMALQQYYRKHAHKEPNKAIIKVAHKLLSRIRAVIHSGIPYQVGLIK

SEQ ID NO: 489413 - protein, 385 aa, unidentified
MRSVGLDLGARHIAWCEVVAGAVSRRGSVRRLDELEPLLGVVTAPARVAFEASREAWHVHDVMVGWGKQPVLLDTTRIRRIGVGQHGRKNDSIDAEAIAMALDSGRVPVAHVLSPERRVLRAKLSVRGELVEMRARQVTLLRGLARAAGVLISSSSTDGFVQKLQQAPLAESTRALMAPLVATLTVAQEQLAEVDARIAQVAKADPIIRLCATAPGVAVIVAATFVSVIDEAKRFRNAHAVSAYLGLVPGENTTGGKQRLGSITKHGNAHARAMLVQSAWLILRTGDSDDPLRRWATDLAKTRGKKIAAVALARRLAGVLWAMWRDGTVYDPGFQARQSAKGLRADAQSHELRAQAMARVAKKIQRRERTPSRVSRAKTSRVAAM

SEQ ID NO: 489414 - protein, 483 aa, unidentified
MATGKKNRRQRKELARQLQSANPGLEVVNPRAAGIDVGNSSHYVAVRPDQDGEPVRQFECFTADLHRLADWLEACGVETVAMQSTGVYWIPLHEILEERGFEVYLVNARHTKNLPGRKTDVQESQWLLKLHTYGLLNNSFRPAAEIRVVRTYWRQRGEHVHGASTCVQRMQKVLTQMNVQLANVISDLSGLTGQTIVRAILAGERDPEKLAHLSHPQIRASREEIARSLEGNWRPELLFVLKQEMEMYDTYQRRIAECDQELEAHLKSFADRVQPKAAEQGTPSDQRQGKQSQAKQTMKPTQRDKKAPGNRPQFDLRGELYRISGVDLTRIDSINVLVAQTVISEVGLDMSRWNTEAHFASWLGLCPDNRISGNKVLSKGTRHVVNRAATALRIAATTLLRSRTYLGAQYRRLRTRLGAPKAITAMAHKLARLVYRMLKYGQEYVDKGMQYYEERHRSQQIELLKKKAANLGLQIVEIQTVGA

SEQ ID NO: 489415 - protein, 389 aa, unidentified
MKIFVGIDIAKLNHFAAAISSDGEIILEPFKFTNDADGFQLLVSKLESFDKNSIIIGLESTAHYGDNLVRYLVTELYQVCVLNPIKTCQMRKNNIRKTKTDKVDTFVIAKTLMMQDDLRFVSFYDLDMMDLKALGRFRQKTIKQRTRLKIQLTTYVDQVFPEIQYFFKSGLHQNAVYALLKEAPSPKEIVSMHMTHLANLLKVNSHGHFTKEQAKELRVLAQKSVGANDSAISIQITQTIQQIELLDSQLDKIEAEMTDIMKFNDSVIMTIPGIGYINGGMILGEIGDIHRFSNPNKLLAFAGLDPSVYQSGNFQAKTTRMSKRGSRVLRYALVNAAWNVVRNNATFKAYYDAKRAEGRSHYNALGHCAGKLVRVIWKMLTDEVEFNLE

SEQ ID NO: 489416 - protein, 313 aa, unidentified
MEPCWVGIDVAKDASVVAVIPQGDQWTVAHTPTALAELAQRLHALRPQRIVLEASGGYQQPVVSALAAAELPVAVVNPRQVRDFARATGQLAKTDILDARVLAAFAQVIKVELRPLPDREARTLRALVARRRQIMEMLTAERNRLLQTEEAIRPSIRAVVEVLERRGNDLDDDVDQRLRTSPLWREGEDLLRSVPGVGPVTARALLAFLPELGRLNRKEVAKLVGVAPLNRDSGRWHGQRFVCGGRPAVRAPLYMAALGATERNPVIGAFYQRLLTAGKPKKVALTACMHKLLVILNAIVRDRQRWSAASLTS

SEQ ID NO: 489417 - protein, 432 aa, unidentified
MNRLQVGIDFSQKKADFCLLHPDGQPLEPHVSFTNSCSGYSLAKQLLIDTLDTYAFDGIDVSGEATGYLWLPFFLQLSADPDLTLRDTNLFLLNPRWVKWFKKCFAEDHKCDEKDAFYIAERTRTRRPDVAWSPPDCLPLRFYTRLRFHVVQNLAREKCYFSAFLFLKASSYRCIKPFSDVFGVTSRLILSQQPTLDELADLPVEDLASRLRDLSGNHLPDSLNNARKLQRVAQESFHLDHSLTLPVQRILDLTLDHIRFLEAQLEQVDHWIATELENYPVIAQLATIPGVGPVFSSGLGAEIGGVQRFLQGQKWDKKRKRYRPRNLRDAEDAVAKIAGLWWPRADSGDFEAQDRHMAKSGNRYLRYYIIQAGNLMRLHIPEYAKFYARKYKEASKHHHKRALVLTARKSVGLVVGLLHRDEPYRSKEDRQT

SEQ ID NO: 489418 - protein, 339 aa, unidentified
MQIHSVGIDLGKTTFHLVALGTAGTVLVRKKFTQKQLLAYTANMQTSLIGLEACSGAHFLGRALHKQGHDVRLIPAQFVKPFVKSNKNDFIDAEAIAEAVERKNMRFVPIKTDDQLDLQAIHRVRDRLISRRTAVINQLRAFLLERGLVFAQTPAKLKAAMADILENAESDLTPRMRNLIDGLWSEWKLVEQQIEELNDELERISAADAGCTRIRKIPGIGPVVATAIVAAIGNGAAFRKGREFAAWLGIVPRQYSTGGKAKLFGISKRGNAYLRRILIHGARAAVLHIKRDRAPIGAWLDALDARAHKNVVVVAMANKLARIAWAVLSSGNEYRPIAT

SEQ ID NO: 489419 - protein, 339 aa, unidentified
MKLTPFGADIAKHVIQVHFIDEFTGEVVDKQIKRSSFLEFFSNKPSSLIGMEACGGFQHWARELEKLGHKVRLLPGKFVKAFVMGNKNDVMDARAIWMAVQQPCKSVAVKNEEQQAILSLHRMRNQLVKFRSAQINALHGLLLEFGETLGKGRTALDQSIPIVLERLSHKLPPFLLRQIEDQHQRLKDYDDQITNIERQLAAWAKQNDVCKRLMKIPGVGTMVATAAVSVMGDAGAFKSGREFASYIGLVPKQTGTGGKVKLLGISKRGDTYLRTMFIHGARSAATLQKEPGQWITELKQRRPACVAIVAMANKLARTVWAIAAHDREYEKDYVSVRPY

SEQ ID NO: 489420 - protein, 423 aa, unidentified
MKNSAAEKRKQVPAGYLVVGVDPHKKKHAAVFMTQDFMVHSKLKFDNSREGFEKVLERVRTEMLKTGCRGVIFAIETGAHHWRNLAYFLDEKGIPLRLINQFTLKRRREGKDLNHRKNDYRDSEVAAQLLCTGEFNAARLSQGVYAELRAAYGSYRRLVKERTRIVNLIKSLLDGLFPEFTQVFKNPCGQTAASVLCTCAVPQAIAGMTESEFVGAIKAACQGRVMKGKLRALHHVALTSIGIGAGAQSVSSEIAFLIEKLRLIEQQLRQIKEALTRLVHETMEGKYLLSIIGLSYVSVAGIIAELGSFSSYQNAKQLIKMAGSNPTESESGGKRHSHTPISKQGRPVLRHCAWTAVIPMLRFNPDFRDWAKKLRERPAGANPLSGREVMVAAVNKLLRLAFALVKNQTLYQIPESQPVEITI

SEQ ID NO: 489421 - protein, 343 aa, unidentified
MDHFAGLDVSVKETSVCIVDDTGRIVREVKVASEPEALLQVLRNPIYRFKRIGLEAGPLSQWLFSALAEAGLPVICVETRHMRAVLQAQINKTDRNDARGMAQMMRAGLYRPVHVKTLRSQKLRMLLTHRKLLQSKAIAIDNDLRGTLRNFGLKVGIVGTVKFEARVRELVENLPDLAVLVQPLLMVRRVLREQFAILHRRLLAVVRNDEVCRRLMTVPGVGPVVALTYRATVDVPARFRNSKAVGAVFGLTPSRYQSGEINRTGAISRCGDEMMRVMLYEAAHIMLVRLAKWSWLKAWAVKIARHRGMKKAIVALARRLAVIMHRIWVDGTEFRWTHEVTVT

SEQ ID NO: 489422 - protein, 343 aa, unidentified
MQIRSVGIDLGKTTFHLVALSAAGKVLLRKKFTQKQLLTFTANLQTSLIGLEACSGAHFLGRALREQGHDVKLIPAQFVKPFVKSNKNDFLDAEAIAEAVDRQNMRFVPIKTDDQLDLQAIHRVRDRLIARRTSVINQLRAFLLERGMTFAKTPAKLKLAMPEILENADANLTPRMRNLVGLLWSEWKDLEQQIVAMNMEVEQIASSEPACQRLRQIPGIGPLVATAIVAAIGNGAAFHKGREFASWLGLVPRQHSTGGKARLFGISKRGNRYLRKILVHGARSAVLRVKRERAPFGAWLDALQTRAPLNVVVTAMANKLARIAWAVLSSGQEYRPAASVVAN

SEQ ID NO: 489423 - protein, 455 aa, unidentified
MARTKTKNGSDLTTIKPGAAAIDIGAKMHMAAVNPDHTDVAIRAFGTFTHDLHDLAEWFTACGVTSVAMESTGIYWIPAYEILEQHGFEVILVNARYAKNVPGRKTDVSDAAWLRQLHSYGLLRGSFRPDAEIATLRAYLRQRERLVEYAAAHIQHMQKALMEMNLQLHHVVSDITGATGMRIIRAIVAGERDPDVLAELRDVRCHSSTATIRAALVGNDRDEHIFALTQSLELYDFYRAKMFDCDRRLEAVLDGLATCKNHDVRRLPRARTKTKQVNTPSFDVRAALYGVLGVDLTQIHGLGPSLALKLIGECGTDLRAWPSAKHFTSWLCLAPGNKISGGKVLSSRTRRSSSRAAALLRLAATTIGRTDTALGAFYRRLAARAGKAKAVTATARKIAVLFYNTLRHGMTYKDPGASHYEEKYRSRVLGNLQRRAKALGFILQEIPDQGELTVS

SEQ ID NO: 489424 - protein, 339 aa, unidentified
MKKNLFIGIDFSKSKFDVSIIERIDQTGCVQATFENEDQGYADFLKWVGKQSKIKRADWRFCGEHTGLYSRGLSNFLAKKGLFVWLENPLQIKRCSGIKRAKSDRLDSLVTAQYACRYIDKAIAYKPAEKEIEALQLLVSYRSRLVKNKVSIEVAANEMRRVIKRDTTARFVYESSMRDIERIKKQINGIEQKMHDTIMNSSLKENYLLINSIKGVGMQTAAMLIIHTNNFAGFENARQIASYCGCAPFPNQSGTVDKGNHISRMANKELKVLLSQCAISAIRHNKEIAKYAQRKMADGKPKRVIINNVRNKLIQRIFAVVRYKIPYREDYLNPFEQCA

SEQ ID NO: 489425 - protein, 367 aa, unidentified
MKKVSTAAVKGTKNFSQPKLTIGLDLGDRSSWYCLLDEVGEVLQEQKLSTTPKAMREAFGAMPRCRIALETGTHSPWVSRLLSELGHEVIVAHARSVRLIGESRKKDDRLDARTLARLVRIDPQLLCPVKHRSAKAQADLTVIRARAGLVRARTGLVNTARGLAKSYGERLRGCNVRNMNPEKAEGLSPELQRALQPLLAGIESLSERIRECNEGIEKLAQESYPQVALLKQIKGVGTLIALTYMLTLEDPHRFRKSRDVGCYVGLQPGRRNSGQSEPQMHISKEGDPYLRTLLVQGAHHILGPFGADSDLRRWGLKLAERGGKNGKKRAVIATARKLAVLLHRLWVSGEVYEPLHNSHQTAMPTAA

SEQ ID NO: 489426 - protein, 347 aa, unidentified
MRFYTQEHRYYCGIDLHARSMYLCILDNRGEVVLHRDLRAEPGRFIEALKPYRDNIVVCAECMFSWYWLADLCAAENIPFVLGHALYMKAIHGGKAKNDKIDSRKIAKLLRGGMIPMAYVYPAKIRSTRDLLRRRNYLMRRRTDLLAHIQNTNSQYNLPEFGKKIARKIHQQGLAEQFGDPHVQRSIETDLELINHLSRLLTNLERYILRIARYHDPQALYLLQSIHGVGKIISLVILYEIGDINRFPRVQDFASYSRLVACARESAGKRYGSSGRKIGNMHLKWAFSEAAVLFLKDNPAGMKYKKRLERKHGKAKSLSILAHRLGRAVYYILMREKAFDMKKFLGM

SEQ ID NO: 489427 - protein, 374 aa, unidentified
MEEEKNTRGYERYVALDIHKEYVLAGGQTACQEWVMQPRRIGIEKFREWASKNLREGDAVVLETTTNVWDIYDIVAPRVSRTVVAHAGAVRQIAEARVKTDKEDVKRLIRLLIADIVPAVWVPPVEVRELRGMISYRNRLVKTATMVRNRLQSLIHRHNLILPKGALTDPAWWEAQKMSALEKIQIRQELGMLEEIERHKAEVDAELGRQCLGEAWGKQAVRLLQLPGFGVVMTMIVLSAIGDIHRFESAKKLVGYSGLGAGVHDSGKEHIEKRITKSGRKELRWALVEAAWQAIRISPYWKEQYEKYLRRMRLPNQAIVVIARKLLVAVWQVLTKEETDIHASEEDLAYKTCPELVEGCWSWRGTWERMSAWA

SEQ ID NO: 489428 - protein, 466 aa, unidentified
MARKRKNIKSKGGRPHPQSLKTIQPNAAGIDLGSREHWVAGPPLEDAKPNVERFGTTTPELLRLADWLKEQGVRTVAMESTGVYWIPLFEILDNRGFEVLLANARQISHVPGRKTDMLDCQWLQLLHACGLLRGSFRPADDICRLRSLIRERNTMVERRADWVRRMQKCLDQMNVCVHHAVSDITGVTGMAIIRAIVDGERDPHALARLRNARCRKSEEQIAEELTGNWRPEHLFNLRQALKMYDQLCTVIADYDSEVLTYIAMLQPPDTSDKFAPPSASKSKANNISKRGQEPMRQGLYRLSGFDLTTIDGIGVDTATVIISELGLDYTVFPNENHFVSYLRLAPNLSISAGKKVPNKSKASTCTRIATALRMAALTLRNSKTALGAFYRRVSWRKGASVAVFATARKLAQYIYRLVCYGQAYVDTGAQAYEARFNHRRLSFYTKALNDMGYKVEPLTTNGATLT

SEQ ID NO: 489429 - protein, 365 aa, unidentified
MLHRTSIGLDVHARSIAAAAFIPETGEVLQKSFGYDADAVVSWAKALPQPAWCVYESGPTGFDLKRKLDESGLECLVGAVSKMIRPSGDRVKTDKRDAVFLARILAVGNVVECRMPDAATEAARDLARIRADCREDLMRARNRLSKFLLRKGIVYEGGKSAWTRAHSAWLSSISFGDPCEQLVFQECCEDVRALTLKRDRLDGAIAKRAGQNDISATVKALECLRGISTVTAFSLVAEIGDFSRFPDAKSFMSFLGLVPSESSTGGHVSRGKITRTGNKHARTLLVEAAWHHARTLKPLSRASLEGAPGVPAAIAEEAARANMRLHGRWIHLRSRGKSGAVANAAIARELAGFVWSIGRMAQAGS

SEQ ID NO: 489430 - protein, 339 aa, unidentified
MDTSKHVFQLHGVNAAEQPVLRKKLRRVEMIAFFEKLPATTVAIEACGSSHHWARLLGTFGHEVKLIAPQLSKPYVKRGKNDAADAEALCEAMSRPTMRFVPVKTSEQQASLMLIGMRERLVRNRTQLANAIRGYAAEFGLTAAKGMCKVEPLLDRVTIDPGIPALASELFASHAAEYRQLSEQLDDIDAKLIKWHRGNECSRRLAQIPGVGPIGACLLMMKTPAPELFASGRQFSAWMGLTPKDHSTAGKSRPGIITRAGDETLRTTLVVGATALLQHVRTGRGKNATPWLLELLKRKPPKLVAVALANKIARIAWKMMMTGEAYQRSAALPPQECVA

SEQ ID NO: 489431 - protein, 406 aa, unidentified
MKQIVSVGIDVSKGKSTVCAMIHPNTIIKESFEVLHTVEEMSMLADYIGSLDGEIRIVMESTGHYHLPVAQFLYQKGFFVCVENAYIIRQFSRIMLHGAKTDPLDAKKLAKYGLAYWSELKPYKFHPSCYTELSLLSKQYQTYIKLLIAAKQNVIHLMDEMLPGFKEALDTASSVQFSKVKYVDFAKEFYHVDMIKSMGKEIFRENYKQWCKEKGYRFQSEKADELFHLAEDGIPTLPTEFPSTRLCMEAATEQVSQLGYALEQILSQMQNLAKTLPEYQTIRQMGGMGEKLCVRFIADIGDVRRFHNGKALVAYAGIDAPPYQSGQYTGTKRRISKRGNSALRKTGYEVMKSLKSHPPKTDTCVYDFIIKKENEGKSKKQAKIAGLNKFLQIYYARVMEIYKNIV

SEQ ID NO: 489432 - protein, 414 aa, unidentified
MERVHERCAALDVHKAQVTACVHVPDQRGVRSELCAEFSTMTADLLGLRDWLLGLGITHVAMEATGVYWKPVYYLLEDDFELLLVNAQHVKNVPGRKTDVQDAQWLCQLLEHGLLRSSFVPPKPIRELRDLTRYRKSLVWERAREANRLQKVLEDANIKLACIASRPLGASGKAMLRELCEGNNDPAALADLAKGKLRAKLPALRQALEGRFREHHALLVSHLLAHIEYLDETIGSLSLEVEERMRPFERQRELLCTIPGVAERTAEVIIAELGPDMDRFPSHRHAASWAAICPGHDESAGKRRSGKTRKGDSWLRTALIEAAQSAAGRTKDTYLHSQYLRVRRRRGHKKAIVAVAHSILVAAYYILRDEVPYQELGGDYFVRREDQERLTQRLVRQLERLGQSVTLKPALEAR

SEQ ID NO: 489433 - protein, 428 aa, unidentified
MDHWFALDKVLALGVDPHRESLDVIAIRFPEEIMLDETFDNCRTGHHALWSQANALAAELDLALVIGLEDGSNYGYTLGRYLTDQGCPVKEVNPRMTNRQRDFYGQDKTNRLDALATAAIVLRVYHQLPDITPIEEALEATRELSRYREQLVKEQTANINRLHRNLANQYPAYKTFFSKINGVTALHFWATYPTPAHLQNITPDELADFFYDKSNHRLGKDASRKKAEQIFQLLDDSPPQALPLLADAQATVISDLAQRLLQLRHSIAALVAKLGDTLPATGQKLDTFKGISSALAGVLVGETQDTARFNHDKDRFASYNGTAPASRGTGKHIRQVENRWCNRRLKSALHRVAISARRCEPLSAQYFQACLDRGLSPGQAHKRLMRRLSDVIFAMMRDKTPYDPEIHRRKQALHKTKGKSVAPAVAGS

SEQ ID NO: 489434 - protein, 357 aa, unidentified
MISKKISVKSKKNNSCSLTENESYDHYIALDWSEKNMAIARLGKKDTEPKIIDVPSDLKELKLYLSKLQGKKILTIEETTTSQWLYVELYEYADRIFICDPYRNRLLTDGPKTDRIDAGKLCKLLKNGMMKEVYHSTNQMYELRKLVSYYDDEVRAGVRLLNQKSALYRAENKSWKKKQELEASRVNKFIVAQLDEKIESYREKKKKYEEEFEKISKKSKVIRSLKSIPGLGPISSVTILSIVIDGRRFKSSNHYLSYCGLVKHEKQSGGRSYGRRSPRYSRRLKAVYVSAAVRVASTENPLRQYYEYLLNEKKLPVYNAKNALARYIAKISLGIIKSGEKYKPYKWRESKKGKEAA

SEQ ID NO: 489435 - protein, 458 aa, unidentified
MGRNKSRNKDRGTISVVHPNAAAIDVGATMHTAAVNADRAPEPVRSFGTFTTDLHRLIDWFAECGVDTVVMESTSVYWIPIFELLDARGFAVFLVNARDAKHVPGRKTDVSDAQWLQRLHSFGLLRASFRPKGQIAELRAYLRQRERLLEYGASHIQHMQKALTEMNVQLHHVVTDITGVTGLRIIRAILAGERDPAVLAGMRDRRCHATVETIEKALAGNYRVEHLFALEQALALYDTYQQKAFACDARIEAVLKELSVHRGRKEGQLPAARQNRSSQQNSLLFDVRAALFALLGKDLTQINGLGPYLALKLIAECGDDLSAWPSAKHFTSWLCLAPSNKISGGKVLSARTRRSGSRAAALLRLAARTVGRTDTALGAFYRRLAARIGKAKAVTATARKIAVLFYNAVQHGMNYVDPGASSYETRYRARVIANLHRRAKAFGFVLQPVDPPPGVAVS

SEQ ID NO: 489436 - protein, 387 aa, unidentified
MTPTSGSLSHPITLDYENTLVLAIELSKASWVLASQVPGLPRIKAKQTVEPRTEALLAAIDGYRARSRAAGRTIERVVAIYEAGWSGFWLARWLVRHGVETHVVQPSSVPVDRRARRAKSDGIDAELLLRTLLAWFRGEPRVCSMVPIPDEADEDERRRVREREDLVAERVSLVNRIGAVLATLGVRDYNPLRRDRRARLEALRTALGDPLPPHARARILRMLDRLELVCAQIAELERMRDAVLEEEAPDKAEGMIQQLAGLRGIGVQSATVLVREAFVREFANGKTLGSYAGLTPTPFSSGTTEREQGIGKAGNRRLRTVMIELAWLWQRYQPGSAQVSWFRERTAGTGRRMRKVMVVAMARRLLIALWRFATQGVVPEGAVKNPA

SEQ ID NO: 489437 - protein, 375 aa, unidentified
MCERAVLTNRPSLDLSPFVLEGHRACRGAWDRSGVFLNPNSCKGFEPVPSKEGSWMMAQNDLVVAGIDVAKDKVDVCIRPLQLQRTFASTAEGRRELASWLRRKKVGKAVMEASGGYEREWAKALRDAKIEVRIVDPKRVRDFAKSAGRLAKNDTIDAEMIAWFAETFDEAPGQVHDAAREELAQIVNARLGLLDLQTKLQNRDEHAGPEPVQKMHARLLKKIAAEVAKLEAVIAAMIKATPRFAELAEIIESVPGLAETTSATLIAKMPELGQVNNKIGAALLGAAPYDDDSGRRRGERHIKGGRRKVRNLFYMACLGAATQHNPVLKAFYDRLIAKGKKPKVALVACMRKLIVILNIMIARRQKWNPGLYALG

SEQ ID NO: 489438 - protein, 345 aa, unidentified
MERDMNLFVGLDVSQKKTAVCVVDASGAKVCQASIETSPQAIYQFLVEKGFTHSKIGMETGPLAVWLYHGLQAFGLQIDCIHARHVHAALTMQLNKTDRNDALGIARLVQSGWYRPTHVKSLQCHQLRLVLTAREKLVQIRVTLINQIRGLLKTFGVVLPAGRNSVFERSVVESSPSIAEVKPTVLMLMQTLKDIGTQVRALDKKLLSFTRTDVVCKLLTSIPGVGTLTAISFKTAIDDPARFGSVSDAGAFLGLTPKKYQSGEVDRNAGISKHGCRQTRSLLYEAATCLLTRYGKDTTLAAWGKRLWERLGFKKAVVALARKLSAVMLSMWKSGELYREARAIS

SEQ ID NO: 489439 - protein, 345 aa, unidentified
MKITTIGIDLAKAVFGVHGVDERGKAVLRKPLKRKEVVSFFANLEPCLIGMEACGSAHYWARKLTQLGHTVRLMAPQFVKPYVKTNKSDRNDAEAICEAVARPNMRFVSVKTAEQQAVLALHRGRQGFVKARTAQANRIRGLLAEFGIVIPQGIGHIAKRLPEILEDAENALPGMMRELLERLGENLKQMDKQVGEMERQIKLWHRENEASRKLEAIDGFGPITASAFVATVGDARSFKNARQVSAWLGMVPRHEGTGGKVSLGRISKRGEAYLRTLLIHGARSVIAQIERKPNQADEWLKKLLARRNKNVAAVALAAKNARIAWALLAHERSYEREYVATRPAA

SEQ ID NO: 489440 - protein, 402 aa, unidentified
MIKCIAEQAKRRAASALETSAGWNRYVAFIGLDVHKETIAVAVALPGRDEPQYRGEIKHERKALKQWLERLNAEFGGALLLFCYEAGPCGYGLYRQLTGAGHDCQVVAPSLIPKKPGERIKTDQRDALKLARLLRTGDLTAVWVPDAEQEAMRDLTRARDDMKSQERKARQQLNAFVLRHGHHWPRGKARWTKIHFNWLESIRFEQPWLQIVLQEYIDAVKAATQRVDDLTDQLMRALPGWSLAPVVDALVALRGIDKLAATVLLAELGDISRFASPKQLMAYLGLVPSEHSSGSRRRQGAITLTGNSHARRMLVECAWSYRFPARQTMHLKRKAKEASEVAKAIAWRAQKRLCGRYRQLTQAGKNIKLVCVAIARELVGFLWDIVRHEMPRLEVQVAPAGG

SEQ ID NO: 489441 - protein, 359 aa, unidentified
METPIKQTAGIDCGMQELVVSFGILTGDGTFICKLTKVFANTAKGFQQLLQWINEVSSKETAVLYAMEATGVYYEKLAYYLVANDCHVSIVLPNKINAFAKTCTSKKQDDQQASKVLCEFGCVKHVDEWQPPHPLFAALKQLTREKHQLQQELVIIKNQLHAEQTKAITASASIKRMKARCRLIEKQIAEVEKEIIDTLNDDAAIKEKINKICTIPGVGLSTAVTVIAETNGFNLIRNARQLVSYAGLDVVQKQSGISVKGRAHISKKGNPHLRHCLHLPSFVAVKYNLPMQQLHHRIVEKQAIKMKAYVAVQRKMLMLIYTLWKKNEAYNPSIKFNEAYNPSIKFLEQPVEAALTELD

SEQ ID NO: 489442 - protein, 370 aa, unidentified
MLNTTTFVGLDVHARSIKAVALDAMTGEVRSATFAYDAAAVAEWVRSLDPSAKCVYESGVTGFDLQKRLASMGIDCVVGAVSKMIKPPADRKRKNDRNDAEFLARMLSVGNVVEVWVPDDGCEAARDLSRALDDAREDLKRCKQRLSKFLLRHGYAFSETTPTGRRKGNWTAAHWTWIRSISFPEKADGDALAYYVDAVRQAMEDKARLERLVEAEASKPRWKRRIDSIRCLKGIDVTSAADLVFEAGEFSRFKSARSFAAWLGLTPSEHSSGESVRQGGITKAGNKHLRRVLVESAWHYLGCSPHSKDLAKGQVPDPAARRHAAKGVRRLVERRRAMLERGVHKNKANVATARELACWCWAVGRMVENG

SEQ ID NO: 489443 - protein, 348 aa, unidentified
MSQELDTAIAVIGIDIGKNSFHLVGHDKRGAIVLRQKWSRGQVETRLANLPPCLIGMEACVGAHHLSRKLQLLGHDARLMPAKYVRPYSKGQKNDFRDAEAIAEAVQRPTMRFVATKTAEQLDLQALHRVRERLVSQRTGIINQIRAFLLERGIAVRQGLRFLRAGLPDILATRGDVLSPRMLRVVEDLAEDWRRLDARIECLSSEIVALARQDQACVRLMTVPGIGPLISSAMVAAIGAGEVFSKGRDFGAWLGLVPKQISTGDRTILGKISRRGNRYLRVLFVQAAWVVLIKPKSWERHGLKPWIEAAQKRLHHNVLAIALANKLARIAWAVLNKERAFETLSQPV

SEQ ID NO: 489444 - protein, 350 aa, unidentified
MEHYKIDSTFYCGIDLHARSMYACVMNKEGDILLHKNMRTESREIKRKLAPFLPDIAVGVESTYNYYWLADACRMHKIPFYLGHAYYMKTIHGGKKKNDKLDSRKIADLMRCNHLPKAYSYPRQRRATRDLLRRRHRYGRIRSEAYRHIQCTFHQHEKYISPSAVRDKSSRHRLLDVFDDPVLRMMIEADLETIYFLDPKLKQLENAIRQQARTYDRDLLTILQSIPGLGDILSLITLYEIDDINRFPSAQKFCSYARLVRGSYESAGKYLGHGKAKIGNPWLKYAIADIIIHAERTSPSIAQFYQKLQKQHGVKRAKSIISHKFGIAIFYMLKNKQVFDEKRFVQSAMK

SEQ ID NO: 489445 - protein, 488 aa, unidentified
MSKSKGTSTSKQDAQGRRRPRGRAKASLRMEKMTPVHHQAAGIDVGAAEHWVAVPAECDQEPVRRFGAFSCDLRAIADWLKACGVTTVAMESTGVYWIALFELLETRGFDVKLVDARAVHHVPGRKSDALDCQWIQQLHTYGLLSGAFRPADDVCKLRVYLRQRSMLVEHAAQHVQHMQKALTQMNLKLQHVVSDITGVTGMAIITAIVQGEHDPSILAKHRHPRCVRSEQDIAKALDGSYREEHLFALRQAFELYRTYRQQIQVCEDQIDTCMAKMDKKLQGAPTDDADYRRKRKGRIQKNSVRFDARGHLYRITGVDLTRIDGIDATTALKLIAEIGTDMTRWPSVKHFSSWLALCPGLKKSGGRMISSRTKPSANRAAAALRMAAQTLLRSKSALGAYYRRMRTRLGAPKAVTAAAHKLARLVYSMLRYGQEYVDSGEKHYEQQYRARVVRNLTRRARDLGLKVIPINDLGPAINAPTTAAEDCG

SEQ ID NO: 489446 - protein, 335 aa, unidentified
MKNYAYYIGVDVSKKTLDITVLKGKEKLFHVRVSNDEKGIKALKKELKNNRISANKSLFCLENTGFHGHKLSCWAVKNAYHVWLENAIAIKRSLGLVRGKNDKVDSYRIALYAFRFEDKCTLWQPKRKSICLLQQLNATRKRLMLSLKILKVPLKENALIFSKAERKITEKCCTKVLKELEKSIKEVEKQIAKIIQEDTKLSRMNKVITSVNGVGRQIAAAFIVATNEFKDIQKAKKLACYVGVVPFENTSGTSIRGKNRVSHLANKSLKSLLHMGALSAIKNSDEMREYYNRKVAEGKPKMVVINAIRNKLVSRIFSCVKHDRMYEKNYTRKVA

SEQ ID NO: 489447 - protein, 405 aa, unidentified
MDIKPIHRCSVGIDVHLNKLVVCILRELDNGEIDIQIREFGGFKRDRREMSEWIASFQPEVVIMESTGIYWKSPYAALEKAGIKATLVNARHVAKVEGRKTDICDAQWLAMLGRCGLLRGSFIPPEELRHLRQLTRYHDRLTKTLIAEKNRLLKVLADAGIRLSALVSDPHGVACRNMIDVLLNGGKPEQAIRFVGRLKADKDEILASLDGELTQHHLFLARKIQNHIDDIEKSLAECEIYVFNELSDYQSLFDLLLTIPGMDRLAIAKLIVEIGVDMSCFGNTGRLAAWTGLCPGNHESAGKRKNAKTAPANPYVRRLLIEVAHAAVKTQCYFREFHQSLVMRRGRKKAIVATAHKIIKVVYILLTRQTTYKDKTIDFEQFRTKRNAPRWIKALRKHGMLPAVP

SEQ ID NO: 489448 - protein, 387 aa, unidentified
MFYVGIDIAKNTHWASIMSSDGEIIADPFSFSNDSAGFQLLLSKLESLDKEKILIGLESTAHYGESLISFLFYLDFKIGIINPIQTANLRRSNIRKTKNDKVDTFIIIKALTLGNYAPVTSRDINNLKLKGLCRSRRNLVTLRSRAKIQLVSFVDQIFPELSSFFKGNLHLNVSYQLLKDYSSPSEIANLNLTKLSNILKINSHGKYKKEDAIKLRELAKNSVGISNPSLSLQIKHAIIQIELFDSQIQEVEKLYKEIVDELDTTITSIPGMSYNQAAVILGCIGDINRFNSSSQLLAYAGLDPSVIQSGNFSARSTRMSKRGSGMLRYALIYSAHNVAKNNVTFKNYYDLKRSQGKSHYCALGHVAHKLVRIIFKMLKDNVSFNLA

SEQ ID NO: 489449 - protein, 381 aa, unidentified
METTRANQAYCAVAVLYMALELSAKKWVVLFSDGTRRQRQVVVSAGHRQALLAQMALAKTKLGLAANAPVVSCYEAGRDGFWLHRWLLSVGVDTRVVDAASIEVPQRAKRVKTDRVDVAKLMQLLLRWHGGDGRDWHEVRVPTVAQEDQRRLQRERHRLLKERTSASNRIGSLLVTQGLALALNRHFPEALGELRCWDGSALPAQLRAELQRQWERYELAGRHLAALQAQQAQRLSHAAADDTMAQQVKQLMRLGSLGVQSAWTLSGEVFAWREIKNRWQLGALAGLTPTPYASGDSQREQGISKAGIAGVRTAMIELSWLWLRYQPDSALSGWFQRRFGDTGSKRSRRIGIVALARRLLVALWRYLHDGVIPAGAVLKSG

SEQ ID NO: 489450 - protein, 364 aa, unidentified
MSTLHYVGMDVHKETIDVSMYKENDSRPYCEKRIPNRDTSIKKLFKGIMKTGSVVACYEAGCMGFTLQRTLEGMGVTAVIAAPGKMPRRSSDRVKTDRRDARTLATYLRNGDIEAIRVPTEEEEVVRDYLRGREDVRLDQARTKQRLQKFLLRHGYVYESVRYWTGPHEKWLRSLEFKNPLMKETFDEYHVGIQELGGKLRMMDKRIDEIALSEPYAAKVKKLRCFKGIDFLTALTLVSEVGDFRRFKSAESFMAFLGLVPSEYSSGGKRRQGGITKAGNTHVRRFLIESSWHYRYSASPSKQLMERRYGQPTDVIAYADRAMKRLQHKFFKLILRGKTSQVAVTAVARELAGFVWGMMVGCTA

SEQ ID NO: 489451 - protein, 318 aa, unidentified
MEAQVSFSQVVSRGCGIDVHKKLVVATIGGEGIKSETREFGTFTRSLAELKDWLLENGITHVAMESTGVYWKPVYHVLEPTSMKIWIVNARHIKYVPGHKTDKQDSGWICKLLLAGLLKPSFVPPRQQRELRDLTRYRTKLVQRVASEKNRIIRVLEDCNVKLSSVLSNTQGVVGTKLIDKLCEGKAITMSDIDQVYHRKLEASKEELYEACQGILGSHHIYLLQTIRQNILSTEFAIDSLDGRIKEMLSEYEHVQEKLKAIPGLNTKTVEDLVAEIGLDMNAFPSEKHLAAWAGMCPGNNESAGKKKADAPATATNR

SEQ ID NO: 489452 - protein, 416 aa, unidentified
MKLWTDLTHYAGFDWAKDHHSVVIVDREGKIVADFEFEHTGEGWKSFVEKTSTFPQLAIAIETSQGAVVDQLLQRDYTVYPVHPVAAHSYRQRKAPSGTKTDHLDGWGLADALRCDGQGWKTLRPLDPLSQQLRLLCRDEVVLIQQRTALVNQLQQALLEYYPAALEAFDDWTKPFTWEFVLAFPRPQDLVEAGKRRWEKFLHSHKLWRPDTVEKRLEVFSQASQFAGSAAVVQAKSQLAVSLCKLLVTLGKQLALYRKQIEALFQEHPDHDLFGKLPGAKDVLAPRLLGMIGGDPDRYGSHQVLQAMGGTAPVSFQSGKIYKVRVRWSCDKFMRHTVHLWADSFRKASAWGQTYYQKKRDEGMSHSCALRCLGQRLLKIVYALLKTRTPYDAELHARNQQKHGSWVLTLANKCTA

SEQ ID NO: 489453 - protein, 343 aa, unidentified
MEHYVGLDVSLKLTAICIVDQTGRIEREGVVASNPEAIAAFIKSHAPHVTRIGLETGATSTWLWTELNKLGLPVICIDARHAKAALKMQINKSDRNDAVGIARIMQCGWYKEVRVKDLDSHAIKALLVSRALLVKIKRDLENQIRGLLKNLGLVIGRAKMNVFAVRAAELTEDRPELAGAVEPLLKAREAIERQIADLDRKVLRLARNDAQVRRFMTAPGVGAITALCFLATIDDPTRFKRSRSVGAYVGLTTRRYASGEVDWTGRISKCGDKLLRSYLYEAANVLLTRVAKWSALKAWGIRLAKRSGLRKAKVAVARKLAVILHRMWIDGTEFNWSTKKATA

SEQ ID NO: 489454 - protein, 413 aa, unidentified
MEVIYQRCAGLDVGKDEVVACTRVPAGASGGGRRQEVRTYKTFSSGLAALADWLQDQGVTQVVMEATGQYWKPVWYVLEERGVELLLVNARHVKILPGRKTDVGDAAWLCELLEHGLLRGSFVPPPAIRELRDLTRYRKRLIQAHTAEAQRIHKTLEDASIRLGSVASDVLGASGRAMLRALLAGERDPGVLAELARGRLRSKLPELREALAGRFDAHHALLVRLALDHVEQLERSITTLDQEVDRVIAPFARARDRLDTITGVGKRAAECIIAEIGIDMQVFPTAAHLASWAALCPGNNVTGGKRRSGKTRKGNVWLGEILVECAWAAARSRDTYLAAQFWRLARRIGKKKAAVAVGHSILVIAWHLLDGDCDYAELGGDFFVRRDADRARQRAIAQLQALGYHVTLQPTAA

SEQ ID NO: 489455 - protein, 409 aa, unidentified
MNPLYVGIDVSSRNNVVYLMKPDGSKIKNFSVPNSKDGSQKLVKEILSALTSFALTDVIIGLEATSVYGDNLVCFLREDGSLVPYNRKIHVLNPKQVNKFKESYNDLPKNDYVDSFVIADCLRFGRINKEVYLDDYRYKALQNLTRARFFAVQNLTREKQRFMNVLFKKYSSLAQEKVFSNTFSTTALAVYEEFDSADALAYMDLHELTAFLQEKGKNHFSNPEEVAKAIQKAARSSYRLPKTVNDSVNQVLSISISSIKALEAQIKEFDKAIAAQMELIPNTLTSIKGIGPVYSAGIIAEIGDINRFPNQAKLAKYAGLAWRQHQSGDFEAQNTRLIRTGNRFLKYYLGEAAMSLVRCDAEYSRFYHLKYKEVNKYQHKRALALTARKLVRLVYRLLKDNRLYIAPEA

SEQ ID NO: 489456 - protein, 423 aa, unidentified
MDKTIPICCGVDVHKKFLVATILTGDYLIPQCKQKHFGTSFRNLLAFKQWLLDNNCKDVCMESTGKYWVPVWNVLEGVVNVVVANPKWVSAVKGNKDDKKDSKWIGNLFRMGLVPSSYIPGKDIRVLREFTRYRSKLVSMRASEKNRYQNAFTVCNLTLDAVVSDMFGKSATAIENYLLDTDVVDPEFCVSLLHWKLKPKSAEIIEAVEGFNMTLEQKERVRIVQGHFNDIDKRISQIDEIIGRLTAEYEGTISLLCTIPGIDRRLAITIISEIGTDMSEFGSSRRLCSWAGLVPGNNQSAGKKKSVKITRAGIYLKPALVEAAHAAVKATEKSPYFRIKFEKIMKRRGKKRAIIAIARMILTAIYAMVSTGEVFNPSDLLKYDMPEELQKKRTLAEAKDAVKLLVSLGLVAEGSISLEALAS

SEQ ID NO: 489457 - protein, 339 aa, unidentified
MKLYGGIDLHSNNSYIALMDERGTVVQRSRVGNDMGLVLRSLAPYREQIDSLVVESTYNWYWLVDGLKAAGYAVKLANPSAMQQYQRLKYSDDRSDAQWLAEMLRLGIVPTGYIYPQAQRPLRDLLRQRSFLVRQGTGQLLHTGNILCRNQGRKSSRQQIRQMTVAEAQQLFPDRERTLAVESSLRVIEVLEQQIASIEKQVLHRIKPEAGFQNLQTVYGIGPILAMTIWLETGDIGRFHQVGDYASYCRCVASTRLSNAKKKGENNSHNGNPYLAWAYVEAATYAARFYRQAARFVERKTAQVNRTLAIKALAHKLARACYYVLRDGVVFEPTRLLGS

SEQ ID NO: 489458 - protein, 344 aa, unidentified
MTITTVGLDLAKNIFQVHAADSAGCVVVRKALRRSQVLPFFAKLTPCVVGIEACGTSHYWGRQLSELGHDVRLMSPAYVKPYVKRGKTDAGDAEAICEAVTRPTMRFVPIKSPDQQAALALHRARDLLVRQRTQLVNMVRGLLGEFGITINRGLHHALELVTRIAGGTTVEVPAVAARVVAGLAGQIIELQARLTALERELLTWFRQNEVARRLETIPGIGVVVATAFAATVTDPQRFRSGRQFAAWLGLTPLANSSGGKERMGRISKMGDPYLRRLMVIGATSRIRIARREPERERPLAELLQRKPARLATVALANRTARIVWALMARGDVYRSPASATSASA

SEQ ID NO: 489459 - protein, 543 aa, unidentified
MVTASARKRWRSIPFRRVHPVSPEGRTGTSDYLNKGSQLQRPEMKTNPSESKVKAVTHDQAPVPTRRRSRGEKAPPSRKAVLDGLEQINLQAAGIDVGSKENFVCVPPRSVKAGESPVRSFGVFTQEQDALVEWLKACQVRTVAMEATGIYWMSLFDKIEAAGMEVILVDPHSVRQVPGRKSDVMDCQWLQQLHTYGLLRGAFRPEATVRRLRVLCRHRGDLVCEGSSHLQQAQKALVQMNLQLHLVVSDINGETGLRIIDGILAGQRDPSALAKLRDPRIKKSTVPQMEAALTGHYTEEHLFALRQNIEAWRFFQTQLADCDLQIEAALKAMASAEKAGAPPVPAKPVPAAVPGSEGAKKKRSRPLHGNNALTLDFSEQMRRICGVDLMKVCGLNLLSVLMIVAEIGVDMSRWRSAKAFSSWLGLCPGTKISGGKTLSRRTRHVVNRASILLRLAALAAGQTDTWLGRFYRRKRAHLGAPKAITATAHKLACVIYHMLKYKEEFLPLDVAIYDIKAQEHRMRYLRKQAAELGFELVERKAVA

SEQ ID NO: 489460 - protein, 326 aa, unidentified
MEHELHYIGIDTAKEKLDVDVLRPDGRHRTKKFANTTKGHDELVSWLKGHKIDHAHICIEATGTYMEPVAECLYDAGYIVSVINPALGKAFAQSEELRNKTDTVDARMLAEFCRQKRPAAWEAPHPLERALRALVVRHQALTDMHTQELNRTETAREVQRPSIDAHLLWLEAELKRLEKQIKDLADDDPDMKHRRKLLESIPGIGEKTSAVLLAYIGLKDRFAHARQFAAFAGLTPRRYESGSSVRGASRLSKAGHVSLRRALYMPAMVATSKTEWGRAFRDRLAANGKKGKVILGAMMRKLAQVAYGVLKSGVPFDASRHNPVAA

SEQ ID NO: 489461 - protein, 331 aa, unidentified
MVYAGIDVHRKRSQVSLIDVDGRELLNRNVDNGSEAMLDILEDLEPGTPVAFEAAYGWGWLADLLEERELEAHLVHPSACKAIASARLKNDKVDARMLAHLLRTELLPEAWIAPKEVRDLRVLLRHRASLVRVRTSLKNRIHAVLADEGLKVEGEKLWSDEGQQWLAGVSVRGMHRLVIDDCCGMLDALAIPIGRLETDIRKQAKTDPRVEALCVLPGVGLITAMTLVSEIGDINRFPTARKLCAWAGLTPSVRNSDNKVCHGHITKAGPAAVRWVLTEAGYHARRFPPFNSTFEAMTKRRGKHIAGVALSRKLLARSFHILKSLEAAKTQ

SEQ ID NO: 489462 - protein, 389 aa, unidentified
MYLVGIDISKYKHDCFIATETGCVIQKNLSFLNSKEGFNQLKKLLQSLDSSQVMRIGLEATGHYGFNLKMFLEKNGFSFMEFNPLLTHKFSEAQSLRKTKTDPLDAKSIAMLLLSVEYKTYPPQSYHMFFLKSLSRLRSSLVKQRSKHLVQLTNTLDYLFPEFKPFFHYKFSGTALFLLEKFSSPLKMSRMNLAHYESLRTLSRGHFSYASFIQLKALAQNTVGSSDSILLIELSSILHLFKSVNLEIKNIELQIQLLIADIPSPILSIPGVGVISAASILSEFGYIPRFDSPAQMLSFAGMDPAIYQSGTVSKNGRMVKRGSGYLRATLFKVAEYSLIWNPIFYDYYKKKRSEGKSHLVALSHLARKLVRLIFTLETKQIKFDLALLR

SEQ ID NO: 489463 - protein, 447 aa, unidentified
MAKQASVLSLECIEPNAAGIDVGATEIYVAVPPGRGEQTVRRFQTFTQDLREMAEWVRRCGVTTVAMESTGVYWIPPFEVLEEAGLRVCLVNSKHVKHVPGRKSDVRDCQWLQYLHSVGLLHASYRPEAAICEIRALNRHRASLVELAAVHVQHIHKALTQMNLQIHHVLSDITGASGLAVVDAILAGQRNPAQLAALCHATVRSPRETVIKSLVGNYRAEHLFTLRQSLQGYRHYQTMLADCDHEIEQRMRQLKGKGGPGQRPLEAPAVVRKRRKNQFYFDMRAELYRVFGTDLTAVPGISSLTAHNLLAEIGPDLSRFPNVAAFASWLALCPGNNKSGGKVLSSKTRKTSSRASRALRVAAQSLHRSQSHLGSFYRRMRAKLGAPQAITATAHKLARILYHLLTTGASYDESVFASAEHKQAVRHENRLRKQARSLGFQLVPLTA

SEQ ID NO: 489464 - protein, 313 aa, unidentified
MDTSEINVGIDTSSKQLDIYVRPNGQFFSVSNDDAGIKEAVKSLQKLKPTRVLIESTGRLELAFVCAAHKAGLPIVICNPGHVRHFAKSAGRVAKTDKLDAMDIAHFGEAMKPRLSSIKPEKLRAISDLLVVRGQCLEMSTMQKNRLKRMPKSVQKPIQSILKAIKKELDMIDRQLDKLVDSVAEWRQKRDLLLSAKGVGKVLAYTLMSELPELGTLNRKQIAALVGIAPMNRDSGSFQGKRYIRGGRHRVRTVLFVSMMSAIQCHPKLKPMYQRMVAAGKPKKVALVACMRKQLTILNTMVKNHTYWDEKMA

SEQ ID NO: 489465 - protein, 430 aa, unidentified
MKSNTQNAKIKAITETTLVLGIDVGSETHYARAFDYRGIEYSKKPFKFSNDEAGFVTFKAWILDIKEKHGKDKVVPRMEPTGHYWFNLGKFLQDNEMKPVLVNPHHVKKSKELDDNNPTKNDRKDPKVIAGLVREGRYMISYLLEGVYADLRTASNMRFQLQAELTRIQNRISRWFNIYFPEYKTVYGQPDAKSGMLILKVAPLPEDIMTLGIDGVNQIWRDAKVRAVGKARAKTLIEAAEHSVGSKEGEISARMEIRMLLEDYESRNTRLQEVVALIEELVKKIPMAEKLLEIKGVGIKTVLGFLAEVGDISRFNNPKELQKLAGLALVENSSGKHKGETTISRRGRKRLRYLLFEVAMSLVSKNPEFRELHSYYTTRKLNPLKKMQSLMAVAAKLLRVFFAMLTKGVDYDPKKLVGDIKRPAVYLQVA

SEQ ID NO: 489466 - protein, 318 aa, unidentified
MDVHKESITACIMDKEGNVVRHHTFPYNKESIKAFLFGISNAEIEIAIEACGIWRGIYKVLKELGYKVKLANPNKTHNIACRKKTDKVDSRILADLLRTNYLPEVYIPDEEMLRLRDITRHKSNLTRLRVEIQAKIKGYLLRKGVKYGKIWNEKALSKLAEDDPDINNLINVYWSLKEEEKEVMRRIRKIAKNMREANLLMSMPGIGEFSSLMILAEIGDIRRFESPKQLISYAGLCPGIYQSGNTERNVRNNAVNKWLKWIIYECSGRATMLDSRFQEYYYKIKQRKGFKVARRAVARKMLTIIWYMLTNEETYRNN

SEQ ID NO: 489467 - protein, 323 aa, unidentified
MGIPTVSIDSTTIIVGLDVSKEYVDFFVLNRKGDPSGRRPRRLKDLTMLAAELAALEPQLVVMEATGGFETVVWAALEAAGLSVAVVNPKRVRDFARSLGLLAKTDRLDARVLARFGELLGPAPTPLPSREARAERELLRHLNALVAMRAQQRTRKWQLEGEGALASAERVIASLSEEIALLEQQVEHALRARPAECVRAARLRTAPGVGPKTSWALVAELPELGQLSGRQVAALAGLAPMARDSGRFRGRRRIAGGRARVRTALYMAARAAVRCDPHLAAFRARLLAAGKPKQVALIAVARKLLVALNAMIRDQRPWIPLPA

SEQ ID NO: 489468 - protein, 400 aa, unidentified
MNPVVGLDVAKGESQVQAFLDQSKPYGKSFSMKHIKEELEHFLEFLKEIEEVTGQMPMVILESTGHYHSPVIQYLEEQGILYILLNPIISYQAKKSSLRKVKTDAIDAYQLCVLYYKEDLEPHKIRGIQLLDLRNLSRQQEIVTNMYVEAKLQFHTILDQVFPEYRKVFGDLYSKVSLLMLKEYPTSEAVLTAGESRLAESVIEFCSSRSSEWAWEKAKKIMDSASRNPFQKSVYESHVINLRMYIELLFHYQGHLSDLEDRIVALANELEEYKIIQSIPGIGEKIAATIISEIGEIDRFNHPKKLVAFAGVDPSVHSSGKFTATINRMTKRGSSRLLHSLYLAVLCGIRSSRNKKLKAFYDKKKSEGKPAKVSIVACMNKLLHWIYALLKRKETFLDLA

SEQ ID NO: 489469 - protein, 331 aa, unidentified
MTTTSQNDTIQRENNENFFVGIDVAKDELVVHVLPTNQRLTVPNSSDGIKELITRFKEIKPKQIILEATGGLERELLTNIVAKGFNATAINPRQARDLAKGLGQLAKTDAVDARMLARFAQLQCLPSRPVPSREIQEMNDLVTRRQQLVQMRTMEANRLQQTNQKRIKTSIENHIADLNKQIDDIDYCIKKMIDDSQDWSEKDKILQSVPGVGPKTSQVLISALPELGELNRQEIAALVGVAPFCKDSGKKSDERHIKGGRADVRSALYMATFSAIKWNPTLKEFFDQLIARGKKFKVALVATMRKMITILNVMIQTKTCWGEHRVPSKNI

SEQ ID NO: 489470 - protein, 417 aa, unidentified
MQHAPTTLPDTPVNGVTGGVDWARDDHAVAVVDSAGRQVGRFSVAHSDAGLRELIAALISAGVSEVAIERPDGPVVDSLLAAGVSVVVISPNQLKNLRGRYGSAGNKDDRFDAYVLADTLRTDRARLRPLTPDNPATIALRVACRARKDLVEHRVGMANQLRAHLQRVFPGVVGLFAELDSPISLRFLARFDCQDRADWLSAKRLGAWLRSVGYCGRIDPEVLHTRLSAAPRGATGEHGVATAHITRALLAALSTVVEQIKILSEQISEQLDTHADAHIFTSLPRSGRVRAARLLAEIGDCRARFPTPEALFCLAGAAPSTRQSGKVKVVSFRWGADKQLRDAICDFAGDSRRANPWAANLYNKAIARGHDHPHAVRILARAWLYIIWHCWQDGVAYDPTRHKALQALLTEQQAAVA

SEQ ID NO: 489471 - protein, 343 aa, unidentified
MQIRSVGIDLGKTTFHLVALGDNGKVLLKKKFTQKQLIAFTANMQTCLIGMEACSGSHFLGRALREQGHDVKLIPAQFVKPFVKSNKNDFIDAEAIAEAVDRENMRFVPIKTDDQLDLQALHRVRDRLMARRTALINQIRAFLLVRGTVFAKSPIRLREALPEVLENVNENLTPRMRNLVAMLWSEWKDLELQIVQMNDEVERIASSDEACRRLRQIPGIGPLVATAIVASIGNGAAFRKGREFAAWLGLLPNQHSTGGKVRLYGISKRGNSYLRKILIHGARAVVLRSKRDRIAMGPWMTSLETRAPRNVLIVATAHKLARIAWAVLSTGQHYRAVPEAVTV

SEQ ID NO: 489472 - protein, 313 aa, unidentified
MYYIGIDVSKKALSVFDGKTSLEFENKEGLRPFYRYLKKHYKQVDNLVLIFEATGIYSDNLREFCAIHQIKVYILNPKQSHNFAKSLGVRSKTDKIDARIIWRYQSLIPQERIQIPLIDQEAKMLASYLTSYQFIQGQRVAVYNHLESVTNPPLRKLLKVELRRKQQLEDKLWGDIKAYISKHPGLAKDFKRLMSISGIGDKLAFSLLFLFRHYQGTNRAQITALVGLDPIYKESGSSVKGKIKISKNGNRYIRKVLYLPTLCAIKNNKKISLFYQRLIDNHKPKKVAVIAAMRKLLLVAHAVYENKTEYVPG

SEQ ID NO: 489473 - protein, 387 aa, unidentified
MAEVLGKLTAKLDAPTVSTRAQENRKGNTVSPNRDRLTVGVDLGDRWSQYCILGLEGETLGEGQLRTTREDVGEFFVGLTTARVVVEVGTHSAWVQDVITELGHEVLVANPRLMEGSKRRKRKSDRIDANKLARLGRVDPQSLYPIRHRSREVRQDLVVLRARDALVSVRTELINTTRGLVKSMGTRLPGCSSPSFAEKVKDAIPIEIGEALQPLVQLVETVNECIERYDEKIEELGRKKYGHTTLLRQVKGVGPITSLAYVLTLEDPQRFANSREVGPYLGLVPKQEDSGDCQPQLGISKTGDRMLRRLLVGSSQYMLGAFGPDSDLRRYGLRLCERGGKNAKKRAVVAVARKLAVLLHHLWGTGDVYEPLHRRETGTGIAQAAAA

SEQ ID NO: 489474 - protein, 376 aa, unidentified
MNEKLRFLGLDVHAETIAVAVAEPNGEVRSLGMIANREDSIRKFIRKLGSPEHLRACYEAGPTGFVLYWQLTQLGVKCDVVAPSLVPKKPGDRVKTDRRDALKLARSHRSDDLTAVWVPDAGSEALRDLVRAREAAKQDQLRAKHRLTKFLLRTGQRPPLGVKAWTEKYVEWVQQVRYTHPAQEATLLDCLNEVQHMEERVKRLEQSIVEVIQLAPAPMQEVVRGLQALRGVAHISAVTIAVELGNITSRFERARDLMGYSGAFPSEDSSGKRIRRGGITKSGNAHLRRIVVESAWSYRHRPAIGARLRRRQEGLPAEIIEIAWKAQNRLHKRYMTLMARGKEQRKTMTAIARELLGFIWAIGIKAEAACKQQMAA

SEQ ID NO: 489475 - protein, 346 aa, unidentified
MTEAYDGRQVVGMDLHRRRSVLVRMTMDGRKLETARIANSPAALRAVLARCGKNPLVVLEATYGWYWAADVLAGAGAEVHLAHPLGVRAFSYRRVKNDERDAADLADLLRMGRLPEAWIAPPQVRALREVVRYRHKLVRQRTSCKDQVHAVLAKLGIPVTHSDIFGTGGGLWLDQLVLPEPYAAKVASLRALIGVLDGQIARLGQEAAGMLAADAGYAAVRELPGIGPVLAAVICAEIGDITRFGKPGQLCSWAGLTPRHHESDLKVIRGHCSKQGSRLLRWALVEAIQHQPASARPQQAREAIVARRGPEARNIAKTAAARVLLTQVFYALRDGHARSAGHPPAA

SEQ ID NO: 489476 - protein, 410 aa, unidentified
MLFIGDDWAEAHHDIEVEDDSGRVLARRRLPEGLAGITTLHELVAEHLDPTAEPDQVQLGIETERGPWVQALLAAGYGVFAINPLQVARYRERHSPSGAKSDAADAHLLAEIVRLDRAHHRRIAGDSEIAEHVKIATRAHQTMIWSRVRQVNTLRSLLREYYPAALAAFGTDLASRDALAVLTVAPSPELGRRLSQSRIETLLRRAGRQRNVSTTAVKIRAALRSEQLAARPGVIGAYTASASALLAVLTAMAARAEVLAGQVEQGFGQHPDAEIYRSQPGLGDILGARVLAEFGDDPGRYADAKARKNYSGMSPITKASGTKRVVLARFARNRRLGDALFLQAFAALNNSPGARTFYDRQRARGATHYQALRTLANRLVGILHGCLRTHTLYDEHLAWHTEPDKLSPAA

SEQ ID NO: 489477 - protein, 429 aa, unidentified
MSYRIAGIDVHKKMLAVVICNVEIESEFQFERRMFGGNPEQPHSLAEWLLQQEVEEVVMESTAQYWKPVWEALEWYWKPICEKREGALRKSGTLHLAQAESNRGRRGRKRDFADAERLVKRLVARELTLSFVPDTEQRLWRTVTRKKYQLRRDRIRLQNQLESLLEEAPIKLSSFVSDLLGLSARRMLKALAEGETNPAALAALADERLRATSEQLCDALGACTELNAVYRRLLNMALEECRLIDEQIGQLDKEMASLLSEHQHAVQRLAEVPGLGVDSAQQILAEVGPTAATFPSEKCLSSWVGACPGDKESAGINYSHRSPKGNRHMRRLLNQAANAAARTKGSLFEIVYRRSIPRLGHNQAIGVIAHRLCRLIWLILHQGAQYEERGPAVTKRSKQLRTWKMIRQLRTLGYRIEPPSPQPGQTPVP

SEQ ID NO: 489478 - protein, 314 aa, unidentified
MVGVDVAKATLDVFWRPAMRLKVVNSPAGRAGLLRRLQAVDVDRVVVESTGGYERDLLSELLEAAVPVAQVNPRIVRDFARSYNLLAKTDRIDATVLARFGEERKPRTLGPADKIRLMLQELIAARRQLVEQCTRLRNQMEHVRLKTVAESIRRSIKHVRQELLLIEAEIQRLIDQNPSLNARQKNLLQVEGVGLTVSRILVSELPELGVLDRRKLAALVGVAPFNDDSGQFQGRRAIRGGRHTVRTALYMATLTAVRRNAVLKAHYQQLLARGKPKKLALTACMRKLLTYLNVRLTHLQTDPPPTTPPGGGAK

SEQ ID NO: 489479 - protein, 306 aa, unidentified
MRSVKGRRRSSHVMSALVCGLDVHKDWTYTTILNHEEKVINQMRMSSEKVLSYLAHYNVNRVAMGSSTAIAPLYRKLTSKGFDVVVSHPKKTRYIAEAKIKSDRVDSKAIAELARLDALPLAYVPNEETAKLREKVRRRAFLVRQRAKLKVKIKSVLAYEGIKPPSDHGLFTLKGIEWLRSLSLEPVDSYLRIMSTFNREIKFLSKQLLGLAEEDVELLAAVPGIGYYSALLVKSEIGNIDRFPLGERLCSYAGLVFSTRASGVKVRYGAITKEGSRWLRWVMVQAAQTHVHRFGSSVTRMYNRVA

SEQ ID NO: 489480 - protein, 345 aa, unidentified
MEHYAGIDVSLDTVSVCIVDETGKVLREAKVASEPGALVAWFGELDFVLDRIGMEAGPLSQWLHKGMRENGLEIELLETRHVRNAFKTMPVKTDRKDARGIAQLMRMGWFRPVHCKSLPAQEMRALLTTRKLVLNKRIDMEMGLRGILRGFGLKIGPTTPRSFEARVRELVDGHPTLLAVAEALLTARATLITQLKGIEKRLVGFARDNSRARLLMSAPGVGVIVALTYASAIDDPGRFRSSKAVGPHFGLTPKRYQSGETDVTGRISKMGDAGVRAALYEAANVILTRPVKGSALKSWAARLAVRAGMRKAKVALARKLAVVLHRMLADGTTFVADKAAARATV

SEQ ID NO: 489481 - protein, 343 aa, unidentified
MDIIRVGIDLAKKVFQMHGVDRSEKTVWRRKLVRDEWLDILRRTVPLHAEIGMEAWGSAHHWARRLQTLGYTVKLIAPQFVKPYVKSNKNDANDAEAICEAMSRPGMRFVAVKTVEQQDVQAVHRVRAGLMEQRNAKANQIRGLTAEYGIVAPREILQLRRAVPVWLDDINSGLSDRFRRLLTGLGEDLRSLDDRIRELDHEIAAIAASDPVAKRLQQLRGVGPMVATALIATVGNARQFASGRQMAASLGLTPRQNSSGGKERLLGISKRGDAYVRCLLIHGARAMIQMARRRTDPLSLWVMRIAGNRHPNVAAVALANKTARIAWAMITRETDYQPELAAH

SEQ ID NO: 489482 - protein, 387 aa, unidentified
MPQLNDQSRSHTALKQDSTLIAVLEMSQSAWLVAGLVPGIERHPLKKIEPDEAALLRLLRRWQEEAIKAGHPITRITLAFEAGRDGFWLARWLRAHGIEAHVIHPTSVAVSREHRRAKTDRLDTALLKRAFLGWLRGEQGHCSMAEIPTLQEEDAKRPTREREGLVRERTRLVNRIKGALARLGIRGFKPTLRHAPERLSALRLPEGAPLPPNTLAELRRDMARLRFVLDQIREIEAARLEQLEQHPETGTHTMVRVLARILGVGIETADMLVHEVLSRNLRDRRAVARYAGLTGAPDESGRRRREKGLAKAGNARVRRGMIQLAWRFLLFQKDSALARWYRARTEGARGGMRKTLIVALARKLLIALWRLVTTGETPEGLVLRPAG

SEQ ID NO: 489483 - protein, 343 aa, unidentified
MDRFYYIGLDIHKRTIAYCIKAIDGHLIDQGKIGADRQSLGAWVEGLPGPWIGAMEATMFTGWVYDFLKPHAVTLKVAHPAMFKAITAAKKKNDRADAEKIADLLRVNLLPECHMLSEEIRELRRILRYRNHIVRTAVKMQVKMSGLLMEVGVSYSKKRLHGKKYFRELLERVDESPPSVKELLQLSRSGYEMFRSFQKRLVETLRTNQLIRDRVQRLMTIPGVGEITALTWTLEIGDPGRFSSTRKAVSYCGLCSAQKESAGKEQRGPISKKRNKHLQTMLIEAAKLAPHWNEQLAIVHEQELKKGNRNRATLAVARKLVAYMLAVDRKQADFKLSSEIRAA

SEQ ID NO: 489484 - protein, 370 aa, unidentified
MKEYSEAFIGFDTAKKKHAVAIADVGREGEIRYLGEIDSSPLTIERMIRKLAGRYEKLHFCYEAGPTGYGLYRQVRGLGHHCTIVAPSLIPKKSGERVKTNRRDAVSLARLFRAGELTSVWVPDTVHEAVRDLVRARETASQDLRRKRQQLLSFLLRHGRIFSGRQHWSRAHLRWLAQQKFDHPAQQIVFQDAVDAIDDAAARLRRLGEQVAAIVPSWSMAPVVEAYQAMRGVSFVVAVTFVAEIGDLRRFDNPRQLMAFLGLVPSERSTGERVRRAGLTLAGNKRARRVLIEGAWSYRYPARVSQTLQARLEGLPKAVREIAWKAQIRLCARYRRLNAAGKKLPVVIAAIAREMAAFLWAIARHVAPAA

SEQ ID NO: 489485 - protein, 392 aa, unidentified
MIVSVGIDVAKDKHDCFIQNSEGEVLADVFTIPNNMEGFNTLLHKIQTCTTLQDKIKVGLEATGHYSYNILGFLLDNGLATYVLNPLRTNLYRKSLSLRKTKTDRVDARTIAAMLLSDVGLKPYTDTAYHNEELKSLTRYRFDKVKERAKLKTSVSRLVCILFPELEKLVTTLHTASVYTLLEEIPGAKQIAAAHLTRLKSLLENASKGRYKRDMAIAVRDAARNSIGSRMPAKSLELQHTIRLIRELDSEIHEIETEIEAMMDDIQSPITTIPGIGCRMGAMILAEAGDLSRFDSPDKLLAYAGMSPSTYQSGQLKNCYPHMEKRGSRYLRYALYNATKYVCLWDPTFTAYLAKKRAEGKHYNVAISHAAKKLVRLIFAIEKSRQPYRSAT

SEQ ID NO: 489486 - protein, 371 aa, unidentified
MSKVRFVGLDVHAETIAVAVAERDGEVRSLGVIPNRPESIRRLIKKLGPAEQLRVCYEAGPTGYVAYWQLTGLGVKCEVVAPTLVPTKAGDRVKTDRRDALKLARSYRAGDLTAVWVPDAAHEALRDLVRAREAAKKDQLRARHRLGKFLLRHGRRPPTAMKAWTQAHLAWVKSAVRFDHAPQEATLLDYLHEVDHVAARIVRLEAAIDAAVTTAPIRMRAVIEALQALRGIARLSAATIVSEVGDLSRFAKPRQLMGYSGAVAREDSSGERTRRGGITKTGNAHLRRVVIEAAWAYRHRPAVGPALRHRQASVSAEVQAIAWKAQHRLHTRYRALTARGKCKQNVVTAIGRELLGFIWAIGVCVESTRVA

SEQ ID NO: 489487 - protein, 339 aa, unidentified
MHVTTVGLDLAKNVFQVHGITHDGTVAFNRSLRRAQLLAFFERLEPCLVGMEACGSSHYWARELGKLGHEVKLIAPVYVKPYVKRGKSDAADAEAICEAVTRPIMRFVEIKSREQQAILSLHRARDLIVRQRTQTINMLRGLLAEFGVIFAQGVGHAVKFAKRVTEGHLPDLPPTACDVILDLSEQLLALHLRVNWYGRRMTAAAKSEPRIALLQTIPGIGPITASAIVATVGSGEQFQSGRDLSAWLGLTPINKSTGGKERLGRISKMGDRYIRRLMVVGMTSRIKQIKNAPERFDPWFADILQRKPAKLAAIAMANKTARIIWAVLSRNEPYEVRTV

SEQ ID NO: 489488 - protein, 377 aa, unidentified
MNNDSTLYVGLDVHKESITVAYAIDGGEVESMGKIGTTPTDIDRLCKRLQSKARQVRVVYEAGPCGYGLYRRLSKQGFASMVCAPSLIPRKPGERVKTDRRDSIKLVRSLRAGDLSAVHVPSVEDEAFRDLARAWASARDDLRHARQRLKSFLLSHGVHYIGRADWGAAHRRWLSKYSFEDAWRQLAFEEHRRTIEDRLAQCDRLEAALREAVTEWGFYPAVLALQAMRGIQFITAVGMISELGDLSRFEHPRQLMAWLGITPSEHSSGGTRRQGGVTKAGNSYARKLLVEAAWSYRHAARVGPQIQLRHEGLPKEIIDRAWDAQVRLCRKFRKLVARGKNVNIAAVAVARELAGFIWDIGRLAMSLALPRRNTRSA

SEQ ID NO: 489489 - protein, 338 aa, unidentified
MALYCGIDLHARSSYVAIVDEQRKRIFKRNLQNDPKLILSFLAPYTQELAGIVVESTFNWYWLVDALMDDGHTVHLANPCAIKQYAGLKYVDDKHDAFWLADLLSLGILKEGYIYPKEQRPVRDLLRKRGLLVRLRTSLLLSLQNTVVNTFGIKIPAHRIKGKEDYVTTYDFGNESLALMGQVSKTSIDTLSRQIEAIESHVYQHCKLTAAYNPLVSLPGVGKILGTTIVLETGAVGRFPAVGNYVSYCRKAETVWTSSDRVKGKGNRKNGNRYLSWAFSEAAEHARRFDTASRNFYNRKLHERNSPVAHNALANKLARAAYYIMRDQVPYEEKKLFG

SEQ ID NO: 489490 - protein, 369 aa, unidentified
MTIIPDAGRRPQSRTSVFAGVDTHKEIHVAAVIDPAGTVLGTHSFSTTRAGYRALLTWVRSQGDLVRIGVEGTGSYGAGLTRHLAKHDVFVLEVDRPDRSERRRKGKDDDLDAINAARAALYERRTTIPKSKDGAVEALRILRVARAQAVRERRNTLQLLRMSIVAAPDEVRDQVRNLTRMQLIRHLAAWRPDVSNATDPVVAYRVALKSFGRRYLELTDEIADLDDLINPIVQALAPQLLERVGIGIEVAGQLLVTAGDNPDRLRSDAAFAMLCGVSPLTASSGVTQRHRLNRGGDRQANRALHLAVISRLRIDPRTKAYVAKKTAEGHSKMEIIRCLKRYLAREVYFLLNPGIEHIAPNTKPRKTAA

SEQ ID NO: 489491 - protein, 343 aa, unidentified
MGYFAGLDVSVKETSVCIVDDAGRIVREVRVASEPEALLQVLANNTYRFKRIGLEAGPLSQWLYSVLAEAGLPVICVETRHMRAVLKAQINKTDRNDARGIAQMMRVGLYRPVHVKTLRSQKLRMLLTHRKLLQSKAIAVENDLRASLRNFGLKVGMVGTVKFEARIRELVENLPDLAVLVEPLLIVRRVIREQLGILHRRVLVIVRDDDVCRRLMTIPGVGPVVALTYRVTVDVPARFRNSKAVGAVFGLTPAKYQSGENDRTGAISRCGDEMMRMMLYEAAQSMLVRAAKWSWLKAWAMKIARHRGMKKAIVALARRLAVIMHRIWVDGTDFRWTREVAAA

SEQ ID NO: 489492 - protein, 411 aa, unidentified
MDVVEKSFPSRLMKDRARSQAAPSGVSWPLGRPSAATLSFGLVVCLPAAPHNNRGNMQTTRTISNGQEWDCGFFTYTGLVSLRESVMIIGVDYHPSFQQIAFFVEETGECGERQLNHSDGEAERFYRDLKKRGISVRVGMEATGYSRWFERLLAELGFEVWIGDPAEIKTRRVKKQKTDRKDAQLLLRLMREDNFPQIWVPSPENRDLRQLLWHRHRLVQMRTRIMNQLQALAMNEGKRWKKKLWSKRGRAELEKLALAPWASRRRQELLELMDRLNPTIEELTAAVEQEARKRPEVMRLMTHPGVGPLTALAYVLIIGTPARFPRGKQIGTYVGMIPSEDSSAGKQRLGHISRQGNSLLRYLLVEAAQAAVRTSRGRRCKGQRKRTRPLFGVNGEVCLKRFDGADIVRDT

SEQ ID NO: 489493 - protein, 451 aa, unidentified
MRWRNRLKCDGEIGCFYSSANNMQNESTPDARGPVFRGVDTHADSHWLCVLDWRGRRVLSRQFPADAAGYEALAGAIAAAGEPACVAMEGTSSYGAGLTRHLASLGMPVREALSPARMQRRRPGQGKCDEADAERAARAAMSGSRLGTPKSQDGWVDGVRCMLAARSGAVKARTSAINTARSLLTTEPEGLRSRFRGMGGPRLMEELPSVRAEGALGAALGALADLWAAARDAALDMELAIEASLEENCPALLAMYGCGPVSAAKLAVAAGDNPGRLRSEASFAAICGACPIPASSGKTVRHRLNRGGDRQANSALHEIARQRVMRDPETAEYAERARGRGKSDREVMRCLKRYVAREAYRALMRPHEIRRPEDASELVAARRAAKVSQVRAASILGTSEKYISMLERGQRELKPIRRAYEAWVEAGLPLDWDRQAFEAERKMDSKKHLAK

SEQ ID NO: 489494 - protein, 389 aa, unidentified
MKIFVGIDIAKLNHFAAAISSDGEILIEPFKFTNDADGFQLLVSKLESFDKNSIIIGLESTAHYGDNLVRYLVAEFYQVCVLNPIKTCQMRKNNIRKTKTDKVDTYVIAKTLMMQDDLRFVSFYDLDMMDLKALGRFRQKTIKQRTRLKIQLTTYVDQVFPEIQYFFKSGLHQNAVYALLKEAPSPKEIASMHMTHLANLLKVNSHGHFTKEQAKELRVLAQKSVVANDSAISIQITQTIQQIELLDSQLEKIEAEMTDIMKFNDSVIMTIPGIGYINGGMILGEIGDIHRFSNPNKLLAFEGLDPSVYQSGNFQAKTTRMSKRGSRVLRYALVNAAWNVVRNNATFKAYYDAKRAEGRSHYNALGHCAGKLVRVIWKMLTDEVEFNLE

SEQ ID NO: 489495 - protein, 322 aa, unidentified
MSQPNPLCVGIDVSKATLDIAASSDVAQFTVSNDSDGFNAIITGLRRHSVALVLMEATGGLEVAVACSLQAEGFEVAVVNPRQARDFARAMGYLAKTDRIDARVLTQMAEVINRHPERKRFIRALPDAERQALAAMVARRRQLIAMLVAERNRLHPFHPQNKKSINTIIKALEDELVRLEKEMDSHIRNHFKEIAERLSSIKGVGTMTVSAMLAEIPELGTLSRREISALIGVAPVNRDSGTMRGRRTIFGGRAGVRSALYMAALVATRFNPVIKTFYVRLLAAGKAKKVALVACMRKLLTILNAMLRKNEEWDESYHHVAP

SEQ ID NO: 489496 - protein, 357 aa, unidentified
MIIIGADYHPGFQQIAFVDTETGDYRELQLQHSEEAEKFYRELAAHGMKVRVGMEASGHARWFERLLAELKFELWVGDATEIETKRVRKPKTDREDARLLLRLLMEDRFPRIWVPSWDNRDLRQLLWHRHRMVQARTRIMNQLQAVALNEGLRFKKRLWREAGRQQLESFPLAPWANRRRHDLLALLDRLNPTIAELSQAIEQEVEKCPEAQRLMTHPGVGPLTALAFVLIIGTVERFQCGKQIASYLGLVPLEKSSGSRRRLGHITKQGNSMLRFLLVEAAQVTVRSIPEWRNKYFHLVLRRGKKTAKVAMACRLAVRLYWMWRRQWDYEQVKKFGSYAGQLGHRDGVQLEHRVID

SEQ ID NO: 489497 - protein, 676 aa, unidentified
MTKVIIGVDPHKLSATIEVVDSHEKLLGSGRFSTDQAGYTAMRTYAKTWPDRVWAIEGSNGVGPPLAQRLLEAGEHVVDVPAKLAARVRLFDTGHNRKTDARDAHSIAIVAVRTNTLRVLRPDGELEALRMLCDRREELTRLRVQTVNRLQRLLAELVPGQAKKDLTALQAKAILATVRPGGIAGRTRRRIATEELADLVAVEAKMKKATAELKVLVKARESRLMDLHGVGPVVAARTLADVGDIARFADRNRFASWTGTAPLDASSGEQNRHRLSRAGNRRMNHMIHIAAISQIRLDTEGRAYYRRKRAAGKTKLEALRCLKRRISDAVYRQLLADAERAQLANAPELVGTGPGGHCGASQRIQRGRPAPAHRHFGSATSRTREPDATTAPARPEDLPPEDPTGHRLTTRGSRSDAPPGGHERVVDGRSRRHPTRGMSRSSALLEQGRNQFGGLLMHGRDGVAVDVEGERDRRVTEPLADHLGRHTGQQRQAGVRVPQVVEPDLRQVRHPQVPLEPERPGVRPDHRPVLAGEHHPGVLPGRTPRQPLLGLQLAPGPQRSHRFGVQGDVALASAGLRLAEDKRRPRLGDGLTHGDPAGGEVDVAPPQPEHLAATHSGRRGESPGGVEPVLAQVLQESAQLSGGPRAHLQRAGGALLRLHRHRGRVAQQIAPVDRIA

SEQ ID NO: 489498 - protein, 433 aa, unidentified
MEEVTDEPLYRDRVCGIDIGKAGMAATIRVPSDKDPSRRASETRAFGTTKREVLALADWLRCWQVPAVVMEATGDYWKPVFYRLEAEGIECVLADAKQVKHLPGRPKRDPEDSRWLAACFERGAVTACFVATPEFRVIRLHTRYRRDLTADRTREKQRAEKLLEDAAVKLSSVVSDLHGVTGRDIMDRLIAGERNVKALAQLARARARRKIPQLEQALEGAEFFTAEHAALLKAMLARIDAVDAQIAALTAVIERLLAPYEEQLQQAESMPGWGRRAAQDAVAETGIDMARFPSPAHLASWAGRVPVDRQSGKREGKARAKKGNRVLGAVTGETAVAAGRTQTREGARYRRLSRTRGKAKAQVAVGNTQMRVYHALLSKPGTRYQDLGYDYYEQERSTARQVSHHVARLGSLGYEVTICKRQDPAATGDAPAA

SEQ ID NO: 489499 - protein, 345 aa, unidentified
MENMYYIGLDVHKKTISYCVKDGSGRIHAEGKIPTTRFDLDRWMKTVPQPWTVAMEATIFTGWIYDHLRPHAAAVKVAHPLMLRAIAAAKKKNDRIDANKIADGLRCNFLPECYMAPTAIRERRRTLRYRNLLVRQTVQLKNKISGLLMEAGVNYNKEKLHKVGYFRELLKSNPDIDESLRPLLQLCRETLVRLQKTESALIRSLARDRFLVERVEHLMTIPAVGPITALTWALEVGEVSRFSSIKKAISYCGLCGAEQSSGEYVKRTPISKQRNKHLQCVLVEAAHMAPRLSPELALLYDREKQKGNANRATLAVARKLVAYLVAIDRSQRDFLLVEKENQAAA

SEQ ID NO: 489500 - protein, 410 aa, unidentified
MISVGIDVSKGKSTVCILKPYGEIVSKPFNITHTQKDLSELSSMLFRLNDEVKIVMEATGIYHLPVLTYLQEKGFFVSVINPYLMKSYRNESLRKAKTDKIDSRIIANYGIDHWFKMKEFQTSGEIYEELKLLGQQYRHYMKLHLLSLAELTHLLDLTMPGIKNLLASWNETNRKDKRSDFVERFWHYDVITSMSEQKFTEEYILWAKEKKYVPSQEKAKVIYTLAQESIPTLPSETSSVKMLVTEAVRVLKEVDATLGLILSRMQEIAKTLPEYSVVREMGGVGNTLAPKLIAEIGDVRRFRNGKALVAFAGIDPPPYESGQFVGCNRKISKRGSASLRKVGYETMRSLKMRSRPEDPVYRYVVKKESEGKSKKSAKIAGLNKFLRIYYARVTELYKNCLLYTSDAADE

SEQ ID NO: 489501 - protein, 352 aa, unidentified
MSNVKYVGMDVHKAITVIVVLNALGHMESHSKVKTKAENICDFFRGLSGKVEVVFEEGTHSAWLHKLIKPLVASVTVCDPRHNKLIEDGNKSDDDDAETLALLLRIGAVKAVYKGDDEQRQLKEFCRAYENLVSDATRAKNRLQAIYRGRGLDPGRAIYRADQRQECLATLDDEAMRFRAESLLDQLAALQELRKQAKRRFVLRVRQHPDYCILSRLPGFGPVRVGQLIATVGTPHRFRTKRQFWPYCGLAVVTRSSADYQIAEGKIIKSQKKVSTRGLNRNHNPRLKEVFKSAALYSLRYEECKAYYQRLVEGGTRPELARVSVARKLAAAALALWQRKEEYDPKKFFATT

SEQ ID NO: 489502 - protein, 430 aa, unidentified
MGLIEPIPMPPARDEQAIAYNWYVGIDWGSQQHQVCVLDRDRHVVGERVVDHDGSSLAQLATWLWALSAGQPQRVAVAIEVPRGAIVEGLIERGFHVFAINPKQLARFRDRHTMSGAKDDRRDAFVLADSVRTDQPSFRRLHLDEPQLLLLRELSRAEETLLEEFRRSANRLRDQLHRFYPQMLHLCSGADESWLWDLIDLAPTPAHAALLSKEQIQRVLKAHRLRRVKATEVLTCLQASALPVAPGAAEAAQVHCAFLLPCLRVLAEQLRSCAQQGEALLKTLAEEPDETGGPSDVAVVQSLPGVGRKITAWLFAEAAQPLTERDYQVLRTQGGVAPVTKQSGKRRQVVMRRGCNPRLRHALYHMARVATQRDAYFGGVYEALRAKGQRHGQALRNIGDRLLRILIAMLHNRTCYDATRSRREPVVQMG

SEQ ID NO: 489503 - protein, 407 aa, unidentified
MLFIGDDWAEDHHDVEVQDEQGRVLQRARLPEGMAGITEFGELVGRFLPEDGQAADVWVCIETDRGPWVNALIAAGYRVFGVDPKQAHRHREILSSSGAKSDKGDAHGLADMIRTRRHQLREAGGDSEIAEAVKVVARAHQTMIWERTRHMLRLRAALREYFPAILAVCDAVDLSLTSRALLALLGKAPTPEMAAKLTVRQILPMLKGYRSKDAKAAQIQQILRGEHLGQPPVVTRAYAASVRSSVAVLTVTVEEITHLETEVKAHFGQHPDAEIILSQPGLGPILGARVLAEFGDAPGRYRSSKDRKNYAGTSPITRQSGKMRIVAARYIHNNRLVDALQRQASCAILHDPEVRAYYEQLRARGTKHNAALRQVANRLVGVLHGCLNARTRYNQNTAWAHRHSAAA

SEQ ID NO: 489504 - protein, 342 aa, unidentified
MYYIGLDVHKKTISYCVKDASGQVQQEGKVGATRWELDDWTKTLPQPWTVAMEATIFTGWIYDHLLPHAQQVKVAHPLMLRAIAAAKKKNDRIDAGKIADCLRCDFLPECHMASTAIRDRRRTLRYRHLLVRQMVQMKNRISGLLMETGVSHNKQRLHKVGYFRELLASNEEVNESIRPLLRVSRDSIVRLQKTEYALVSSLQRDPLLAERIKRLRTVPGVGPITALTWALEMGDVSRFPSIRQAISYCGLCGDEKSSADKVTRTPLSKQRNKHIQRVLVEAAKLAPRQDHNLALVYEREKQKGNANRATLAVARKMVAYLLAVDRGQRDFVPFADSQSSAA

SEQ ID NO: 489505 - protein, 447 aa, unidentified
MMKVIIGVDPHKLSATIEVVDHHEKLLGSGRFTTDQAGYAAMRTYARAWPDRVWAVEGSNGAGRPLALRLLEAGEHVVDVPAKLSARVRLFDTGHNRKSDALDAHSIAAVAVRTTTLRVLKVDGELEALRMLCDRRETLTRRRVQTVNRLQALLAELLPGQAKRDITTGQAKAMLATVRPRDIAGKTRRRIAAAELTDLIAIEAKIKKSTAELMALVTARDSTLMDIHGVGPVVAARILADVGDVARFADRNRFASWTGTAPLDASSGEQNRHRLSRAGNRRMNHMIHIAAVTQLRLDTDGRAYYRRKRAAGKKPMEAMRCLKRRISDVVYRHLLADAQAAAIAAEIEEADQTATELGTGPGGHCGATQESCAVDLPPHIDTSDQPLPGPADQTLPQQRSASNPHAASAASPPRRRAGAVKMERPSGRTILTATSAGAHSKATRPRP

SEQ ID NO: 489506 - protein, 318 aa, unidentified
MQTSIVFIGVDVGKFELQVAASDGEIVTGVLPNNRSSIVGWLKRLPATSVIAMEATGGYQELLARTAHERGFEVYVLNPTHVHHYAISLGNRGKTDRLDAAVIAQYIAQHQKKLHRYEPISPELQQVRALQALRSTVVRVGTSLRLSAQRHGCVSSHQKKALASLTAWSEQLEREMIAKIKAQSDWAKTYGLLTGICGIGPITGVALTSLFSRIEFASSDAAVAFCGLDPRPNESGRKVGRRRLSKQGDKAARTLLYNAASSAARTEQFKDYYAMLRARGLASTAALVIIARKLLRIAYGVWRTGQPFDSEKLRPAIA

SEQ ID NO: 489507 - protein, 418 aa, unidentified
MSEDENTRGSRRYIALDIHKKYSVIGGVDREGRVVLHAVRMEHADLEGWLKKNLHGTDHVVFESTTNAWHVYDLLEPLVERVVVANPARVKQIAQARVKTDVRDTFILARLLAANLVPEVWVPPAHVREMRQLLSQRRQLVETHTQIVNRMHSVAHRHHLNHERGKRFTAKNTLWQKDKRLSRVEQFQLELEMENRAYIEKQIQRIGTEVTKMCHQKPWADSMTYIMQLPGFGIITGMTVLAAIGEVQRFGTPQHLASYSGLTGGLDQSGTHLVQKGITKEGRKELRWAMVEVAQRAVKSDPHWKRKFQEMEKRMHRNQAIVAVARQLLELVWHVLTRRQPYRHFSQERIAYKYLTWAWQMDEQARDGLTRQQFTRYYLMRLGIGHDLTRIAIDPKHPRRISTEAELLALRPELNHIE

SEQ ID NO: 489508 - protein, 428 aa, unidentified
MSTKGARVRAIGLDVHRDFCEVAIAEQGKVRSAGRIQTRPEVLELFAQSLGSDDRVVLEVTGNAWEIARIIEPHVARVVVVSPSDTGIRHARAKTDRLDARTLAKLLAAGALDSVWMPDERTRVMRRRLARRSQLVQARTRVKNEIHAILIRRLKGRPEVSDLFGKAGRAWLAELELPIEERETLDSGLRQIDFLDAEVASVDRVLAHDALNWPQARRLMTVPGVNLIAAATFLAAVGNIERFPDRRKLVGYLGLDPKVRQSGDAPATHGHISKQGSAAVRVALVEASWSAVRQPGPLRAFYRRVRARRGHQVAITATARKLACLFWVLLWRGQDYAFGQPSLTAKKIRRLEITAGAPRWQERKGVWIAHRLLREAELDLARQAEHAYAQTVRDRQAAGAIKAGASATPGRASQRPSEGKAARQTTSP

SEQ ID NO: 489509 - protein, 407 aa, unidentified
MRSIALDVHRDLCEVAIKEEGGEVRSAGRVRTSVEQLELFARSLGADDQVALEATGPANAIAGIIEPHVARVVVANTRRVRAIAEARVKSDKVDASTLCELLDAGFLPAVWSPDDATRALRGLLGRRDRLVRSRTRAKNAVHAALQREPKGRPPMSDVFGRAGRRWLARLELPAHERQIVESCLREVDFLSQEIAALESELARLALSSEQVKRLMSVPGVSLVSAATFVAVVGDISRFETPKKLVGYVGLDPKVRQSGEQAARHGRISKQGSSAARHMLCEAAWIAVRTPGPLRAFYERLRARRGTQIALVATARKLCVLFWHLLTREQDYAFGRPSLTRHKLRRLELMAGDPPRRGQRSGSPASKREQHHERELSEQFEAAYRRLVADWQQKPTKSGAGATPGRAS

SEQ ID NO: 489510 - protein, 446 aa, unidentified
MKKSFRMSIIHPHAAGVDIGAEFHVVAVPPDADAAPVRTFQSFTGDLHRMSDWLKTCHITTIAMESTGVYWLPAFEILEAAGFNVILVNARDAKNVPGRKTDVNDAQWLQKLHSFGLLRASFRPEHDISVLRSYLRQRERLTEYRAAHIQHMQKALMQMNVQLHHAVSDITGVTGLSIVRAIVSGERDPSVLIQYRDVRCKTMPEVLQQALTGNWQPEHLFALEQSVAFFDFYQEKIRECDDQIETSLLQLSTGIKEPEGALPSARHRTKQPNQLVFDVRPLLWKITGADLTQRHGFGPYLALKFVAECGTDMNRWPDASHFTSWLCLSPGNKISGGKVLSAKTRRSSSRIAAALRLAATTIGRSDTALGAFYRRLSSRIGKAKAVTATARKLAILFYNALKYGQKYVDPGADYYEERYRNRVLDGLKRRAKSLGYSLQQDPELCV

SEQ ID NO: 489511 - protein, 346 aa, unidentified
MPETEVDTFAGIDVSARELSVALRREKGEDKPAMAKFSNHPSGHKALIAHLLRGGRRVRVCLEASGNYSLDLALTLQAHRQVEISVINPRRARRFAESLGQRSKTDPVDARVLCEYVARMPWVAWQPPSSVALHLRAVARAIADLGVIHTQQNNRAHASAASQALPVLVVKEMQRHQKYLEQRMTRLRREALRLIAGDSELDRRFRLMLTTTGIAETSALQILVELAVLPDMLDARQWVAFSGLDPRLFKSGKSVEKRPRISRGGSRHLRRALYMPALVALRRDPCLRRFYQNLLARGKARLQAVVAVMRKLLHALFAMFRTNQPYDGSKLCCAVDMAGNAIAACA

SEQ ID NO: 489512 - protein, 415 aa, unidentified
MELTRWVGRAIGLDVHRDFCEVAICEDGQARSAGRVPSTPEALGMFADSLSPTDRVALEVTGSCWEVARILKPRVDRVVVVSPDDTGISAARAKTDRLDARALAVLLWRGELDAVWMPDERCQILRRRLQRREQLVRSRSRAKNEIHAVLQRRLQGKPPCSDLFGVKGRAWLTGLELPVEERESVDAGIRHIEFLDTEIGAVERLIAQQALAWPEIRRLMTVPGVNLVCAASFMAAVGDHTRFITSSKMVAYLGLDPRVRQSGETPARSGRISKRGSASARWALVEAAWTTVQQPGPMHAFYERTKGRRGHGRAIVATARKLTVLFWCMLTRSEDYAHQQPSLTKKKLRRLEITAGAPKYTPGARGIWSANDAVRDAERALAEQAEASYKRMVQDQRAGGPARRMGASVSVEHAK

SEQ ID NO: 489513 - protein, 388 aa, unidentified
MTITSRWDENTASRQVAYGKHATEREANVITTEDGQMLTTVGLDLGDKTIQACFVDHHGEIVEESRLKATEAALRRRFSGEPRYRMVLEAGLHSPWISRLLESLGHEVYVANPRRLRAIYENENKSDRVDAEYLARIGRLDPALLYPLRHRSLEVQADLAVLRSRAALVRARATLVNHARGAVKSIGGRLPRCETRYVAERAALHLPPELVPALSPILSAIAELTARIAGYDKEIERMAKERYPETELLRQVPGVGAITATTFVLTVEDPARFPRARAMGSYLGLRPRRAESGSQNPQLHITKAGDKQLRSLLVECAHHILGHLGPDTDLKRWGLKLAECGGKAAKKRAAIAVARKLSVLLLRLWVTGEIYEPLRNSRAPGNTPVLDT

SEQ ID NO: 489514 - protein, 322 aa, unidentified
MNTYTDYLGIDMSKQTFDVVNRAGKHYQYENTTKGFRKFKRVIGDNSLCVMEATGIYHLPLAKFLYSKEIAVSVVNPIQIKRFSQMKLQRNKTDKADAQMISSFAQDQEVSQWEPSPEDMEEGRDTAQVIEQYIEFRAGLKNKIDGLRSKKASQVLIDAVLSQISHMSEIIAELQKKLVDIVRNYDDSLLQNLTSIVGIGENTAALLIITTDGFRNFDNAKQLSSYFGLAPTENSSGTSINGTRKISKMGNPLVRKKLYMCSLQASPHNKTCIDLYQRLLAKGKPKKLALIAVVNKLLKIIFAISKSGLPYDREYRSYMKTR

SEQ ID NO: 489515 - protein, 361 aa, unidentified
MPTQMNKLNFEGQNIYAGFDVHLKSWKVTILSEEMMLKTFTMPPKPEVLSDYLLKSYPGASYHSAYEAGFSGLWAHYQLCELGINNIVVNPADVPGTQKDKLQKEDKRDSRKIAYALRNGNLTPIYTPSESTLNDRSLVRSRKTLVNDMIRFKNRIKAMLNFYGISMPEEFANSRTHWNRRFMLWLESIHMKEPSGEMALKHQINEALYMKELLKNILLDIKHLSETDKYREKVKLLRSIPGIALLTAITLLTEIEDINRFPNSERFASFIGLIPMTKSSGEKQKVGELTFRAHDFLRSIIIESSWVGVHRDPALLMAYQKLIKRMEPNNAIIRIAKKLSNRIYTVLKYNKTYEFGKTDNL

SEQ ID NO: 489516 - protein, 317 aa, unidentified
MANLGIDVAKKTFDVALLKNEKYKSKSSFDNKPSGFIALLAWMKQREQSEIHVCLEATGAYGDQLAKFLFENGYTVSVVNPSRVKAFGEAELLRNKNDKIDAKLLARFCEKMKPTAWQPDPPEIEHLRMLGRRRDALASMRTQEVNRLGNPDRSVNESIEKHVGYLNQEIEQITQSIKDHINGNDDLKKKRDLLDSIKGVGDVVIEAILSETNGFARFERIEQVVAFMGLSPKEKTSGTSVKGRPSLCKIGSARLRKALYMPALSAIKCNPFVRALYQRLKAKSKNGMVIACACMKKLVHIMFGVLKNGKPFDPAYA

SEQ ID NO: 489517 - protein, 303 aa, unidentified
MSDKSNLTVATMGIDIGKNAFHVVGLDRRGAIVLRQRWSRGQVEARLVNMPPCLIGMEACVGAHHLSRRLHSQGHDARLMPAKYVRPYSKGQKNDFRDAEAIAEAVQRPTMKFVATKTADQLDLQALHRVRARLVSQRTGIINQIRAFLLERGVAVRQGLRFLRAELPIILATRSDVLSPRMVRVIEELAGDWRRVDERIDGLSQEIEALARQDPACERLMTVPGIGPIISSAMVAAIGNGAVFTKGRDFGAWLGLMPKQLSTGDRTILGAISRHGNRYLRALFVQAAWVVLLKIKCTRRYLI

SEQ ID NO: 489518 - protein, 352 aa, unidentified
MESTGKSVITLTGIDLAKEVVEVRCEDAESNKIKGQSLKRENLIPFLQKLPKGSTVVMEACGSANHYARECQNLGLIARLIEPQHVKRFRIGQKNDKNDATAICLTARQKGVPSVSIKSAEQLEMQRQHRMREKITRDRTATINQIHGFVYDQGLILKKGGSNFKARVEEIVTKLGEDSDFGVTLKLLLEQFEQFTKWLGVLTKKIYQAVKTSEPVKKIMELSGIGPIVGSALVAHIGDPSSFKNGRCFAASLGLVARQHSTGGKPMLGGITKSGDSYIRKQLIHGARSAVRAAMLKTTSKDPHILWIQQLQARAGTNRTAVAVANKTARCAWAILAGKQPFVQPLPKPVAQ

SEQ ID NO: 489519 - protein, 425 aa, unidentified
MSAKTSDVDDLMVLYPCCAGLDVHKKTVVACIITTGERGKVSRQVRTFATTTVHLLELSDWLAEHEVSHVAMESTGVYWRPIFNILEATCEVILVNAQHMKAIPGRKTDILDSQWIATLLRHGLLKASFIPPRPIRDLRDLVRYRKSLVYARNQEVNRRPLLLETANIKLGSVASDILGKSGRDMLASLRQGVTDHTLLAELARGKLRGKLPDLREALEGRVQAHHRLLLGHLLDHIEFLEQRVQTLEGELEPYLNPYQAEIALLVSIPGVAETTAATILGEIGAEMSAFPSAKHLASWAGVAPGNRQSGGKRLKAHTTKGNARLRAALAEVVWAISHTKDNYLSAQYHRLARRIGKAKAIVAVSHSVLVIIYHLLRDKKEYSDLGSSYFETLDQDRVRTRAVRQLQALGYTVTLQTSAPEEESA

SEQ ID NO: 489520 - protein, 344 aa, unidentified
MKNSNVIGIDLAKNVLQVCKVSKHGELTVNKATSPRKLKELLATSPPSIVAMEGSGSCHYWGRLAKAFSHEVRVINPKKVKAFLQGQKTDANDALAIAMAATQFGVRFSLIKDEEQQTLQTLETSRKFLDKELTALNNHIRAYLYEYGITMNKGRKSLRETITLVLDDLDTRLPRCLKNTLRLLWERYQLTLAQLKETKKVKAALVKQIEPCKRLLALESVGEVCAAMLYANIGDGKEFKNGREASACIGVTPKQHSSGGKTHMMGINKKGGNKELRAALYQGALSVITHLPAEPQTVKQAWLIELVKRVGVKRACIALANKTVRTAWALLATGESYQPVLLSK

SEQ ID NO: 489521 - protein, 355 aa, unidentified
MMIIGCDYHPAFQQIAFVDTDTGELRERRLQHREEAEKFYRDLATQGIKVRLGMEASGQARWFERLLAELNFELWIGDAAEIRTKRVRKQKTDRQDAQLILKLILKDDFPQIWVPSWENRDLRQLLWHRHRMVQARTRIMNQLQAVALNEGLRCKKRLWRDAGREQLEAFRLAPWASRRRRDLLELLDRLNPTIADLTQTIEQEAEKCPEARRLRTHPGVGSLTALAFVLIIGKAERFQCGKQIASYLGLVPLEESSGNRRRLGHITKQGNALLRFLLVEAAQVSARSIPEWRHKYFHLAIRRGRKIAKVAMARRLAVQMFWMMRKGWDYEQVRKFGSQGRKPWSHAGEPTASTR

SEQ ID NO: 489522 - protein, 354 aa, unidentified
MAISKQCIGIDISKATFTACLCQRSDDGVLTFSKTLDFSNDTKGFNQFLRWVKGVIAPGAALVFLMEATGVYYENLAHHLHKIKKRVHVVLPNTSKHYFSSLNIKTKTDAIDARILSQFGVERAHKAWSPPPAVLLQLRNLTRYHVQLQEQKTALVNIKHSKDCSHDIQNFILKSNKKLISDIDKEIARCIKEINRLVKSDVGLHRKIEKLATIKGIGMITMVTILAETMGFEQFRSAKQLVSYAGYDVVQRESGTSVKGKTRISKKGNRYIRNALYFPAMVACRHNSVLKEAYTKIIQKKPSKMVGQVAVQRKLLILMYTLWKNDTVFIENYKVSSPDPKTETTLDSSEAELL

SEQ ID NO: 489523 - protein, 338 aa, unidentified
MENFVGIDLHKYVSQLAVLRESKSPSQLRFANDVVTVERVLKKLPEGSKIAVEAMGSWWWLVELAQKSGHEVFLSHPKQTKAIASARLKSDKVDALMLAKLLKADLLPTVWIPPAAQRHIRELLSHRGRLVRQRTAVINELRAVYAKRNIDPEARLQRVRPMVSGAEDLGGYGPRIVEEDLKLLEFINRQIGGLDKELIKIALEDAQAKRLMTIEGVGPVSAVAISCWIGEIGRFSNAKKLASYFGLAPRVRQSGDTERHGHMTKEGNRMVRMLLIQAALVHTRRGKGPSRKHYLGVVKRRGKQIARVAVANKLIGAIFHMMKEGMDYSDFIKRSGAQ

SEQ ID NO: 489524 - protein, 348 aa, unidentified
MMKRSTEEAAGLDLGDRYSQLCIFHSATGTFVEERRLRTQPETMRSFFSQLPPMRIALEAGTHSPWVSRMLEELGHEVIVANPRKLRLIFENPTKSDTVDARYLARLAALDPGLLAPIQHRGVQAQADLASLKSRDMLVRTRTRLINHVRGLVKSHGERLPRCSTPAFADRVTAALPESLKDTLEPVLEVLRSLNQQIRRLDERIKELATTDYPETTALQQVPSIGPLTALAYVLTMESPHRLPNSRAAGPFFGLVPKRKASGSRDPQQRITKAGDPYMRRLLVGSAHYLLGPFGPDCDLRRYGQRIAQRGGDNAKKRAVVAVARKLAVLLHHLWRTGKVYQPFLKTA

SEQ ID NO: 489525 - protein, 411 aa, unidentified
MEQIHDRVAGLDVHRDQVAVCVRTPGPRGGVQTEKARFDTTTGGLAALAQWLAGHAVALAAMEATGVYWKPVYYALEGRFLVWLCNAHHVKNVPGRKTDMSDAEWLADVAAHGMVRPSFVPPPPIRELRELTRYRKTQIDVRAAEIARLEKVLQDAGIKLTSVASKVLTQSGRAIIEALIAGQRDPRALAGLAKGKLRPKIPQLTAALRGHFGAHHAIVAARILAHLDFLDETIGALDAQIAARVAERCQPAARLLADVPGLERRSIEVIIAETGADMSRFPGPAHLASWAGLCPGNHESAGKRRRVATTPGNQWLRRTLIESARAAARTKGSYFGAQYRQIARRRGPDKAAVAVAHSLLDVIWHLLTTGEVFSDLGADYFTSRQDKERQARRLISQLEKLGFTVQLTDAG

SEQ ID NO: 489526 - protein, 352 aa, unidentified
MKSTQTTATPKLFIGMDVHKKSWTVHFKTDLFDNKTVTMPADPDELISYVRKHFQDHEVSCCYEAGCCGYWIARALLSHGWEVKVVNPADVPRNNKQDWQKTDRIDSRNLCKHLSDDNLKGIYIPGEEQEQLRSLFRRRIHLARNLRSIKNHIKSQLLYFGIKLPDQYDNPNWSREMKTWIGNLKWKFSSGGESIKSRLKQLEFMWYEELHISNELRAYCRKHYRKDYYLYKSIPGIGGITAAGILSELCDIRRFNRLDELAAIVGLVPGIYQSSDHTINLGLTKRSNHQLRSLLVEASWVAVRTDMALQQYYRRHAHKEPNKAIIKVAHKLLSRMRAVINSEVPYQLGVLK

SEQ ID NO: 489527 - protein, 372 aa, unidentified
MKQKIIHIGLDVDDTQYHGAAFNKETGEVVDFRSRPTLKGLLQQLDRMARHFEGHKIQLCYEASYVGYCLQRDLIANGVHCDIVSPSSIPSPRGKAIKTDRIDAGYLAQFYANELLTIVQPPDEEQEQDRDLLRSRQKVMQQRNQLRKHMQSVLRRSGLHYKAETGNKSHWTKHHYCWLDRTIDGLSGSLKVNLELLLRQLKALNEVLTEYGQQIDGLANSPRYRSAVQSLTCYKGIKNVFALTMITEIGDIKRFSHPRKLVSWIGMDIREYSSGGKCNRFGITKHGNRYVRTAFVEANQRGYRTAKIGQDLKSRRQAIAPELVNIADRCLRRLNKKGNRLLLAGKHPNKVKVACAREMVGFVWESLNKAAA

SEQ ID NO: 489528 - protein, 366 aa, unidentified
MERTFVGLDVHARSVVACALDDRTGELSKARLVPDNETVLAWLQALPGPVAVVYEAGPTGYGLARFLTGRGIRCVVAAPSKMHRPSGDRVKTDARDALLLARLLRLGEITAVTVPSLAQEAARDLVRVREDVRADLMRARHRTSKLLLRQGILWSGGTAWTGAHEQWLGHQRFELPGLQAAYDTTLETVLLATSRRARLDKAIIEMAHEPQWWPTVSRLQCLRGVSTLTAFGLAVEVGDWSRFSGSTIGAYLGLVPTESSSGDSRHQGSITKTGNTHARRLLVEAAWHHRRPYRPTKTMRDRWDLAPAAARARGHAGNQRLHERWLRFNERTKRTVIANVAVARELAGWCWSLAVIEDPAAPAARR

SEQ ID NO: 489529 - protein, 415 aa, unidentified
MRIVYARCCGLDVHKKSISACLLTPDDEGGTQQQVRRFGTMTRDLLELSDWLASNQVTHVAMESTGVYWKPVWNIFEGIFTVLLVNAQHVKAVPGRKTDAKDCQWIADLLQHGLLRGSFVPPSPIRQLRDFTRTRASLRQDHTAVANRMQKILEDANIKLASVASDWLGVSGRIILNQMLDGEEDTGKLAHLCRGRLREKIPEMQLALEGRMTEHHRWMLRLQREQLEFLEAQIAKLDAKIQEHMSDYQKAVDLCTTIPGIEAIAAANLIAEIGVNMEQFPSAQHLASWAGLCPGNNESAGKRLSGKARNGSVWLRRNLCQAAWAASHSKNTYLSAQFRRLAARKGKKRAIVAVGHTILVIVFHMLKNQQPYRDLGAEYFDRRNAEQLKRSLVRRLERLGVHVSIVSTAPAPQPA

SEQ ID NO: 489530 - protein, 337 aa, unidentified
MAPTLPLFVGLDYSQRAVQLCVLDPAGNVLCNRAVPDDADALDQAVRRLGAVRGAALEACTGAADLAQQLADRFAWPMHLAHPGFVSRMKQSPDKTDFSDARVLADLERVGYLPRVWIAPRQLRELRTLVRDRQQLVAQRRNGKLQIGALLREHRQRCGHSRWSRPWRLWVEHQAQLPEQARWVLQQRLRRLEWLQQEIRIVERRLEQVSAADATVRWLRTIRGLGPVTAWTLRAEIGRFDRFRSGKQLARFCGLTPCNRSSGDRQADAGLIRAANPELRRVLIEAAWLLARLEPRWRQLADRLKARGKASTVAVAAVANRFVRWLYHEGVRRQTAA

SEQ ID NO: 489531 - protein, 459 aa, unidentified
MSRIKTGKKNCSRSQTDQAPPTSTPPQPRFVGVDLHKQIATFHTMAEDGKTLEQGRFDVNPEAILKFANEKLQAADSVAVEVTSNTWAFVRLIRSHVDKVVVSNPMKTKAIAEASVKTDKVDAKVLAHLLRCNYLPSVWTPTETIENSRALAARRTALVGQRTALRNRIHSVLARRLVVVPAGGPFTQAGLTWLQELSLDPVDRTLIDTDLRLLEGIAQEMQEIEHLIVKESYDDPDIRLLMTLPGLDFTIAQALKACLADISRFPNPDKAASYLGLTPRIKQSAGKCYHGSITKAGSSQTRWLLIQAAQSVGRTPGPLGAFFRKLEKKKNRNIAVVATARKLVTIAWHMLKNKEPYRYAVPRTTENKLGTLRVRATGEKRKGGSPKGPKPEPRFENSDSRRIPSLDEIYTREDVPGRRPLSEGEKRMIQEAGVENFVAELGQTRIVPRKKRVPASTPQ

SEQ ID NO: 489532 - protein, 422 aa, unidentified
MNPQTEQEPFAAYIGIDWADKTHFVSLCEAGSQVVERYKLEHKPEVLAQWIGDLQRRFAGRRLAVALEQSRGALVYALMSYEFLVLYPVNPKALAKFREAFYVSGAKDDPLDSDLLLELLTVHRRRLRAWRPDDELTRAISLLGEYRRELVNSQTRLTNRLSNLLKLYFPQALEWAGDLATVQACDFLERWPSLAKVQQTTASKLKQFYLKHGCRKAALIEARLQQMQQAQPLTTDGAVITASIAMVQASISQLRPLIASIKQFDKQIAELFAQHDDHELFSSFPGAGPVFAPRLLAAMGTDRTRYLAAQELQQFSGIAPVIERSGRTCFVHRRFACPKFLRQSFHEYAGQSIRWSPWARAYYNQQRQRGNGHHAAVRSLAFRWIRIIFRCWQMRVPYSEELYQQALRRRGSSLAKLLLQQP

SEQ ID NO: 489533 - protein, 337 aa, unidentified
MKYAGIDLHSNNCVVSVIDETDRVAAERRVGNEIEQVIAVLQPYRSELAGVVVESTFNWYWLVDGLQERGFIVHLANTAAMQTYSGLKHSDDRDDARHLAHLLRLGVLPTGFIYPKEQRATRDLARQRMRLVQARSRSIIAVENVWSRQTGGRLSGNQVKRLTGDDIEAMELHADVRLGLQAQVALVGALEQQIDALEKRLQERVRLQAGYRLLTTVPGIGATLAAVIALETGPIDRFAAAGDFASYARCVDSALISNGKKKGEGNVKNGNRYLAWAFVEAAHFACRYCEQARRFYERKRAQTNTAVATKALAHKLARACYHMLKRGAPFDVARCFG

SEQ ID NO: 489534 - protein, 359 aa, unidentified
MSAQEVRERHVVGGVDTHKDLHAAAVVDDRDRVLASASFDATRQGYRQMLAWMRSFGSLQRVGVESTGSYGAGLLRFLQQAGIEVLEVTAPDAQDRRRRGKNDDFDAQSAAHAAFAGTRTVTPRTRDGMVESLRILSACRKTAVAARRIALQMIHNTIVCAPDALRETLRRMTRMQLVRTLAAWRPDLSAYRDVEAAYRIGLKSLARRYLELHDEIADLDAMIGTIVDELAPELVARNSIGRNGAAQLLLTAGDNPERLRSEAGFAALCGVSPVPASSGKTVRHRLNRGGDRAANSALHIIAIGRLRTDARTKAYMARRIAEGHSKLEAIRCLKRYIAREVFTLITRRQKAIRQTRIAA

SEQ ID NO: 489535 - protein, 391 aa, unidentified
MLICGIDIGKNNHEACLMDETGRQLAKTLRFTNTTEGGERLLDYFVGCNPAKETIVVGMEATGHYWLSIYCFLFDQGFQVNVINPIQSDAVRNLFLRKTKNDAKDSFLIAETIRIGRFSHTALADEDILAMRQLCRHRMDLVDYIADQKRKIIGVMDRVFPEYQHFFSDMFGKSSTELLSKAVTPEEILAIPTDELSAILKKASKGHFGDAKAEEIRAAAQRSFGITIATSAFAMQLRQLLEMIELLEHQLGELDFEIEQYLDKMNTFVTTCPGVGKVLGGVILGEIGDIARFTEPKKLVAFVGVDPSVHQSGEFIGTQNKMSKRGSPHLRRAIWLAATVAAFHDPVLSAFYQKKRAEGKHHSSAIGAVARKLTLIIYAVLRDNKPYVPNC

SEQ ID NO: 489536 - protein, 399 aa, unidentified
MVCLLTGAAGEKPRVEKRQFDATVMELERLREWLREENCSHVVVESTGSYWKPVFNVLEKSVTVVLANPVHVRNLQGHKTDRKDSEWLAHLLRHGLIRPSFIPPAEIRELRSLTRQRKDPIVAGARERNRVRRLLEEANIKLGNVLSDVFGVSGQRLLDALLEGKATPVEVAQLAVKSVRRKIPLLEAALQGHRLTETLRFLIAQNLRPMEFLEKEIAALDEQIAEKLKPFSQQVDLPTSLPGVDHTTAATVLGEIGVAMTRFPTPGHLASWAGLCPGNHESAGVQKSGRIRRGNATLRSTLNQCAWAAAHTKGTLLKHRYDHLIPKRGKKRAIVAISHQLLTLMHLLLTQGIPYTDPGWKPKLSTQYRTRRASYHLRCLHRLGFQPASPRATDGPALM

SEQ ID NO: 489537 - protein, 345 aa, unidentified
MKHYAGLDVSVKETSVCIVDETGKICREVKAVSHPDDLIAVLKTSGLQIERIGLEAGPLSQWLFEGLARAGLPVICIETRHTKAFLKAQPNKSDRNDARGIAQMMRVNLYRPVHVKTLTSQKRRALLTARKLLQEKALAIENDIRGLLRNFGLKVGVVGAVKFEARIRELVEGNLELAEVIEPLLDARRTLREHFAALHRKLLLIVKNDEVCRRLMTIPGVGPVVALAYTATIDIPQRFRNSKAVGPILGLTPVLNQSGESRRVGRISLCGDGMMRTLLYEAAQVLLTRVAKWSWLKAWAMNVAKRRGAQKAIVALARRLAVIMHRMWSDGTEFCWTRERFPAAI

SEQ ID NO: 489538 - protein, 479 aa, unidentified
MRQGPEEIHDEEHEQRLERVAAIDVAKTSGKICTRLPHESTPGKRVTLVWDVPATTNAICALAAHLVDQRVERIVIESTSDYWRPFYYLLEAQGLVVWLVNANDVKQVSGRPKTDKLDAVWLAKLNERGMLRPSFVPPANIRNLRDYTRTRLDLTAERSRHKQRIEKLLEDALIKLSTVATDIFGKSGRDMIEALINGQRDPRVLADLARGRLRVKHAALVQALTGRFDDHHAVLARILLDQIDTLTTRIDQLTTIIDQAITAIPGAHAPTGASDAPAATAPLPTLARLDEVPGIGLYTAQIIIAEIGLNMAQFPTAGHLVSWAKLSPRTIQSGNTTRAGKAGHGNPYLKGALGEAAAAAAKTNTFLGERYRRLVKRRGKLKALVAVARSILVIVWHLLSDPTARFHDLGPDYHTIHMDKDRKTRNLRRQLEALGYAVWASPRIVETSPMREVNGDGGDETQVRTGVPRGRGSDRAGDW

SEQ ID NO: 489539 - protein, 436 aa, unidentified
MRRVIGIDIHRTFGEVVIWENGLTRHEGRIDMTRTALEGFGRTLLGTDEVVIEATGNAMAVSRLLAPHVARVVIANPLQVKAIAYAHVKTDKVDAATLASLHAAGYLPEIWTPDAATERLRRLVARRYQVVRHRTRIKNEVHTILHAHLIPKCAHADLFNRRGRDWLTRQPVPDDERAAIARHVRELDRLGEDLVALDRDIAQDALEDEAIQRLLTITGINLAVAAGLMAAIGNIERFRSPQKLVSYFGLNPRVRQSGLGAAHHGRISKAGRSHARAKLVEAAWAAAKAPGPLRAFFIRIRARRGHQVAAVAVARELTTLCWHMLTKGEDYRWARPSLVAHKDRAMELAAGLPQKKGNKRGANYAYNVKEMRHQEMQIAEKAQESYEHFVASWRVRPPSEGRCATASHRQGLNGLPGGASSRHATLRHEADRTQKE

SEQ ID NO: 489540 - protein, 403 aa, unidentified
MNAVGIDVSKGRSTIAVVRPFGEVVASPYEVAHTDSELSKLAKMLKSLKGETKIVMECTGSYHLPIANTLHEAGLYVSVINPQLTHNYDNNSIRKSRNDKTDSVKIANYTLTNWLKLTQYIPEEDIRHMLKTYSRQYNKYVKIKIMLKNNLISLFDQTFPGVNELFTSPPRKRDGHEKWLDFAAYFWHCECVCSLSQKVFAERYRKWCKRSGYNFSQDKADDIYASACGHVSVIPRNDITKLLITQAIAQVNAVAETISVISAEMKRLASFLPEHPVVMKFFGVGDILGSQLMAEIGDVFRFPKKSSLVCFAGLEPVENQSGKFQGKETISKQGSPHLRKTLFQIMDCLLQHAPKDDPIFQFLDRKRSEGKHYYSYMNAGAAKFLRIYYARVKHFLDNLYDES

SEQ ID NO: 489541 - protein, 370 aa, unidentified
MVNRSMFVGMDVHKESIDISLAEEGRDGEVRHYGVIRGDLEALAKVVRAVRAPDRRLRFVYEAGPCGFGIHRYLTAQGEDCVVVNPSSMPKRSGDRIKTDRRDGNALARLHRAGELTAIYIPTADDEALRDLVRAREDAVGLSTQAKHRLKAFLLRQGRRYPGRAGWTTPYRRWLADLSFPSAPQHIALQEYRDTIDEAERRVERLTDQLRQLTPTWRWAPVVDALQALRGVSFITAAGLVAEVGDFRRFQHPRELMAYLGLVPSEHSSGPSVRRGGITKAGNPHARRLLAETAWAYQGIPRLGRQALYRQEALPKSIRDIAWKAQLRLTARFRRLVARGKAKPKVATAVARELTGFIWAIAREVPAPPA

SEQ ID NO: 489542 - protein, 355 aa, unidentified
MSNCTTIGIDLGDKKHAVVGLDDKANIVLKRWIPNTKEDLEALFKRNRGAVFGMETGTHCRWVSALCGECGCEVYVGNAHRLRSIFGNSRKNDMRDAEEIARLLHGDKRHFHPVRLRDAEHQNLVQLVKMREMVMSQRTKSVNAIRGMAKANGIRLPDSDADSLHKKLAAVVDTLPGNLQMLIGPQIELLEKLCATLKEYDRSICDYRNAHFRKECDLLETIPGVGPVNAAAFVAFTGEVSRFRHARDVGPYYGLTAGRDQSSSKDEPKKITKEGNAFVRRLLVSAANLIMQGRSRNTELQQFGLRVWGNRGKIAKRKAKVALARKLAVTMAAMLRSGTPYNGITEENANENANA

SEQ ID NO: 489543 - protein, 367 aa, unidentified
MKGQIQNKKVLVRGKEVFIGVDVHKESWHVTARAEGEEVFHGGIPSQYHTLQRLLDHFKDCKIKVAYEAGPCGFWLYDRLTENGIEAIVVPPSLIPIESGNKVKTDKRDSRKLAKLLESNLLKRVYVLSEDDRADRELLRTRRQVLEHRNDVARQIKSKLLFYGIRSPFSAKGRWTKQYLRWVKGLLFEREGLTISFQSLMELYEYLSAQLVKMNRKVIELSRGEKYLDKVRLLRSVPGIGILIAMEILVELPEIERFKSGEELSSYLGLTPSEFSTGQYVRQGRITRCGNKRVRTCAVEGSWILITKDPWMRFKYLQLKALKGAKRAIIAIARMLMIRVRRILLSREPYRVGTPGGIRQRLVASTA

SEQ ID NO: 489544 - protein, 377 aa, unidentified
MKRIIRIGMDVHSTNYTLCAMEPILGEDDRIFATVDVTPDYKNILMFIENLKMKLGADNQYDIQCGYEAGCLGYSLYNQLTAANVKCVILAPTTMLTPQGVRVKTDARDARMIAQCLSYGGYHAVYVPTEDDDSVKEYIRMRDDHKTALKKIKQQISAFCLRHGHHYAQSKWTVAHWKWLKQLELPALYREVLNEYMTSYEEQNAKIERFDQRIEELASQEKYAEKVKKLGCFLGIQTHTALSLIVETGDFARFVKGNIYAAYLGLAPGEDSSGPKANRTGLSKAGNSHLRQMLIESAGGICKGTIGHKSKALKARQNGNTVEVIAYADKANTRLRSRYYKFIRHGKARNVAVAAIARELACFVWGMMTDNISVKAV

SEQ ID NO: 489545 - protein, 327 aa, unidentified
MEPEYIGIDLHKASFHVCAVNGSGARQWEQRWPTTDAGIAGLLARCDGHSRVAVEASSPTWAFVDRIVDRVGTVTVVDPRKTRIKAGYAAKTDRLDAQRLADALRRDSVVGIYYPPPAIRDLRELGRYRCHLARLQARLKQRMHALLLRQGVATPRALFTQRGQQWLEALQLAGWAGDELRGLRQVWRDVRTQLGPVTVAMRAVAASDPIARVLDTRPGFGPVFSVTLRAEIGTITRFPDGPHLASYAGLVPRVERSGGRQWTGRITKAGSPWLRWTLIEAAMHQFRRQDDFGRWARRLAVKTGMLKARVAVARALCTEIFDAWPRA

SEQ ID NO: 489546 - protein, 424 aa, unidentified
MKFKQKQVQNQRIERITIHHLVIGIDIAKEVHVARAVDFRGIELGSHCTFSNELDGFEKLLHWVTCLQRLHSKTTAILGMEPTGHYWLNLANDLLEKSFEVVVTNPYQVSRNKENRDNSPTKNDVKDALVIADMVKNGYYAELRLPSCEYEALRILVDSRDFLTNQCVSVQNRIHRWLDLYFPEYSKVFKDWTCKTSIVTLRLFPLPSEIQQMQPKEVLAQWKKHMKRSAGLSYAQALVEQAHRSVAKSQALVEAKLSLEILLEQYEKLAARLEELEQKMTSHLEQLPLGRQLLAIKGLGPIHTCSLLADTGDLGLYHHGNQVLRLAGLHIGERSSGQYKGQIKITKRGRSRLRKTLYLAVLSLIVNDASFRAQHHQNVKIKKMAGLKSIIKLCGKLARILVAMARNNEAYRPEQIGSVEKVAA

SEQ ID NO: 489547 - protein, 338 aa, unidentified
MKLYGGIDLHSNNSVLVLIDEEDRVVVEKRLRNDLALILQELTPYRKKLTGLVVESTYNWYWLVDGLMDSGYRVHLANTAAIQQYEGLKHTDDRHDARWLAHLLRLNILPEGYIYPREARAVRDLLRRRHRLVQQRVGNLLSIQNQFARLGMSGFSAQRLKRLQDGELDRLIAEPNVRSAVTANLALVRCLNLQIERLEREVLTQVKLAAQFVPLLSVTGIGKILALTIMLETGEIGRFAKVGNFASYARCVDAKRLSNEKKKGSNNAKCGNPYLAWAFVEAANFAIRYSPRIKRFFDRKCARTNKIVAFKACAHKLARAAFHVMRDRVAFDETRAFA

SEQ ID NO: 489548 - protein, 401 aa, unidentified
MNCVGIDVSKGKSMIAVMRPLGEMVIPPFEVRHTDAELCELSRRLGDLDGETRIVMEATGNYHLPVASFLYDSGFYVSVVNSMLVHGYGNNSLRRAKTDKKNAIKLANYGLDHWLALPRYIPEDEVRPMLKTTYRQYQQCAKVQTMLKNNLISLLDTAFPDANRLFTSPIRADGSEKWVDFVSSFWHCECVCGLSEKAFTARYQKWCKKHGYNFSQDKALDIYASACGHFSVMPKTTTAKLLVDQAVAQLRAASAALAVLRNEMQSLAASLPECPVVMGMFGVGPALGPQLMAEIGDVRHFHSKKALVAFAGIDAPPYQSGQMEVRSRSISKRGFSALRRSLFLVMSAILRCSPAHEPVYQFMDRKRAEGKPYRVYIMASANKFLRIYYATVKQYLDSLES

SEQ ID NO: 489549 - protein, 269 aa, unidentified
MEPTTIAIDLAKRVFQIHFVDPDGTIHSKVLKRAQMLPFFANRPASRVVMEACGSAHHWARVLARLGHDVRLIAAQFVRPFVKSNKNDAADAAAIWEAAQRPGMRFVAVKTEDQQAMLAMHRIRQQLVRIRVMQVNQLRGLLYEFGVVLPQGRRASVDAAKAALASLADELPAMLLDSLQDQLSRLRALDEQIARIEQRILNWRRNDDACLRISEIPGVGVLTATAAVSVIGQARTFRSGREFAAYLGLVPRQNGSGGKIKLGGISKSV

SEQ ID NO: 489550 - protein, 404 aa, unidentified
MKGPIVSIDVSKGKSDYQAFKDLNVKYTGSRSIKHNKEGFDEIVNLVREMEKKLETEVCVVYEATGVYHRVLKKVLEDNNIKQFIINPLLSAKTRKNDSLRSPKTDKLDPKSIAKTYYSHSLHNSYKQETIYHELRELSRYYEDILVHIRKDKVAFRAQLDIVFPGYDTLYDDLYGPVALAIIEKYPHPEMLQKKKINTVSKVIQNKTCHRQAVSDTMADKAIEYSKTIYSGCDKDDIEVLILQRFIKKLNEDMAEAERTIGEMIKLAQELPDFNIIKSIPGIGDNLAARIIAELGDMTRFKKKNELVAFAGLDPRISESGQNDGDHMHITKKGNKRLRCLLYLAVTCSIRLKRDDNSIKDFYIKKKQQSNPMCSKAAKTACASKLVRIIYSMCKTGELYQYNK

SEQ ID NO: 489551 - protein, 411 aa, unidentified
MRRVIGIDVHRTFGEVVIWEDGRLRHAGRIDMTRTALEGFGKTLLASDEVVVEATGNSMAVSRVLAPFVARVIIANPLQVKAIAQAHVKTDKIDAGTLASLQAAGYLPQIWTPDAETERKRRLVARRYQVVRHRTRLKNEVHSILHAHLIPKCPHADLFNGRGRTWLAAQPLPDDERAAIDRHVRELDRLAEDLALLDREIAQDAIDDSAVNRLMTITGVNLAVAAGIMAAIGDISRFNSPQKLVSYFGLNPRVRQSGLGAAHHGHISKIGRSHARAMLVEAAWAAAKAPGPLHAFFVRIRARRGHQIAAVAVARKLTVLCWHLLTKGEDYLWARPALVAIKTRAMQLQAGHPQQKGSRRGPAYAYNIKVLRDREMLIAAQAEQSYERLVTQWKPRRPKTGARAPQLGKTK

SEQ ID NO: 489552 - protein, 418 aa, unidentified
MKKHSKSLQRSEPTLKRTKARGPVQRDAKEVLAEVLGKLTGKLDAPAVSTSAKENRRGNTVGPNRDRLTVGVDLGDRWSQYCILGLEGETLAEGQLRTTQEDVREFFQALTVARVVIEVGTHSAWVQDVITEWGHEVLVANPRLMEGSKRRKRKSDRIDANKLARLGRVDPQSLYPIRHRSREVRQDLVVLRARDALVSVRTELINTARGLVKSMGTRLPRCSSPSFAAKVKDAIPVEVREALLPLVQLVETVKDCIARYDQKIEELGREKYGHTTLLRQVKGVGPITSLAYVLTLEDPQRFSSSREVGPYLGLVPKQEDSGDSQPQLGISKTGDRMLRRLLVGSSQYMLGAFGPDTDLRRYGLRLCERGGKNAKKRAVVAVARKLAVLLHHLWVTGDVYEPLHHTGAETRTAQATAA

SEQ ID NO: 489553 - protein, 349 aa, unidentified
MNRTTYGLDIAKNVMQLHWVDNETGEIGRKKLGRAKLSDFFARLQPARVVMEACGSAHHWARVLVALGHQVELLPARQVRPFVRSNKDDAADARAIWLAAQQSDIRRVPQKSVEQQAALALHRTRQDWVSVRTATINALRGALYEFGVTLPGGNRVGLKALANHRAEIDAKVPATIQRLIDGQLATLKDIGCRIDKLEAEIGMQLEQLDNTATLREVPGIGLLGATAFAATLGDGKAWKSGREFSASLGLVPAHRGTGGKARVGHLSKRGDPYLRTLLIHGARSVIAHAKNKPKWLEQLLARRPMNVAVVALANKMARTAWALVAHGRDYEREWKSTPPKGCTAQASAA

SEQ ID NO: 489554 - protein, 410 aa, unidentified
MELLHRRCCGLDVHKETVVACLRLVSDGKVTTEVCTFQTTTADLLHLSEWLAANGCTHVAMEATGVYWKPVWHILDDGEFGLVLANAAHVKNVPGRKTDVNDAMWLAELLAHGLIRASFVPDTQTQEMRNLLRTRKQLVREQSSHVLRVQKTLEDANIKLDSVLTDLMGKSGRAMIEALIAGETNPTKLASLADRRAKASHEEFREALRGRVTKHHRFLLRLHLNQIDALNAAMATLDAQVEKNLGPFRTAVGLIISIPGIKNLGAHVIVSEIGIDMSRFPSHAHLISWAGICPRNDESAGKRRSTRVRKGAPWLKTTLVQCAWAAVKKKDSYLQTQFNRIKARRGPKKAIMAVAASILTAIYHMLKDGTMYQDLGCNHFDRRSTDRQKQRLVKRLTELGYVVEIKPLAA

SEQ ID NO: 489555 - protein, 337 aa, unidentified
MERQYVAIDLHRRRSLIVRQSARGEQLAVVNIDNDPVALGLAIEEAGPNPEVAIEATYGWYWAVDVLQAQGANVHLVHPNGLAWDDRRVKNDYRDCCELLKRLRLGELPEAWIAPVGLRGLREMVRQRAKLVALRSGLKVQVHAVLAKHGLHPPVSDLWSETGTEWVEALKLPAPYAFKVEGLCELIDVFDRQVDQYERIIWDWLRDDVRYRAIQALDGVGETIGAIFIAEIGDVHRFPSPEHLCSWAGLTPKLRESDVKSRAGHITKQGSPLVRWAAVEAVSRVRGTPKIKRDYQRIAERRGKGIARVAAARKLLTLVYYGMRDGHIRCLKHAKAG

SEQ ID NO: 489556 - protein, 333 aa, unidentified
MNKKWFIGIDISKLSLDVAIHSDEGGQEENHIKVTNDIPGFKKLLEWLKEKKVDYKQSLFCMEHTGLYGLEIQFFLTKKEITYCMESPLQIKRSLGLVRGKNDKVDAQRIAWYAYTFRDRIKASHLPPEALRILQRLLTERKHYVKQIVSFRQQKSDVIKYETKQASKRKAKMLEYLDDMLSQVESQMMEIITADGTINNNYNLLLSIPGIGIINAITTIVNTQNFTAFANARQYACYIGIAPFEHTSGTSVNGRTSVSKLGNKQAKVELTQAARSAVIHDPGIKSYFQRKYNEKGATRDAYGIVLNAVKFKLLLRIFAVVRRGSKYVKLAYA

SEQ ID NO: 489557 - protein, 471 aa, unidentified
MLALGPTVPSAGTCEPEDLFGRPPASTQLRARQGNRADSNRCVAPLALNSARTQLEVEGRSLEEKDAVEAQTRFVGLDVHRRYATVAAVDSKQQVVLTARHIDFEDFDDWVRKHLRRTDLVTLEATSNAWHLYDKLVPLVASVTVANPMQIALIGKTLVKTDPRDALTLARLLAAGILPSVWVPPVEVRELRALGGHRSRLIKQRTQARNRLRAVLFAHNLFPPTGEAFGPANRGWWEGLDLPGSEKLRVRQDLSILDSLEPLIKEVEAELVRQSSLEPWAEQTAFLVQLPGIGVHNAMLLLAAIGDIGRFDAAHKLVGYAGLGARVHSSGEEQYGGRITKQGRRDIRATMVEAAWVAVGGHPYWKELFERLAYRVGKPKAIVAIARKLLVVVWHVLTKHVADRAAVPEKIAGKFLEWSWKLGRVNRAGLTSGAFIRRELRRLELGENITAISRGNRKFPIPLAEHAEAVG

SEQ ID NO: 489558 - protein, 319 aa, unidentified
MSDPMIVVGIDVAKATFDVALGAQGAVEQFANGEEGHDGLLAKLKDLPVELIVLEATGGYEFAVASALQAAGFSVAIINPRQARDFAKAMGYLAKTDRIDARMLAQMAEVLARHPDRDKIVKLLPSADLQRVQAIVSRRRQIVSMLVAEGNRLGTAHSAARKSIVAIIKALKKELGKTEAEITKHIAKHHADLAALLGSVKGVGDTTISTLIAEVPELGKLTRREIGALVGVVPFNRDSGTMRGKRTIFGGRATVRRALYMATLVAVRFNPVMRAFYERLVQSGKPKKVALVASMRKLLTILNAMVRQNKPWDESLHFA

SEQ ID NO: 489559 - protein, 335 aa, unidentified
MEFEFFIGTDVSKNELDFAVRMGKQLLFHREIANEPAAINAFLKELIKLPGFDLSKTVFCMEHTGIYNNHLLVCLHKKKANICLEAATHIKKSLGNIRGKNDKVDSIRIAEYAYDKREKLRMWAPKREIVQQLSHLAATRSRLIKVKKILKTPLKEAGPFVNKSIIKQNIKVCNGTLNAIEADLKKVEKEIDKIISSDPELKRIFSLVTSVCSIGAVIATQVLISTNEFKDLTDAKQFACMGGMAPFTEESGKFKGKGRVSHMANKKIKTLFHMAALVAIQYDPELKLFFERKVNQDKKNKMSVLNAVRNKLILRIFACVNQNRKYEKNYARLVA

SEQ ID NO: 489560 - protein, 433 aa, unidentified
MPTNHPYDLVIGLDRSDRKADLHLIDTRTGTVEKQTVATSPEALHDWLAQLRQNHPQARLAIGLERPAANLIVFLETYSWITLYPINPISLQKFRETFVTSRAKDDGKDVQYLAELLLSHHDKLKPWQPDDSQTRQLQQLVLHRRAVVDQRTGLTNRLKALLKQYFPQALELCGEDLWRPLATAFLLKWPTLQSLKKARKPSLKQFYYLQGSRSQTLIDQRLERIDKAVPLTDEIALLQSYTLRVQLLCKELQLLLKTLEQFDQQIAKVFQQHPDRPIFEALPGAGPVLAPRLLASMGSERERFPQPGNLQCLSGVAPVTKQSGGKCCIHRRYLCPKFLKQSFHEYAKESILHSRWAAAYYGQQRNKGCGHHTAVRALAYKWQRIIWKCWQSRTIYKEAIYEAALKKNKSPLVSLLDQIELGKSPVKNGAKKS

SEQ ID NO: 489561 - protein, 460 aa, unidentified
MPSITHDQSMDSISDSIVHIDDNEIKECVIEALETFKNELEAQSFDLNGLGTSDLVKAWKKIKDFKGAELKDASDFADLIKGQIAEFDEEKLWKMCTFSKISYGDVDRKLEKGKYKTKRKFEEEGYQIIRFYDNELIEDKYCSDVDYKLEQHDVGYALTIHPLGHHKVFENNVQAIDQMLDFLRLHNVTKVGLEATGGYEKLCAYTLLSHGFEVYVIQPRWVRDYAKSLGIATKTDKIDCSIISRYVSNTDMRVTPLKVSSIDCLKQKLSRRNQLVEIAKIQKTQAHQVTDLSIIKQMEELLAVLQNQIQVLEDEVMELVDKNQELKKKYMSITSIPGVGAITAITFICYLPELGTLQHEEISSLSGVAPFNRDSGFSKGKRCIQGGRSQIRKILHMCILSAQRYNSYIKIFFDRLYNQYKKPYKVASTAAMRKLLILANSLVRDGRLFTEEYSPKTVSI

SEQ ID NO: 489562 - protein, 350 aa, unidentified
MESITTIGLDIAKNVFQLHGVDESGVVILCRSLRRGQMLTFFGNLPPCLIGMEACATAHHWARTLMALGHDIRLIPPAYVKPYLRRQKNDAADAAAICEAVTRPSMRFVPVKSEEQQATLMLHSARELLVSQRTALINALRGHFAEFGIVVAQGARNARLLVAIIHDESNPDLSCSARIALQPLASALIDIEAQIANLSKEILVAHRSSDVSVRLATIPGIGPIVASSLAASIPDAGVFRSGREFAAYLGLVPRQHSTGGKPRLGRITKMGNRRLRKLLVVGAHAALYSIKSGKTNTPLANWARSLLAKKPFKLVAVALANKMARIAWVVMSRNTIYQPMFRGTASQGAS

SEQ ID NO: 489563 - protein, 359 aa, unidentified
MNTQKNKLDFKDQNIYAGFDVHKKNWSVTIMTDHIAHKTFSQPPKPDILHQYLVKNFPGGNYFTAYEAGFCGYWIHNRLMELGVTSIVVNPADVPTTGYERDQKNDPVDSRKIARSLRNGELKAIYVPPLKILEDRTLLRTRAILVKDITRYKNRIKAFINFHGIEIPDPFLKNSTHWSKRFMDWLDTIEMKENSGKESLQAILKAVKELRTILLDITRKIKALSKTEAYQQNVGLLISIPGIGLIVAMILLTEIGNIERFNNTDQLCKFVGFIPSMHDSGEKDKPGNLTKRGHSVLRSTLVESAWTAARLDPALIKSYNDYCRRMEPNEAITRIAKKLLKRISYVLKTKKPYECSSVK

SEQ ID NO: 489564 - protein, 430 aa, unidentified
MKSNTQNAKIEAITEKTLVLGIDVGSETHYARAFDYRGIEYSKKPFKFSNTEDGFVTFKEWILDIKERHEKDKVVLGMEPTGHYWFNLGKFLQDNEMKPVLVNPHHVKKSKELDDNNPTKNDRKDPKVIAGLVREGRYMIPYLPDGVYADLRTASNIRFQLQAELTRIQNRISRWFNIYFPEYKTVYGKPDAKSGMLILKAAPLPEDILTLGIDGVNQIWRDAKLRAVGKARAKTLIEAAEHSVGSKEGAVSARMEIRMLLEDYESRNIRLQEVMTLIEGLVKQIPMAEKLLEIKGVGIKTVSGFLAEIGDISRFNTPKELQKLAGLALVESSSGKHKGETTISRRGRKRLRYLLFEVAMSLVAKNPEFRELHNYYTTRRLNPLKKMQSLIAIGAKLIRIFYAMLTKGVDYDPKKMVSDIKRPAVYLQAA

SEQ ID NO: 489565 - protein, 396 aa, unidentified
MKEIKEIYCTKEMLELTDYWAGIDLHSNNHVIAIQDSNHQRIFRKKLSNDIEKTLACLARFKDRLCAITVESTYNWYWLVDGLMDAGYDVRLAHPAAINQYNGLKHTDDKDDAYFLAHLLCLGLLPEGYIYPKEERPVRDLNRKYRSFIQERTTHILSFKSFLNRSFSKDMSAYHIKKLTDEQVREMIVDKNSLAMAMADVETIRYLTHTIDKLEGLLLRQVKLKPEFERLMTLPGIGKVLAISISLETGPISRFPTPGDYASYCRCVESLRKSNKKIKGKNNRKNGNPYLSWAFHEAADKAKRYCPYAKKFFERKIKKGNIHIARNALAHKYAKACYHVLKDQVDYDVTRVFESAKQQNKPKCTLKIKGRVGKPDRGLDSEPLAPIGIAGATALS

SEQ ID NO: 489566 - protein, 344 aa, unidentified
MQINSVGIDLGKTTFHLVALGEAGKVLVRKKFNQRQLLTYTANMPTSLIGLEACSGAHFLGRALRKQGHEVRLIAAQFVKPFVKSNKNDFVDAEAIAEAVERKNMRFVPIKTDDQLDLQAIHRVRDRLISRRTAVINQLRAFLLERGLTFARTPAKLRNALPDILENPEVDLTTQMRNLIDLLWAEWKTVEDQIEGLSRELERISAGDAGCTRLRRIPGIGPIVATAIVAAIGNGAAFRKGRDFAAWLGVVPRQYSTGGKTRLLGISKRGNVYLRKILIHGARAAVLRMKRDRAPIGAWLDALDARAPKNKVVVAMANKLARIAWAVLSSGEDYKPASNLVKAS

SEQ ID NO: 489567 - protein, 340 aa, unidentified
MHYVGLDVHRKSITFCIKLADGTIVEEGRVEARREKLQEWLTTLPQPWSGALEATIFSDWIHDYLAPHAAALAVGHSERMKAIAAGKKSDRLDARTIADLLRANLLPPAFTMPAPLRDLRRVWRYRARLVSDGADARNRIAGMLMQLGVPYDSSRLHGKKYFHELVKTHGQLIPDSARGLLAFSRRQIETIAAMDRQLTGALAQHPDLAARVARLSSIRGVGQVTALTWALEIGPVERMGSIDRAVRYCGLCGEQKESADKRLRGPLSKRRNRHLQTVLIEAAHLAPHWNPELAAIHAREVARGHRNRATLAVARKLVAWLMGADRGHQPRALAAEKAAV

SEQ ID NO: 489568 - protein, 367 aa, unidentified
MKNHSSIDQSVSSSDLSACTTLAVDLAKQVFQVAGEDVLGQVLYEQRIKSREAFYDFLRQLPPHVVVLMETGPGAQAWARQLQDQGNPVRILPAGLVATHRSGPKNDRNDALAILRANRDEKICAVPVKSVAALAMQALHRARQGYVRRRTALSNQMRGLLLEHGVALAQGDVAISQKIPRVLEDATQPVPGLLRELIDELLAEWRHLGERISVLTGRLEVAANADMTAKRLMTVRGIGPVTATALVAKETKPERFPNARKFAAYFGMVPDQHSSGETVRLGDMTKRGDAYLRSLMIQGAHAVLQQLRPDSQQPDDRRLLHWMSRLGRKEAAIRLANRNLRIVWVLLQNDQTYRRHAGDGQPATMGH

SEQ ID NO: 489569 - protein, 320 aa, unidentified
MTILTSPTVIGVDVAKAEIVVYREDLKIIQAINNDRTSVGHWLKTLPAQSSIALEATNLYHLDTAELAHGMGHRVYIVDPYRVSHYRESIGQRAKTDPCDARLLARYLTSEQHRLRVWNPPPRHYTVLKSLLNKRAQLMKVRVSIKLSWSTEPLLEDLLADGLKHFKQMDQAIQELLRKVSQEAGISENIRRCKAIEGVGELTATGLATTYMRGEFASADAFIAFLGMDLKAKDSGKKHSPRHLSKKGDGELRRLAHNAAMAACRSPVWKPFYDSYLARGLARTQALVILARKLCRVAFALMKNQSEYQPNLRLQGSPAT

SEQ ID NO: 489570 - protein, 461 aa, unidentified
MSRRKSKRTKGIEEAHPFAGMSQVNANAAGVDIGAEEIVACVEGAENMQIVKGFGNYTVDLQAIGQWLGEHHVKTVAMESTGVYWIPLFEVLEGMGFQCLLISSRSLRRVLGRKSDILDAQWIQTLHSYGLLESSFRPQADLVALRTLLRHRAQLLEHRAPHILHMQKAMLQMNVQLSQALSDITGETGMAIIRAIVAGERDAEKLAAYRDRNCKKSAEEIGRALTGTWRAEHLFVLKQSLEMYDSYTRQVEVCDAEIDRLYALTRPDWDGGELKPLPMKKRNSHSKNAPKNQEAIRAHLKRISGVDVCAVEGIGVGVAQTVIIECGTDLVQFPKEGNFSSWLGLAPKHEISGGKVLKNRTLKTKNRAGRAFRMAAQSVKRSDCVFGMMFRRFRARMDNRQATVATAHAIARVVYRMLKYKVEYDQIDVTEYEKQYEEQQIKYLKKKAGKFGFQLVPTASA

SEQ ID NO: 489571 - protein, 346 aa, unidentified
MQYVGIDWAYRHARWCAISEHGELVAEATTPADEDGLLRLIARLGPDVRACVEMMSGAVWVRDCLERAGWRVEVADARKLKGLAPLAAKTDGVDARLLATLAFRDLVPALWVPALSERALSERLKRRAHLIRLRSSAKNRSFGLLSQWGLRLSLQRLREPDAAELLESRGVPEVWRRSVFEAVALVDHLDRRLAPLERELLPLARADRRVQLLDSIPGVAAILGLTLAVEIGEVSRFATARKLVGYSGLTPSVRQSGESSRTGRLSKAGSATLRWAAVEAAQHAWRESNPWHRLYRDVKQRTGKTNAAKSAVARKVLIAAWHVLSREQPFKPHSPVSASSPQPLAA

SEQ ID NO: 489572 - protein, 351 aa, unidentified
MNNIDYIGFDIHKKTISFCAKAQDGRILDEGTIPSRRADLSAWAKRRSRPWWGAMEATLFTGWVYDHLKPWAQELKVAHPAMLKAIAASKKKNDKVDARKIADLLRCDLLPECYMAPSATRELRRVLRYRNLVVRQATRMKNRIASLLMETGTVYNKERLHGKTYFSELLGSVREIPASVINLLKLSRGQLEFFQGIQQRLVKGLRADAGLRERVERLQSIRSVGEMVALTWALEIGDVTRFPSIADAVSYCGLTSAQRNSAGKEQRGPISKQRNKHLQTILIEAAKLAPRFNSQLAAVHERELKRGNRNQATLAVARKLVAYLMAVDKSGEPFRVRAHADEESPHEQPVG

SEQ ID NO: 489573 - protein, 337 aa, unidentified
MNKFDYFIGIDVSKETLDFNIVHEGSTINGKRIENKSKSINILLNEWISLYKLNWDTIVFCMEHTGIYNNHLLDVLFKNNANIYLENPIHIKRSLGLVRGKNDKIDALRIATFAYKNVDNIKLWIPERKVVKTLRGLLSTRERLVQAIENLTIPIGESKEFDKEICKSIKQACKASVTALKKDLQKINKSIIDVINSDERISELYKIITSVDNVGTIVATSIIIYTNEFKKIKNPKKFACYSGVAPFEHSSGKSIRGKTRVSNMANKYMKKLLHLSALSSVSRKGEMRDYFDRKIKEGKNKMLILNAIRNKIILRIFACVNQNKIFEKNVKNNLVVA

SEQ ID NO: 489574 - protein, 343 aa, unidentified
MDHFAGLDVSVKETSLCIVDDAGRIVREVKVASEPEALLAVLTNPACHFKRIGLEAGPLSQWLFKALAEAGLPVICVETRHMRAALKAQINKTDRNDARGIAQMMRAGLYRPVHVKTLRSQKLRMLLTHRKLLQSKAIAIENDLRATLRNFGLKVGVVGTVKFEARVKQLVDNTPDLAVLVEPLLIVRRVLREQIGILHRRLLAIVRNDAVCRRLMTVPGVGPVVALTYRATVDVPSRFRNSKAVGAVFGLTPSKHQSGESNRTGGISRCGDEMMRMMLYEAAHIMLVRSAKWSWLKAWAMKIARHRGLKKAIVALARRLAVIMHRIWVDGTEFRWTREVAAA

SEQ ID NO: 489575 - protein, 379 aa, unidentified
MNDHIAAFVAFDTSKLRNAVAIAEEGRAGEVRFFGEIDNTAEATAKLVKKLAAKYERVAYCYEAGPTGYGLYRQITDLGQECMVVAPSLIPKKPGDRVKTNRRDALSLAKSLRAGELTAVWVPDGRHEAMRDLTRARGAAVEDVRQKGQQVSAFLLRLGRHYTGRTWTKAHLGWLASQKFEHPEQRIAFEELLLAVRQAKERVERLEEAIRLAVPDWSLAEVVVALMAMRGIDMVTATAFLAEIGDLSRFRTPRQLMAYLGLVPSEQSTGDTVVRGPITKAGNRRARRLLIESAWAYRHPPRVGKDKQAKVAAAPPAVREIAWKAQHRLYARYRALTRKGKRKTVAITAMARELAAFIWAVAREVANTDRAAAQQGIRG

SEQ ID NO: 489576 - protein, 350 aa, unidentified
MERYIGLDVHAASTTFAVVGESGKRLGTHVVETNGQALVEQLKTIPGKRHVCLEEGTQSTWLYEILSPHAEEVLVVMVPESRGQKNDAKDAFALAEQLRTGAIPKHVFKEVGEYGTLRELGRTHMMVVQDVVRVQNRIKALFRSRGIAVVGKNVYSEKGREACLKKLPHASRGAATTLYAQYDAVEAIRRQAEKDLVTDAHRHPMSRVLESCPGLGPIRVAQLMPIVVSPMRFRTKRQFWSYCGLGIVMRSSSDWVRKPDGGWARAEVKQTRGLNVNHNSTLKTVFKGAATTVITQLETEPLHQDYQRLIAAGTKPNLAKLTIARKLAAIALSMWKSKEKYDPTKHRKQG

SEQ ID NO: 489577 - protein, 338 aa, unidentified
MYYTGIDLHKRTSFITTIDQNGKVIFRRNFPNVEELILDYFRNLDGPTKIVIESMCSWYWLYDLLSANNFTTVISNPLKTKAIASAKIKNDKVDSHMLAQLLRADMIATVHVCNIKTRKLKELIRHRRRLVQDSARMKNRIHMLLMKNNINIPVSDLFGKRGMKLLKEVSLPGYHQQQFNSYLALLRYLTEQIEPLTEQIRDLAKKDPMARLLMSIPGIGFLTAMTIIAEIEDIGRFPSYRNLASYAGLVPSLDASADKCRTGRITKQGSPYLRAALVEAAQAIPRTKQSRLNIFFRKRIVRAGYRKAIVATAHKILQYVYYVLKNQVFYSEEYLARA

SEQ ID NO: 489578 - protein, 339 aa, unidentified
MQVTTVGLDLAKNIFQVHGVTETGEVAFNRPLRRAQVLAFFERLSPCLIGIEACASSHHWARELSQLGHTVRLMPPMYVKPYVKRGKSDAIDAEAICEAVTRPTMRFVEIKSEEQQALLSLHRARDFIVRQRTQLINMVRSLVAEFGITIARGVARAIEFARSIIDGKQPELPDLAKDVLRVLSRQLMDLHNRIDWFETMLRIQARLSRQAQLLQTIPGVGPVTASAVAATIGSGRQFRSGREFAAWLGLTPRNHSSGGKERLGKITKMGDRYLRQLIVVGMTSRVRQVATHPERADPWLTKLLQRKPARLATVAMANKTARIMWAVLTRDEPYKPHAV

SEQ ID NO: 489579 - protein, 445 aa, unidentified
MFIQSQDDSHCCYSFFIKVVILMMKLKYSICCGLDVHKNVIVATIVTTNKDGISEYLQKSFSTINSDIQRFHNWLIENNCYHVCMESTGKYWIPIFNYLENDIDICLTHPKYVKAIKGKKTDKKDSKWIADLYKFDLVRCSFIRPKDFRQLRELARYRFKLVCMKSSEKNRIQNCMTISNVGIASVLSDPFGKTATEIMSYLLEHTADSMDEKAVRKLIKKGAKAKSDEIIEAIKGYNIETDQAKKLELAQGHLEYLDDMITQTEVELYVRIKPYYEFVEFVSTMPGMTELSSTIVLAETGVDMDIFDDAKHLCSWCGLSPANNESAGKKKSVRIAKAGDYLKPMMVQCALAAIKSKKQPYFAIKYGRIKKRRGHKKAIIAIARMMMVCIYHMVSEKKPFTPTDYEELMNPQNHVERVVLNENNVFAYLESLGYDSSKLVKRNDN

SEQ ID NO: 489580 - protein, 317 aa, unidentified
MSERVAGCHVGIDVSKARLDVAVYETGEVWYTTNDSADYPRLVERLKGVSPQLIVVEATGGLELAVVAEVYQAGLPVAVVNPARVRDFARATGALAKTDPIDAQLLARFAQAVRPPVRRLPSDEDQQFAELVTRRRQIVEMLTMERNRLSSAPARSRERIQNHIVWLDTELAALNTERDEFIQQHTAWRERAELLDAVPGIGAVTVSALLSDLPELGQLNRKQIAALVGVAPFNHDSGRHRGKRRIKGGRASVRQVLYMATLSATRFNPIIHTFYERLLKVGKEKKVALVACMRKLLTILNAMLRTKQPWREAAVSV

SEQ ID NO: 489581 - protein, 358 aa, unidentified
MRIIGCDLHARQQSIAMLDTDSGELVEKTLEHDGEELRKFYSGLCRPVLVGIEATGAMQWFLEWMEELGIECRVGDPAKIRAAEPRKQKHDRRDAQLLLKLLSENRFPTIWMPSREQRDLRTLLRHRHQWVRMRTRVQHTLQSMALNHGLRRGHSLWNQAGQHALRALPLAPHASERRKALMTLYPSMQESIEELDEEVRQQAQQHPQARRLMTHPGVGPITALATEVFLGDPLRFADGKAVASYVGMIPREHSSGGRQRLGAMSKQGNALLRYLWCEAAMHAVGRDPELQRFYGRKLVQKGLGKARVAAARKLGIRLWIMMRDEIDYQEFCRRGEARQESGSVCAGMLDITSGPTKS

SEQ ID NO: 489582 - protein, 367 aa, unidentified
MGNDNIVWIGMDTDAKKNQVALYRGWETQPAAEWEAGMDEKGIKRLIERLKREEGEVRCVYEAGPCGYELYRKLRKAGIGCDVIAPSLTPKKASDRVKTNRRDARNLGRLYRAGELTVIGVPDEKQEALRDLTRAREDVREDLTRRQHRLNRFLARQGCHYQDGEKWTQKHWAWIRKIRLEDSNAETVREESIRAVEQSQEQLKTYDAKIEENAGKPEYAKKVERYQTLRGVKTVTAMTIVAEVWDMRRYGRAPQFMGSTGLVSSERSTGDHERRGKITKTGNAHLRRVLVEAAWHYRHRPIAGQAIKKRRQGQPEAVVSIAERADQRLNRKFRRMVDRYNKKPVIAAVAVARELAGFIWAIGQLQD

SEQ ID NO: 489583 - protein, 338 aa, unidentified
MAATIDATINATITAHLGIDIAKATFDVALLTAEGKIKPKHFDNSQTGFSHLETWLHQQFVTDPATLHICMEATGHYGHTLARYLHERGYCVSVVNPAATRAFSKCELARTKTDKADAARIARFCRAHQPRRWEPPSEEVATLQALVKRLETLQQMHQMESNRVEGAPEVVRESLQAVLSTLAEQIHTTERLIREHLHGHRALKEQAQLLESIPGIGAATAAVLLAELGDVTRFASAKQAVAFAGLCPRLCLSGSSVRGRERLCKQGRFRLRKALYFPAMVGLRHNPALRAMKERLSANGKRPMVILGAAMRKLLHLAFGVLKSKKPFDAALACPAGS

SEQ ID NO: 489584 - protein, 438 aa, unidentified
MKITEKTLEVNANHILNIGVDVSSRKLDVHFECPLQLNKREVYREQILNRSVEIEKALKNYLSLAQSKGFLNLRIVCEPTGPYSLNLLSMATHLNCLTAYVSGEAVKNSKIIEFNGTNKNDLVDAELINSLAERNKVLIHRTYSANYTRLRMLNSHYEDVDKAYVSARNQVHNTLKQLWPDYSSKLSLLYASTGQALYRCYGFNPWKIVSYNYSYFERRMRTHCKGVWSSTLKQIYRDAEESVRNHCSDAASTLESILSDHYENCLRGLERKASLKTEMKTILSEIREQDDRIPQARVNFISEFHIARLLAETGPLSDFKNLKQLTKYLGLNLRERQSGECQGRVRLSKRGRSLARKVLSLVVLPLTTQKALYGPDYHRIKTQKDKPGKLVMCIFMKRFLKSFFGIYRSHQSFDSRRLFIDRGSYEKLNSQEVLKAIS

SEQ ID NO: 489585 - protein, 389 aa, unidentified
MIYVGIDIAAAKHACCILSEEKKVIKQFTFANSASGYEKLRSALLSPAETKIGLESTGVYGNNLVEFLRRNGYTTHIFNPLLVKKSIQATTLRKTKTDKSDAKQIARYTMEHSQPDQLPSYHISELKSLSRGRFSLVRERSKAKTQAKTLLIQLFPEFSEAFSDMFGVTASAVLRSFPSARALSLCPANVLAEILSQTSRGRFGKAKAEYLIGLAKDSIGTQSIALELELQMLLQQIDLFTAQIAGYEAAIKSVMEEIDSPITTIPGIGYVLGAVILSEIGDISRFSTPAKLQAYAGVDPSISDSGSSVSAPGRMVKHGSRYLRWALCQAARCVSLYDPVFAAYMQSKRNEGKHYCVACSHVAKKLTRVIYSLLKNNSVYSPTYSLLSA

SEQ ID NO: 489586 - protein, 328 aa, unidentified
MTQPNRVVGIDIAKHKADACIRALGLRLSLAATQAGEREMIAWLRQHQVTLAVMEASGGYEQGWAKALRAAGIAVRIVDPKRVRYFAKSAGRHAKNDAIDAEMIAWFGEIFGAAGEESYDADRETLDRLVTARALLVKLQAAVRQLDEHEQPPVVLAAQRALLKVFATQIGKLEAAAEAKIAASPPLAARAKIIASVPGLGRHFTAGALAWLPELGHIGNKPLAALVGLAPYDDDSGEHAGERHIKGGRQEVRNLLYMATLGAATQHNPVLVPYYRKLRARGKKAKVALVACMRKIITILNTMLARNQTWNPPAAPAGDTPIAAAAPA

SEQ ID NO: 489587 - protein, 346 aa, unidentified
MTNVTIGIDLGDKNHEVCVLNLDGEIVERFSVKNTKKQLQKEFKRFLAPVIAIETGTHSPWISRVLAAMGARVLVGNARKLRVIWARSQKTDVKDAEMLARIARFDESLLYPIHHRSEQAQVDLETIKARDALVSARTDLINHVRGVVKSLGERLPACSADCFHKRAEIFMPDKLSDTLKPVVEQIGSLTQHIRTYDKKIERLATVSYPETICLRQIQGVGVLTSLTFILTLESSDRFDTSRSVGPYLGLTPRRDQSGQSDKQLRISKEGNVFLRRLLVSCGQYILGRYGQDSDLRRYGLRLAARGGKIAKRKAVVAVARKLAVLLHRLWSTGETYQPLYNAKNAA

SEQ ID NO: 489588 - protein, 338 aa, unidentified
MDVKVVGIDIAKRYFQVHGISASGVVTLRRKISRDGFLKLFADLPPCLVGLEAGSGAHHWAREIARLGHDVKLMPPQFVRPYVKTNKNDAADAEACCEAVQRPGMRFVPVKSREQQAAMALHRVRDHLVRQRTGTINALRGHLAEYGIIAAALRGGLNQLISIVEAEDDDEYLPASVKQLLRMLVAEIRAADARIAELDRKLKDHARDDEACRRLIEVPGIGPVIATAVVATVPDKHRFSSGRHFAAWLGLTPRQHSSGGKERLLGISKRGDAYMRRQFINGARALVRIASGRTGGYWDWINALLARRSFNVVTVAVANKLARVAWALQARGERWQAA

SEQ ID NO: 489589 - protein, 397 aa, unidentified
MEKGGEMFAGIDVAAERHMLARLDDDGMPMGRPTAFAEDAAGYRTLLEALGAPPVLVVMEATGHYWKNLYATLTAAGHDAVLLNPLVARRFQEAQLERTKTDAVDAIALARLGFEKRPAPTRLFDQAAEALRELVRHRDRLRQDFDDRVRQLHRLVDLGFPEFTRYVKGLDSMLATALIAEYPTAAAFARAQPRRLAKLRYDGCHKVGEDLAEALVAAAKRSVGQHHGPVYEMQARHICQDLDLWRRRLKEIEGDIDRLLDAHEIGRLLTSIDGIGPHSAARIIATVGDPARFRSPAAFAAYVGVVPGLRQSGKRTGSRAATSPFGNARLRRALWMAVLSAVRRNDWLKPFYERLRAAGKPPKLALVAAMRKLLHAVYSVARNRKPFTVTTEQARAA

SEQ ID NO: 489590 - protein, 389 aa, unidentified
MIYVGIDVAKDQHDCFICNGDGEVLANVFTIENSKSGFEHLLSIINTCTGIDDKKKVGLEATGHYSYNLHGFLLDNGLPTYVINPLHTNLYRKSLSLRKTKTDKVDARTIASMLMSDVSLKPYSQTLYHNEDLKSLSRYRFDKVKECSKLKTSVSRLINILFPELDKLVCSVHMTSIYALLSEFPSAKDISSAHLTRLTNLLYSVSKGHYNRDTAIKFRDAARNSIGCYMPAKTLELKHTIKLIRELNTEIKEIDIEIKRIMDDINSPILSVPGIGYSLGAMIVSEIGDFNNFSTPDKILAFAGLSPSTYQSGKLDNAYAHMEKRGSRYLRYALFNAAKLVCTWDNTFSAYLAKKRNEGKHYNVAVSHAAKKLVRLIFALEKSGRPYKV

SEQ ID NO: 489591 - protein, 411 aa, unidentified
MQVMVERCCGLDVHQETVVACVLVGAPGFRPQKEVRTFRTMTRELEALRDWLKAMGVTHVGMESTGVYWRPVYAVLEGHFELIVGNARHIRNVPGRKTDVKDAEWIANLVRHGLIAKSFVPPRPLRELRDLLRYRRKLTESQAAERNRLLRLLETANIKLASVATDVFGVSGQAMLKALIEGNASAEEMAGLAQGKLRRKHDDLVLALEGRVEEHHRFLLSLQLRRLEAAEEDIEALDLRIAERLEPYSLQHALLMEIPGVNWVVAAALIAEIGVDMSVFLSVHHLAAWAGVCPGNHESAGKRKSGRSRKGNVHLRTMLVGAAISASRTKGSYLRNKFYRLKARRGALRAALAIAHKILVAAYHMLAKGVGYRDLGEAYLDQIDQTRTAANLKRRLDGYIVQLQPKENAAV

SEQ ID NO: 489592 - protein, 343 aa, unidentified
METYVGLDVSLKRTSICVVDQTGKVLCEGTVNSTPEAIVEFVKLKATGAIRIGLETGPTLTWLWTSIRGLGLPVICIDARHAKAVLKMQINKSDRNDALGIARIMQCGWYKEVRVKSLDSHAMRALLESRALLVKMKRDLENQIRGLLKNVGLLIATARGQGLHARIQELVEGKPHLAVAVLPLLETRNGVVRQIAEFDRKVLMLARNDSQVRSFMTVPGIGPITALCYRATIDVPSRFKRSRSVGAYVGLTTRRYASGEVDWTGRISKCGDAMLRSYLFEAAGVLLTRVQKWCALKAWGLRLAKRVGLRKAKVAVARKLAVIVHRMWTDGTQFQWSTDKVAA

SEQ ID NO: 489593 - protein, 300 aa, unidentified
MNQEKYIGMDVHQATISVAVMDSSGKLIMECILETKAATILEFIVGLRGTLSVTFEEGTLAAWLHDLLKPHVSHLVVCDPRRNALLKDGSKSDRIDARKLAELLHANKLHAVYHGEHGVRTLKELGRSYLTITKDLTRVMSRIKALYRSWAIPCSGTTVYAVRHRAEWLAKIPEAGVRLRAERLYQQLDLLQPVRQGARRDLMVESHKHPAVKLLRQIPSIGPIRAALLVALLQTPHRFRTKRQLWAYSGFAVETHDSGEYRFARGKLIRNRERITVRGLNHNHNHDLKNLFKGAADNQK

SEQ ID NO: 489594 - protein, 372 aa, unidentified
MITMPKQIGSSKPGQVLDAVPGQLLVFGGVDTHADTHTVAAVDERGGLLGDARFPATAAGLDQLHQWLIGHGQLVQVGVEGTGSYGAGLAAYLTARGVNLVEVNRPNRATRRARGKSDPIDAEAAARAALAGVATAVPKAHTGVVEAIRVIFVARRGAVQARTAAINTLHQMIITAPLKLREQLQPLTRRQKIAACARFHAKDLTDPGRATRLALRRLARRIGHLTTEIDDAERDLTALVVDLTPQLLAEPGVGPLSAAQLLITAGDNPDRMTSPAGFAALCGTTPIPVSSGKTNRHRLNRGGDRQANSALHTIVLSRLRYHHQTQTYAAKRRAEGKTQLDIRRSLKRYLARHLFALILNPSEAADHTLLAA

SEQ ID NO: 489595 - protein, 280 aa, unidentified
MSAYIGLDVHKDWTFATVLDQDGRVVAQRKLENENVPSFLEKFNVLKVGLEASTYIVPLYRALVDRGFRVEVGHPKKTRYIAEARIKSDKVDSKAIAELVRLDALPQSYMPPPEIACLREKVRRRAFLVRERAKLKAKIRGVLAYEGLKPPEGLGLFTRKGVDWLRSLCLEPIDCYLRLIVVLNGEIRRLSRELKQLAGLDEDVRLLMTIPGVGYYTALLVKAEIGDVNRFKGGGRLYSYAGPSTYNSGGVTRHGGITREGSRWLRWAMVEAAMLSMKRA

SEQ ID NO: 489596 - protein, 369 aa, unidentified
MADYREAFVAFDVAKIKHAVAVADSGRAGEVRFLGEVENRPATIERTIGKLAKRYHRLHVCFEAGPTGYGLYRQVRDLGHDCMVVAPALIPKRSGERIKTNRRDAVTLARLHRAGELSAVWVPDIVHEAVRDLVRARQAVAEDLRRKRQQLLSFLLRHGRIYDAGGHWTLAHRRWLARQAFEHPAAQIVFQEMSDAIEDAAQRLHRFDEQLAAIVETWSMKPVVEAYQAMRGASFLVAVIFAAEIGDVRRFETPPQLMAFLGLVPGERSTGDTVRRSGLTLAGNRRARRALVEAAWTYRYPARVSEPLRARLEGLPKAVRDIAWKAQVRLCARYRRLAAAGKKPPVIAAAIAREMAAFLWAIGREVAPS

SEQ ID NO: 489597 - protein, 428 aa, unidentified
MKQKQNQRITRITEKTLVVGADIAKKTHVARAVDFRGIELGKDCVFHNDQEGLMRLTAWIKELSRIHEKTEILFGIEPTGHYWFPLAAFLKEQGIKLVIVNPYHVNRSKELEDNSQTKSDYKDAKVIANLVKDGKYSEPNLPSKEYTELRVLMNFREKVMVSLNQVKTRITNWLDRYFPEYSQVFKDWEGKASLMTLRQFPIPSEIVSIGARGILTHWKMEVKRGVGIKRAEQLHAAATASIGLTEGLIAARIELTALLEQYDLYCKQEESLMVSALQILENIPGTKQMLSIPGIGVLTVAGFLAEVGDLSNYDHGQQIIRLAGLNLTENSSGFRKGMTGISRRGRSRLRGMLFRAVLPMVAKNEEFKAMHEYYTTRTQNPLKKKQSLIALCGKLIRVLYTLGTKQKEYNAKNVLGPVRQAQLRESAA

SEQ ID NO: 489598 - protein, 417 aa, unidentified
MTQYAAYLGIDWADKKHDLCLVEATSGKKTKQVLAHTPQAIAEYFSNLRCRYPGQQIAVGLEQSRGPLLFALLQYDFLVLYPLNPTTLAKYREAFTPSRAKDDPTDADYASELLMKHSERLKAWHPDDDQTRTLRYLVEHRRRLIGDRTRLSNRLTSLLKCYFPQVLAWFPELTTVLVCDFLLRWPAWERLQGVKRITLLNFFRAHHSVRADTLERRLAAIKASVPLTTDRAIIDSSVLMITALAAQMKTTIGAIKQFDEAITKLCVVHPDFPLFQSLPGAGEVYASRLLAMMGTQRDRWTTADELACLAGIAPVMERSGQSVWIRWRYFCPKFMRQSFHEYAGESVKHSFWARAYYEQQIAKGKSRQAAVRALAYKWIRIIWKCWQTRTPYSEVKYLEALRKKGPPLLSFAATKAA

SEQ ID NO: 489599 - protein, 339 aa, unidentified
MQAMPVGIDIAKSVFQVHYIDADTGEIVNKALKRAVFLEYFSNRSPCLIGIEACGGAQHWARVLTRLGHTVKLMPARFVKAFNIGNKNDAADARAIWLAVQQPSKPIAVKTEAQQAVLALHRMRQQLVKFRVAQSNNLRGLLMEYGEVMGRGRTALNAAFPVVLARLVERLPAVLIDTLRDQWNGLTELDKRISEIERRLGQWMKQDTAVKAIAEIPGVGLLTATAAVATLGNANMFRSGREFAAWIGLVPRQTGSGGKVALLGISKRGDTYLRTLLVHGARSVLRIQKDPQSWTEQLRGRRPLNVAIVAQANKTARTIWAILAHGTKYEQGHISKGPT

SEQ ID NO: 489600 - protein, 340 aa, unidentified
MEKRYIGIDLHRNRFTCCIRLENERTYLTDWELEDLGKFVKKLRPADEVAVEITGNTRLFFDAVAAHVARVVVVNTNQFRVIRQSVKKTDPNDARTLALYLSKNMLPEVRMKDKEHGQLASLTQTRDTLVKLRTALKNKINNILSARGLNLAKEALSSEKKLAEVLELPFDEIVRIELRVIVGEIRSLNQSIAELEKTIGEEGSKLDGHKGLSSIKGIGKITGAILLSVIGDVNDFADEGHLASYFGIVPRVSNSNETERSGRIHKRGTKLGRTALVQSALIAANYSPYLKRFYEQVKVRRGAGKAIIALAKKFLGIIYRTLKNKWVFEDFPNFVLAEES

SEQ ID NO: 489601 - protein, 387 aa, unidentified
MTARTVSNLPAAMHVETARCLFAIELSKQSWVIGFITPLSAKISRRILSGGDWKGLLDLIEEVRARVSRETGRAVDVISCYEAGYDGFWLHRLLEAHGIRNYVIDPASLQVDRRMRRVKTDRIDTERLLRSLMAYLRSEPKVWSVVRVPSIAEEDARRLHRERDRLVSERVQHVNRIKGLCALHGIYDYQPLRPQAMARLEQLRTAQGISLPPRLNSEIKRELQRLELVVEMIATLEAERDAIVEDEASTHVNAKKIQNLHQLKAIGPEFAAVLVGEIFHRDFNNRRQLASYVGYAPSPFQSGNVAHDQGISKAGNRKGRTTGIELAWLWLRYQPDSDLSVWFRARVGTTKGRIRCITIVALARKLLVAVWRYLETGVVPRGAVLKG

SEQ ID NO: 489602 - protein, 505 aa, unidentified
MVAVFPILGEAATSIEPADGALDDPALRLDDKALRVVATPDDLGHEVGHDICDAVGEDRPDIGAVREQLAQKGELSEQSGQQQHAAIAVLHVGGGNQGVQQQPEPVDQDVAFLALDQLAGVEAMRIDRRPPCILPLPDAKQPAIVSMDGSPEPPRVREPEKKRGAPSIGSTGNPNSRLGRKPSPHSQGRVMEHLPTAPSFVGIDVSKDRLDVHVRPSGQTLAVQRNDKGLEDLVSELRKLAPALIVLEATGGFEVTVAAALASANLPVAVVNPRQIRDFARAVGRLAKTDALDAQAIALFAERIRPEPRPLADADSQSLAELVARRRQVVEMIGMETNRLHQAHNPQIQRMLRATLKTLTAQLAKLDRDIDNLIKRSSLWRAADDLLTSVPGVGDVTAHTLIADLPELGQLDRRRVAALVGVAPVNRDSGQLRGKRTIAGGRTGVRNALYMATLSALRWNPVISTHYHSLVDRGRPKKVALVACMRRLLGILNAIMRTKTPWQCP

SEQ ID NO: 489603 - protein, 406 aa, unidentified
MNMNAVGIDVSKRKSTVAVLRPGGKVVVKPFDVPHLSADFQSLEKLIRELDGETRIVMECTGRYYEPVARELSQAGFFVSAVNPQIIRNFQGQDNPLRKVKTDKADSVKIARYTLDSWANLKQYSLMDELRSQLKTMNRQFDFYMKHKTAMKNNLIGLIDQTYPGANTYFDSPAREDGSQKWVDFIGTYWHVDCVRKMSLSAFTDHYQKWCSRRKYNFSKSKAEEIYGKAKELIPVLPKDSFTKRIIKQAIDQLNAVSQTVEQLRALMNETASKLPEYPVVMAMKGVGPSLGPQLMAEIGDVTRFTHKGAITAFAGVDPGVNDSGDYSQKSVHASKHGSPVLRKTLFQIMEVLIKTKPDDAVYRFMDKKRSEGKPYYVYMTAGANKFLRIYYGRVKEYLSSLPESE

SEQ ID NO: 489604 - protein, 525 aa, unidentified
MQETSISISMERIETVPIKAMANTTCGLDIHKDKIDACILINDGTEAGTAVHKAFSTMRGALAELRDWILSFGCSDVLMESTGVFWMPIYFLLEAVENMNVGLANAYHAKNVPGRPKTDKEDAKWMARLCMWGMVLKSYIVKEPFRNLREYTRYYKKLVQEQSRHKNRIEKLLQMNGFKLSSVLSDIYGKSGLGILAKLSSQGSLTVADISAVLDPRAKSTPEEVAYAINGELKQTSRALLKFQLAKLKANDKALKEIYQCMVELSKDYTKEIGIIASIPGLSELSAMYIIAEIGTNFDSFKNSNYLTAWAGLAPKKNESADKSRPSSTKKANRYIKSVLVECAWAATRTRGSRLSIWYWHNVNRLGKKKAITGVARKLLRYIYAMVQNGTLYDASLDRVQEQNYRARKLDSARKIVDSNKPYSDSEEPTGLLAEKQKAAPDNPQASALEPPPDSTPVKKRGQPKKKLEQATENDATISASHTTSGLSQPDRARQPGPTDVPVKKKRGRPRKNPVSNNTPLAPTT

SEQ ID NO: 489605 - protein, 364 aa, unidentified
MLIIGCDYHPGFQQIACVDTDTGELSEPRLAHREEAEAFYRILKQRNLSVRVGMESSGHSRWFERLLYELGFELWIGDAAEIQSRRVRKQKTDRLDAQLLLRLLLENRFPRIWVPDAENRDLRQLLWHRHRLVQMRTRVMNQLHVVPLNEGLRRKKALWRPAGRKELESIALAPWASRRRQDLLDLLDQLTPKITQLTRALEVEVEKRPVTRLLMTHPGVGPLTALAFELVIGTPERFHCGKQLASYVGLVPEEKSSGDRRRLGHISKQGNVLLRFLLVEAAQVTVRSQQEWRSKFFHLAMRRGRKIAKVAMARKLAVHLYWMWRQGCDYGQTPKLGSHAGEPGHPDGVQSSTDVMIGHPAPSK

SEQ ID NO: 489606 - protein, 441 aa, unidentified
MRVMYERCCGLDIHKASITVCALITEKGKTQEETRRFGTMTADLRELAGWLQQKGIRHVAMESTGVYWKPVWNILEPAGFELLLANAQEVKIVPGRKTDQKDSQWIADLHKHGLLRNSFVPPRAIRDLRDLTRARAILTQEHTSVCNRIQKVLEDANIKLRSVASDVFGASGRAILRALMKEENDPEALANLSKGKLRNKIPQLRRALEGQVTAHHRELITGHWNRMEFLEHQIADLETQIAERMKPTPAEMAPAMQNASEDAPVPLSPREEAIQLWMEIPGLSWTSACSMVAELGVNMDQFPTAAHAASWAALCPGNNESAGKRLSGKTRKGNIWLRRTMCEVAWAASHTNDSYFAAQFHRIASRRGRKRALMAVAHSILVTAYSMLKHKRHYKELGAGFFDEINRDKVRDRLVQRLGKLGFDVTLESKGAVESAADVTE

SEQ ID NO: 489607 - protein, 354 aa, unidentified
MKRTAKYVGLDVHQATTVVSVRDPGGRVIAHSILHTEEREVVGFLRGLRGSVSVALEEGTQAQWLHDVLEPVVDQVVVCDRRGKKRQGNKGDLVDADEISEQLRLGTLRPVYHGSAHQANLRELARTYRGVVGDATRVMQRLKALFRARGIKTPGARVYHPATRSEWLDKLPKGGARFRAEVLYAQLDVLRMQRPKVKAAMMAEARRDPAWDALRSVPFLGPVRVAQILAIARTPWRFRNKRGLWAYSGFAVVTAASSEYVLVDGRPVRRRRAPITRGLNRNHNATLKDIFKGAATAAIARPGPLQDLYLAMTEGGMRAELARLTLARKIAAVSLRLWKTGERYDPTKLTMQAR

SEQ ID NO: 489608 - protein, 337 aa, unidentified
MGLYCGIDLHSTNHVMTVIDEGDRRLYERRLPNDLAITKAALEPFRAQLVAVAVESTFNWYWLVDGLMDAGYEVRLVHTGAVVQYDGLKHTDDEHDAFWLAHLMRLGILPTGYIYPKSERGLRDLARQRMRLVQHRASHITSVQNQVWRSTAVRLSGHTIKGEGKQPWPELRDADLALSVETGRAAIDALTVQIERLEEVLLKRVGLSPQFRVLKTVTGIGPILALTIALEVGDIKRFPGVGEFASYCRCVDSQRLSNAKKKGEANRKNGNPYLAWAFMEAAHFAIRYLPAARRFYERKCRQRNALLAVKALAHKLARACFYILRDQVPFAPERLFV

SEQ ID NO: 489609 - protein, 348 aa, unidentified
MTLVGCDLHSRKQQVAALDTTTGEVLEQELAHDGDAVERFYRALRPPVTIGIETTGYTQWFHALMHRLGHTVLVGEAGRIRAMVVRKTKTDRRDARHLLDLLKHDRFPTVWMPDPDTRDLRALVAHRVRLVRMRTMVKNGLQAIALNQRLALRSALWTQRGLAQLRGLALPPHTTRRRDDSLELLAWINVRIDQLDAQLAAVVDADPRARRLLTHPGVGPLTALTTVLVLGPVTRFPDGKHVVSYVGLAPAINASADKHHLGKITKQGNALLRWVLGQAAPQAARADDELRRRYFAVLHRRGRPKAKVALARKLLVRLYVMLRDQIDYEEFRRRGRAGQASRAPVTVT

SEQ ID NO: 489610 - protein, 352 aa, unidentified
MRKYIGCDAHQKYSVFVAMNEAGEYGKAVRVENRRAELRTFLRQIPAGTPVAVEASGGWYWLIDELEAAGLDARLANPTEAKKRMPGRNKTDERDARGLALLLRNQTLPEVWIPPAPLRDLRGLLRTRLALRNDRTRVKNRIHATIRRYGLRDDSLKDLFTGKARVRLSVYIGSLPEETREAALHEWMLVDELSGYLKQLEARLAERLKNEPQWRLLKTLPGVGLILGATLHLEIGDVGRFPTAMHLASYAGLTPLVHASGGRTHLGPTSKRSNHYLRWAFVEAANCIVSHQKELGEQHVVCLYRRLAARKGHAKAAVAVGRHLAEASCWMLTKGDPYRAPSQRVETSSEIG

SEQ ID NO: 489611 - protein, 430 aa, unidentified
MKSNTQNAKIEAITEKTLVLGIDVGSETHYARAFDYRGIEYSKKPFKFSNTEAGFVTFKEWILDIKERHEKDKVVLGMEPTGHYWFNLGKFLQDNEMKPVLVNPHHVKKSKELDDNNPTKNDRKDPKVIAGLVREGRYMIPYLPDGVYADLRTASNIRFQLQAELTRIQNRISRWFNIYFPEYKTVYGKPDAKSGILILKAAPLPEDILTLGIDGVNQIWRDAKLRAVGKARAKTLIEAAGHSVGSKEGAVSARMEIRMLLEDYESRNTRLQEVMVLIEELVRKIPMAEKLLEIKGVGIRTVSGFLAEVGDISRFNNPKELQKLAGLALVENSSGKHKGETTISRRGRKRLRYLLFEVAMSLVAKNPEFRELHNYYTTRRLNPLKKMQSLMAIAAKLIRVFYVMLTKGVNYDPKKMVNDIKRPAVYLQTA

SEQ ID NO: 489612 - protein, 369 aa, unidentified
MNKISVIGLDLAKNVFQVHGVDSVGEVVVRKQLKRSQVRRFFTNVEPCLVGMEACGGAHYWSRELTGLGHTVRMMAPIFVKPYLKSNKNDRKDAEAICEAVQRPSMRFVKPKTPEQQCVLHLHRARRLLVRQRVALSNHLRGILSEYGIVLPQGTKALSGRLPALLEDAENELPMLTRHLLAECKEEHDQLMERVERLEAQIKDWHANNSVSQRLASNPGIGVLTASALAATVGEGQDFRNGRQLAAYLGLVPRQASSGGKVRLLGISKRGDGYLRGLLIHGARNVIYHVRRRLMAGQPGGNAWVERLLQRAHPNAVAVALANKMARIAWVLLVRNQTWCCLSDYFTSNYPSYFAADTARVPTLHPPVG

SEQ ID NO: 489613 - protein, 398 aa, unidentified
MFYIGIDIGKRHHEVGLIDDQGNPVGKPLRFANSKAGSEKLVEFINHHHLTPDNAVVGLEATGHYWLSVFSFLHQLGFKTTVFNPLQSDALRHFYIRKTKTDVRDAYLIAQVIRIDSPEETPFLEEDLLQLRHLERLRYSFVDQISDLKRKIISLLDQVFPEYEQVFSDLFGKASSEILLHVPLPEDILKMDTEKLAAVLNRVSKGRLGKSRAYDKALQLKERAEHTFGISIGTDVFKMQIQLLLEQILLLEKHVNQMEAAMIDISNRQQHFLTTITGVSDVTASVILGEIGTIDRFERPEQLVAFAGLDASVHQSGDFHSSGTRLSKRGSPYLRRAIWQAGFVASFHDPALSLHYQQLRKRGKAHGTAVGAVARKLTHIIFAILRDNKPYVPRSPHN

SEQ ID NO: 489614 - protein, 333 aa, unidentified
MHHCAIDLDGRKSRVCIRAADGRLLFEGEQNTSSLPHYLRELPRKCRVIVETAAEAFRVTDAAIAAGHEIRVVPATLVRTLGVGARRTKTDRRDALALSEVSCRIDLPSVHIPSPQSREWKTICGMHDVLVATRTRLINNLRGWLRGQGKRLRSGQASTFAKRIRALQPLPEYAAMQVDALTVLDDKIKASEERIAALARGSELCRRLMTAPGIGPSTAVRFVAAIDDVSRFDLAHKVEAYLGLAPGESSSSERQQRLSITKAGPTTVRWILVQAAWVLQMRFRSSDARPLQLWAAEVAKRRGRRAATVALARKLGGILYALWRDGTSYQPYT

SEQ ID NO: 489615 - protein, 400 aa, unidentified
MNAVGIDVSKGKSKVAVMQPFGVIIAEPFDVLHTDSDLKELVKFIKSLTGETKVVMEYTGTYYEPVANALHNAGIFVSVVNPLLIDDYDINRIRKVKTDRIDALKIASFALDKWTRLCEYTPSETARKTLKIMNRQCIKLNKILVMQKNSFIALLDCCFPNANTLFTSLRRESDGHEKWVDFVLKFPHADSVAKLSLSAFKAKYQSWCKKERYKYSESKAEQIHAYARTLVCTLPMTETVRKMIADSAKLLNSTLEALANFHNEMDSLASLLPEYETVMSLFGVGKVLCSQLIAEIGDVTMLKSRKSLIALAGIDPPPNQSGKDDSKSRSISKRGSPALRKTLFLIMTIYLQRQPVDEPVYQFLDKKRTEGKPYKVYMIAAANKFLRIYYARIKEAIPVQ

SEQ ID NO: 489616 - protein, 344 aa, unidentified
MEITTIGLDLAKSVFQVHGVDATGQVVVRRSLRRAQMLPFFARLPSCLVGMEACGTSHYWARELIKLGHQVRLMPPAYVKPYVKRGKTDAADAEAVCEAVARPTMRFVPVKSPEQQAALSMHRTRDLLVKQRTQLVNMIRGLLAEFGTDIPKGLERALLMARRIVDGEAPDMPMEAAKIVGTLSQQALAIHIRLREIDRDLLVWQRNNDVARRLMTIPGIGPVGATALAASVTDPHQFRSGRQFAAWLGLTPLQKSSGGKERLGRITKMGDKYLRKLLIVGMTSLVRRAKHNPKTVDPRLADLLARKPVRVATVAMANKTARIVWAIMARGETYRAGHRPALAT

SEQ ID NO: 489617 - protein, 444 aa, unidentified
MLKSSRETKYEIENLGDVIHPVCCGLDIHKTWIYAAILIYNFEKKQIHWITTRVTSFKKKLDKLAKWLIVNGCKYICMESTGQYWIPVFDTLEDAGLKPIVAHPKYLKVLSGKKSDPNDARWIAKAFACGRVVASFIPPKVIRNLRSLVRFMIKISHEATSNKNRARNCLTSLGLKLDDVFSDVFGKSSRSIINYIIAHPGEKFDVAPFVDKACKTPIAMIQDSIDKAIDAKQDAGTLLKLRKALERLDDAEKDIQELKGNITQQMGAYKKQLDLIRTVPGFDTDPFTAMRVLIEIGPDMKVFPTMKHFCSWAGVCPHHDSSAYKVKGRRISRSGTYLKPLLVNIAKAVVRSKNHPEISQRFNRIKNRRGYMKAIIAVCRMFLTAIWNILSKGEPYRADGFMPVNNGNNKAISISQALAYVRSRGYAIIDDNSGALTTTGSQGT

SEQ ID NO: 489618 - protein, 430 aa, unidentified
MKQYELLHSLFVGIDVSMKENVVHAMPFSPEDHPGHAHLRFSAPNTPAGSVGIVEKVSDFLKFYPDVIQVVIALEATSVYSFHLATFLSVAHFNGHIPAIVYSVNPKEIHAYKKTFTDVGKDDYVDAMVIADYARSNKIRSRPWKGPELLGLRVLTRLRFRIAKLMGIVKNSTGNSIYLECSGLMTGENPFCNVWTTTCQELLTTFQGPDEILSLSDEELLNFITEKGHGRFSHPLDVVEKVKKAARNSYRLDKRVYEPLTSGLSVSFFIIHSLEAAIKKLDKSIETMAKSFSSDSYQILLSIDGVGPVIAGGLLAEIGDIKRFKTDDALAKYIGLTWRGKQSGQSESPVKHLSKAGDVYLRYYVLLATGQIINYSAKYREAYERIRIRKTLFPYRAALNLVARKIVRLIFTLLDKHQLYSDNKVMVTLE

SEQ ID NO: 489619 - protein, 331 aa, unidentified
MAHIGIDVSKAKLDCLWVRDLEQGKVKTKVFKNQPDAFPSLLHWLQQNTGESVDQLHVYLEATGIYHEPLAHWLYEQGVSVYVLNPAQVRYHAQGMGVRSKTDRKDSMMLARYGIERSPEPWQPEPPEVRELKRLLGRLDALEEDIQREQNRLEKAQFNGDSLAVESITNVLNALNEEHERLRQSIDDHFDRNEHLKQDRALLETIPGIGKVLSPYLTAAIRSRDFASARQVAAFFGLVPVEEESGTSVRKRPRLSKAGSAKLRQKLYMGAVVAAQHNPDIRAQYRRLCQRGKAKMAAIGAAMRKLMHIAYGVLKSQTVYQPQAENALKGA

SEQ ID NO: 489620 - protein, 315 aa, unidentified
MGKFIRIGVDLAKNYFQVHALANECSPVVKRKLMRSKMHRFFSQIEPSSIGTEACGSAHYWARELKAMGHDVLLMPPSYIKPYVKRGKNDAVDAEAICEAMSRPGMRFVPIKHGEQQATLMLHKTRELLVKQRTMSVNALRSHLSEFGIIIAKGIGRIGELLKLAEVDTTLPDAAKTVVKALAAILERIEKAIDDLEGQIADAHARSDMNRLLARVPGVGKLIASVITASTPDPSVFRSGRDFAAWLGLTPRQNSSGGKQTLGGITKQGNRYIRKLLVLSATSLLRSVSKRKGALADWISALLAKKPAPPGSSGR

SEQ ID NO: 489621 - protein, 387 aa, unidentified
MPQLNDLSRSLQAFEQNKTLVAVLEMSQSTWLAAGVVPGVERRPLKKLDPDPAALLRLVERWRDQAVKAGHAITRVVLAFEAGRDGFWLARWLRARGIEAHVVHSTSVAVSREHRRAKTDRLDTEMLIRVFLGWLRGEPRHCKMVAIPTLDEEDARRPSRERESLVGERTRIINRMKAALIRLGIRGFKPELLKAPQRLEALRTPEEIPIPPNMLAEMRRDMARLAWVREQIETIEQARLDRLEHAPANGPHAMVRLLARVVGVGVETADMLVQEVLSRNLRDRRAVARYAGVTGSPDESGAKRREKGLAKAGNARVRRGLMQLAWRFLRFQKESALAKWYRERTEGAGKRKTTMIVAVARKLLIALWRLVTVGEIPTGVTLRAVAA

SEQ ID NO: 489622 - protein, 375 aa, unidentified
MKGTSPSRGVRVEAEYGNEVPRWEVRNLINSLQKGKSMAIVYVGIDLAKNVFAVHGVDEAGKPVLVRPAVPRAKLHELIASLPPCTLAMEACTGAHHWARLFVARGHAVRLIAPKFVTPYRMSGARGKTDAADASAICEAVQRPNMRFVPLKSEQQQSQLMVHRARQGYVQARTACINRTRGLLAEFGHVLPLKAHTVRRQAAGLLEELPGWANTVIGDLLSELHRLDERIAAYDRHIAQIAREDERAQRLMSLNGVGATTATAVVAMIGSGHEFKCGRQFAAWVGLTPGQYSSGGKTRLGRITKAGDGYLRSLLILGARSVLALAKSRSDGLSGWALALQQRRGYWKAVVAIAAKNARMAWAVLRRGESFKLPT

SEQ ID NO: 489623 - protein, 370 aa, unidentified
MDVVHPRCAGIDISKKDAKVCVRIQGRGNRRTSSTVTTWGAMTNQILALREHLLERKVTCVVMEATSNYWRPFYYLLEELLEVMLVNAHDVRTVPGRKSDVSDAAWLADLGAHGLVRASFVPPEPIRVLRDLTRARTMITHERTREIQRLEKLLEDTGIKLSSVATDVTGVSGRLMLEALIDGRNDPVQLSQLAKGRLRSKIPVLTEALTGHFSAHHAFMTRLFPGRIDAHTADIDKLSARIDEAMAPFRPARDLLISIPGFSTTVAEIFIAETGGDMRVFPTAGHLASWAGAAPGSNESAGRVKSTKTRPGNRYLKGALARRRPRRLPLQGNLFLGEVPAHRRASGADEGSRGGGARDARRRLEHAHPR

SEQ ID NO: 489624 - protein, 317 aa, unidentified
MTQKRTLVGLDIAKGKIDAAIRPVGAEASFANDAAGRRQLLDWLAGHGVGKAVMEASGGYERAWAGLLRAAGLEVVVVDPKRVRHFAKSAGRLAKNDPIDARMIAWFGEVFEDTSGQVADEDRQELDQLVMARLGVVRLKALVESWGEHEQPKAVQKIHQALLKAIAVQLAKLETVIAARIAKVERFARQAEILHSVPGLGDAAVAGLIALLPELGRVDRQAAAALLGVAPYDDDSGERRGQRHIVGGRRKLRTLLYMPILSAIQHNPVLKAYYQRLRARGKKPKVALVACLRKLIGILNTMLLRSEKWNPAKHAIA

SEQ ID NO: 489625 - protein, 412 aa, unidentified
MSVVQFTQVLLRGCGMDIHKKVVVATVQGEGICKETRSFDTFTRSLTQLREWLVSLGITHVAMESTGVYWKPIYNVFEGFIPHIWIVNARHIKNVPGHKTDKNDSEWICQLLMAGLLKPSFIPPKAQRELRDLTRYRRKLIQFVSANKNRIIRILEDGNIKLSSVLRDTSGATAVKLIDMLCDGKQITLSDIESVCHGRCQHTKEEMLEACTGCLDEHKVYMLGKIRECNASLKEDILDFDKRIKDVSSSYHDAIERMCEIPGIQNCVCEDLVAEIGLDMSNFPTSAHLCSWAGMCPGNNESAGKKKSGRTNHGDKQVKETLVEAAWAASRAKGTFFMERFNRLAPRKGSKKALIAVGHSLLKCIHYVLSTGGRYKELGDNYVPNKKEQKRKEYLKKELQKLGYSVKLSKED

SEQ ID NO: 489626 - protein, 343 aa, unidentified
MQQKATVLGIDLAKRVFHLVGMDDTGHIVLRKRLTREALMPYIAQLPRMIIGMEACGGAHYWARRFRAHGHTVKLIAPQFVKPYVKSHKNDPADAEAICEAVTRPTMRFVPVKEVEQQDLQSLHRARERVVKARTALVNEIRGLAMEYGLVFPQSVTKFRQTFLATLEAEHDKLTPLSTELFGQLYDEFGALEKRLAYYNEKIEAICAAHPVCQRLGTIPGIGPLTATALVAAVSDASHFKNGRQFAAWIGLVPRQHSTGGKARLLGISKRGDVYLRTLLVHGARATLRWVRLKTDRRSQWSRALIERRGKNKAAVAVANKNARIVWALLTTNQVYTAEPTAA

SEQ ID NO: 489627 - protein, 409 aa, unidentified
MSFTLESIPIQRFIGIDSHKHYVMVGGMNQQRKWVLRPRKISMARFRDWAAKNLRPDDAVVLETTSNVWDIHDVISPLVSKTLVANAYKVRQIAEARVKTDKEDVKRLLTLLIANIVPEVWAPPIHVRELRSLISFRSRIGKQLTMSKNRLHSVVQRFNLIPPDGELLADKNQSWWLEQDFSELTALQLQLDLEIITHLEAQKNKIDQKLALLSNSQPWANDVVFLMQIPGFGLLTSMTILAAVGDISRFSHPKKLVGYAGLGAGIHESGQKHQQKSITKEGRKELRWALGQAAWAAVRSDPYWKEQYKRLSQHKHPNQAIVAIARRLLVSAWHILTKREPYRRSDDETIAYKMMTLVPMRDLVSTHGRNRTPRPHSPAVYQIWLASPRRWTSAHSYCSQRQTQTDCSL

SEQ ID NO: 489628 - protein, 411 aa, unidentified
MQVVHARCCGLDVHKKSVVACVLITDEDGAVHKQVRTFGTMTADLLVLEEWLSRWEVTQVALESTGVYWRPVFNLVEEGRTVVLVNAQHMRQVPGRKTDVKDAEWLADLLRHGLLRASFIPPAPIRELRELTRYRKTLVQERTDEINRLQKTLEGANLKLASVASDVLGLSGRAMFAALLEGERDPEALADLARGKLRAKLPALRRALDGRVKPHHLVLIGQLIAHIDFLEASIAQVQQAIEPALAAFADAVELLQTIPGVGELVAAAIVAEVGTDMSRFPSAKHLASWAGVCPGNKQSAGKRLSGKTTKGNTWLRAMLGEAAWSVARSRGTYLAAQFGRIARRRGKPRAVVAVAHSILVSAYYMLRDRRPYQELGPNYFDSLDAVRLQHHHVRRLQQLGYQVTLVPHVAA

SEQ ID NO: 489629 - protein, 377 aa, unidentified
MSKDTLYVGLDTDKKHIDVALAEALPGGEVRYWGQVANEASAVARLVKRLQAGGRQLEMCYEAGPCGYGLYRLLNGKPAVRCRVVAPSMTPRRPGDRIKTNRRDSVALARLLRAGELTAVWVPDATHEAMRDLVRARGAGVADLLRCRQRIAGFLLRQDIRYAGKPWTKKHRVWLGQLVPALALPAHRLMLGEALQALDDTTARRDRLTDHIAELVPDWSLAWLVDALQALRGFALINAATLAVEIGDPRRFAKPSQLMAYLGLVPSEHSTGERVRRGGLTKTGNGRTRKALIEAAWTYSRPARAPRNNARHAPAVAAIAAKACHRLSLRYRRLTNTRGKRPIIAVAAIARELSGFVWAIAQVAGPAAATPERSTRR

SEQ ID NO: 489630 - protein, 335 aa, unidentified
MYYLGIDLHKDESHVAVLDDDAEVVEEIRVANANLDDVAEEYAGAKAAIEATSNYYTVYDTLDEHLDVVVADPSQTKAIGYAEVKNDRLDAKLLAQLRRAGMIAESYVPSEELRERRALVRGRKRLVEKRTDFKNEVHALLDKHGITYDWDPFSVNGREILAGEDFSLGVVGDQLMESFLSIIDELTSQIEELESLIEETAASLEETQLLMTIPGVSFYSSLLITSEIGEIDRFDEAKQVVSYAGLDPVVRESGDSRTEGSISKRGSGDLRWILVQCVQTAVHRCNDPYLGRFYARLKQRKNHQIAIVATARKLLVSIFHMLEREEVYDPPEVSA

SEQ ID NO: 489631 - protein, 391 aa, unidentified
MIYIGIDVAKDKHDCFITNSEGEVLFNAFTIPNNADGFHDLFQKISSLTNDFSNVKVGLEATGHYNYNLLGFLIDKGLPTFVINPLHTNLFRKSLSLRQTKTDKVDAHTIALMMMSGVNLQSYSNTSYHNEELKSLTRYRFDKVQERAKLKTSISRLVNILFPELEKLVPSLHMVSIYALLAEFPSSAQIASCHLTRLTNLLANASKGHYNKEKAIEIRNAAKHSIGSNMPAKSLELKHTIRLIQELTSEIDEIECSIKSIMDEIRSPILSIPGINYRMGAMIIAEIGDFNRFSSPDKILAYAGLSPSTYQSGQLDGCYSHMEKRGSRYLRYALFNATKFVCIWDNQFSAYLAKKRSEGKHYNVAISHAAKKLVRVIYQLEKSGQLYHRAA

SEQ ID NO: 489632 - protein, 526 aa, unidentified
MKETIVKHLPPSQLGNDRLRPTVGFIIMSLSGARRRHILGVIPSPGTSLRGGASGLADNRYGMPFPGQARGFIWLPGGYFNLGRRIEAPEPESVVAKSQPEIRAPDFNLEYSMKAQPESRTIHRYVALDLHKEYVMTGAMNAAQEWVLRPRKVEMMRFREWAAANLRQGDAVILETTGNVWDIYDIVAPLVTRTVVAHAGAVRQIAEARVKTDSEDIKRLLRLLIADIVPEVWVPPAPVRELRSLISYRNRLVKTATMIRNRLQSLLHRHNLKLGENGLTDAEWWESQPLSALEKLQVRQELALLSRVEQSKAELETELAKMSMSAKWGKSAVRLLQLPGLGLITAMTVLAAIGDIRRFASPKQLVGYAGLGAGIHQSGKEHQDKGITKSGRKELRWALVEAAWRAVRSSEVWKQRFDQLAKRRGEHKAITAIARKLLVTIWYVLRREETDRHASEEDLAYKMLVLSWELNEEARLGLTYKQFAKYALMKLGIETDITRFVRKNVPRRVAPRDEVLARMKELGLSL

SEQ ID NO: 489633 - protein, 345 aa, unidentified
MELHTIGIDLGKTVFHLVGLNLRGEVVVRKKFSRKQLLHFTANLQVELIGMEACGGAHFLGRALREQGHEVRLMPAQYVKPYVKTNKSDYIDAEAIAEAVGRPKMRFVPIKSDDQLDLQSLHRVRERWVMRRTAVINQIRGLLLERGITLRKGRCHVDEALPGILEDASAKLSGALRVLLAQLKLELDHLQMRIDEADAVIKKTAGENEACRRLVAIPGIGPITATAVIAAIGNGAAFKKGREFAAWLGIVPGEYTTGGKQKLLGISKRGNSYLRRLFVHGARAVLQQSAKQSSGLSAWLAQLTARTHRNVAAVALANKLARMAWAVLAKNEPYRPPMLADAATA

SEQ ID NO: 489634 - protein, 343 aa, unidentified
MDKISTIGLDIAKNVFQVHGVDMSGRAVVRRQVRRRQLLPFFSKISPCLIGIEACATAHHWARELRKLGHDVRLMPARYVKPYVKRHKNDAADAEAICEAVTRPTMRFVPVKTVDQQSLLMVHRTRQLFVRQRTSLTNAMRAHLAEFGIVAGVGRNGVDKLVALIAEGRDQRVPPEARDCLMALAAQLDLMRRQILDADRRILAWHRQNSMSKRLEAIPGIGPLGASALVASIPDPHVFRSGRDMSAWIGLVPKQNSTGGKERLGAISKAGNKYLRKLLVIGAMAVIKRAKILGHTRYPWLAKLMERRSVKVAAIALANKNARTVWAMMARNQSYRTPPPAMA

SEQ ID NO: 489635 - protein, 346 aa, unidentified
MLYAGLDLSRKRLDFHLLDGEGATLEIGAAPPDADGLDGLTERLARHGAPIRAAIESMNGARFVHDRLELAGWQVDIADAQKVKGLAPLACKTDRIDAWVLAELARRDLVPAIWLPDPRVRAERERARWRLHLVRHRSSLKQRVHAVLLTHGKPCPVSDLFGVRGRQLLARLGLPEPWQGTIEASLRLIDELDREIGDCERELRRLGADHHYVPLLCTVPGISWVLAYTIAAEIGDIGRFPTPRKLVGYSGLCPRVYQSGERDLRGPLAKQGPRYLRWALVEAATHACTHPAYRQRYTDTKARIGKQRGAKVAQVDLARRLAEAIWHMLTREQPFAPAGATDPLAA

SEQ ID NO: 489636 - protein, 391 aa, unidentified
MPDVRSSVSAKTTETWVALDVHKDSIAAGIMSAEGGPPEVVQFENSERAIRRFLRRLGDPQALGVCYEAGPCGYDLYRLLTSIDVACDIIAPSLTPVRSGDRVKTDRRDAVKLVRLYRAGELSFVCPPTPVQEGLRDLVRCRDDLRCARTAARQRIGKQLLRYRRIFREGRGHWTQRHGVWRRAQRLDDPLAQTALEHTLCHLGALDAQLLAIDAQLDEIAREEPWREAVEALTCFRGISTLTALSLLAEVGDFHRFASARELMSFLGLTVSEYSSGARRTRGSITKTGNRHARRLLVEAAWHYQHPPRLSARIRAHEGRVAPEALARAWQAQIRLHHRHRHLTGRGKPATVATIAVARELCGVLWATMTDQPVRADRPEERRPSKEVLVA

SEQ ID NO: 489637 - protein, 345 aa, unidentified
MVTFAPAITSPTSPTSLTSPPSLASPASPTFLGIDVSKASLDVHFSDGRAALGKLDNRGVSIKRFVAQLSKNPPVLAALEATGGYENAVLHALLDAGVSVVRVNPLRVRRFAQSRGQQAKNDALDARVLADFARVNVDRLRPMARLSDTARMLKELVARRRQLVEQCTANKSQLEHAGFPQVRKSIRATLRHLQGQIAAVEALIQEQIDQDADLRRRQEILLTVKGVGLAVSRVLVSELPELGNLDRRQIAALVGVAPFDEQSGTVNKERHIRGGRATVRAALYMATLVATRRDPVIKAYYQHLKGRGKPKKVALVACMRKRLNYLTSLLSKKSEMPPDGGGGAK

SEQ ID NO: 489638 - protein, 315 aa, unidentified
MTNLNKSKTIVNVGIDVGKFTLDVYIYEKAIYFQVDNTTEGIKKILKRISYYNIQRFVMEATGRYEFELAQAAHNKNLPVCIAKPSSVRNYAKAINLTAKTDKLDAELIAEYAAIVQPPITPKKSKNLIAIKDLISRRRQVMGMRTQELNRLSIMGKGFEVSCKRIIRYLDQEIKRLELRLSKHVNDQAEWTEKQSILKSAPGVGDTLIYTLLADLPELGNLNRKQISSLVGVAPMNRDSGKLRGKRRIKGGRYSVRTVLYMATLSATQCNPVIRAFYQQLVAQGKHKKVALTACMRKFITMLNAMVRDKCVWAY

SEQ ID NO: 489639 - protein, 421 aa, unidentified
MLKIHRFNCAGLDVHKNLIVATIGITDKKTRVTEYIQKDFSSLNYDLYNLKNWLIEHKCFDVCMESTGKYWIPVFNILETESKMNIVLVHPKYVKAIKGKKTDKKDSKWICDLFKHDLLKSSFIPPKDIRELRDLSRYRFKLICMRTSERNRYQNSMTVSNIALASVVSDPFGKTAKAIMNEVLSTEAIDEAKITKLIHGSCRNKDKIIESLKNSKIEPDQRFKMTEIQSHMNELDKHIEAVEIEIIKRASRYFDDFIHITEIDGIQLMSAILIISEIGVDMTQFETDKQLCCWAGVSPANNESAGKKRSVRISKAGQYLKPVLVQCALAAIRKKNSYFGQKYTRIKKRRGHKKAIIAIARMMLVSIYHMILTGEKFNPSDYESFKDPKPQREKNNYTVETALDFLKSQGFDVSSIQEIPK

SEQ ID NO: 489640 - protein, 372 aa, unidentified
MDEGIKVFVALDVHKDSIVIGAAQAGSRVPARQVGRTAHEVNKLLKALAKLGAPSEVHVVYEAGPTGYGLQRALAARGYRCQVIAPSLIPRRAGERIKTDGRDCLKLAESSRSGDLRAVWVPDPAHEAIRDLSRARDDAVTARTQARHQLRSFLLRHDLRYPRKTAWTAAFHRWLATLNFGPDGAQTAFIEYQLAVQAADQRVERLTQALIGSIAGWRFEPVVQALQALRGVAAVSAIGLVAEIGDLARFEHPRKLMGYLGLVPSEHSSGERTARGSITKTGNAHARRLLVEAAWNYRFKPRIGVQAMRRQQTLTSDIQATAWKAQLRLSRRFAALDARGVQRNKVCVAVARELAGFVWAIGRQAMNTTPIH

SEQ ID NO: 489641 - protein, 343 aa, unidentified
MQTITTIGLDIAKSVFQVHCVDANGQVVIRRQLKRRYVLAFFQKLPPCLVGIEACASSHHWSRELQAVGHTVRLMPPAYVKPYVKRQKNDMADAEAICEAVTRANMRFVPTKTPEQQSGLVLHRTRHLLIRQQTSVINAIRAHLAEFGVIAAVGRKGIEELLSVIADPSDKRVPDAVRACLAALGNQLLSLKKQILAFDRMILAWHRSNQTSKRLNCIPGVGPLLATALVANVADPKAFQSGRNFSAWIGLVPKQHSSGGRPRLGSISKQGDRYLRGLFVAGALAVIRYAKLHGTKYRPWVAALLERRPTKVAAIALANKLARMAWAMMAKGERYNYPASLRV

SEQ ID NO: 489642 - protein, 287 aa, unidentified
MSNGSTEQMKMTAGMDLGDKYSHLCLIDTESGELIEESRLRTTPEAMRRRFDSERPLHVAIEVGTHSPWVSRLLTECGHEVLIANPRKTRLIYGQRRKTDKLDAEKLARLARADPELLYPVEHRGEDSQAHLAMVHSREALVRSRTQMINHVRGTVKSFGYRLPKCSTPSFHKKVQGQLPSELAEVLGPIVETIGSLTEKIKDYDRCIEELAADRYPETRLLRQVSGVGSLTALTFVLTLEDPQRFAESRSVGAYLGVAPGTEQSGKQDPQKSGSLARVTRCSGDCW

SEQ ID NO: 489643 - protein, 405 aa, unidentified
MLLVGIDWADAEHVYCVMDEAGATLASGSIPHTPEGLAILFAAIRTHARAPEEVAVALETSQGLLVGALLDQGFVVYAINPKAVDRHRERFRVAGGKSDLRDAWVLATLLRTDRALYHPLLPDSEPAQELRVLTRDRAELGRTRTMLSNQLTACLKAYFPAFLDLFDDPDRPVALAVLQQWPTPAALRSVSGKRLEAFLRQHHQPEAAAKARDIQTRLTQPAFQVAPVILRTKARLAQTLGHQLRALAEEIAAYDAEIRRVLKTHPDGELYLSLPGAGDLLAARMVGELGDNRDRYRDPAIAQSAAGTAPVTRASGTTCIVHVRRACIHPLRETMWHFAFCSTTHCAWAKAYYRAARSRGKRHAEAIRMLSNVWLRIIIAMRRNHRPYDQAVFLNAREAHLATAS

SEQ ID NO: 489644 - protein, 344 aa, unidentified
MIKNYTPKSKSEIPHQEEKVIYVGVDLSKSKLDVMSDKYRIYPNSDSGCKHFCRDLKQKSNNVVVVYEATGSISLQFAAMLDMNGIQRCQVSPRKIRHFAKGGIKEAKTDKLDCEVIRNYAITYSQHLKINAPMSKDYAEMRELQRVERFIAQNIAKTKQVLSDCRSELARKSLNDKIKADKEQRKLINAQLHRLIKEDEYMGRKMRILMQEIGVGKETAVALALELPELGNLSRKEVAALVGVAPFNFDSGNKIGKRYIRYGRRNIRNLLYMCTRAALNAKTENVYHKRWKQLERKIKNPNSLTNDPEDKDYKRRMVACMRLMIVRLNAITRDWIAEGCPDIT

SEQ ID NO: 489645 - protein, 328 aa, unidentified
MNIIGIDVSKNKLDCALINDSNHAKFKFKVVSNSEDGFIALIDWLSKHIKSTAQEYHFVMEATGVYHERCAEWLFNTGSKVSVVNPAHIKYYGQSLGVRSKNDKKDSVVLARYGLTQKPIAWEPETPEIRILKALASRLDAIEKDILREKNRYEKSSINPCSDSVLDSIKMILAVLNGEKTNLERLIELHINQYEYLQHNYALLLTIPGVEPVVSRYMLIVIGSRTFKSASQCAAYIGLVPIQNESGSSLKGRSRLSKAGNPVIRAKLYMAAISALQHNPDIKIQNQRLLKKGKSKISALCAAMRKLVHICFGVIKHQRPYQVQASLI

SEQ ID NO: 489646 - protein, 336 aa, unidentified
MTKYIGMDIHSSTSSFCVVNDAGEILDQREIVSNGRLLVDYVQSIEGHKKIALEECELSAWAYDLFTNRVDELIVCDPVKNGTYKKAKTDKLDAKNLADLLRGGFLKPVYHDGSKRQQFRALMSGYQDVVDTGVRMKNRYASLFRKAGLRQSGTSFYGDESLFKDLPRPDQRFVAESFYKMIASIESQREAYVKEIKKLSRGFREIKSLKTIPGIGDIQAAKIVSQVVTPERFKSKYKFFSYCGLVRQVQSSGGKDYPGAKIHGNRILKCVYKMAAHSAISGSSSLREYYDRLLGQGLNVKAARNAVSRKIAAISLAVWKHGSKYNDAIMVECVKQ

SEQ ID NO: 489647 - protein, 402 aa, unidentified
MNCVGIDVSKGKSMVAVMRPFGEVVISPFEVQHTASELSELAKLLKSLDGETRVVMESTGNYHTPVAWLLHDAGLYVSVVNAMLVHDYGNNSLRRAKTDKKDAVKLANYGLDHWLTLPRYVPEEDTRLLLKNCYRQYQQYSKVQTMLKNNLIPLLDAVFPEVNRLFNSSPRADGSEKWVDFVSTFWHCQCVSTLPLKSFSARYLKWCRKHGYYFSQEKAFEIHSKAKNCIGVMPRNETTKLLVQQAIAQLKATSAALAALKQEMQSLAASLPEYPVVMEMFGVGSTLGPQLMAEIGDVRRFHSKKALVAFAGIDAPPCQSGQMDIHSRSISKRGSAALRRTLFLVMGIYLQSAPLDEPVYQFMDKKRSEGKPYKVYMMASANKFLRIYYASVTAYLNTLARI

SEQ ID NO: 489648 - protein, 289 aa, unidentified
MLNQSRYLGVDVSKDTLVVAFERNRWQFSNSKEGHRKFIEQINKQSGTLHVVCEATGPYHLAMCLALQAAGIALTVSNPARIHYFGRSEGVLAKNDPIDAALIERFAQSKRPPADPPLCREQLTLNELVNHRRQLVDAIRIFRVNRQQVINSDVRREIDRSIAALERRVQAVERELQDKVNANPAWKKKFDVLISAKGVGFITAIVLLVKMPELGSLNRGQCAALAGLAPYDDDSGQHDGRRSIRAGAPKCVARSTWAPSPPLGQTRFSRQSTSALKKPISPQRSRSPQ

SEQ ID NO: 489649 - protein, 348 aa, unidentified
MAQNLDRAIAVIGIDIGKNSFHIVGLDGRGAIVLRQKWSRGQVEARLVNMPPCLIGMEACVGAHHLSRKLKAFGHDARLMPAKYVRPYSKGQKNDFRDAEAIAEAVQRPTMKFVATKTADQLDLQALHRVRERLVSQRTGIINQIRAFLLERGVAVRQGLRFLRAELPRILAAPPDVLSPRMVRVIEGLAEDWHRLDERVDHLSGEITALARQDVGCERLMSVPGIGPIISSAMVAAIGTGDAFSKGRDFAAWLGLVPKQISTGDRTILGKISKRGNRYLRVLFVQAAWVVLIKPKSWERHGLKHWIEAAKKRLHRNVLAIALANKLARIAWSVLANGRIFEARLQAA

SEQ ID NO: 489650 - protein, 415 aa, unidentified
MAEASTTEVLDPSAFTYVVGIDIGSETCCFTVLTPQKQVVVKPTDLANAASGFAYLQERIARLGVAPEQVVVGLEATSRYGENLFQFLQRQGYHLCLLHPRQTHEFAKQRGLRAKTDRLDASTIARVLLSGEARVGYVPDEQIASYRELVRLHTQLSDELARDKNEIQGLLVVLFPEFTQVFADPCRLTATAVLQAYPSAKAIRSAGVDAIAAILRATAPRNYGRDTAQRLVDLAERSISSDLAVGARSLSLQIWCDQLHHTAAHLAQIEEQIAQLLSHDRSAKGLQGVPEFGSKTVAVLRAELGEVVRFHRLDQVVAYVGMDIEIKQSGKWQGKAKLSKRGSGLVRRMLYMAAMRCIWLPGSAFGIYYHRLLARGVEKMTALMAVMRKMLVIAAYLLRTGEDYDPTRVATGPAG

SEQ ID NO: 489651 - protein, 421 aa, unidentified
MRGLRSNRVTAVKEGTLMVTVDVGMASNTGYCSTVDGRDTKPFKFDNTREGFDKLWSLVVVNKNRFKCNEVIVGYESTGPYAEPLLHYLRNKPVTIVQVNPMHTKRMKEVNDNSPLKTDDKDPRVIADILRIGHALSVVVPEGDAAYLRRLNNARERHIRERTALLNQLQQLVFLIFPEFKTVIKNIKVKTARYILKTYTTPEKIGCLNKDELGEAIRKQSRGKFGIGHADLLISLARDTIGIKEGMAGLAMDIRHILMQLETIDGFAAKIESEMEVTLIRIPCSTRILSIKGLGTVTVAGLIGEVGDFSKFRTRSEIMKLAGLDLYEISSGKRKGQRRISKRGRSLLRKILYYAAIQMIRKNGIMYDYYTRLTNRGMLRLKALVAVARKLLGIIHAIVRDNRDYAGAYHAPKRRMIQKAA

SEQ ID NO: 489652 - protein, 393 aa, unidentified
MRFYTRQHRHYCGIDLHVKTMYVGILDGTGQGLVHRTLKATPDAFLEAVAPDRDDLGVAVEGMFTWYWLADLCAAQGISFVLGHALAMKAIHGSKAKNDKIDSQKIAALLRGGLLPQAYVYPAAMRSTRDLLRRRLHLVRKRGPLLAHIQNTRAQYQLPEFGRRLAYPANRAGVGEHFPDPSVRKSIDVDLALLECYDSLITDLELTIVREAKRHDGEAFHRLRSIPGIGKVLALTILYEIHDITRFGRVQECASYARLVKCQHQSAGKTRGTGGAKMGNVHVKWAFEEGAVLFLRHAPGGTALLAAIEKQHGKGKALSILAHKIGRAVFYMLARGTVFSMDKFRAASQGRERLSHTSNSSRETQLDEIAPDACALERHEPVDHKPRSGSAYA

SEQ ID NO: 489653 - protein, 413 aa, unidentified
MRLFIGDDWAEDHHDVELMDASGRRLAKARLPEGVAGMARLHAMAGEALGDDAEDGDPGQVVVGTETDRGPWVAALIAAGYTVYAINPLQASQYRKRHGVSGAKSDAADAHVLADMVRTDSHQLRAVAGDTAQAAAVKVVARAHKTLIWERTRHMQRLRHSLRDYFPAALEAFTDLAAPDTLELLAKTPDPASAAKLTTAQITAALKRARRRAIPAKAAAIQAALRSERLGQPGAVAAAYAATVRAATAVLTVLNEQISTLEGQAGAHFGQHPDAEIIGSQPGLGAILGARVLAEFGDDPHRYADARSRKNYAGTSPITRASGKKKAVLARCIHNDRLIDALTRQAFTALTTSPGARAYYDQLRGRGVSHYAALRQLANRLAGILHGCLKTRTLYDEATAWPQHTAKAEKAAA

SEQ ID NO: 489654 - protein, 362 aa, unidentified
MEVVYRRCCGLDVHKQTVVACLLLLDEAGRKTKKKREFGTFSDDLRRLMLWLFSNHVTHVAMESTGVYWKPVWNVLEDKFTILLVNPQHMKALPGRKTDQKDSEWIAELLQHGLLRASFIPAREIRELRDLTRLRVHLKQEVNRVRNRVHRILEDANIKVSCVVSDLFGVSGRAMLEAIVRGKTDPGWLADYARGTLRLKKDELTRAFQGHIGEHHRFVVGELLAELAFLEGRIVRLEAEIERRLQAHANVLERLCTIPGVERITAWTLIAELGLDMSAFADAAHLASWAGLCPGNCESAGKRKTGRTRKGNVYLRRGLCQAAWAASHCKDTYLTALFYRVASRGGVKKAVVLGHPRPRHNQ

SEQ ID NO: 489655 - protein, 339 aa, unidentified
MGGRYVGIDLHRRRSVIYTMDSDGERLDCVRIANDPWVLLEQIAKAGSDAEVVIEATYGWYWAVDLLRDAGFSVHLSHPSGNDWGNRRVKNDERDARDLADLLRLGRLAEAWIAPPAIRELRELVRYRAKLVQLRSGLKAQVHAVMAKEGVLPALNDMFGPGGQRQLDEMQLADAYTVRVESLRDLIKVYDREVAMLERTIHQQLRHDRGYLAIQALTGVGRTMAAIFVAEIGDVGRFRSAEALCSWAGLTPRHRESDTKVVRGGISKMGSRLVRWAALEAVAAYKGGPKLKADFHRIAERRGTNKARVAIARKLLTLVYYGLRDGEIRCLRDNEAVAA

SEQ ID NO: 489656 - protein, 424 aa, unidentified
MKVTYQTCCGVDVHKSFLVATIIKTTAGIEPSYQKKRFSTFNNSILDFKSWLLENECHDICMESTGKYWVPVFNLLEDQINVTIANPKWVKAVKGNKDDTKDSKWIGDLFRLGLVKGSYIPCKSIRILREYTRYRYKLVSCRSSEKNRYQNALTVCNIALDSVVSDIFGKSSSSIIDYLLEQSATTINHEEIASKLLKRLKSKEDAVIESIEGYQMTDSQKYRMRLVRAHIDYITAEIDDVDKQIESLISSVPDYVKAIRFLTTIPGVKRDSAITIISEIGIDMSQFCNSKRLCCWAGLTPSNNESAGKKKSVRITRAGVYLKPALVQCAHAAVKSDKSPYYKTKYESLVKRRGKKRAVIAIARMILIAIYRMLSTGEVWNPSDLYKIDMPAPLAEKQKAKAIKQAKKLLQKEGLLPPDEPLAS

SEQ ID NO: 489657 - protein, 369 aa, unidentified
MKKRIKNIGLDVHKNSISIGIANDGRDGEVRYYDKIDNDMSQLDKVIRKLVSEGAVLRFVYEAGPCGYGIYRYLTNNNMDCVVIAPSKIPQQSGNRLKNDRRDCLSLARLHRAGELTPVYVPTPEDEALRDLVRARIDATRALRVAMQQLGAFLLRHDIVFPGKTRWTKTHFNWLSSVTLPHSAQVFVLQEYIDRVTDCINRVQRFTDQIRLQSRQSSRHELIKALQAMRGISLIVAATIASELGDLTRFETPGKLMAFFGLVPSEHSSGEKVKKGSITKTGNRHVRNALVEAAHAYRFFARKSRIIRKRQEDLPKNVIDISWKAQCRLCARYQYLMAKGKKVNVTKTAIAREIAGFSWAIAMELDRAA

SEQ ID NO: 489658 - protein, 431 aa, unidentified
MSERDYNKQVAKRQRIRSTSLVVGVDVGKAYNAVGFMNKEGKVLGSCAKVYNSREGFEQFVKMVEDLKARHGLKDVLIGMEPTGHYWRKLAYFSKEHGYEVRFVRTTALKHHRELDESASAKSDQRDALTITNITREGKYIDTVIEDGPLRQLRTLAKARERLLRYSVSAKNSMHAALDDYFPELHELFWSMGSRSLWAILDRCPFPEDVLSIKVSTLRGLIVQSSRKKAGAVQKAEALYQAATKSIGLRQIGSADRYRVQMCLEEVKRTVLALKSIDQQMKSMLKEIPAAPYLLSIPGIGALSAAVFLGELGDPAHFHNARQIVKYAGYDPQESDSGSWVSRKFISKKGRWLMRKYLFFMSMRVVVLTHYFKTYYERKLETKNRVGQLPRRKEILCAVAIKLIKVIFALLRDKRRFDDTRGTVTALSQVA

SEQ ID NO: 489659 - protein, 402 aa, unidentified
MNAVGIDVSKGKSMVAIMRPFGEIVSTPFEIKHTSSDINSLVKLIKSIEGESRIVMEHTGRYYEVLAHQLSEANLFVSAINPKLIKDFDNDSLRKVKTDKADSVKIARYALDKWQNLKQYSVMDELRNQLKTMNRQFGFYMKHKTAMKNNLIGILDQTYPGVNTYFDSPARSDGSQKWVDFASTYWHVDCVRKMSINAFTDHYENWCKRKKYNFSKSKAEEIYGKAKELVPVLPKDDITKLIIKQAVDQLNSASITVESLRTLMNETASKLPEYPVVMAMKGVGTSLGPQLMAEIGDVSRFTHKGAITAFAGVDPGVNESGSYEQKSVPTSKRGSSDLRKTLFQVMDVLIKTHPQDDPVYQFLDKKRAQKKPYYVYMTAGANKFLRIYYGRVKEYLASLPES

SEQ ID NO: 489660 - protein, 343 aa, unidentified
MQTVTTIGLDIAKSVFQVHGVDAAGQVVIRRQLKRRQVLAFFQRLPACLVGIEACASSHHWARELQLVGHTVRLMPPAYVKPYVKRHKNDATDAEAICEAVARANMRFVTIKTPEQQGCLVLHRTRHLLIRQQTSVINAIRAHLAEFGIVAAVGRNGVEQLLGVVADANDKRLPEVARACLATLGVQLRVLKAQILEFDRMINAWHRSNETSRRLDKAPGIGPVLATALVATVADPKTFRSGRNFSAWIGLVPQQHSSGGKDRLGHISKQGDRYLRNLFVAGALAVIRYAKIHGTQHRPWLAALLARRPTKVAAIALANKIARMAWAMMVKGEHYKEPVALAR

SEQ ID NO: 489661 - protein, 412 aa, unidentified
MELLHRRCCGLDVHKETVVACLRLVSDGKVTTEVRTFQTTTADLLRLSEWLAANECTHVAMEATGVYWKPVWRILDDGEFALVLANAAHVKNVPGRKTDINDAMWLAELLAHGLIRASFVPDAQTQEMRNLLRTRKQLVREQSSHVLRVQKTLEDANIKLDSVLTDLMGKSGRAIIEALIAGETNPVKLAGLADRRVKASPEEFREALRGRVTKHHRFLLRLHLNQIDALDAAMATLDAQVEANLGPFRTAVELIGSIPGIKNLGAHVIVSEIGIDMSRFPSAAHLISWACICPRNDESAGKRRSNRVRKGGTWLKTTLVQCAWAAVKKKDSYLQAQFYRIKARRGPKKAIMAIVASILTTIYHMLKDGTMYKDLGRNHFDRRSSDQQKNRLVKRLAELGYAVEIKPLAATA

SEQ ID NO: 489662 - protein, 343 aa, unidentified
MQSISTIGLDIAKSVFQVHGVDAAGQAILRRQLRRRHVLAFFQKLPPCLVGIEACASSHHWSRELQALGHTVRLMPPAYVKPYVKRQKNDTTDAEAICEAVTRPNMRFVPTKTVEQQSCLMLHRVRHLFIRQQTAVINSIRAHLAEFGIVAPVGRRGVEQLLEVVADTADRRLPEVARACLAALGSQLRALKAQILEFDRRIMVWHRSNATSMRLDAIPGVGPALATALVASIAEPGAFRSGRDFSAWVGLVPKQNSSGGKDKLGSISKQGDRYLRSLFTAGALAVIRYAKIHGTRHRPWLTGLLARRPTKIAAIALANKLARMAWAMMARNESYKEPAALAA

SEQ ID NO: 489663 - protein, 393 aa, unidentified
MRIRFCGIDIAKNSFHAALIDDQGQPLWSRYFPMSSEGFRDFWRALRPRGSSGRSLQLGMESSGSYYLNLFSFLQAQGLDVRLINPLLVSNFAKLSLRKTKTDKRDAVTIAEFLRTNAQSLPQAHPAVDELRALARERENISAQIVALKNEIKRYLGIVFPEILGLLNPFTASSLRLLAAFPSKEAFLQASPQALLQILAGASRSRKSTLSSQLLIDTARTSIGLASPDLEAILRSKIRILERLQAELEEMTDRLVQRCRDQVPGPLMILDSIDGLSTTTVSHFLAETHGHSFSTPQKLIAYAGLDPTIYESGQWKGRGHISKRGNKSLRRVLFLMAVAVIRVNPIFKEVYLKKRAEGKRYKQAVLVVAHKLLRVIHALLRHQTPFNPAFQSL

SEQ ID NO: 489664 - protein, 394 aa, unidentified
MFIVGIDISKRSHMVRVIDSEGRTVYKPFSIRNSCSGCSVLLERLRKLTNHKSEFLFAMESTAHYWLALYTRLRKEGYQVVVLNPIQTDAMREMLMEENKTDEIDTLVIAETIRFGRYKASSVPQEKLLALRELSRNRFYLIDMGSDLKRKITALLDQVFPEFESQFSTIFGKTALAVLRQYPTPEKLSRAQTGKLTEVLQTASNGRFGEWKARQLKELARDSFGIPDCEGTYSALLLLYLDQFQSLQDAATVLEKRIAELFSQFDSTLTSITGIGPVLGAVILSEIRDISCLASADKLAAYAGLNPKVKQSGDKKSSAVHMSKRGSPYLRRAIWMAGAIAVQYDPMFKAYYEKKSAEGLRYMNIIGHVSKKMTSVIFAIMRDNKLYEPVLPAT

SEQ ID NO: 489665 - protein, 343 aa, unidentified
MNVFIGLDVSLASTAICVLGPQGKIVEELEAASEPEALVHAMTSLPYAVDAIGLEAGPLSQWLSKGIEEAGFDVVMMETRLVKAALKAMPIKTDRRDAQGIARLLQMGWYRPVHRKSVSSQEIRALLTARKSVQQAIINLELSMRGVLRNFGLKLGHVTRIRYEARVRELVEQNEILSASTEALLRARAQLRVELAELDAKIADLAKQDDVCRLMMTMPGVGRIVALTVKAAIDDPTRFVRSKDVGPWVGLTPRRTQSGEMDIVGQITRAGDRALRTALYQAAMILMHRGSPNWLQAWALRVAHRRGSKRALIALARRIGVVLHRMWRDGTPFRHAQSAPATV

SEQ ID NO: 489666 - protein, 415 aa, unidentified
MLFIGDDWAEGHHDVVVQDDAGKTLARRRLPEGVDGLARFHELVASCLGEDREPDPARVAVVIETDRGPWVKALAAAGYRVYPANPKQAARHKETVANSGKKDDFFDAACLADMGRTRRHQMRELAADSDVAEAVKIAARAHQKLIWERTRHLLRMRSALREYFPAALEAYADLTLAGKDALELLAKAPDPESAARLTVTQITAALKRAGRRGDLAQRARDIQAALRAPHLAQPEVIAEAYAASVQAAAAVITALSEQVKIMEAKVSGLFRRHPDAGLYLSQPGIGDITGARILGEFGDAPGRYATAKARRNYAGTSPLTIQSGKKKTVHARYIRNRHLIDALHAQALSALSVSPGARGYYDGLRAREIGHDDAMRRVASRLTGILHGCLKTGRQYDEATAWSHRAETPEAAEAA

SEQ ID NO: 489667 - protein, 423 aa, unidentified
MPYRIAGIDVHKKKLAVVMADVEVEDEFQFERRWFGSNPEQLRQLAEWLAGQQVEEAVMESTAQYWKPVWGALERYWKPACQSREGAGPKSGILHLAQALSNRGRRGRKNDFRDAERLVKRLLSQELILSFVPDAEQRLWRTLTRTRYQRTRDRVRLQNQLESLLEEAHIKLSSLVSDMLGVSARRMLQALADGETDPAALAALAHQRLRATPEQLQDALGACTELNPVYCRLMKMALADLKFIEEQISQLDREIAALLGEYQDAVRRLAEIPGLGVESAQQIMAEVGAKAATFAAAKNLVSWVGACPGEEESAGVNRSKRSPKGNRHMRRILNQCANAAVRHKGSIFEILYRRLVPRLGHNKTIGAIVHRLCNLIWLILHRGLRYEEHGPAVSEQSRRTRTQRMIRTLRNLGYRVEPLEVPA

SEQ ID NO: 489668 - protein, 436 aa, unidentified
MQKVYKRVAGLDVHKKSVVATRMRVNAAERLEWETATFGTTTPELLDLHDWLQAWSCTHVAMESSGDYWKPVHNLLEDTFEVLLVNAQHVKRVPGRKTDVSDAEWLAELQLHGLLKASFIPPKPQRALRELSRYRTRLIQERARTVNRVQKLLEGANIKLAAVVSDIQGVSAQAMLEQLAAGVEDAQALAQLARGRLRNKLPELEKALTGMVQAHHRFLLTKQLAHIEFLDEQIADIGAAIARQVEELSQGASGNEDDAAPPDGPDAAVTWEQAVDLLDTVPGIDQQIAEMILAETGIAMQQFPTANHLAAWAGVAPGNHESGGKRYSGRIRPGNRHLQTILVQAAWAAVRTKGTFLKARYHRLAARRGKKRAIVAIAHSIVVSIWHMLSRGEAYQELGADYFDQRNKEAKVSYLTRQLEKLTGATVQITFSTVAA

SEQ ID NO: 489669 - protein, 413 aa, unidentified
MYYVGIDIAKRSHVAVVLNEDNTLKVKPFSFNNDELGFKKLLIHLQTLCCDMSDMVIGMEATGLLFENLYRYLQSLEYNVVLLNPYQTAKFREMDTMKRVKNDNIDSVMIAALLKSGRFSEGYVSQEQLQSLRELYRHRASIEHQLKALKRQTSTILTVVFPELETVIRDPFNITGLALLEKYPTAKHFRHASVERILKTFRGIKGNNFNRVKAQALLDASKRSIYSGVASEARALNIRMNIAQIRLLQAQLDETLSAMQSLFSERSEVKKEDREVMETLIDNLRTIPGVADKTILALLAECGNLDRFYAPKALIGFLGLYPTLSQSGDSTRNGRLAKRGASLAKKAIYLASIAAIRHNDEMRTIYMNYRSKGRAKKEAIIIVARKLLTIIYTIYTRNIPYDPQRVFVAKPNQ

SEQ ID NO: 489670 - protein, 356 aa, unidentified
METGYDGRQVVGMDLHRRRSVLVRMTEDGRRLGTARITNSPAELRAQIARAGKSPKVVLEATYGWYWAADTLAAAGAEVHLAHPLGVKAFTYRRVKNDERDAADLADLLRMGRLPEAWIAPQQVRELRELTRYRHKLVHLRTSCKDQVHGVLAKLGVEVTCSDIFGRAGSAWLDELGLPQPYAGKVTSLRQLTAELTTEITMLSEVIADLLAGDRGYQVIQQLPGIGPVLAAVIIAEIGEVTRFSNAGQLCSWAGLTPRHRESDTKVARGHVTKQGSRLLRWALIEAIQRIPADCAIGAAKAAIIARRGKEAKSIAKVAAARRLLTLVFYGMRDGQIRCLSKTPENPPVTQTALAA

SEQ ID NO: 489671 - protein, 383 aa, unidentified
MSKQRTRADPLEPERHQCARVEMFGNHSRDRGSTMNVTTYGLDLAKRVFQVHWVEPDTGELKRKVLARADVAAFFARRAPGIVAMESCGSAHYWGRVLSGLGHQVRLIAAQFVRPFVKTNKTDAADAEAIWEAAQRPGMRFVALKSEEQQAVLSLHRMRAQLVKVRAMQAYQVRSLLYEFGIVAPKGFRALATKAGPVLADATSSAVPELLRSELLRQLEGLRTLSTRIEELERRIGGWQRREGECERLADIPGVGRLTATAVAATVVDARSFRSGREFAAFVGIVPRQSGTGGRVKLLGISKRGDPYLRTLLIHGARSVVLAQTRPGGTIDPWLRDILSRRPKNVAIVALANKMARTIWALMAHGRRFDPNWARPPMAIAKA

SEQ ID NO: 489672 - protein, 358 aa, unidentified
MVQSKGINFNGQNIYIGIDVHLKSWSVTIITESGYKRTHSQKPSAKELFEHLKKHYPNGKYQAVYESGFSGYSTYYALKEYGIKCMIIHAADVPTSQYENVMKTDAIDSEKLAKSLKGGLLRGIYVRDKKELDDRSLIRLPKTLQKQLGGYKSRVKHLLYNNGISYPDCFENSRSHWSNRFIYWLENEVRLLSSTRLSLDLLIDQVKLFRKNLLKATRMVRDLSKKPQYSRQYENLISIPGIGLVTAMCLLTEIGDVSRFHNQREFASFLGLIPSCHSSGENIYNMEKTFRGNKHLGPLVIESAWVSIRHDRAMSMAYGAYCKRMKGQEAIIRIARKMSNRILSVLKSGKKYQYDKVR

SEQ ID NO: 489673 - protein, 353 aa, unidentified
MGYGAIDLHKKESQVRILAESGEVIDQRIRTTRDRLTALFWGRPHARIVIEASTESEWVAQHLETLGHEVIVADPNYSLMYGHRSRRVKTDRRDVAALAEACRHGIYRCAHRRSSRQRVVQWHLNVRRELLDARTRLISVVRAITRSQGYRIAGGATDTFLTRLAALDLPVSVSESLVPVRSVMELLNQELAAADQRFEALVAEDPIVKRLTTCPSVGPITATAFVAALDNVHRFAGRRGAAQVTSYLGLVPREYSSGEQQQRGRVMRSAHPYVRVLLVQAAWRIRRSSDARAGALRTWAQAIARRRGQNIAIVALARRLTRILYAMWRDEIDYQPDRIRSARRDTAAAKPAA

SEQ ID NO: 489674 - protein, 422 aa, unidentified
MLEQAQDEEEIITHVAGLDIGKASLVCCARVPDEARPGQRLQEVRTYATMTRSLIGLAERLAVLGVTRVVMEATSDYWKPVFYLLEAHGFEVWLVNARDVKHLPGRPKTDKLDAVWLCKVAERQMIRPSFVPPAPIRMLRDLTRYRVDLTTEAGAERNRAEKLLEDAQIKLSVVVSDLFGTSGRAMMAALIGGQRDPHTLADLARSSLRRKIPALQEALTGHFTDHHAFLLGKMIARVEAIEADIREVDARIEAQLAPFAQAAARLLEIPGIGPAAAATIIAEIGVDMTRFPTPAHLSGWAKFAPGVKESAGRRKGNGSTGHGNRYLARVLGQIAVTAARTDTFLGERYRRIARRRGAKRAIVAVGRSVLTIIWHLLSYPEAGFHDLGADFYLNRTDTERRKRNHIRQLEALGYRVTLDLAT

SEQ ID NO: 489675 - protein, 322 aa, unidentified
MHPLQLGIDVAKAKLDCALRLESGKFRHKVVDNTPAGFKALDTWLAKEGAAALQVCMEATGIYWEAVAEHLAARPETTVSVINPAQIKAFGASRMVRTKTDKVDAKLIAQFCAERTPEPWQAPTPAEKTLRALVLRLDALQTMRTQESNRLEVARESVAEGIAQHLTWLDDEIARISKAIRDHIDNDPTLRDKHRLLDSIPGLGERTTAVLLAFLAEPARFENARQVAAFAGLDPRQHESGSSVRGKPRLSKVGHSFLRKTLYMPAMVALYRTDWGKLFRDRLASKGKPPMLIIGAMMRKLVQVSYGVLKSGQTFQPELHGA

SEQ ID NO: 489676 - protein, 343 aa, unidentified
MHSTTIAVDLAKSVFEVAVSQRPGKVAERHRLSRGQFSRFLAEQAPATVVMEACGTAHFWGREARARGHRVVLLPPHAVRPYVLRNKTDGADAKGLLEALRNDDVRPVPVKSVDQHVLAGLHRMRSAWMATRTARLNTLRGLLRELGFSIPVGARQVVPHVGALVSDADSGLPDALRPVLAEAAREIRELEARVREVERSLEAMSRGSEVLVRLRTIPGVGLLTATALVAFVGDVRRFPSGRHFASYLGLTPRESSSGLRRRLGAISKRGDPYLRMLLIHGARAVLCHAKKATSERDRLREWAIERERARGHNKAAVALANKLARIVWAVWRSERAFAIRPQN

SEQ ID NO: 489677 - protein, 450 aa, unidentified
MSPLALDVVTKTDKTPVLGRMLSKYVGRKTSSIENGITKARNHSRQRGNIMRVVFGIDVSKASSEVAILVNGEKVHGYTIPNDAIGFNRLLGDLKTVHQPEIVFEATGVYSRRLQAFFEDNSYTYTRLNPLESKKQLDSLRVRKTDKIDAEKLAMSQFILNRKPSYVQEALYQELRDLSRFYQNLTEDIVCAKNRLHKVLQITFPELENILSAPTGEQYWNLVITFPCNSFVLESDDATLTAIIRQSTAKRISEKRVTYLVDKLTKLANQSYCAVKKTSPVIEEVKYYAGELLRLSEHRQGVVEEMVTLAQSLPEYEILLSIPGIAETTATSIIGELGDIRQFHSANQINALISIDLSHYESGDFLAKEHITKRGNPYARKILFKCIHNIASASHTNPCHIADFYEKRKRQSQVTSTKPHTIASIHRLIRTMYYLITHNKLYDYTSIQNR

SEQ ID NO: 489678 - protein, 449 aa, unidentified
MMIGGARDSGSRRKGIDVKQKSNSLTKGDQVGKTTKTTNARGPAQRDAREVMAELVVKLSQKLEPQSTRKSEEDPRKAGMPGPNRDRLTVGVDLGDKWSNFCILGLDGEKLTEGELRTTPQDFAEFFQAMAGARVVMEVGTHSAWARDVVARSGHEVLVANPRQMEGPKQRKRKNDRVDAHKLARVGRMDPQSLFAIEHRSVEVRQDLVALRARHAVVAVRKDLINTVRGLVKSMGTRLPKCSTESFAKKVEGALPTEVRDALLPLVRLVEALSSSIKGYDERIEKLATEKYPHTKLLRQVKGVGPLTSLAYVLTLQDPQRFVKSRDVGPYLGLVPKQEDSGDSQPQLRITKMGDMMVRQLLVGSAHYILGPFGPDTDLRRYGLRLSERGGKNAKKRAVVAVARKLAVLLHCLWVSGEVYEPLRHALPKAPRKKAERPPAAEASARAAA

SEQ ID NO: 489679 - protein, 371 aa, unidentified
MKNNTTPSVVSIIPTPATIVPGGFTLGLDLGDRGHHVCVLDTTGQIVREGALTNTRPALAKLMAEFPHATVALEAGTHSPWISRFLTGCGATVLVANPRKLHAISRNERKCDRRDAQMLARLARVDPALLHPIQHGSAQAQHDLLGLKLRDALVRTRVNLINTVRFTLKSLGHSVRNPSSESFHKTVLADVPADCLPVVQPLLTILAQVTAEIKSMERDLVQRSRTDYPVTQRLQQIAGVGPLTALCFVLKVGDPQRFSRGRDVGAYLGLCPRRDQSGGTDKQLRISKCGDGLLRRLLVSASHYILGPFGPACALREHGQRLTGTGSAREKKRAVIAVARKLAVLLLSLWKHGTDYEPRINASPAVVMTPA

SEQ ID NO: 489680 - protein, 326 aa, unidentified
MEHELHYIGIDTAKEKLDVDVLRPDGRHRTKKFANTTKGHDELVSWLKGHKIDHAHICIEATGTYMEPVAECLYDAGYIVSVINPALGKAFAQSEGLRNKTDTVDARMLAEFCRQKRPAAWEAPHPLERALRALVVRHQALTDMHTQELNRTETAREVQRPSIDAHLLWLEAELKRLEKQIKDLTDDDPDMKHRRKLLESIPGIGEKTSAILLAYIGLKDRFAHARQFAAFAGLTPRRYESGSSVRGASRMSKAGHVSLRRALYMPAMVATSKTEWGRAFRDRLAANGKKGKVILGAMMRKLAQVAYGVLKSGVPFDASRHNPVAA

SEQ ID NO: 489681 - protein, 460 aa, unidentified
MNRKQSKSKMDRTMPTVHPNAAAIDVGATMHMAAVKADGAREPVRSFGTFTADLHRLVDWFTECGVETVVMESTSVYWIPIYELLDARGFTVFLVNARDAKHVPGRKTDVSDAQWLQRLHSFGLLRASFRPKGQIAELRAYVRQRERLLQYAASHIQHMQKALTEMNLQLHHVVADITGATGLRIIRAILAGERDPEALASLRHYSCHSSAETIEKALTGSYRAEHLFALEQALALFDAYHEKASACDIRIEAVLKELSTHRGRGHGAVPPASRRRNRADQANALAFDVRAALFALLGKDITTIDGLGPYLSLKLIAECGDDLTSWPSAKHFTSWLGLAPSNKISGGKVLSSRTRRSGGRAAALLRLAAVTVGRTDTALGAFYRRLSSRIGKAKAVTATARKVAVLFYNAVRHGMEYVDPGASSYETRYRTRVINNLHRRAKTFGFVLQPLEPKAGAAVS

SEQ ID NO: 489682 - protein, 348 aa, unidentified
MKIVGCDLHARQQSIAMLDRETGELTEKVIRHEGNAVREFYASLGKPVVVGIEATGAMQWFLELLEELGIESRVGDPAKIRAAETRKQKHDRRDALLILDLLERDCFPAIWMPTSEQRDLRSLLRDRDQWVKMRARLQHTLQAIALNHALRKGSSLWSGTGQEALAKLPLPAYTCQRRNELMSLYAQLQRRIQQLDKQVEEQAQHRPQARRLMTHAGVGPVTALATDVFLGDPSRFTTANEVASYIGMIPSEHTSGKRQRLGKMSKQGNSLLRYLWTEAGMHASGKDPELKRFYRRKLIQKGMGKSRIAAARKLGIRLWIMMRDEIDYEEFCRRGKLRQIGESPCRSA

SEQ ID NO: 489683 - protein, 395 aa, unidentified
MQTLFVGIDVSKDSFSVAGLDGQGATAFSLTTGMNRAGFSELFKAISSHSVALSDVVVAMESSGCYHLNLFSFLSSKGLRTLVINPLVVANFSRLSLRKTKTDRKDAFTIARFILSHRDSVEQFTILQAHQDLKDLAREREFTLKMISSIKNEIKRLLQSTFPELEHMGNVFSDTMLQFLSVFPSARLIRMAEPQAISHAFEQRDKRKRIAVPPETIRRAARNSIAAVSLAKEMILPGKIETLLHLEERLAQLTKMLVKLCETTMQEDLKILTSIDGINNITAAPFLAEMGDWRGFRSYKQLIAFAGIDPSIHQSGTIQGVSRLSKRGNRHLRRLIWLMTFCAIRMEGPFKAYFIRRKTQGLPFKKALFATAHKLVRVIFSMLNNRTCYVAQPTA

SEQ ID NO: 489684 - protein, 279 aa, unidentified
MYFIGVDHHKQVSVMTVLDEDGRELKNGRVFNLREKVERFLEGYRPFTAVIEAGRSSYVMADLLRELGGEVKMANALQVKAIAHARIKTDKRDSRTLAQLLRADLIPEVYQRGTRNRRAQRVMRMRTYWVRKQTEVKNKIRALLAQQNEEVRVEVGKREEGLFSLRGLEFLTKLPLEDPDKMVLDDLIQGYRETQAHLKKTDGIVRSLYGEIEEAARIDTVPGFGTTLSVLVAVEIADVNRFPTVGDLHSYAGVIPSTYASGERTYHGRITKQGSAWLR

SEQ ID NO: 489685 - protein, 324 aa, unidentified
MTSTKYIGMDVHKESISIAVRNDAGKIVMECVIETKASMILQFIDGLRGDVHVTFEEGTWAAWLYDLLKPHVTKVVVCDPRRNALLQEGNQNDRVDARKLAELLHNNQLRSVYHGDHGLRTLKELVRSYLTITQDLSRVMTRVKAIYRSWAIPCTGKQVYAPRHRAEWLAKINEPGVRRRAEFYYQQLDALRCLRQEVRRDLLAESKKHQAWKRLCGIPSIGPIRAAVLLGILQTPHRFRTKRQLWTYGGVGIETSSSADHHVVKGQLERKKKQVAIRGLNRNCNHDLKNLSRARRSSPRPSPVPSRSSMRNCWLRACGRKWRG

SEQ ID NO: 489686 - protein, 358 aa, unidentified
MTSNEAVGEAKVIVGVDTHRDEHVAVAIDRLGARLGEHRLPTTLKGYECLDRWAAGLAETIVYGVEGTGSYGAGLTRHLAGRGRTVIEVNRPDRSTRRRLGKSDAVDAEMAARAVLAGVAKDCPKSGQDNVEMIRMLKIVKDSAIKARTQTINQMKALIVTAPAELRDKLSGLSVRRLTACCARFRPGELVSPLAAAKHALRLLARRHCQLTSEIEGVESELVQLTTQTAPALVEVFGIGPDTAATLLVTAGSNPERLRSEAAFAALCGVNPIPASSGMTNRHRLNRGGDRQANSALYRIVLVRLCHHEPTQEYMSRRIGEGRTKPEVIRCLKRYVARQVFAILRDMGRRNLAIPAAA

SEQ ID NO: 489687 - protein, 405 aa, unidentified
MSESWYAGVDWASEEHAVCVVDEHGRIAEGKRYRHNEPGIRALCARLLRLQVGLVAIERPDGLLIERLLDAGLTVVAVHPNQVKAMRPRFSVAGGKSDGFDSFVLAELARTDSHRFRVLEPDSDRTKALRAMTRARDSLVHTRVGLANQLRDQLATFWPGASKVFCSVDTQIALAFLKRYPTPGDTRGLGEQRLGAFLKRHGYPGRKPADELLKRLRDGAEGRADELETQARRQVVLALVSALEPVVARISELTIEIRHALEAHPDGATFRSLFIAKDSWLCAATMLAEIGDCRERYPTYRALAADAGQCPVAVESGKARHAKFRWACDHRLRQAICTLSDASRRYNPWAADIYNRARARGASHTHATRILGRAWSQVIWRLWHDHDTYDPLQHTALQRLIAAGG

SEQ ID NO: 489688 - protein, 460 aa, unidentified
MKSKINDLGQKCKEKEKFVSMPVIHEHAAGIDVGSRSHFVAIGQSLEDVREFGVYDKDLRECAVWMKSHGIETVAMESTGSYWQNLYDVLTESGFEVLLVPGRQTKNMAGKTDVKDCRWIQFLHSVGLLSSSFLPDIDTEELRTLYRHRDFLLKQGAKYICKMQKCLRLMNFRLDVVITDVTGVSGQAIIKAIIAGETDPERLASLACCNVKKSKEEIARALSYNGRKDYMYELSDSFDLYQFYFKKMEVCDKKIEELMRSQIVKLCRPLTTPPPLEKKKKINKNSPKIPLDVLSWQWNDEVDLMSIKGVSHTTVLAINSEVGLSIDKFPTAKSFTSWLRLSPDNRISGGKILSNHVRRGSNRVATALRHAAESIGKQKDAPLYPFFQRILLRKGRCAAIIATARKLAVIIWNMLTKKEMYKPYDTSKIESQIRDKQIKKINKLMRLFDVKESEINFAIV

SEQ ID NO: 489689 - protein, 365 aa, unidentified
MNKCHSNTELSSHEETRCQFNGGPGAIKLGIDVHQDFYVVVKQVGGSNLKPPQRFQKEAFLHWAARLKRKSGAEVYAVYEACGFGFSLQRKLSALSIKCYVVCPQKLDEQNRRVKTDGLDAKALCLKLDRFVQGNRDALALVRVPSEKEEQLRAVHRQREQLVKARKQLEAQGRSLLVNHGIEPVRSWWKPRTFGALDVPQWMRELLCNSQAILLALQQKIGALTVQLQSAAAPKQPRGLGRMTSVVIDREIGDWKRFNNRRQIASYTGLCPGEYSSGNTRLQSYVTKHGNPRLRAALVELAWRLVRFQPNYKPVRKWRQILAKGALATGAARKKAIVAVARQLAIDPWRIKTGRLRPEELGLIN

SEQ ID NO: 489690 - protein, 358 aa, unidentified
MIAMKYYTSTTQFNCGIDLHARQMYVCLMDRDGKKLVHTNIRNNDFAYFLKLVEPYRHDLTVCAECMFGWYWLADACQAANLPFVLAHALYLKAIHGGKNKNDRIDSEKIAHLLRTNLIPPAYVYPADKRPLRALLRQRLFYVWSRSELLARIQSHQLAHNRPPLRQTRPNRDPWEERLLAQEDNPIRQLALQNDLALIRHYDTQITALEEQLQRLTKATAWRDYTLLQTVPGIGEHLGLTILYEVGDINRFPTVKDFVSYCRLVKGTVASAGKIKGLRGAKLGNAYLRWAFGEAAVIAKRDHAVIGPLAQRLEAKMNGNKFKANTVLAIKLARAVYFMLKNKTVFDPERLVAALTHK

SEQ ID NO: 489691 - protein, 408 aa, unidentified
MNAVGIDVSKGKSMVAALRPMGEVALLPQEFLHTEVGLEQMAYAILALGEDTRVVMEATGRYHEPVAAALHEYGIYVCVLNPLFIKQSGGGSIRKVKTDKADAMKIAKYGLDNWVDLREYTPMDTVRQQLKLCSRQYNLYMKTVVSLQNNLISLTDKTFPGVNELFSSPERTDGHQKWVDFVMTFWHCDCICRVSEKAFTERYQKWCKRKGYHFSAEKALDVYAGSCGHFTTLPKNDNTKLLITAAAQQLLAGKMTLAALRAEMTRLAKQLPEYDTVRAMYGVGETTAVQLMAEIGDVRRFPRRSSIVGFAGVDPAVDQSGKHSAKSVPTTKRGSPHLRKTLYQIICTYLKKSPADEPVYQFLDKKRAEGKPYFVYMTAAQNKFLRIYYARVKECLEAFDARQNLTQG

SEQ ID NO: 489692 - protein, 342 aa, unidentified
MKKNLFFIGLDISEADFAASIYKTPGRQPIVTKEAIPNDPEGFKLFLLWLSDYHLDKKNSRICMEATGVYSQAIAYYLLFQGFPVSVEPPLKVKRAFDPVGHKTDPVDSKQIAEYAYRFQDELTSWKPRDEILEKIRQLLSVREQFTKQKVALDNSIQAYSKQRVQVTLIRKAQKETLNQLKKQITRIDKELANLIKQDPEIFQRANNLDSIPGCGMLLAAHLLVITENFTKIQNSKRLAAFVGIVPYQHQSGTSVYKRAKIRHFGPMPSRKLLRLAAQSVATHNVTFRRYYLRKLAQGKAKPLVLNNIANKLLKVAFTIIRNNTRYIKDYRSINPMYLKSA

SEQ ID NO: 489693 - protein, 342 aa, unidentified
MHHAAIDLGSKESQICIRQPDGAIIEERKHPTRKLTELIKTWPTSRVVMEASAEAFKIADAALAAGHQVRVVPGKLVRLLGVGDRGVKNDQRDARQLSQASWQTDVPSVHIPSAAARELKSICGARDVLVATQRNLSNNVRGWLRTQLWKPPGGTMVTLPERVRAHARAGGHELPEHIERQLTMLTQVTEQVQAANKQARRLAKEHPVCRRLMTVPGVGPLTSLRFVAAIDDPSRFPTAHRVQSYVGLTPGEHSSGGGGGKRGITKAGPSELRRCLVQAAWSVMLARRSHPMLEWVRQLAQRRSRPVAVVALARKLAGILFAIWRDGTTYEANHAARRSALT

SEQ ID NO: 489694 - protein, 322 aa, unidentified
MSLPNPLFVEIDVSKATLDIAASSDIAQFTVSNNSDGFDAITDELRKYPVVLVLIEATGGLEAAVACLFQAEGFDVAVVNPRQARDFARTMGYLAKTDRIDARVLAQMAEVINRHPGRERFIRAMLDAERQVLAAMVVRRRQLTAMLIAERNRLYPVHPQSGKSINIIIKALEDELARIDEDMNNHIRNHFKELAARLSSIKGVGTMTVAALLAEVSDLGSLSRRAISALVGVAPINRDLGTMWGRRTIFGGRGGVRTALYMAALVATRFNPVIKAFYTRLLAAGKAKKVALVACMRKLLTILNAMLRKNEEWDESYHHVSL

SEQ ID NO: 489695 - protein, 421 aa, unidentified
MSDDRCRLGSDDVVIGLDLASAEHQAVVVTAAGKRLTRFRMPHTRAGLEELLRRTTPAALGRPGGARVFAFEATGHLWEAVAYVLRARGEPYVVVNPLATFRVREARQLSREKTDLTDAEQIAELCRTGLVTRTQLEARPYLALRRAWGEYARLREERARLKVLVAHQLYGLFPEFLRVWADLLQPGALAVLRTGLTPAAIAALSLTEFVAQARAHGAGHRIWRDKLAQVHRAAAQTIACPDGLDVLAREVQRAVARIDMLTAHMTAVAAEIDSMLAELEEVPSLRTIPGLGWTSVAGLLAHVGAITKYHHGRQLIKLAGTNPSRRDSGQTVGHGQRMSHRGRAGLREVLSLATLSCLQHNPRIRAHYDRLIQRPDRPLPKMQALGACMNKLLLYAFAVMHRREAFQLDHDWQRTTMARVA

SEQ ID NO: 489696 - protein, 355 aa, unidentified
MDKIKTNFSGQTIHVGMDVHKDSWNLGIYLNDIFVRNLHQKPNPKMMVDYLHKNFPGAIYKAAYEAGKFGFWIQRQLASLGVECLVVNPADIPKSQKDSLQKTDPRDARNIGLRLQSGFLRGIHIPDEQQEADRVFFRHRKKILKDLNRCKNRIKGLLAFTGIDIPQAYDNANWSHNFINWLKALDCKQAPRRRALDYKIRNMEFLRKELLSISNDIRKMMREQRYRTNYYLLRTIPGIGPLTAASILVEIGDVKRFNTFCHLNSFIGLLPMEHSSGQSENKMSLTVRKHRQLRSDLVESAWTAKRTDPAMALYFQEQAKRKDPKIVIIKIARKLLNRIRYVLINQQPYEFGVLK

SEQ ID NO: 489697 - protein, 328 aa, unidentified
MFYLGIDVAKAKIDCCLILDNSTSKKKTKTFSNTQNGFEQLQIWLNHHAATSMQTITLMEATSIYHELLAQYLFKAGYQVCVTNPARARYFAQSMSKLNKTDKIDSEVLARFAMTADLHFWQPLPEHIQLLNALLERRAVLYDDLQREKNRLEKANSTFTMEPVLESIHNSITQLNKHIQNIDQQIDNHIDQNPDLKNDKDLLSSIPAIADRTSLLMLSFLRSHTFEKASQAAAFIGLVPIQKQSGSSIRGRSRLSKAGSSKIRAGLYMAAVVATRHNPHIKKMNERLLANGKTKMMAIGAAMRKLVHLCYGVLKHQQPYQANYCISS

SEQ ID NO: 489698 - protein, 430 aa, unidentified
MEEVDEQELHVERVAALDLGKAALEACVRVPHQTKPGRRLQEVRGYATTTAALLGLADWLHSWGVTRVVMESTSAYWKGVYWLLEAEGFDCWLVNARDVKNVPGRPKTDKADAVWLAKVAERGMCRPSLVHPRPIRQLRDLTRFRRALIQDRTREMQRVEKLLEDAQIKLSSVATDIFGVSGRAMLEALIAGQRDPKALAQLARRRLRAKLAALEEALRGFFTDHHAAILRMMLDNIDRLSQQIAALDTTIEEAITPFAAQVAQLDAVTGVGLTAAQELIAEVGVDMGRFPSAAHLVSWARFCPQVHESAGRKKPKGRGKGNPWLAGTLGNIVATAARTDSFLGARYRRIAKRRGKQKAIVATGNSVLVIVYHLLADPTATFVDLGGDHYLSRINHERRARSLASQLQAVTGQRIVIRDGQAIIVQPDAA

SEQ ID NO: 489699 - protein, 376 aa, unidentified
MNEKLRFLGLDVHAETIAVAVAEPNGEVRSLGMIANREDSIRKFIRKLGSPEHLRACYEAGPTGFVLYWQLTQLGVKCDVVAPSLVPKKPGDRVKTDRRDALKLARSHRSDDLTAVWVPEEGSEALRDLVRAREAAKQDQLRAKHRLTKFLLRTGQRPPLGVKAWTEKYVEWVQQVRYTHPAQEATLLDCLNEVQHMEERVKRLEQSIVEVIQVAPAPMQEVVRSLQALRGIAHISAVTIAVELGNITSRFESARDLMGYSGAFPSEDSTGKRIRRGGITKSGNAHLRRIVVESAWSYRHRPAIGARLRRRQEGLPAEITEIAWKAQNRLHKRYMTLMARGKEQRKTMTAIARELLGFIWAIGIKAEAACKQQMAA

SEQ ID NO: 489700 - protein, 408 aa, unidentified
MEVLYPCCCGLDVHKKSITACVLWAEAKGRVRKEKRRFGTFTQDLEQLAAWLGECGVTHVAMESTGVYWKPVFNILEGRFELLVVNAQHIKAVPGRKTDQRDSEWIADLLQHGLLHGSFIPPRQTREMRDLTRYRVSLTEESNRIANRIQKVLEDANVKLASVATDALGASGRAMLEAILAGEQEPEKLAELSKGLLRHKIPELRLALEGRVTEHHRFLLRQLLDDLRHVESKIAAVEAEIDRRNRPFEEQVARLCTIPGVSRVTAWGLLAEIGLNMEQFPSAAHLASWAGLCPGNFESAGKRLSGKTRRGSHALRRCLCQAGWAISRQKNSYLAALFGRLAARRGTKRAVIAVAHALLVIAFHVLKKKTDYRDLGPDYFDRLNQTRTTHALVRRLERLGHTVILQPA

SEQ ID NO: 489701 - protein, 391 aa, unidentified
MSLYFVGIDISKYKHDCCIISATDQKVISKFSIKNDKVGFEELITTFNSLSSPEDIRIGFESTAHYALNLELFLENAHHSFMEVNPVLIKEYKKSTTLRRTKTDSVDCESIARWLMTVEYKPHSKGFYHAYSLKSLTRLRDRLIRQRSFYLVKITNVLDHTFPEFKPFFNERLSKTALYLLENYGSAEKMARMNSVYYEKLRSISRGKFSPQQFIALKELASNTVGVNNSIFDVELNSLLTLYKTLVTEINTLEKEINLLIEEVHPHYLSVPGIGPISAAIIYSEYGDISNFDNPGQMLAFAGIEPGINESGTESHGGRMVKRGSSQLRYALINCCLPLIRFDMTFATYYAKKRAEGKPHRVAITHVAKKLIRVIYALERQDTDFCVQKLR

SEQ ID NO: 489702 - protein, 366 aa, unidentified
MKKTSTVRVNGNMILKGDKLTIGLDLGDRWSFYGVLDEAGQVILEQKLPTTPEAIKQAFGKIPRNLIALETGTHSPWISRLLTELGHEVIVAHAQEVRLITKSNRKDDRHDARTLARLARIDPALLGPVRHRSVQAQLHLTVIRARAELVSARTALVNAARGLVKSYGQRLPKCGTYQVSEKLAEGLSAELREVLVPLFKEIESLNERIKEYDERMEKLAKEVYPEVSLLKQVKGVGTQIALTYVLTIEDPHRFPKSREVGCFLGLRPGRRNSGESEPQKGISKEGDRYLRTMMVQGAHYILGPFGEDSDLRRWGQKLAERGGKNAKKRAVVAVARKLAVLLHRLWVGGEVYEPLRNSQKAMQEVA

SEQ ID NO: 489703 - protein, 338 aa, unidentified
MQWTVAIGVDTHKGLHVAVAFDVLGVELGSREIATTEAGYRDLLGWARGLGVPAFAVEGCGSYGAGLARFLELAGVAVWECERPRRRDRRRGKSDLIDAVIAGRRLLAGEGLSVPRGGGRREELRLLLLERRSAVRARTAALNQLSALVVTVPAQLRARLEPLSGERLARAAARQRSGPEVTAAVLRRLGRRVEHLSEEIGELERALTALVVELAPALLGEPGVGPVCAAQLLVSSGDPKRMASEASFAALAGTSPVEASSGKQQRHRLNRGGDRQLTWALHVIALARMRHHVETAAYYQRLLATGKTRREARRCVKRALARHFYRQLRELSTLPLTT

SEQ ID NO: 489704 - protein, 344 aa, unidentified
MKHYAGLDVSVKETSICIVDETGKICRELKVTSHPEDLLRVLHDPAWNLVRVGLEAGPLSQWLFSALAEAGLPVVCIETRHARAYLKAQVNKTDRNDARGIAHMMRVNLFRPVHVKTLASQKQRALLTARKLLQGKAIAIENDIRGLLRNFGLKVGVVGVAKFEQRIQELVEGLPDLSELMEVLLEARRKLREQFTKLHRKLLVIVRDDTVCRRLMTIPGVGAVTALAYRATIDVPARFRNSKAVGAVLGLTPAQHQSGEMNRVGRISLCGDGMMRALLYEGAQTVLTRSVKWSWLKAWAMTIAKNRGLKRAIVALARRLAVIMHRIWVDGTEFRWTKEEAASA

SEQ ID NO: 489705 - protein, 424 aa, unidentified
MKNFMSTLFVGIDVSSKINVLCALDFQGNKLLNLRALNNQPGAESILDSIITCLNSNSLKYVVIALESTSFYSTHIANFLSSNEELLFFKPLVYCLNPKSVANYRKSFVDMDKTDPLDAFVIADFARCGRITSEPWRGAQFLALQRLSRHRLHLVECVTREKAYMVSNIYLKFSELAVLDKDEQPFSNTYGVTSAAVLTEFLSLDDITYLSIEDLVAFVSAKGKNRFSDPYETAKLLQKAARDSYRLDKVLYEPLNTSIASSFNVIKAFDDEIKTIDKAITKAIKGINTTEYQSLISIPGIGPVLASGILAEIGTITSFDTHNALAKYAGLTWRVNQSGNYSADDTRMTKTGNKYLRYYLIEAANSVKNHVPEYKDFYLKKYSEVTTHQHKRALALTSRKLVRLIFGLLTKNQIYSSGKVGEVQ

SEQ ID NO: 489706 - protein, 375 aa, unidentified
MNYNTVYVGMDVHKKSFSLCCYTNEKEQAEYPQKTAPHYSKVLNYLEAMRFHYGDDVLFICGYEAGCLGYTLYHELMDHNVKCILLALTTIPQPTSRKKVKTDKRDAALIARCLAHHDYSPVHIPSEKDEQVKEYIRMRNDHKIALKKVKQQISAFCLRHGYRYDATVNQWTQAHLKWLRALKPEGLYRDILMEYLSTYDQLTDKIERMDRRIEELAGEPQYREGVKKLSCFLGIKIQTALSTMVEVGDFKRFSSAQRFAAYLGLVPGERSSSESQNRLGITKAGNSHIRTLLVEAAQSYTRGRVGFKSKALKERQYGNPADVIAYADKANERFRRKYYTMVLTKGKKVNVVKTAIARELACFIWGMMVGNLTER

SEQ ID NO: 489707 - protein, 359 aa, unidentified
MASGSMAHDIAAGVTVGVDTHGEVHVAAAFTSDLGWPLGHLEIPTTPAGYGRLLRWAQAFGDATPRFGVEGTGAYGAGLARHLRHAGCTVIEINRPNRQTRHARGKSDPIDAEAAARAVLSGEASSVPKSDEDRVGMIRTLRVARRSAVHSTTQIVNQIHSLLVTAPADLREQLRPLTGTSLLETLAAFRPGPITTPTAAAKMALRGLARRHQYLGDEIATLNVELERLTQEVAPELCALKGVGPDVAGALLVAAGDNPERLRSEASFVQLCGVAPLPASSGKTTGRHRLNRGGNRQANNALWRIVVGRLRWHQPTRDYVARRTAEGLSKREIIRCLKRYVAREVFRVIAAERELARAA

SEQ ID NO: 489708 - protein, 448 aa, unidentified
MQRRIIGMDLGVASAHVAVVCDETGAVLARRRCRPTVASFDALEALALKGAGDNVALEVVIEPTGVSWLPVAVFFCRRGHAVYRVGTAKANQMRKLLRPHAKSNGIEALSLARLAIFEPEHLNALELPSGTEQASLDRRVRAADSLTDAIAEHKTRIRELARQVMPTVAEVFTNTLGKADLAVLGHYGDPRALLALGEEALTAFIKAQSNGYHGERKAKAWLDSAREAVELYGDDPAVAYQDVAAELATEARVLALFESELAAHAKAREAAYQKVDPAGLARSLPGIAWVGGPVLVSAMARPGRFSSGAAFKSFTGLAPRRAGTGEAEQKGGGITKAGDRRLRAQLVCSANVARKLDPQLAAVYWSQMAERGAHHQKALCVVAARLAERAWAVMARGTPYVLKGTDGREVSAEEAKAIITSRYVVPDEVRARRSARRRQARRAPQQVL

SEQ ID NO: 489709 - protein, 358 aa, unidentified
MNAQVKQIDFTGQNIYAGFDVHLKSWKVTVMAESFVYKTFTQPPKPEVLYNYLKNNFPGGTYHTAYEAGYCGYWIHNKLTSYGIKSMVVNPADIPTTHKERVQKEDKRDSRKIARSLSAGELNPIYIPSIQAQEDRSLVRTRSMLIKDLTRIKNRIKSLLYYYGISIEDAFPHAQSHWSNPFVSWLDGLELSYDSGKYTIQALLTEFKHLRGSTLEVTRQIRLLAQTDTYREKVNLLRTVPGIGLITSMTILTELELIDRFSTLDKLCSYIGLVPSTRSSGEKERSGDITPRGHDTLRTALIESSWIAIRNDPSLMKSFVVYRSRMEQNKAIIRIAKKLLSRIRFVLHNNEPYKCSIA

SEQ ID NO: 489710 - protein, 429 aa, unidentified
MPSTVRSCSPAATHSQDGTLFVALELSLSHWLVAVSAPDASKVSKHRVPACDGPALLALLDRLRRQAEARRGGVVGVVSIQEAGRDGFWVHRLLEAHGVQSQVVDPASIAVNRRSRRAKTDRIDAEGLLRALMAWSRGERQVCSMVRPPTREAEDARRLTREREALVTERTRHANRIKGLLATQGVFGFEPTWQARRARLDELRTPEGQRLPPQLMAEILRQIERLELTMRQIASVEAERDAALAAECQAEDQAGAALASPEGPAPAAPVLPPSAALPRATGRETFGSSARDGAGARLLRLKGIGPETASVLRLEAFHRSFGNRREIAAYAGLTPTPWKSGGLDTEQGISKSGNARLRRTMVQVAWFWLRNQPQSALSAWYRERVGDGRGRTKRIAIVALARKLLIALWRLVTQGIVPEGAELKVARAA

SEQ ID NO: 489711 - protein, 405 aa, unidentified
MSALTVGIDVAKEFHWVVATVPHPETGKARVALSRRVENTPSDITALLAEIAELEAEHGSAAVGIDVLGGIARLVEVMLTSAGVEVRHVPGLAVKVTRRATRGGVHKSDPRDARVIADLVRSRDDLRQVSGDDADSVGLSLLVGRRRALVEDQTRGIAQLLDLLCSIHPGLERVIKPRNKADLALLARYVTPTEIRRTGRSRLLAYLRRTGRHNGPVLDRLVTAALTAAAEQHIHVPGEDIAAAIVKDLAAELLAIRTRLATVDAQIAEQVADHPDATLIQTLPGMGTILTAEFLAVAGGITRFATPDQLASAAGVAPALQQSGKVRYLQRSTGGDRVLKRVFYQAAFCALKTDPTSRAYYDRKRTAGKTHHQAVIALARRRVNVLHAILRTRQPYQPRPTRNAA

SEQ ID NO: 489712 - protein, 355 aa, unidentified
MERTIGMDVHAASCTLALISEKGRKLKDFPVETNGQALVEAIRMIPGHKHLVMEEGLQSAWLYETLSPHVDELVVTGVTESRGPKSDKRDAYGLAEKLRVGNLDKHVFKAPRQFTRLREFSRTHMTLVGDVVRTQARIKSVYRSRGVLVTGIDVYGSRRRNEWLEQLPSSTQIRATRLYDHLDFLLEQKKQAEADLLREGKKHPIVKTLETAPGFGPIRAARLVPIVITPHRFRTKRQFWSYCGLGIVTRSSSDWVQTTDGAWVKARVPQTRGLSLQHNRFLKDIFKGAATTVITQRKKDPIQARYERLLDGGTKPTLAKLSLARRIAATVLRMWKNEEEYDPGRAGLPAQTREG

SEQ ID NO: 489713 - protein, 352 aa, unidentified
MNITTIGVDLAKNVFQVHGVDECGKAGLRKRLKRTQVLSFFVNLPRCVIGMEACGSAHFWARKFTELGHTVKLMAPQFVKPYVKTNKNDAADAEAICEAVGQEDMRFVPIKNAEQQALLALHRARQGFVGARTAQVNQIRGLLAEFGIVIPAGIRRVRENMPEILQDAENELPCVSRDLFSRLFSHFRELDSQVRQLEAQIQAWHREDAASQRLQRIPGIGPITASALVGSIGDASTFKNGRQLAAWLGLVPRQKSSGGKEQLLGISKRDDTYLRTLLIHGARSVVRQLKLKAGQSEGWLARLALRRNLNIAAVALANKNARIVWALLAHGRDYQAGYVAQRSREIMVVTAQ

SEQ ID NO: 489714 - protein, 452 aa, unidentified
MKILALDLGKFNTMCCFFDTKTRKHTFLNATTERRYLEAVFKQHKIDLVVMEACGPSGWINDLAKSHHLPTLVCSTNEDAWRWSNVKRKTDKDDALKLARMAAMQELKAVHMPTEKHREFRSLVKYRKTLDGRINKMKCTIRAWFVNHGISIDAGDKAWHTGREHINSFRKPLMECQPHELWRGELDIELTQMDALAAQLDIVVKQLETIGKRDARIVRLRTIPGVGPRTAEILVACIDDPHRFANGRQVSAYFGLVPRQYQSGETDRNGRITKRGNPLARTILVECAWASLRYNPWAKSVYDRICGKQKTRKKKAAIALARKIAVLAWALLRDEKDWDPKQMLAVTESFGRTPPALKETLEKMKPKENSDQRKSRLRREAREAKTAATSSTAKRQNKPAAKSTNPIATKIPKPKISIGKPTAKPSPPQKATGPKTKPKSEPRRARKLVSAV

SEQ ID NO: 489715 - protein, 428 aa, unidentified
MKEVIPMKKRIYRKMPVNQFQPSSISRDDVGARLVVAVDVAKVDMVAAIAAGDGRVLNTIAWKAPAENATVLGVLRSFRAAGFLVEIAMEPSGTYGDVLQYQLEKEGFPIFMVSGKRTFDAREIFDGVPSLHDAKSAAIIARLHVEGLSKPLSAPCPERRQLRAAITIMDLHQRRYLQLVGNLESWLARHWPELPALVELTAASLMALLARIGGPADVAAHRSGAGKLLRGMSHGLMAEDKITAVLDSAGTSVGVPLVGLERDALITIAAEAHRALRNFKVAKTEVEKLSAHTPAVVLAPVIGRTTAAVVYTEVGDARSFSSAGSFLKAMGLNLKEKSSGTIKGQLKLTKRGSSRVRHYLWLAVFRWIQKDPIANAWYQRKKERDGGKSSRAAVALMRKLAKALYHVGRGATFDSSKLFDARRLALAA

SEQ ID NO: 489716 - protein, 387 aa, unidentified
MPQPNDLSRSLVSLDQNSTIIAVVELSQSSWLVGGIVPGIERQPRKKLEPSPERLLGLLHRWQDEVVRAGSTITRIALAFEAGRDGFWLARWLAARGVEAHVIHASSVAVSREHRRAKTDRLDTELLKRAFLGWLRGERGHCSMARVPTIAEEDAKRPNRERDGLVRERTRIVNQIKSTLARLGIRNFKPAVRKAVERLATVHTPEGMPLPPNTLAELQRDVARLGFVVSQIREIEEARQKQLEQQHETGSHAMVRRLARIVGVGVETADLLVHEVLSRPMRDRRAVARYAGLTGSPDESGARRREQGLARAGNARVRRGMIQLAWRFLMFQKESALAVWYRARTADSRRGTRKTMIVALARKLIIALWRFVTTGEPLDGVVLRPAS

SEQ ID NO: 489717 - protein, 279 aa, unidentified
MISGLGVLLGTRSFPTTASGYRQLLDRAGGFGTIRRAGVECTGSYGAALARHLSANHIEVIEVNQPDKASRRRRGKTDTVDAEAAARAVLSGRARATAKAGDGPVEMLRIFKLAKTSAIKSRTQAINQLKAVLVSADPQLRESLSGLRNPTLIRRCAQLDTSPPHDAPTVAAYTLALLARRILELTTEIDDLNQQITAILTRHAPTLLQRNGVGPDTAAALLIAAGDNPERLHSEASFAALCGVSPVEASSGKTHRRRLNRGGDRRANSALHTIVGFPP

SEQ ID NO: 489718 - protein, 343 aa, unidentified
MTHYVGLDVSQKLTVICVVDDTGRRLWRGQCTSDPEQVERAVCRHGGDGARLGIETGPMTPWLVHELRGRGLDVTCLDARHARAALKMQINKTDQNDAEGLAQIMRTGWYRSVHVKSFDSHRARALLGARAQFVGMTTRLSNHIRGVLKTFGMLPGQMRGLPFDRRVEILLADRTEVAPIVRPMLAAWRHLREQITAFDKAVRVLVKSSPTCRHLLGVPGIGALSVLAYVSMVEDPTRFRRARSVGAHMGLTPKQYQSGEIDRSGRISKCGDMLARTLMYEAAVVLMTRVKRASGLKEWAQAIARRSGAGKARVALARKLSVILHSMWRSGEPFRWSEQPATA

SEQ ID NO: 489719 - protein, 387 aa, unidentified
MQIANRAEAPAAIRTDLRAIFISLELSRSSWLITSLSPGNGEKMSKHSIAGGDIAELLERFGQLTEKARKRTGKSFEIIVIQEAGLDGFWIHRVLESKGIESHVVDPASIATSRRHRRAKTDRLDGETLVRTLLAYKRGEPRVCAMVKAPTAREEDRRRLCRERKVLIAEQVEHVNRVKGLLFSQGISGYEPLRRNRRAQLEELQTGDGRQLPQHLKSYVRRELDRLELLLDQIKAVESERDALLAEEETIVSAPAAMLLNIKGIGAEFAATLWSEGLFRHFSNRRQVAAYAGLAPTPWRSGSVAREQGVSKSGNPRLRTTLIQLAWLWLRHQPQSALSLWFKERNERSCGRLRKTTIVALARKLLVALWKYVTSGVVIEGAMLKIA

SEQ ID NO: 489720 - protein, 423 aa, unidentified
MMKLKYSICCGLDVHKNVIVATIVTTNKDGISEYLQKSFSTINSDIQRFHNWLIENNCYHVCMESTGKYWIPIFNYLENDIDVCLTHPKYVKAIKGKKTDKKDSKWIADLYKFDLVRCSFIPPKDFRQLRELSRYRFKLVCMKSSEKNRIQNCMTISNVGIASVLSDPFGKTATEIISYLLEHTADSMDEKAVRKLIKKGAKSKSDEIIEAIKGYTIETDQAKKLELARGHLEYLDDMTTQTEVELYVRIKPYYEFVEFVSTMPGMTELSSTIVLAETGVDMDIFDDAKHLCSWCGLSPANNESAGKKKSVRIAKAGDYLKPMMVQCALAAIKSKKQPYFAIKYGRIKKRRGHKKAIIAIARMMMVCIYHMVSEKKPFTPTDYEELMDPQNHVESVVLNENNVFAYLESLGYDSSKLVKRNDN

SEQ ID NO: 489721 - protein, 340 aa, unidentified
MRYIGIDCHKEFCQMSVVNEAGEEERNERVPTQRDVLLAFLKGFEDDKPGTKFVLESTVRWRMVHDIIAGQGFEVKVAHPRGVKMIAASKVKTDKVDAYIMGNLLRVDMIPECHVASDDAQRWRKVVRHRYFLVNESTCIKNRIHSELREEGIDIPKQYVKPFSQKGKTWMRSLNMLMVDDLLDCLEELEAKIKGIERLIEDECLGDREARRLSEIPGVGCCTALTLMAEIDDVDRFPDPESICAYFGLVPSVSQSGSHCHHGPITKQGSPMVRFLLAECVHIHAECCPSSRISIFLERKKLEIGKQKATVAAARKLLVATYFMLKRDEPFRGPEPDLEV

SEQ ID NO: 489722 - protein, 367 aa, unidentified
MSETGNSRLCVGVDLHKTQFTVCALNADGEYLMEKQYPTKEDGYKKFSEEMHHFEEQGYSIELAVETTGNARHFKNRMESEFFAVKVVNTNRFKVITMSTKKTDANDAATLAYYLMKDMLPEAHLCSQTSEEIRRILKTRSILVQSMVKIKNQIHGMMLGYGIETKAAQLQSKKKRQELMNDLEDHDYSAYTASSLKVMLKILDDLSSEIKEIEKHLEEMVSNNEDVELLMTVPGIGINTATTIAAYTEELERFEGNYKKFAAYVGIVPSVRNSNESKHYGWITKHGPQELRTAFVQAAPGMIRLTKVTSDWRIIKDYQRRKGDKGSGRAIIALARKITRIVFVMLSKRESFNPELMRCEVIIQQTA

SEQ ID NO: 489723 - protein, 375 aa, unidentified
MSNHSEAFVAFDSSKLRNAVAIADSGRTGEIRFLGEIENSTTATAKLVRKLASKYERLTFCYEAGPTGYELYRQIKSLGQECIVVAPSLIPKKPGDRVKTNRRDAVSLAKLLRAGELTAVWVPDRHHEAMRDLTRARDTAVNDLRSKRQQISAFLLRKGLHYCAGKKTWSQAHLNWLMSQRFEYPEHRLVFEEMMMAMRQAQERLERLEQAMRAAVPDWSLAHLVTALMAMRGIDLISAATFLAEIGDLSRFQSPSELMAYLGLVPSEDSTGDHIKRGPITKAGNRRARRTLVECSWSYQHPPRVGKDKQAKVAAAPQAVREIAWKAQSRLNRRYRALVRRGKLKTVAITAVAREFAGFIWAVAREATAARAAAK

SEQ ID NO: 489724 - protein, 340 aa, unidentified
MNKTNTIGVDLAKNVFHLCIQNDKGHILKKIKLGRSQFKQFLATTPVSRVVFESCATSHYWARVAARYEHQAALIHPAYVKTYLKTNKNDFNDAEAICEADSRPTMRYVASKTIAQQDIQLLHRIRQRQIDQRTALVNQIRGQLLEYGIPIPKGISQVRHQLASILEDGENELTPQARLLFDALRQELCELDSRIKQADKQVKQLADSHPLCQRLMAIPGIGPMIATALISAVGNASNFKNGRELSAWLGLVPKQFSTGGQQRLLGISKRGDGYVRALLVQGALSAITRCKGRTDSQLLWARQLQEKKGLQKAAVALANKMARIVWSVMARDHDYVTIVK

SEQ ID NO: 489725 - protein, 324 aa, unidentified
MSDAIVGIDVSKKTLDAYCARGQMHRGRTFANSPDGWKLVRTWLKAMGSKQAHICMEATGRHSLGVALALHEAGHVVSVVNPAQIRDFARTKLGRNKTDKVDAALIREYAELFKPGPWTPPSPAMRRLCELQTMRVGIIRSRAEWKNRTGSGLGDITATKLAAATIDHFTTQLEAIDRAISETIDQDAELHGRRDLLVSVIGVGDTLAALLMAKMPEPGVLRRSGEIVAYAGLNPSHHRSGTSIDRPTRISKIGNAELRSALYMPALSAMRFNPAVAALVARLKSAGRLKPKQIVVAAMRKLLVLCFGVLKTGKRFDPVIAMSG

SEQ ID NO: 489726 - protein, 346 aa, unidentified
MLYAGLDLSRKRLDVHVLREDGTTALVTAISPDGDAMRSLVRRVAAEGEPVRATIESMNGARFIHDRLEFLGWEVLIADAQRVRGLAPLAAKTDKIDARVLAELTRRALVPEIWLPTPEVRAERERARFRLHLVRHRSALKNRIHAILIAFGRACPMSDLFGIAGRELLDSLALPEPWQANLVESLALVDDLTARIDALELELRRLGAEHPSMRLLMTVPGVGSVLAYTIASEIGDIDRFASPKKLAGYTGLCPLVRQSGGKDRRGPLAKNGPTYLRWALIEAATHAARDPRYRERYERTKQRLGRQRGAKVARVDLARQLAEAIWHVLTKNEPFHPAGPAMGLVA

SEQ ID NO: 489727 - protein, 328 aa, unidentified
MEQELHFIGIDVSKAKLDVDVLRPDGRHRSKKFTNTPKGHEELLSWLRSHNVAPAHVCMEATSTYMEDAAASLSDAGFTVSIINPALGKAFAQSEGLRSKTDALDARMLAEFCRQKRPAAWEAPHPVERALRGLVLRHQSLTDMHTQELNRRETAREVQMPSIDAHLLWLEAELKRLEKQIKDLTDDDPDLKHRRKLLDSIPGIGEKTSAVLLAYVGLKDRFGQARQFAAFAGLTPRQHESGSSVNRASRMSKAGHVSLRRALYMPAMVALYKTEWGKGFRARLEKNGKGAKLIIGAMMRKLAQVAYGVLKSGRPFDATLHQENACVA

SEQ ID NO: 489728 - protein, 321 aa, unidentified
MSKIKQIIGIDVSKLTLDVYDESYGHSSYSNDVNGFKQILKRYDSNSHYLMEATGCYHQQFAMFLYNHDRSVSVVNPLIIKRFIQMKLQKLKTDKSDAKMICCYGLEQGLELWQPSPEYLNKSKRNYSAINLYLKQTTAIKNTLHSLVASGVLKGKIVQSLNRQLKSLKKEISLLELEITTLIKEFDSHLFTSLKSIPGIGNKTALLLIIHTNGFKDFESYKQVISYFGLAPMERSSGTSVRGRSRINKSGEGTLRNHLFMCSFTACTSNPQCKALYDRLVNKGKSKKLALIAVCNKLIKQAFGIAKSGLVYDKNYRSVLS

SEQ ID NO: 489729 - protein, 337 aa, unidentified
MSVYVGIDVHRKRSQVAVVTGDGTVELNKNVVNGSEPMLRLIGDLPPGTPVAFEAAFGWGWLAALLEDYGFEAHLVHPLRCKAIASARLKNDKVDAATLAQLLRADLLPEAWIAPPAVRQLRALLRHRAGLVRLGTQQRNRIHAVVADFGFDRSGSYLSGPGRGWLAGLELPPVSREVVADCLAVIDGLAPVIDRIDGELRQHAKADPRVKTLTTLPGVGQFTALVMLAEIGDISRFPSARKLASWAGLTPTVRGSDRTVRHGHISKQGSAWLRWVLNQAAQTAKRSPDFAATYSAIAKRRGKKIATIAISRKLLTRAWHLLDDMQATNTNEPPRRP

SEQ ID NO: 489730 - protein, 419 aa, unidentified
MKIVYPICCGVDVHKNTIVATIAITDKNNITQYVIETFSTLNFDLVRFRTWLLGHKCFNVCMESTGKYWLPVFNILEDAEINVLLTHPKYVRSIKGKKTDKKDSKWIADLFKFDMVRSSFIPPKDIRSLRELARYRYKLVCMRSSERNRYQNCMTASNIGLASVLSDPFGKSASDIMKYVLTSNLFNEEYCKKLIQKSAKKKTELILESIRNCRIEADQRFKMNETNAHVNYLDQAILRTEAELYMRIQPYYHIVEHLSSQLPGISQLSAALIISEIGADMSVFETSKHLTSWAGLAPANNESAGKKKSVRISKAGQFLKPLLVQCALAATKDKKETYFAVKYLKIKKRRGHKKAIIAIARMMLTCIYHMIQTGEVFNPSDYEALVKITPRKVVLTDETAIAFLAEQGYDISNLSKLAV

SEQ ID NO: 489731 - protein, 411 aa, unidentified
MTQPNATIIGGVDTHKEFHVAAVIDDVGRLLGTSSFRATACGYDELVCWMRSFGDLAMVGVEGTGCYGAGLARHLATESVEVREVNRPSRQTRRRKGKSDPVDAEAAARAALNGEATGLVKTKDGAVESIRVLHLAYYSARQSRSKVACQIRDLIVTAPEEIRCLLGDLTTEHRVERCSRLRPVGDPADPVVGTKLALRFLARRYQSCDTEMDDLEQLLDQLTTAVNPSLKGAKGVGTDTAAILLVAAGENPERFKNDSAFAALCGVSPVQASSGKTQRHRLNRSGNRQANHALWRIVRIRMIWDPTTKAYVARRVAEGKSEREIVRCLKRYVAREIFRLLVDPKEVTNGADLRRLRHEHGITLTQVASALGTTTSKVSNIERSIYHDTNFTERYLAWLNEAGFSGAEKAA

SEQ ID NO: 489732 - protein, 340 aa, unidentified
MQFTAIGLDIAKNVFQVHGIDAAEKVVVRKQLRRGQVMKFSEALPPCLIGMEACATAHYWARELTKLGHEVRLMPAKDVKAYVKRNKNDAADAEAICEAVGRPRMRLVRAKSAEQQGRLMQHRARDLLLRQQTQVINALRAHMAELGIVAAQGREGLKQLLKNIADEKDARLPIDARASLIVLAAQLQALHTMIGSIERRIVVQHRANEASKRLESIHGIGIIGASAITATVTDPSAFRSGRDFAAWIGLVPRQDSTGGKQKLGPISKQGDRYLRRILVVGAISVLRRAKLNPEKYPWLTQLLARRPFKVVAIALANKMARIAWALLANGSHYRPRLATT

SEQ ID NO: 489733 - protein, 340 aa, unidentified
MSNVTTIGLDIAKSVFQVHGVDAAGEVVIRRKLTRGRVLGFFEKLPRCLVGIEACSSSHYWARELIARGHDVRLLPAQYVKPYLKRQKNDAADAEAICEAVTRPTMRFVPVKSPEQQSVMMLHRVRLMLNRQRTQISNALRAHLSEFGVVAPIGRNGIEQLLVVVNDDKDTRVPADARLCLRMLEAQLKVVKEQILENDRRVRASARETELGRRLMEIPGVGPLLASAFVATIADPHAFKSGRCLSAWIGLVPKQNSSGGKEKLGSISKAGNRYLRQLLVVGAMAVIRYAERNGTRRPWLVQLMARRTTKVAAVALANKTARMVWALMTGGERYREPIIA

SEQ ID NO: 489734 - protein, 391 aa, unidentified
MINIGIDVGKFKHCAAVLDDKTGEVLIKPFFFNNDQEGFELFYSKTKRYIHRKHSVGMEDTGHYMINLTNFLLEKKFTVKYINPRSTSLRRKELGITTKNDKKDALLIAEMLSEKKFWRSVSKSSLETAKLREITRLYHQLQEQQNQDMNRLQRALDIVFPEVNKLSWTRYSKAYMQFLAAYSSASSIAKEDIRNLRKALETGGRGRQCKVSAEEIKTLAKCSVGDDNIAVELEVKSVIAIINARAEQIRVLEKKIEEFSHQLNSPIISIPGISHITGMTILAEIGDIQDFPEAAKLISYAGMEPLVHQSGKYDAAHMPISKHGSRYLRKALYQAVFTVCKYDPTFQAYYTKKRNQGKSHRCAQGHCVRKLLRVIYKILSTDILFDSELIH

SEQ ID NO: 489735 - protein, 348 aa, unidentified
MRFYTKQHKYSCGIDLHARTMYLCILNQEGKILLHRDIKTSPDIFLKTIAPYREDIVVAVECIFTWYWIADLCSEEEIPFVLGHALYMKAIHGGKAKNDKVDAHKIAVLLRGGMMPMAYVYPSEMRSTRDLLRRRTHLARKRAELIAHIQNTNHQYNLTDMGRISRKCDRNKTGVADRFTDPSVQKSIELDIALIDHYDKLLNHLEHELSLIAKVHDADSYFRLRSIPGIGRILGLTILYEIHDISRFPRVQDFVSYCRLVKCAKESAGKIIGSSGKKIGNVHLKWAFSEAAVLFLRRNPEAMKYRAKLDRKHGKAKSLTILAHKLARAVYHILRKKEVFHPQTFFAK

SEQ ID NO: 489736 - protein, 343 aa, unidentified
MCWNTTALDEAGHELNQWQGLNNAAGWRAISQWAASLRSPRQWGIEGAWGYGRNLAQHLVAAGETVYEVNPRWTAMGRRSARKPGKTDRLDARAVALLVRQETSALPRVHAEDDTAVLDLLTSEREAAIAESTRLRNQIHALLSQTDPEYRAYLPTLKSQAALAALESYTAVGSNPLQAQRAAAIRRLSQRLRLALSQAEELAQQIKDLARRRFSPLTNLCGVNLITAGTLAGILGPGDRFATDAQLAAYAGVAPLEASSAGLVRHRLNRGGNRRLNCVLYRIVLTQAHHLPAAKAYIDRRLSEGKTRREAHRALRRFVIRAIWRLWQECQPAQIAASAERAA

SEQ ID NO: 489737 - protein, 330 aa, unidentified
MKQDNLLGIDVSAKELVVKIKRSGKSYPIVSFENDASGHRKLIRWATKGGKCARVCVEATGVYSFELALALHQNKQTEVMVVNPRALRNFAQALMQRAKTDPIDAEVAVEFLERMPFQVWEPPRDEVLELQAITRRILQMKLENNRESNRLHASLRRPSVSKAISKDIEVNIRHLKRRIERLEKEGLALIESVPDLHKKFKRLVSITGVATVSAMRILAEIEMLPKDMNPSQWVAHAGLDPRPFESGATINKHRHITKAGNKYLRSALYMPALVASQKQENVKAFYGKLIQKGKRPMQAVVAVMRKLLHAIWGILHHDQDFDGEKFYKLA

SEQ ID NO: 489738 - protein, 392 aa, unidentified
MDSPPPRHHSATVAFEEANGSEGETMKKHSSKHDSLSSTDVELCTTICVDLAKQVFQLAGEDATGRVIYEDRIKSRQAFHDFLLRLPTTVAVLMECGPGAQAWARLLQAKGNPVRILPAQRVAEHRSGAKNDRNDCYAILRAGRDTSIASIPIKSTTALAIQALHRIRRGNIKRHTALGNQIRGLLLEHGVSMPQGDAAINKHVPQALEDASLPLPDLLRELLDELLMDWLSLGERIAALSRRLEATAQEDKVAQRLITIRGVGPIIATAIVAKQTDPSRFASGRMYSAFFGIVPDQHSSGNKIRLGKMSKRGDGYIRSLMIQGAHAVLSQLRPDSDQPDDRRLLRWLSRLGRKEAAIRLANRNLRIIWALLQSDQVYQRKPNEKPEAAMSL

SEQ ID NO: 489739 - protein, 343 aa, unidentified
MNEVITIGVDLAKNVYQVHGVDAAGGVVFRRQLRRGQMLPFFKKQPLCLVGMEACATSHHWAREIEALGHQVRLMPPRYVKPYVKRNKNDMADAEAICEAVTRPTMRFVEIKTVDQQSVLMLHRTRHLFVRQRTMLINALRAHLAEFGIVAGIGRNGLERLLKVIEDGDDARIPSVARDCLLALRDQLEMVKHQILVADRRVLAWHRMSEVSRRLDDIPGVGPLIATALVASIPDPHAFKSGRDLAAWIGLVPRQNSTGGKERLGHISKAGNRYLRMLLVVGALSVIRRAKQVGYTRRPWLTKLLERRSTKVAAIALANKNARTAWAMMAQGTCYQEPKPQAT

SEQ ID NO: 489740 - protein, 442 aa, unidentified
MAMRKREDSSEVFPNAAGIDIGASSHWVAVPKGSADEPVREFGAMTDDLNAMANWLLACGVGTVALETTGVFWIPVYEVLEQRGLTVWLVDARQMKYVPGRKSDVMDCQWLQKLMSLGLLRAAWRPGDEVCVVRAVARQREVLLTEQAGWVQRMQKALVQMNLQLTEVLTDVMGVTGQAIVRAIVAGERNPKVLASHRHGRVRASAAEIERALTGNWRDEHVFVLGQALAMFDSLGERILECDAKIEALLKPLGVHEVELSGPGKRGGKNTPHFDARTALARWAGVDLTRINGLSITTVMTILSEIGPDLSRFANVKHFCSWLGLCPGTKISGGKVLSARTRRSTNRVRQALKLAAMSLSRNDSALGAFYRRLCARMDKPRANTAVAHKLARMVYFMLTRGEAFVDEGQQCYEEQQRQRNIAALRRRASALGFEITPAGQVP

SEQ ID NO: 489741 - protein, 354 aa, unidentified
MIIIGADYHPTFQQIAFVDTETGELQERRLQHREEAEKFYRDLAAQGMKVRVGMEASGHARWFERLLAELNFELWIGDAAEIHRKRERKQKTDRQDAQHILHLLLKDDFPRIWVPSWENRDLRQLLWHRHRMVQARTRMMNQLQAVALNEGLRCKKKLWREAGRKQLEAFRLAPWASRRRHDLLELLDRLNPTIAALSQAIEQEVEKCPEAQRLMTHPGVGPLTALAFVLIIERADRFQCGKQIASYLGLVPLEDSSGNRRRLGHITKQGNSLLRFLLVEAAQVTVRSLPGWRSKYVHLTMRRGRKIAKVAMARKLAVRLYWMMRKEWDYEQVKKFGSHAGQPGNRYGVKSNIE

SEQ ID NO: 489742 - protein, 348 aa, unidentified
MRIIGCDLHARQQTIAMLDVETGELEERRIEHEGDQVRAFYAGLPQPVLVGIEATGPMQWFLELMEELGVECVVGHPAQIRAGEPRKQKNDRRDARLLMRLLAEHRFPKIWMPSMEQRDVRALLRHREQWVRIRVRLQNALQAIALTHGIRRGAGLWSKAGQRTIGELALPPHSGMRRDELMRLRVQLQQEIERLDKEAKRVAEERPLARLLMTHPGVGPITSLATEVFLGDPTRFADGKAVASYVGMIPSENSSAGKQRLGKLTKQGNAMLRMLWCEAARHAVNKDEELRRFYRRKLAQKGLGIALVAAARKLGVRLWIMLREEIDYEEFCRRGRQRGEAQAERPAR

SEQ ID NO: 489743 - protein, 406 aa, unidentified
MDIQPIFRCSVGIDVHLMLVCVCVIVAAPGLEPEVHRREFGGFKRDRRAMAEWIASFQPDIVVMESTGIYWKSPYAALEKVGIQALVVNAQHVKKVPGRKTDTSDAEWLAMLARAGLLRGSFIPPEALRNLRHVSRHHQKLTAMRAMEKNRLLKILSDGGIRISAVVSDPHGVAATAMIDCLLAGGTPEQALTHAGRLKAPPETLLASLQGELSQEHLFVAETIRSHLQFLEAQLADLERRLLAALQPHEAALHLLMTLPGMDRLAAAKLLVEIGVEMAAFGTASRLCKWAGMCPGNDESAGKRRRGNTAPGNRYVRTLLCQIAWAAIRTTSQFKGRFQNLASRRGTKKAIIAIGHKILKTVFVLLSRQVPYRDPEVDYEALAVRRNAPRWIRQLKKFGYLTPKAA

SEQ ID NO: 489744 - protein, 407 aa, unidentified
MIFVGVDWAEAHHDVHVQSEDGRRLSGGRLPEGVEGIARFHEMVGVHAQEPDEVVIGMETDRGLFVGALVAAGYQVFAVNPMSTSRYRDRHSTSGAKSDPGDAKVLADMVRTDRHNHRPVAGDSELAEAIKVLARAHQSMIWSRGRQTNFLRSTLREFYPAALVAFDNLTSGDALEVLRVAPTPTLGAGLSRSKIAAALKRGGRLRRVEQRAEEIQEALRTPQLQGSAIVATAMGTSVSATAAVIVTMNVQIAELTKELDAGFEQHPDAEVIRSLPGLGTILSARVLGEFGDEPNRYATAKCRKNYAGTSPITRASGTKRVVLARYARNMRLADAIYQWAFTSLTASPGARTFYDYRRAAGDTHHAALRHLGNRLVGILHGCLIHHTNYDENTAWGHRAEIELARTA

SEQ ID NO: 489745 - protein, 369 aa, unidentified
MKKDITHVALDDSKNSIVAGVLRPKAAEPELRQFPNEPKHLRRFFTRLQREGPVSACYEAGPSGYDLYRQLTALDIPCQVMAPALTPRKPGERIKTNRRDAAKLVRLFRAGELTPIRVPDEAQEAVRDLLRCREDVQADLLRWRHRLVKFLLRHGRIYRDGRHWSQRHWSWLRGQRFADPVLARTCQEYLFAVEQLLARRAELDRELEALAQQEPYRTPVGWLRCFRGVDTLSALGLLIEVGDFQRFPHPRELMAYLGLVPSEASTGDREWRGSITKAGNTHVRRILVEAAWHYRHPPRIGKALARRSQGQPTAVLAQAWKAQQRLHRRYRHLVGHGKRPPVAVVAIARELVGFLWAALTPREPAAQAA

SEQ ID NO: 489746 - protein, 343 aa, unidentified
MQTTTTIGLDIAKSVFQVHGVDAAGQVVIRRQLKRRYVLSFFQKLPQCLVGIEACASSHHWSRELQALGHTVRLMPPAYVKPYVKRQKNDATDAEAICEAVTRANMRFVPTKTPEQQSGLVLHRTRHLFIRQQTSVINAIRAHLAEFGIVAPVGRRGVEELLTVVADPNDKRVPEIARACLSAFGAQLRSIKEQVLEFDRLITAWHRSNEMSMRLDEAPGVGPVLATAVVATVADPKVFRSGRNFSAWIGLVPKQHSSGGKDRLGSISKQGDRYLRGLFVAGALAVIRYAKIHGTKHRPWLTALLARRPTKIAAVALANKIARMVWAMMAKGERYKEPVALAA

SEQ ID NO: 489747 - protein, 354 aa, unidentified
MTSTTKAATAERILAIDLGKYKSVLCEYRTGNGEVSFTTIDTTYVELRKQLNKRVPDVVVIEACALSGWVYDLCSDLRLCCRVANTNGEAWKFKHSKRKTDHDDALRLAQLEALHQLPTVTIPAKSVREWRALIAHRQALVCRRVTIQNKIRAILVVQGLPTPRGAKAWTELGLAGLAQLAKPLADCAAAELWRGRLERTLIEYRQVLELATAVEKTLDGIAAKDRQVQLLLSVPGVGPRTAEIIAAYLDDPHRFRNASEVSAYAGLVPRQFQSGEVDRRGRITKRGPALLRKLLVECAWCSLRYNAWARSVYVRLTAGGTSRKKPAIVAVARRLLIRCWAVLRTGHPWRSEAA

SEQ ID NO: 489748 - protein, 370 aa, unidentified
MPPASQHKKIKGWFEVNSLGIDVGKKKCRAALKDERGDIIREFFFSNNNEGISALIQSASHYGKCTAVVESTGNMWIRIHDTLEENGIDTILANPYKTKIIAEAKIKSDKLDARILADLLRADLVYESYVPTKEFREKRSLVRHRISLVRNRTILENKVHSLLDKYDYKSDLTDIFGKSGIIWLKTLDVSNIDRLIMNTTLAAIENINLQIDTVSKELAKYGWDSYDVKILLSMTGIDVFSAMLIVVEIVDVRRFCTPWKLISYAGLAPSTRESSGKTKTGRISKQGSPWLRWILVQCAMTAVRYDQRLKSFYERLKSRKGSAKAIVATAKEILVIIWYMLTRRELYRHMNKKRYEQKLSRLKKIKESAV

SEQ ID NO: 489749 - protein, 414 aa, unidentified
MSLSRWVGRAIALDVHRDFCVVAICEDGRVRSGARVPSTPEGLTLFAESLMPSDRVVLEVTGSCWEVARILEPHVERVVVVSPDDTGITRARAKTDRLDARALARLLWSGELESVWMPDGRCRVLRRRLARREQLVHARSRAKNEIHAVLQRRLQGKPPCSDLFGVKGRRWLAGLQLPPEERESVDAGIRHIEFLDREVAAVERLVAQQALNWPEIRRLMTVPGVNLICAATFIAAIGDVSRFFTSRKLVAYLGLDPKVRQSGEAPARSGRISKRGSAAARWALVEAAWSVVGQPGPLHAFYDRTGARRGHGKAIVATARKLAVLFWCMLRRGEDYAHQQPSLTKKKLRRLEITAGAPKYAKTARGVWSTNVAIRRAERELAAQAEASYKRLVTDRQAAAPTRKVGASVTAERA

SEQ ID NO: 489750 - protein, 343 aa, unidentified
MELYVGMDVSLEETSICVVDGAGEIVCEGTVLSEPEAIAAFIEAKAPHAKRIGLETGPTSTWLWHELRTLGLPVICIDARHAKAALSMQINKSDRNDAMGLARIMQTGWYKEVLVKRLSCHEVRAALNSRALLVKIKRDLENQIRGLLKNLGLRIGKAGGNVFSRRAEELIADQALLREAVRPLLTVRESVRREIADLHRKLLALAREDKDSRRSMTVPGIGPITALTFHAVIDEPARFRRSRSVGAYVGLTPRRFASGEIDWSGRISKCGDRMLRTYLFEAAGVLLTRVPQWCKLKAWGHKLWKRIGFKKAKIAVARKLAVMLHRMWRDGTDFIWSSKEAPA

SEQ ID NO: 489751 - protein, 427 aa, unidentified
MSYRIAGVDVHKRMLAVVVADVHEDGPYRFARQMVGTSPDQLRTLAHWLVAQEVEEVVMESTAQYWRPVWEALERYWQPPRQRRDGAGPMCGRLHLAQAQSNRAPGGRKKDFADAERLVKRLVAQELTLSFVPDAEQRLWRTVTRRKYQLTLNRVQLQGRLECLLEEAHIKLSSLVSDLLGLSARRMLQALADGETSPATLATLADRRLQATPDQLCDALGAATDLHPVYRRLLTMALNELHLIEDQIQELDQELAGLLARHQAAVQRLAAVPGLGVDSAQQIIAEVGASAPTFPSPKRLASWVGACPGDDESAGVSYSHRSPKGNRQMRRVLNQAAHAAVRTKGSIFELVYRRLVPRLGHAQAIGAIAHRLCRLIWKILHQGITYEERGPAVTKHRAQRRAATMIRELRRLGYRVELFPSPSGSPA

SEQ ID NO: 489752 - protein, 404 aa, unidentified
MPYKIAGIDVHKRMLHVVVSDVQVDGEYDFTRRVFGSLPEALRSLAAWLVEQQVEEVVMESTAQYWKPVWGTLERYWKRICQTREGALATSGTLHLALALSNRGRRGRKKDFRDAERLVKRLVAHELTLSFVPDVEQRLWRTVVRTKYQLTRNRVQLQNRLEALLEEAHIKLSSLVSDLLGASARRMLEAIAGGETNRETLAALADRGLRATQEQLQDALGVCQELNPVYRRLIKMVLDEVASIDKRIEQLNQEMANLLRPHEDQVKRLAEVPGLGVDSAQQVIAEVGATAATFPSEKHLSSWVGACPGAEESAEVNHSRRSPQGNRHMRRILNQAANAAAKHKGSIFQILYGRYVPRLGHNQTIGIIAHRLCRLVWKILHRGIRYEERGPESAKPPSKSVPEK

SEQ ID NO: 489753 - protein, 316 aa, unidentified
MSELVYVGIDIAKNSFEVAVTGELQTLNLANDEAGHAQLCQCLAPLAPRLILMEATGGYEQDLALALAGAGLRVSVVNPRQARDFARCVGKLAKTDRIDAQALRSFASMLDAQGHQPRALADDERRELTALVVRRRQLLTMLVSERQRLGVAHRKAKPSILAIMDAIAAQLHDVDDELKAHVQTHHADLAKLLTSVKGVGPTTACTLLAKLPELGQLNRKQITALVGLAPMNRDSGTLRGQRHIFGGRADVRRVLYVAALVGTRFNPVLKAFYAKLLAAGKAKKVALVACMHKLLVILNAIARTRSPWRDDFAERL

SEQ ID NO: 489754 - protein, 348 aa, unidentified
MGDSIMNISVLGIDIAKNIFQLHGVDSSGKRVLKQRIERDKLSAYVANLPLSIIAMESCGGSNYWARVFQSQGHTVKLISPQFVKPFVKTNKNDANDAEAIVEAASRPSMNFVPIKQVEQQDIQSLHRVRSRIVKNRTALINEIRGLNLEYGIAIPQGALKVKGHLLSIIDDKENELTRSSRELMQELYDELVELEGRLKKLEKKIKLICKNNDQCQRLLSIPGIGELTATALVASVPDANEFKNGRHMAAWLGLVPRQSSSGNKQVLLGISKRGDRYLRTLLIHGARAALCRCKSLDNKYGKWLISKRESLSLNKAAVALANKNARIIWSLLKTGEEFNSNQQKGAA

SEQ ID NO: 489755 - protein, 365 aa, unidentified
MNIKKGRRPVMKLTKKEITGKDNEQENYDQYISLDWSEKTMAVARMRSNSMNPKVIEERSDIKRLKKYLAAIGGRKILTIEETTSTHWLYVELKESVDKILICDPYRNRLLSEGAKTDKIDAGKLCRLLRGGLLKEVYHSDDQSYKIRKIVSAYDDLVKAGVRVQNQKSAIYRGLGLKYKKETIPKDDKIMHYVEESQNRSIQLYREEKKEYETLFSQLKKNNSVIKRLTEISGIGNIFAVTIYSTVIDARRFTTKYKYWSYCGLTYNMKESGGRNYGRKRPRHSRKLRGVYKTAALAAIGGKNDIREYYEYLLSEGYAEKKAQNAISRYIAKVSYGVMKTGESYRAYQWRENNKVTSEKITVNN

SEQ ID NO: 489756 - protein, 392 aa, unidentified
MYIVGIDIGKNHHEASIVSPKGKQIGRSLRFATTHKGADSLMRFIFKNIGNSPCVFGMEATGHYWYPIYSFLKAKGYTIYVINPIQSDSLRKMYIRQTKNDSIDSFLIAEVIRFGQFGTTSMADENILAMRQLCRYRDSVISSRTEIKLRIGTIMEQIFPEYEKQFSSLWVSTSMGILEKYLTPENIENAPIDELFEIIKDKSHNRLTRAKAISIKEAAADTFGIKIAQDAFSFQLKQLIDRMNFLDKQIEALDCQILEYYEKFDCYLHTIPGIGIIGAATILAEIGDISRFKNSSSLIAFAGIDPTVRQSGEFNSTHNHMSKRGSPYLRHAIFLAATTCSFHNSPLNAYYKKKRDQGKHHLTATGAVARKLTTVIYAVLRDSKPYEPKKFC

SEQ ID NO: 489757 - protein, 379 aa, unidentified
MKKNTIARLQVTRSQIRRMAAKQRLTVGLDLGDRSSRYCILDEAGEKASEDQLPTTKTGLDSVLGKMPPCRVALEVGTHSPWVSRHLAAMGHEVIVANPRKVKLITQSVKKNDRMDAEQLARLARVDPKLLSPIQHRGPEAQADLAVVRARAGLVDARTELINMARGLAKPMGERLKKCDSDTVKESLADGLSEAAQNAIRPLLKSVEAINQQIGVYDQKIEGIAKKYPEMKLLKQVHGVGTLIALTYILTIEDAGRFAHSRDVGPYLGLTRKLRDSGDSQPELGISKAGDQLLRRLLVQGAHCVLRDGAPESDIKAWGMGMMQNGGKKVSKKRKKKAVVAVARKLAVLLHRLWVTGEVYDPQYNRKAAQAAKGKGKAA

SEQ ID NO: 489758 - protein, 315 aa, unidentified
MTACLAQNVGVDISKDFLDVAFFPPTESWRLANDNKGFRALLKKLGKRVIERIVYEPTGAYHRLFERTLAKAHMPLVKVNPRHARRFAQASGKLAKTDRCDAAMLARMGAALQLEPRCVVSDAVDALKELQIARDALVKDRVAALNRQKTARSKLIKTQLGERLQQIDAQIEEIDREQKKLRNVDPTLTQSFDIITSIPSFGAVTANLLLVDMPELGHVDEEQVSALSGLAPIAEESGKHKGKRSIGGGRARVRQALYMPALNAIKPNGIFHKKFTAMIDAGKPAKVAITAIMRKMLILANALIRDQRKWTPTPP

SEQ ID NO: 489759 - protein, 346 aa, unidentified
MHYIGMDCHISTLDFAVVDETGRLVKNGSVATSINNFMEFVKKIPSPRKIYMEEGTLAAWALEVCVRFRENLVITDPKENHWIGSSGQKNDPLDAVKLAQLARGGYIKEIHHPVGERRRFRELMEAYHDTVRSTTRVKNKIKAKFRQNGIQCTGDTVYSETHREKWKGKLPQDSTLLLILDGLWLQLDQLEQMEKKIVATAKAQAKQYPEIKMFEDIPGIGFIHAATVSAILETPYRFANKRKVWMYAGLGLMKRSSAGKLYSEKLSTDYNHLLKYTIKQAAGAALQAEANPLRRKYLDMTLLRRTAPNLAKLTIARDMLATMWAMWKKGEKYNPEIRAKAVRKQG

SEQ ID NO: 489760 - protein, 398 aa, unidentified
MNAVGIDVSKGKSTVAVIQPFGVVIAEPFDVSHTESDLNKLVQLIKSLSGETKVVMEYTGAYYEPIANALHNQGIFVSVVNPLLIDDYGTNRVRKVKTDKKDSLKIASFAIDKWLDLREYIPANDIRKTLKILNRQYVQYNKILVMQKNNLISLLDSCFPNANTLFTSPRRESDGHEKWVDFVLKFPHIHSISKLSLSAFKVKYQSWCRKNNYNYSDKKVADIHSYCKTQISVLPMTDSVIKIITEAAVMLNSTLETLCMFRDEMDRLSSTLPEYNAVMGIYGVGKVLCSQLIAEIGDVRKLNNSKSLVAMAGIDPPPNQSGKVDTKSRSISKRGSPVLRKTLFQIMTIIIQNKPVDDPVYQFLNKKRSEGKPYRVYMIAAAHKFLRIYYARVMQALN

SEQ ID NO: 489761 - protein, 279 aa, unidentified
MKCDKYMGMDVRQATTVVDVVDADGKPVLETIVATEAAAIIRLVQSLSGPLHVTFEETTQAAWLYEVVRAYVTEVVVCDPRRNKLLGEGSKADKPDARKLAELLRAGMLRSVYHGHEATRKLKELVRAYETLSIDTERTMVRIKAVYRGRGIPTPGRGVYQLRKRDQWLEKLSEPGARQRVAFLYEELDLVRSLRRRAKQAMLVESRAHRAVSLLRTIPQLGPIRCALIVATVDTPHRFRTKRQFWSYSGLAVVTHMSSEYEIKEGRVVRSRKPIATRD

SEQ ID NO: 489762 - protein, 416 aa, unidentified
MNAVGIDVSSRKSTVAVLRPLGEVVCLPFDVTHDIAGLASLAEKLKALDGETRVVMEHTGRYYEAVAKALHEAGLFVCAVNPLLIKEYGANSLRRVKTDKADAVKIARYALDNWADLRDFTPMDAIRYDLKTLNRQFQLASKQRTASANNLIALLEQSFPGIRKCFDSPVRSDGTQKWVDFAHSFWHVDCVRKQPFPAFCERYRKWCKRHAYLFKLSNAEEVYALAKRAVVLTPKSKVVKVLVQEAANQLISISRSVEVYRAEMDRLAAMLPEYPVVMAMYGVGKSYGPQLMAEIGDVRRFERKQALVAFAGIDPMPNQSGDKNVRSNKSSKRGSPYLRKTLFNVIRTYLQCAPQDEPVFQFLNRKRAEGKPFYVYMLAAANKFLRRYYAKLRDFFASLDTLQPVAPIPTILKATL

SEQ ID NO: 489763 - protein, 345 aa, unidentified
MPIVGGLDIHRKQITFDYLDTVTGQVQCGQITPADRAHLRAWLARFHGRDDVAFAVEGCTGWRYVAEELAAAGVAAHLAEPADTAFARGRKRHAKTDKTDCRHLRALLAEGRLPECWIPPGHILECRALLETYHDLRAEHTAWVQRVHAVLFHQGAPALGEGTLRTEQGLAALRAAAAAHLSPAGQLQVATALEVIDALETRLHVLRHQLLDAARHLAGAKVLAARLYGVGPVTALAMTCWLAGAGRFSSSRKAVRFAGLDITVYSSDRKAPPGRLSRQGPPVLRWAVYEAGKTHARSSAPDHGYYAAVKDRQNGKRAALSEARKILRQACHILAELGDDALAAA

SEQ ID NO: 489764 - protein, 391 aa, unidentified
MHISVGIDIAKEVHWVTVLDAQGLILIDRKLHNTPTAIAQLIEELCALQSTVRVGLDVIGGIAGLVQAFFAEANMQLVHVPGLAVNRARQGSVGGENKSDPRDARTIAEQVRTRSDLRTIDALSETDLEIRLLVGRRRDLVQAQTQRIARLHDLLVGIFPGLERELDLRTKGPLHLLTRFVTPAEMRGAGAKRLLRHMQRAGGLPHLQELVELVLRASNEQLITVPAENAVARLIKELAVEALDTRERLERLERELSELLNRHPDAALIRSLPGMGAVMTAEFIAEAGNIGRFRSPDALAAAAGIAPVLKQSGRTRFLKRPLGGNKGLKRVFYQSAFCSLSHPISRAFYDRKRREGKRHHQAVIALARRRVNVLYAMLARRQPFQPVPKNA

SEQ ID NO: 489765 - protein, 364 aa, unidentified
MTIVAHAYPFVIGVDAHARSHALAVLASPTGELLDETQFPATVAGLQRAVSWVARRTGGDLAVLWVIEGVGTYGARLARAANDAGYAVAEAGRMSARANRGVGKSDPLDARRIAQSVLAVDVAMLRRPRADDGVRAAVRVLIASRDHISTERTSAANALTALIRVADLGIDARRPLTAAQITAMAAWRARDEDLATAVARKEAGRLAKRVIAADRELAANTKQMTDLLNASPARVLLDQPGIGPVTAAVALAAWSHPGRVRSEAAFASLAGVNPIPASSGNTVRHRINRGGDRRLNRALHMAAVTRIRMDPRTRAYVERRTAEGRTPREIRRCLIGEVSVMRPGIGLDRGFSVVSGDGLVAEPL

SEQ ID NO: 489766 - protein, 350 aa, unidentified
MIIIGVDYHPEFQQIACVDTESGEFEERRLQHREEAERFYRELAARGVAVRLGMEASGHARWLEHLLKELQFELWIGDAAEIQTKRVRKQKTDRQDAQLILKLLLEDRFPRIWVPSAENRDLRQLLWHRHRMVQARTRVMNQLQAVALNEGLRCKKKLWGERGRQQLKSLQLAPWASRRRSELLQILDQLGPRITELTQAVEKEAQKRPEVRRLMTHPGVGALTALGFVLIIGEPERFHCGKQVASYLGLVPLEKSSGNRRRLGHITKQGNSMSRFLLVEAAQATVRSDPKWRSKYFHLMMRRGRKTAKVAMARRLAVDLYWMLRKGWNYEQLISFGSYAGQPGNPYGVQ

SEQ ID NO: 489767 - protein, 446 aa, unidentified
MDVLYTHCAGLDVHKKSLTACRWVPDPTGHCAEGLTEIETFGTMTIELLGLVDWLTEAGITHVAMESTGEYWHPVYNLLEGHFTVLLANAAHVKNVPGRKTDKADARWLAKLFRHGLLQASFIPPRGQRDVRDLTRYRTKLVQERAREVNRVQGVLERANIKRASVVSDVMGVSSRAILAALVDGRADPATMAELARGRLRSKMPLLEQALSGLVREHHQQLLAMQLAHIDFLDDQIATLNTTIAERLSALPPTETVTVPVAADEPSAGSTPHVDAAVPLTFDQAIILLDTIPGVDRRGAEMLVAEIGTDMSRFGTAARLAAWAGVTPGNDESAGKRRSGKTRKGNRALRTGLVQLAHSATHTKATYLAMLFRRLAARRGKQRAIIAVAHSILVSVFYILVRHEPYRELGATHFDRLRHSQSVEHLTRRLEQLGYAVHLEPRPVAA

SEQ ID NO: 489768 - protein, 398 aa, unidentified
MSNNTPLEIRVGVDVGCYQHNVAIGLPNGDFLEEFEISHTSDGFREFFLRIGAHEKKYNCGVAVAMEGFNGHARPLDTMICVRDYRLYNVNNLKLARFKEIFPAAAKTDVIDARKALELFQLRDHLPSARDVLQEVKAVPQENAILKRLTRRRRFLVNERVRIINSLQTDLRAVCPGLLDITNDAGNLWFLRFLTSTDSLKKLARLRLATLLKIPGVGKKYANSIRHWQEKAIYSPEVDWIGDMIQEDALRVLELHDKIKTLEKRCEDIGRHSRTAALISSIPGYGPVCSATLAGEIGTIDRFRSEASLALYLGMATLDNSSGKHKSSKNPRHVNARAKAAMMIAIDRHRKGVPESQKYYVKKRSEGKAHNQAIRALGRHLSRVIYKMLKEDRPYQMR

SEQ ID NO: 489769 - protein, 368 aa, unidentified
MGEITSFVGLDVHKETISVAVAEGGRNGGVRFLGEIPNTPAALDRLAAKLAKDGRSPQFCYEAGPCGYGVHRHLAERGHDCIVVAPSQIPRKPGDRVKTDRRDAVMLAGLHRAGQLTPVWVPDAGHEAMRDLVRARAAAVASGRAARQQLLGFLLRHGRRFEGRPWSRTHRAWLSGQRFDRAAQQIVLQDLIDTVDAAAERVARLTRQIEVQVAEWSLAPLVAALQAMRGVALIVAVTLAAELGDLGRFASPAQLMAYAGLVPSERSSGAKTRRGGITKAGNGQVRKALIEAAWTYRRPARISEPKQRKVGAAPRPVREIAWKAQVRLCARYRRLAAAKPLQVVVAAIAREMLGFVWAIAREVRPAPA

SEQ ID NO: 489770 - protein, 311 aa, unidentified
MEHSRFVGIAISKDHLDVHVRPTGDSFRVRYDDAGLVTLVAHLRPLAPVVLVLEATGGYEVTVAATLASAALPVAVVNPRQVRDFARATGQLAKTDTLDARVLALFAEAVRPAARPVPDAQAAALGELIARRRQLVDMLGAEHNRRRLLRDRRLQRHLEAHIAWLEEALRRLDHDLTTLIRSTPVWRETDDLLRSVPGIGPVTAGTLIADLPELGRLDRRRIAALAGLAPIARDSGAFRGRRMIMGGRAHIRRVLYMATLTAITHNPVIRAFHQRRVAAGRPGKVALTAAMRKLLTILNAMLRDRRPWHPA

SEQ ID NO: 489771 - protein, 346 aa, unidentified
MGKLYLGVDLHKRSCWVTVLDADGHLLQSRELGTEKWELLEFFGKVAKPAALAVEATFNWYYFLNVIEPLGLELHLVHPWKTRAIASARIKHDKLDSRVLAELLRTGFLAEAWIAPREVREQRQLLRHRARSVQWATRAKNGVHGVVNRQGIRPPRESLFGPKGRAFLAELPLAEMDRWEVDDHLLRLDVLGAQIAELDREIRRRGRENAVARALEEIPGIGSFIALLLVAEIGDIQRFPTGKHLASYTGLVPSLYASGERRWGGAITKQGSTLLRWALVQAAHRAALSARFSEYYQRQRERLGAPKATVALARKLAVISYYRWRAVESSGVHLGWRMVGRSTQTV

SEQ ID NO: 489772 - protein, 342 aa, unidentified
MEYCGIDLHAEYSQICILDEDGEVMETSRVRTSRPGLTRFFGHRERMKLVLEAGGSSPWVSRLLDSLGHEVVVCSPRRVRLIAESKLKNDRVDAEVLARLVRLDPEFLKPIQHRSEEAQVLRANLKVRRAMVNARTAWINTVRGLLRSFGYKVSGKAPHTFVDRVDQMELPIELREVIEPLLEQLDLLTGEIERRNEHLEEMVEELPEVNHLREIPGVGPVVATYSVLTVDDPDRFKNSRDIAPFFGLRPSMRESASVTHFGRITKEGDPEMRRLLVQAAHALLRTKADSELKRWALALAERRGKGKAVVALARKLAVLMHHLWVTSEVYQPFPNRDMTEAA

SEQ ID NO: 489773 - protein, 397 aa, unidentified
MYIVGIDIAKRKHEAAVIDGEGTVIIKPFSFTNNCSGYNRLLAMLAKAKLPLDEVSFAMEATGHYWLALFTRLQKEGFRVQVINPVQTNSIRSFYIRQAKTDPRDALLIAEVIRFGHFSESTLHPENIYELRELCRGRHAIVSMQADVKRKVVALLDQVFPEYETAFTNLFGDTSMAILQTCPTPKELSEMPLEELCHLIEVSSRKRFRMAKAQELQALARNSFGFAMAGDVFSTMIRLYAKHLDFLKQQVREMDRKIAEIMETLDTPITTITGIGPTLGAYILSEIGDISRFSSAAKLAAYAGIDPTMRQSGEYNGVRNRMSKRGSPYLRHAIWLAASSAVLHDPALKLYFQKKRDEGKPYMASVGHACRKMVSIIYAVMRDNKAYTPYIPNEISA

SEQ ID NO: 489774 - protein, 387 aa, unidentified
MPQPNDLSRSLVALDQDSTIIAVVEMSQSSWLVAGMLPGIERQPRKKLEPSAERLLGLLHRWRDEAVKAGRKITRIALAFEAGRDGFWLARWLRARGVEAHVIHASSVAVSREHRRAKTDRLDTELLKRGFLGWLRGERGHCTMARVPTIAEEDAKRPNRERECLVGERTRIVNRMKGTLARLGIRNFKPTLRKAAERLGTLHTPEGSALPPNVSAELQRDIARLGFVISQIKEIEEARQERLEQEPETGPHAMVRHLARVVGVGIETADMLVNEVLSRPMRDRKAVARYAGLTGSPDESGAKRREQGLARAGNARVRRGMIQLAWRFLRFQKESALARWYQARTADSRAGTRKTMIVALARKLLIALWRFVTTGETLEGVILRPAG

SEQ ID NO: 489775 - protein, 339 aa, unidentified
MKTYAGIDLHSSNNYIGIIDENDQRLYQKRLPNQLAHIKQALKPFKESMEGVVVESTYNWYWMVDGLKEDGYKLHLANPSAIKQYEGLKHTDDKWDSFWLAHMLRLNILPEGYIYPKEERPVRDLLRRRLLFVKHRTSHILSLQSAITRNLGYTISGNDIKKLNESDADTLFNEPFLLLAAKNNIATIQFLGKIIKDIERPVKSNVTLKPEFEYLLTMPGIGNILGLTIMLEVGDIFRFPTVGDYSSYCRCVKSEHLSNNKKKGKGNPKNGNKYLSWAYVEAANFAIRHYPECQRFYQRKKSTTNGIVAIKALSNKLARASYYVMRDQVAYDMNKLFRQ

SEQ ID NO: 489776 - protein, 405 aa, unidentified
MKLYIGIDWSQGKHDICFVNTKGVIQSQLVIPHSQTGFWKFEQRRKKLGVPAENCLVGLETSYSILVDFLWDRGYANIFVLPPTLVKGSRTRMRSSAAKDDPGDAYLIADILRTDHGRLQTWQPDSGLTRQIRTKVRFISFLTRNIVRMTNRQRAVLLRYYPVAAELFSSLSTLISQHFILAYPTPQAAAALDLDSFRKFAKQHRYTHKSKLASILAKLDQDDPLADMDIIVACQDEAQGLAHVLLDMIRLKRDNLKQLQQLLDLHPDQNIFASLPGTGVYLQAALISKFGDDRGRFSTPGRVQAIAGTSPVTIRSGKSKYVRFRKSCDYEFRHIVQQWAKQSLRSSVWANAYYARVRPNCDSESHAFRCVANRWLAILWRLWQDHTLYDETYHLKQRALRSQPR

SEQ ID NO: 489777 - protein, 328 aa, unidentified
MTRAVLGIDVSKATLDVCLELGPRSKRGTFNNDTKGHHALYGWVRKACKDQLPHVCLEATGQYGDRVAKYLYEQGCPVSMMNPMRIKAHAGAMGKRNKTDKADAEVITDFCLKQNPPLWSPPPSHLRDLKALVRRLDDLKNMRTQEKNRLGSGTETPGVIASIEAHIDFLEEEIKDMDAQVQALVDQFAQLKKQRALLESIPGIGKLSAAVVLAEIPDIANFESARQVAAYVGVTPRNHRSGSSVHPNARLSKTGNAHLRHALYFPAVVAKNHNPIVREFCQRLTDRGKAPKAVVCAAMRKLLHIAYGVLKSGQPFDPEYLKKQAVQA

SEQ ID NO: 489778 - protein, 431 aa, unidentified
MNYNQNNKIAQITPKTLVVGIDIAKHHHVARAQDYRGMELGSTCFFDNTHDGFRTFINWINQIKESYEMESVITGMEPTDHYWLNLAHILKDEQIKFVTVNPLHVKHSKELDDNSPTKNDIKDAKVIAQLVKDGRYAEPTIPQGVFAELRVAKKLRDLLNVDLQIVQGQVHNWIDRYFPEFFTVFKSWEGKAAIHLLKLEALPEELVRYTEEELLEYLRQAVKRSIGIKKIQALKEAAKRSIGIRQGAMMAKMELRTLIQKYELIQAKFEELDQTLDTLLQDIPGVEQMLEITGIGRDTVAGFFAEVGNLSEYNHPRQIIKLAGLSLKENTSGKHKGRTKITKGGRKKLRALLFRASMILVAKNKAFKALHHHYTTRPDNPLKMMQSLIAFCNKLIRILFSIWKKQFVFQEEKMLKDIPHMHAFIQESIAA

SEQ ID NO: 489779 - protein, 372 aa, unidentified
MAEKVARSRRMSKELRLVDNEVAFVGVDVHKKTYAVCVWTEEREAVASWVQPARPALLAERLEPVRAQIAWVVYEAGPTGYALVRHLRSGGFRTDVIAPSRTPHAPGRSGKGDRRDAAQMAFLAAKGMLTRIHVPTPEEEADRQVVRRRNQLGRELRRTKHRIKSFLLQHGLPGFEHWSRAALEALDALALGPHLRFCLDSLLADYAHLRAQLAAADAHVAELARTERHATAVELVRRVPGVGPTVAMTVRTELVRPARFDTPQQVASFTGLAPCVRQSGERTRSGPILKTGNRVLRSLLVEAAWQWVRHDPAAKALYRHLAAATATPNKAIVGVARHLIILLWRILTTGIVYTPPPSASADGEPLEPHEDS

SEQ ID NO: 489780 - protein, 413 aa, unidentified
MQRLFRVCAGIDVHKRSIYVCLVKAAPDASFTKEVRSFGATTHELLGLRDWLTREHCQSVSMESTGVYWKPVFNILEGALKVVLVNAHHVKGLPGRKTDVQDCEWLAELHLHGLTRPSFIPPSEIRELRELVRTRTTLKQDRARHVNRIAKVLEDANIKLGNVASDILGVSGRAMLDAIVAGQTNAAELAQLAVGRLRSKQTALQQALHGFVKPHHRLLIQTHLQLIDAFDASLDALTIQIEECMHPFAATRDRLDEITGVGPEVATVFISELGVDMSPWPTPAHAASWAGLCPGHHQSAGKHKSGRMRHGNRWIKRAFAQSGWAASRANGTYMQAHFRRLCSRRGAKKAVMAVAHSQFLRCVLLSTLPGECYQELGGDFFDRRNERHATRRLVTRLESLGYKVALERADPAA

SEQ ID NO: 489781 - protein, 358 aa, unidentified
MNSVGIDIHKTRCNACVKTSEGRILEEFTFQNNTQGLEELVTHLNVHQETQVAIESTGNLWTRIYDRLEQQQIRVVLTNPKKTRALTENKVKTDRIDARLLADLLRGNLLSASYVPPREIRTQRSIIRERARLVQTRTILKNRIHTLLDKYDLPPSFTDLFGKHGLEWLRGLQLQPGDQVILDVNLEQLSSLTRSIDALTANIALSAVDNPEVKLLMGFTGIDYYGAMLLLNEIGPVARFPSAKKLVGYAGLAPSTHQSGPVTIHGHITKEGNSHIRWILIEAAQNASRHDPRFKHFYLRIAKRRGHQIALVAVARKMLVTIYHVLNHHSEYRGLRPELFENKIRRLQRITRSDLQTK

SEQ ID NO: 489782 - protein, 328 aa, unidentified
MENNIHFIGIDVAKAKLDVDMLRPDGRHRSKKFANTPKGHNELVSWLRGHQVIHAHVCMEATGTYMEDVAAHLSDAGYPVSVINPMLSKAFVQSQGIRSKTDTVDARQLAYFCREKRPPKWEAPHPVERALRALVLRYQALTEMHVQEQNRRESAREVQLPSIDMHLLWLETELKRLEKQIKDLTDDDPDMRHRRKLLDSIPGIGPKTAAVLLAYVGLKDRFREGRQFAAYAGLTPRQHESGSSIRRVSRMSKMGHVSLRRALYMPAMVTLYKTEWGRVFRERLEKSGKNAKLIIGAMMRKLAQVAYGVLKSGRPFDATLHTKNACMA

SEQ ID NO: 489783 - protein, 368 aa, unidentified
MKNITTYVGVDAHKKDLFIAMLVGAQQTPVTWQLANEPNAIRRLVRKLEREAPGPVSVCYEAGPCGYALQRQVTTTRVSCQVIAPGLIPRKPGERIKTNRRDARKLAELLRAGLLTEVRPPTPEEEAVRDLCRARDDAREDLQRARHRLGKLLLRRGLHYSGRNWTRAHRQWVDSLQWTQAAERVVVDDYWLAIDHVQARLIELDARLTEIAETAPYREPVGWLRCFRGIDTLTAILILAELHDFRRFHSPRALMAYLCLVPGEDSTGEKHRRGRITRTGNALVRRVLVETAWHYQHRPHIGVALTRRRKGQPTRVIAIADKAQQRLCRRFRRLGEQHKPAPKIAVAIARELAGFLWAALQPAREPAA

SEQ ID NO: 489784 - protein, 335 aa, unidentified
MEITKQSIGIDVSKESLEVKFKEKSTKGIKIKGSSKFDNTSNGFNKLLEWCTKREKVKNVIYVLEATGVYHEDVLYFLFDQGKKVSVELPQRIKYFAKSKGVKTKNDLIDSGTIADYGLERELKVWQPPGKEFKTLRDLSREHNTLTNSRSVAKNRLHAAIHSHDKNIRVIERLQSTIKFYSAQLSEIEKDIKTTVNADKELSGKIKKITTVKGVGVMTVVKVIAETGGFYLFQSINQLISYAGLDVVENQSGNHNGKTWISKKGNADLRTALYMPALSAIRVNEKIKSFNDRIMTTHLYKKQGIVAVMRKLLILIYTLWKKNEEFNPDYKWGRV

SEQ ID NO: 489785 - protein, 406 aa, unidentified
MKQIVSVGIDVSKGKSTVCAMIHPNTIIKESFEVLHTVEEMSMLADYIGSLDGEIRIVMESTGHYHLPVAQFLYQKGFFICVENAYIIRQFSRIMLHGAKTDPLDAKKLAKYGLAYWSELKPYKFHPSCYTELSLLSKQYQTYIKLLIAAKQNVIHLMDEMLPGFKEALDTASSVQFSKVKYVDFAKEFYHVDMIKSMGKEIFRENYKQWCKEKGYRFQSEKADELFHLAEDGIPTLPTEFPSTRLCMEVATEQVSQLGYALEQILSQMQNLAKALPEYQTIRQMGGMGEKLCVRFIADIGDVRRFHNGKALVAYAGIDAPPYQSGQYTGTKRRISKRGNSALRKTGYEVMKSLKSHPPKTDTRVYDFIIKKENEGKSKKQAKIAGLNKFLQIYYARVMEIYKNIV

SEQ ID NO: 489786 - protein, 335 aa, unidentified
MIVVGVDVHKQSLTAVAVDEVGRALAEATTADAAGLLVWSASLQGERLWALEDCRQLTRGLERTLLVAGERLVRVPPKLMAPQRRASRMRGKSDPIDALAGARAALREPRLDHPRPGERRLRELKLLVDHRDDLVDERRRAQQRLRWHLHELDPQLAVPAGALDRAIWLDRLARRLARQEQTVQVRIARELVARCRSLTRTILERERELEERTAETAPALLALPGCGTLSAAKLLGEIGPIERFDTDAQLARHAGVAPLEASSGKHRRHRLDRGGNRQLNCALHRIAITQARAHPPARAYSTANRPKARAAAKPSAASNDSSPAPSTPRSKASRH

SEQ ID NO: 489787 - protein, 359 aa, unidentified
MQQNSKQSTSTKAVVAGIDLGNKSSEVCFLDSEGKVIKRHKMRTTRNNFEALFGSLPRLRAAIETGPSSNWVARLLDELGHETIVADAQRVKIITDTHSKDDRRDAHWLAEIALRWPELLNPVRPRSLETQQHRAMLRLREGLVEARTKLINAVRGVLWSFGEKLPSSTGEWFARKALPNLPELLRDQVHPALLAIEEISAQVQVYDRMAEKLCRERYRSATKRLRSIPGVGPLTALTFTLELNDDPNWLRSSRSAGALVGLRPKRRDSGEVSPELSITKKGNRMLRRLLVQCAHRILGPFGPDSTLRRWGLGLADRSGTKRGKRKAIVAVARKLAVILHTLWRRDQDYDPLYGLPQKT

SEQ ID NO: 489788 - protein, 351 aa, unidentified
MIIIGVDYHPSFQQIAFMDEKTGEYGERQLNHSNGEAEKFYRELQHRGVHARVGMEATGHALWLERLLAELGVELWIGDPAEIKTKRVRKKKTDREDARLMLRLLLENRFPKIWVPSPENRDLRQLLWHRHRLVQMRTRIMNQLQAVAMNEGYRWKKKLFSEKGRALLEKLSLAPWASRRRKELWELLDQLDPKIAELTAAAEQEAKKRPEVLLLMTHPGVGPLTGLVYALVIGTPERFPCGKQIGSYTGLVPCEDSSAGRQRLGHINKQGNSLLRFLLVEASQAAVRCNPDWRRRYVHLRMRREKRIAKVAMARKLAVRLYWMWRNNWRYSQLVEFGSNVGKLGTVHGVK

SEQ ID NO: 489789 - protein, 386 aa, unidentified
MQASNVCTPTVGDIGTIFVAIELSQKSWLMTIHSPDRDRISRHKLTGGDHAGLLSLLEGIRTRASRKLGSAPAIVSCYEAGYDGFWLHRLLTAAGIGSHVFDPASIAVEQRGRRAKTDRIDGELLLRTLMAYCRGEPRVVRIVRPPSPEQEDARRETRERDRLVKEQGGHTNRIKALLRLHGMAVGNPRRRDWLKWLSAQRDWQGQTVPRQIKTEIEREHARLMLVREQLAALEQQSAQAQPAPAAAEMARRRNILFQLKSLGPAFSGTLTNEVFYKNFDNRRQVGAYVGLAPSPWKSGGIDREQGISKAGNPRARLAAVELAWLWLRHQPNSALTHWFLARTVKASKRIKRIAIVALARKLMVALWRYLTTGLVPVGAVLKPVEA

SEQ ID NO: 489790 - protein, 463 aa, unidentified
MRIIGLDLALTGDHKALIADERGQPLTPVRSLQTTARDLQQLLERAREHTPPTEPLVLVMEPTGMAWFPVAAFALRQPHVTVHLVNSQQVADLRRYYQKHHKSDRIDARVLVKLPVVSPEKLHPLCLPSAPQLACQRGCKELDRLVTLRTAIQNRLQAVDRFAWPGLEAVLPGTVSPLRCWFRERWYNPASVCQAGAGVLRQSWLQATEAVAASAVAGDWADQLVSVAQQVLALYGADSPYLDYAALQAEVTRDQVLLGFVTEQHQALQLETVRPLYRHLHPSRNLETLKGVGQDGAAVYASFIGDPSRFADASHFRSWSGMIPSSQQSGESEVQGLRITQAGPDLVKKFAYLDAEVARQHDPQLAALYYDQMVHHGKHHCQAVCTCATHLLDRIWVVLSEDRPYELRDVDQTPVTVKEAQQIIAERYAVPAEVRQRNNRRHRQARAEAQAEKKQKREKRPSR

SEQ ID NO: 489791 - protein, 420 aa, unidentified
MKELHVSDFSALVGIDWADKKHDICESPSGSNDYQYSIISSSPAGIHDWANSLKKRYPKGKIAVACELKKGPLIYALNKHKHITLFPVNPSTVAQYRKAFTHSGAKDDPSDALIQTEILEHHMSKLTPIEPESAEIRVLTQHVENRRKLVQERVRLSNKITSTLKNYYPQVLDWFNEKDTIIFCDFISKWPSLTDAKKAQKRTLLNFFNQHSSRYPDVNEKRINEIKSATALTDDRGVIEPNKLMVEILILQFKLIIESIQQLDTIIRQAYKKQSDAKIYDSFPGAGPKLAPRLLVAFGTNRERYQKAEQLQMYAGISPVIERSGQKSWTHWRYSCPKFLRQTFVEWAGQSVKYSFWAKAYYLQQIEKGKPHNTAIRSLAFKWIRIAFRCWKTKTTYDETKYLEALKSKGSPLLEYAVKV

SEQ ID NO: 489792 - protein, 341 aa, unidentified
MNVTTIGIDLAKTVFSIHGTNQHGKVVVRKRLNRPKLLAFFAQLPPSLIGMEACSGAHYWARELTKLGHDARIIAPRFVAPYRKSSKNDDNDAEAICEAVSRPNMRFVPIKTDDQQAVLCLHRIRRGLTKERTAQINQIRGLLAEFGLIIPQGRYHARHRIPEILEDAENGLPMLARRLLNNINQRILQLDEEILAYDREIEAMARRDEQAKRLMAIPGIGPQTATAILASAPDPRQFKSGRHFAAWLGLVPRQYSTGGKPRLGRITKRGDKYLRTLLIHGTRAVIAKLADKNDRLSGWAKGLVERRGYKRAAVALAAKNARIIWALLMNQTEFKTQPMEG

SEQ ID NO: 489793 - protein, 317 aa, unidentified
MAQNGRVVVGVDVAKDKVDACIRSLSQRQTFPNTAPGHRKLAAWLAKHQVNKAAMEASGGYEREWAKVLRQASMEVRIVDPKRVRSFALSAGQLAKNDTIDAEMIAWFAETFSEAPGRPHDAAREELAALVKARKRLIDLKTRLQVQDEHAASGPVQKAHARVLKSLTSEIAKLEGAISVKVKSTPEFAARAEIIESVPGLAGTAAATLIAGVPELGQVSDAIAAALIGLAPYDDDSGKRRGERHIKGGRRWVRNAIYMPCLGAATLNNPVLKAFYQRLIAKGKEPKVALVACMRKLIVILNTMIARGEKWDSSRYA

SEQ ID NO: 489794 - protein, 358 aa, unidentified
MNRNTGMCAGQVIGTMNGLQVVGLDIAKKVFQLHTVDMGTGEIINVQIKTGKVLEHFANREPCLIAIEACGSGHHWARELQALGHTVRLMHAKIVRPFVSGNKTDATDARAIWLAVQQPGVKFVGVKTVAQQATLTLHRQRESLMKMRIMQTNALRGLLYEFGATFAKGKRAMFSEIETTFETLVDTLPQVVVDSLREQVARIKKLDEDMLTIEKRLKLQLKQDLQMQRIAKIPGVGLLTATAAIATMGDASAFKSGREFCAWLGLVPTQTGTGGKVKLGGISKRGDTYLRTLLVHGARSVLNATKTPSPWLVAIQARRPGNVVCVAQAAKVARTIWAITAKDQEYQSAHKSIRPQAA

SEQ ID NO: 489795 - protein, 416 aa, unidentified
MNAAGIDVSSRKSTVAVLRPFGEVVRLPFDVANDTVGLASLVEQLKALDGETRVVLEHTGRYYEPVAKALHEAGLYVSAVNPLLIKEYGANSLRRVKTGKADAVKIARYALDNWADLRDYTPMDTIRYDLKTLNRQFQLASKQRTASANNLIALLEQSFPGIRKCFDSPVRSDGTQKWGDFSHTFWHVDCVRKQSLNAFAERYRKWCKRHGYIFKQSNAEEVYSLAKNAVVLVSKSEVTKILVQEAASQLTSISRSVETYRAEMERLASTLPEYPAVMEMYGVGKSFGPQLMAEIGDVRRFERKQSLVAFAGIDPMPNQSGDKNVRSNKSSKRGSPYLRKTLFNIMGIYLKCSPQDEPVYQFLDRKRSEGKPFYVYMTAASNKFLRRYYAKARDYLATLEDLPPVDMDSTGLQTHN

SEQ ID NO: 489796 - protein, 394 aa, unidentified
MIYAGVDIAKTDHVIDAVDDKGNKVAKPMGFKNTEAGFERCVAWLEGVAEDPGEVFVGMESTGHYWMACFAYLMARGYKVAVINPMQVKAMRRLKSMPRVKNDRIDSWLIAEVLRMGDFDVTRLATDEVQSLKMLTRYRQQLKQEQAAVKTQLICVLDAYFPEYAGIFGKKGLFGAGSLAVLERCPTPAECGKVRASTLAKVLSEASRGRHGAERAADVKAAAKASVGITLGQDAASYQIKTMVGQIKSLEETTAEVTAKIEALLEGVEPLILTIPGVSTATGAQIVAEIGDVARFKNAAAVVSYAGLNSGVSQSGQFEAKGEPITKHGSPYLRRAMWLAADGARKKDPALKAFYEKKRGEGKCHRVAVTAVARKLCHIVYAVMRDQVPYDPDR

SEQ ID NO: 489797 - protein, 337 aa, unidentified
MSVYVGIDVHRKRSQVAVVTEDGTVQLNKNVVNGSEPFLRLIGDLPSGTPVAFEAAFGWSWLAELLEDYGFEAHLVHPLRCKAIASARLKNDKVDAAILAQLLRADLLPEAWLAPPRVRQLRALLRHRASLVRLGTQLRNRIHAVAADHGYDRSASYWTGPGRGWLAELDLPAASREIVGDCLAVIDGLAPLIDRIDGELHACARADPRVTVLRTLPGVGEFTALVMLAEIGDITRFGSARKLASWAGLTPTVRGSDLKVRHGHISKQGSAWLRWVMNQAAQTAKRSPEFAASYAAIAKRRGKKIATIAVARKLLTRAWHLLNEMQATDTNAPLRRP

SEQ ID NO: 489798 - protein, 367 aa, unidentified
MKKSITVKRVGISKAMNKSARPATIGLDLGDQFSQYCVVNQQGSEIDSGRVRTRPEELGKHFGKMKRVRIVMETGTHSPWVSRLLQGLGHEVIVANSRKLRLIYKNRRKADRVDARYLAKLGHKDTELVFPIEHRTQATQAELSLIRSREALMAARTQLVNHVRGTVKSFGGRLPICSAAAFHKRMATELPEPLREALLRVLDTIATLTEQIAAYDKLIAQRARKHSVAKRLQQVQGVGPLTSLTYALTIERHERFARSRTVGAYLGLTPATADSGQSSPQLRITKEGDVLLRRLLVGAAQYILGPFAQDSDLRRHGLAIAARGGKNAKKRAVVAVARKLAVLLHKLWKTEQDYVALYNPQQLEQVA

SEQ ID NO: 489799 - protein, 412 aa, unidentified
MDLDIVVTHGAGLDVHKKVIVATVLTPTVSETRSFGTLTPDLLALADWLQSCGVTHVAMEATGVYWKPVVNLLEAYPFEAVMVVNPQHIKGMPGRKTDVQDSQWIAGLLRIGALKASYIPPRPQRELRELVRYRTSLQQARATEANRIQKVLEGANVKLGSVISDVLGVSGQRILAALTDGVTDPAALADLADPRIRASRDTLIQALTGLVTAHQRLMLRVQLQHVAFLDRQIAALSEEIATRLANFDDALTRLQTIPGVERRTAEIIIAEIGTDMQRFPSAAHLVSWAGFSPGQDESAGKARPTRTRKGSKALRAALTQSGHAAGKTKTYLGAVYHRLAGRRGKQRAAVATGRHILIAVYAILRIPGAVYEDLGATYFDQRDRQALVRREIRRLEALGYRVSVEPATPEAS

SEQ ID NO: 489800 - protein, 410 aa, unidentified
MYGKAGPMIYAGIDITKNDHVVGATDEHGRDASKPMKFANSAGGFDRCVAYLEGLAESKSDLLVGMEATGHYWLPLFCRLQDAGYAVVVINPMRTDAMRRFKGSSRVKTDMIDCALIAETLRCGDFEPSRLGDESMMELRQLTRLHQELKESVADLKRQVITALDQVFPEYDSIFSDTFGESSKAFLKRCPTPEECLGIRADSLAGTLAKASHGKLGRKKADEIKSIAKGSCGMRMATSALSFQIKLLIDQIDFIERQAEEVEAKIREGIQEIEPLILTIPGIGHVLGAQIVSEIGDIRRFHSAPAIVKYAGINPSVSQSGKFSSDDNHITKPGSPYLRRALYLAAMGQLKLKTPFYDYYAKKRADGKSHREALIAVSRKLVHVIFAVLSKQQPYDPNVAKSPELASRSE

SEQ ID NO: 489801 - protein, 313 aa, unidentified
MMNDNTGAAGIDIGKTKLDLALSGRAERWQFPNDDEGRAALVVELSKHGIARVGLEASGGYERDIVDALRHADFDVILFQPRQVHAYAVYRQQRAKTDAIDAGLIAACAAEHGPGRDAPDPRIAALSEPLRLLGQIESDIVQLKTRREAYRDETIRAHIDEEIRRLKLWRSQLKRSLLAALKAHDDLKHRLDLVLSVPGIGPRTALILIIHMPELGTLSREQAASLAGLAPFNDDSASRRGQRHIAGGRSDVRTALYAAALPAAFRWNKALVSLYARLTAKGKAHKQALVACARKLLIFVNTVLQRQSPWIPA

SEQ ID NO: 489802 - protein, 394 aa, unidentified
MEQPTPFAALIGLDWSDRKHDLCLIDATTGRRELFVIAHTPEALDDWARALRARFNGAKVALCLEQSRGSLIYALLKYDFLVLYPINPQMLSRFREAFTPSRAKDDPSDAEYLVELLVHHRERLKAWTPDDERTRTLQLLVEHRRRLVGDQTRISNRLTALLKGYFPHVLQWFPDIRTKMVCDFLLRWSSLDALKCVRPTTLEKFFREHHSQRKETIEKRLTAIKAAVGLTTDRAVINSSVVMVKALAAQMKTTLEVVHEFDRQIEELCQAHEDFELFIALPGAGKVYASRLLVALGSNRERWASEDELLCFSGVAPVIERSGKSSWTRWRYFCPKFIRQAFVEYAGESIRHSEWAKAFYVSQTAKGKSHQAAVRALAYKWIRIIWKCWQTREI

SEQ ID NO: 489803 - protein, 343 aa, unidentified
MFYAGIDTLKQSITVCVVNEARKIEKRKRLMCANEAAIVAFFKEVIQELGPFRAVVEATASYEWLIKLIEPLADKVILAHPGKLRVIAESTRKSDRLDAQVLAEFLSRDMVPASYRPTPRQRDHRGLVRQRSSIQRRITSVKNRMRRIMSNYNADRPDLFRKAGQEYVSSYPLSAADRICMNQLTSEWLFFLQQLKSANQALVDFAGTAPIREQHQRELLQSIPGVGFVITEVVLSEIADIDRFDSQKQVVAYAGLAPGQRESAGKMKELHIEKAGSRYLRWALVEAAWQLVYRVSRWKTIYERLKKRLKAKKAIVAIARRLLGMMVAIMKSGEPFTATHQPA

SEQ ID NO: 489804 - protein, 331 aa, unidentified
MTSLPDSTSAPVTIGIDVAKATLDIAIGLKSPPLSLTNDSKGFDALLTHLATHQVTLVVMEATGGLETAAAAVLQTAGYAVAIINPRQARDFARAMGQLAKTDRIDARILAQLGEVIERSPERDRFVKPLPSAEQQALAALVTRRRQLVAMQGAEGNRLAQGAPAATRKSIDTIIEALTTELERIDSDIAGHVQAHFADLSSLLDSAKGVGKTTISTLIAEVPELGQLTRREISALIGVAPINRDSGRMRGKRTIFGGRGSVRRVLYMAALVAVRFNPVIKVFYERLVAAGKPKKVALVACMRKLLTILNAMVKTGKPWDAVLHQSDSKNA

SEQ ID NO: 489805 - protein, 344 aa, unidentified
MMNIQLKTNDVQVNSIHQAGIDVGAEELVMVIRKNGKLFNPQTFTNTRADRARLVMKLVKLPGVIVCMEATGVYHFDLAVALHDAGVLVMVINPKSSHNFAKVLMKNSKTDAVDANTLAEYAARMDFVAWTRPSDETIAVRCFSRRITALTTQKAAAKNHLHALTATQETPKAVLRDAKLAITQLQKRIDRLTTEALLLIGKHPKLERSLTLLISIKGIAETSAISLMGELLLLPPDLTHREWVKFAGLDPKAFDSGKSVHKKSRISKAGNRNIRAALYMPALSAKQHDPHVRAYFQHLVANGKKPLQAVCAIMRKLIHAIHGMLKNDEPFDNTRFYKIPVSAV

SEQ ID NO: 489806 - protein, 291 aa, unidentified
MSKVRFVGLDVHADTIVVAVAEAGGEVRSLGVIPNRLESIRKMIGKLAPLETLKCCYEAGPTGYVLYWQLTQLGVACEVIAPSLIPTKAGDRVKTDRRDAEKLARCYRAGELTPVWVPDANHEALRDLVRAREAAKKDQLRHRHRLGKFLLRHGKRPSDAGKAWTQKYLNWIRIHVHFEQPALEATLKHYREEVDHIAERIAKLEQAIDEAVKQASPEMRAVIEALQALRGVAQTTAATVVAELGSLSRFASPSLLMGYSGLVSSEYTTGNRVRRGAITKSGNAHLRRFFF

SEQ ID NO: 489807 - protein, 345 aa, unidentified
MEPMYYIGLDVHKRKISYCVKDGSGKIYAEGSLSATRLDLDVWMKTLPHPWSVAMEATMFTGWIYDHLKPHAAALKVAHPLMLRAIAAAKKKNDRIDANKICDCLRCDFLPECYMAPTAIRERRRTLRYRNLLVRQMVQMKIKISSLLMEAGVSYNKQRLHKAGYFRELLATNPDIDAGLGSLLRLCRETVVRLQKTESALVRSLERDALLMDRVERLMTIPAVGPITALTWALEVGDVQRFCSIKKAISYCGLCGAERSSGNTVQRTPLSKQRNKHLQTTLIEAAKMAPRNSPELSMLYDKEKRKGNANRATLAVARKLVAYLVAVDRRQKEFLSVERENRTAA

SEQ ID NO: 489808 - protein, 340 aa, unidentified
MEKRFIGIDLHRNRFTCCIRLENERTYVTEWELKDLGKFVKKLRANDEIAVEITGNTRLFFDAVVPHVARVVVVNTSQFKVIRQSVKKTDPHDARALALYLSKNMLPEVRMKDKEHGQLASLTQTRDTLVKLRTALKNKINNILSARGLNLAKEALSSEKKLNEVVELPFDEIVRIELRVIVEQIRSLNKSIAELEKTIGEEGSKLEGHKGLSSIKGIGKITGAILLSVIGDVNDFADEGRLASYFGIVPRVSNSNETEHSGRIHKRGTKLGRTALVQSALIAANYSSYLKRFYERVKARRGAGKAIIALARKFLGIIYRTLKNKWVFEDFPNFVLAEAS

SEQ ID NO: 489809 - protein, 319 aa, unidentified
MLVGIDVAKAELVIAMRPNGERWSVTNDERGVATLVERLRALAPQVIVLEATGGYELLAVAALAAAALPVVVVNPRQVRDFARATGQLAKTDRIDADVLALFADRVRPAVRPIADAEAQELDALLTRRRQLLEMLGAERNRLGQVFGKGKRPVKKSLKAHISYLERELHLADTDLGDMVRESPAWRERDDLLQSVPGVGRVVSFTLLAELPELGRLSRRAIAKLVGVAPLSRDSGTLRGRRFVHGGRASVRAVLYMGALVATQRNTRIRAFYQRLLRAGKPKKLALVACMRKLLTILNTMVRTRCPWCPELTAGTPMPA

SEQ ID NO: 489810 - protein, 335 aa, unidentified
MLDPQGEILEEDTIASTGQAFRKLFGERAAARVVIEVGTHSPWVQRLLQELGHETITANPRYVRLIYSSRNKNDQLDAERLARLARVDTKLLHPIEHRGGTAQADRALLRSRNALVECRTKLVNHARGMVKSIGGRLPTCSTSSFHKRVRQDLPDELKPALTPVLDTIAALTKKIQCLETRIERLASKRYPETGLLRQVSGVGPLTSLSFVLTLEDPERFKSSRAVGPYLGLRPRQSQSGDQDPELRITKAGDTDLRRLLVGSAHYILGPFGPDTDLRRWGLALAARGKKNAKKRAVVAVARKLAVLLHRLWVTAEVYEPLRSQRSAITAQAASA

SEQ ID NO: 489811 - protein, 424 aa, unidentified
MFSRVNIACGLDVHYSKIVGSIVTSDGTSETRTFTTYIDDTLKLRDWILTHKCERVAMEATGIYWYPIYDLLEEHVTVQVANPLFIKGIPGRKTDQIDADWIGMLCLNGLIKPSIVPTREVRNIRDLVRTLTSFTHERTRHKNRIHKILVRAGIRIGAHLSNQYGPSGLKILYGLLDGKSIDTILLDLKNAKIAKKRDELVRSICGTLDENDVYLIRLELDSIEFINQQIDNLKQRLTYLMTPMNEDINILTTIPGIGQYSAMKILAEIGNISLFPSGKHLVSWAGIAPGMNESAGKKIPGHITKRGSKYLRTFLIEPAHAIAVMKTDNQLKRYFGRMVGRLGYKPAIIALARKLLMIIYHLLTNHEPYFEENFSKKKPITLPVASPPSMTVDQTLNVMSKAFANMSEVERAEFVRKLNRIRTH

SEQ ID NO: 489812 - protein, 326 aa, unidentified
MTVLSPSDNTFIGIDVGGASFEAAWHRGGCTQYANRPDAIAAFVERLCAGPPVTRIVMEPTGGHEKPLVRALRRAGFRVELVHTSRFKAYRDLVGARAKSDTSDAKLLASYAAAPDEVRGRKARHVELPDDEQREELAELASRRDQLKQMIHAESCRLTTVRNADVRREIELHLGALQASARNTAAAMARLVRARADLSNAKKLLRSIKAIGDTSALTLLALLPELGRIDNKAAAALVGVAPFVRKSGTMDAPARIAGGRAAVRNVIYMAAVTASRHNPVLKPFYDRLIAAGKPIKVALVAVMRRLVVFANAVLKSGQPWKGACSA

SEQ ID NO: 489813 - protein, 334 aa, unidentified
MNYSNFIGIDISKKTFDLALIKGNYTEKMVTAKFPNDHKGIVALEQFIRKQELVKSETLFCIEHTGLYCRVLSSYLVENQYAVWLEMPVQILRSLGIQRGKNDQLDAKRIAVYAFTFKDKARLWQPPREEVQKIHDLLTLRERLVESRKSILTPIEELEATGLSEVATSLKKHCKKSLDALEKEIEQIEKELDKIIDKDTNLKNKYRLAKSVPGIGKITALSLLYYTNEFTLFPSAKKLACYCGVAPFARESGTSVKGKSRVSNFANKAMKKLLHMASMAAISSDQELKSYYNRKVAEGKNKMLVLNAIRNKILHRLCAVIRRETPFYTNFQIA

SEQ ID NO: 489814 - protein, 434 aa, unidentified
MDILSKIYPNSAGIDIGSEKVYVSVEGQSVRNFRTFTASYKELSAYLKECSITHVAMEATGVYWITLYDILEADGFDVTLVNPSDSKNLPGRKTDVQDCQWIQQLFSYGLLRKSFVPEDIVRKLRVYTRMREDKLQMASTHVQHMQKAMILMNIRLPAVLSQTHGASGLAMIEAILAGERNPEKLLGYCTTSLIKNKGKDILLALEGNYKEEYIFELQQAYDGYMFYLNQVSKCDTETGKILEEYNSSSNKNYTDNHPIKPIRHNKPKINHLHDLLLGIHGANPTTLPGLTDYSLMRLTAELGNNINQWPSVKNFVSWLGLAPGKHQSGKMNKRSKKKPATRAGQIFKQAAQSLILSKQPGLGAFARRLKARKGSGIAIKATARKLAELYYRIFDKGMMYVETGIAKYEEKIKQQQIMFLHKKANELKMQLTEI

SEQ ID NO: 489815 - protein, 315 aa, unidentified
MTEEGTYVGIDVAKTNIDIAVRPAGRVWQTSYDGAGIDELVSQLTSLTPTTVLLEATGGLEVPLAAALAAAALPVVVVNPRQVRDFAKATGQLAKTDALDAQVLAHFAEAVRPPVRPLRDADTQELNAMTTRRSQLMTMLVAEKNRLGRAAGAVRPRVQAHITWLEQEIKDLDKDLRQTLRQSHVWREKDDLLRSVPGVGEQLSLSLLAYLPELGTLDRKQIAALVGVAPLNRDSGTMRGKRTVRGGRARVRAVLYMGTLAASRFNPVIRTFYQRLLAAGKPKNLALTACMRKLLTMLNAILKTGQYWNPCISTD

SEQ ID NO: 489816 - protein, 366 aa, unidentified
MNPIYIGVDFHSRQQTICYLKTETGELVIKELLHKDKEQVRAFYQQFQGHVIIGIEASGYSPWFEAMLEQLGCEVWLGDATEIRRRARWRQKSDRRDAELIWDLLLHNEFPRLHQPTPESREVLRMLRYRQKLIKVRTMLKNSLQAIAMQAGLAKGKQLFTAAGQQELCKAEMSTVLQWQRDHWLELMKPLNQQLLETMVWFKQQSKDDVQIKRLRTHPGIGLLTSLCLLHTLQPVSRFRNQRKVVAYAGFDPMIRSSAERAIYLGISKAGSRMLRYLLVEAVHTAVRYDEDLKRFYKRVAERRGRAKAKVATARKLLIRAYIMLRDEIDYAEFRRRAVAVRLARRGQGPVPVPEVLIGQSASPGV

SEQ ID NO: 489817 - protein, 368 aa, unidentified
MFEHTFIGLDVHAVNVVGHALNPDTGEITRHTMAADPALVLAWVRRFEPPVKVVYESGPTGFVLARHLRAAGINCVVAASSKLLRAPGDRVKTDRRDARVLAEMLAVGSVTEVRIPDPDEEALRDLSRLRSGTAKDLAHARQHVNAILLRHGIRYAQESRWTREHSRWLHRQHFDQPALQFTYQADVEQAELLAAHLARIDKQVTATAAGCRYGPVIDALMCLRGIQLTTAFGLAVEIGDWTRFTGSSIGSYLGLVPSENSSGQSRHQGPITKAGNTYARKLLIEAAWQHRRPYARPGERLLRQFELVAPATRIRALEGNHRLHRKWEHFDERHKIPVKANTAIARELAGWCWSLAAPLQQGERMNAA

SEQ ID NO: 489818 - protein, 384 aa, unidentified
MRYIEQTEAARDGAVVFVALELGKPAWLLAAQGSPSGKTSLHRLDRGDVAGLLALLRRLQAREQRASGNQVQVVLGYEAGYDGFWLQRRLSVEGITCCVMDPGSLQVDRRARRAKTDRLDAAMLLRALMAWWRGDRAACHMVQVPSVEREDARRTHRERQRLIAERVQHVNRIKGLLATQGVYDYRPLRRDRWKRLEELRTGDGRELPPCLRREIEREFKRLELVLEQIAASETERDATIEAPAAEDVDAAKVAQLSKLGGIGPELATVLVREALYRSFTNRKEVAAYAGLTPSPYASGDRHRDQGISKAGNPLLRKAMVELAWLWLRYQPDSALARWFTERVGAVRGRMRKITAVALARKLLVALWRYLTTGLLPDGVRLKAA

SEQ ID NO: 489819 - protein, 382 aa, unidentified
MQTIAPVNPTILLAIELSTSTWLVAARLPGLDKPRLSRIDGGDTAALLALISSLRARAACGLDTTMGVVCCFEAGRDGFWLHRLLTAHGVVSYVLEPTSILVNRRARRAKTDRLDAEGMLRVLAAYLRGDHQACSMVRVPTPDQEDAKRTHREREHLVQERLRIENRIEALLFTQGIRKRPSLRSWERDLTVLRTGDGRKIPRHLRAELDRLRRRLVLTLELIREVEVERDQVTKTKPQDQAHHKMTALCRIRGIGENFAAVLTREVFYRSFDNRRQIASYVGITPMPYQSGGMDRDRRIGRAGNPRARTTMIQLAWLWLRYQPDSELAEWFRERVGTLAGRTRRIAIVAMARKLLIALWRYIETGVIPTGAEIRAETTVAA

SEQ ID NO: 489820 - protein, 368 aa, unidentified
MKECYCGLDLHSNNTFIGISDEDGRRVFQRRSPNDISGILEYLKPFKESISGVVVESTFNWYWLVDGLIEAGYKVHLAHPPAIVQYMGLKNQDDKHSAFHLAKLLNLGILPEGYIFPKEERHLRDFLRKRLMMVQNSTKYILNFKSLMNRNFSVSISSNEIKKLKPDQLKEAFFKDYHLLLSARSSISAINYFHDEIKSIEKEILKEATLKDEFQILLTAPGIGKILALTIALETGNINRFSKVGNYASYCRSVSSIRSSNSKKKGTGNKKNGNKYLSWAYLEGAHKLRRYCLEAKAFYEKKKIKTNNVVAIKALAHKLSRACYYMMKDNIAFDVEKIFGKPIKVGGGSKSTGGLAKKPNAPIDNTAA

SEQ ID NO: 489821 - protein, 409 aa, unidentified
MRVIYRTCAGMDVHKRTVTVCLVWWDAAGQRHQEVRTFRTMTKDLLELREWLRAKGCRIVAIESTGAYWQPVFNLLEDTFEVLLVNPSHIKQVPGRKTDVKDCEWIAELLEHGLLKGSFIPPRAIRDLRDLTRQRGRLMQIRASAVNRVHKVLEGANIKLASVASDVMGVSGQAILKALLEGERNAQRLAELSRGRLRKKKADLVAALEGRFRAHHAKLLARLLAHIEFLDESIAECDAQVEALCRPYALDLERLDGIPGVDRRSAQDLIGEIGVDMRPFPSHKHLCSWAHVSPGNNESAGKRKSGRTGKGNRWLRALLIECAHAAGRSRDTYLGEQYRRAARRRGKKHAAMVVAHSQLEAAYFILRDKVPYHELGAQHFDQINQAQVIRYHVRRLESLGLSVQVTAAA

SEQ ID NO: 489822 - protein, 451 aa, unidentified
MTRDVQEIDADGEAELVERVAAIDVAKASGMVCTRVPHASVAGRRVTRVWEVRSTTNAILALADELVDQGIERVVVESTSDYWRPFVYLLEARGLSVWLVNAREVKQVPGRPKTDKLDAVWLAKLNERGMLRPSFVPPAEIRRLRDYTRLRFDLVGERSRHVQRLEKLLEDALIKLSTVATDIMGVSGRAMIDALIAGERDPHVLAELARGRMRVKRAALAEALTGRFDEHHAELAQMLLDQIDALSAKVEALTFRIDQLIAEIPAAQAPVDTGPGGQRGDPHSYPLAVVARLDEIAGIGVRAAQVIVAEVGLDMTQFPTPGHLISWAKLCPRTIQSGPRSRSGKTGKGNPYLKGVLGEAATAAAKTDTFLGERYRRLVRRRGKLKALVAVARSILVIVWHLLADPAARYQDLGADFYTNRVNKNRKTRQLVHQLQALGHHVTLQPIAVAA

SEQ ID NO: 489823 - protein, 463 aa, unidentified
MHLLLGSGRILVLVQGATEEDVVSHGRALSRGDRRRNERLARLRSVVRRDFAVVAVDLASAKQAAVVTDHDSMVLGRRMFTGNTWVIDDILDWAEPIAAKAGYAGVVVGCEPTGHRWKPLLDRSRARGLELVCVNPMLVHRGREEEDFTRDRSDFKDATIIAKRVAELRCYVPYVMEGHWCRLRHLGARRADQLVAAGSARQRLRDLLECAWPAVLSAAADPLDALTWRAAMAVSTDPGRIVAMGFGAFADAVREQLPRWGGTRRNLRILRAIFDAAHAPGGVETERAAACERAAYALEDWHYALDQVTDVEHRMVEVLDALDLYELVTTIAGLSVVGAAAILAETGDPARFDCARTWAKHAGLCPRANESGNFHGSTNVSRRGRPGLRLAAWRALWGALRHNPVYAARYTHLTTRADNPLCDGQARAAIAAALLRQLFVVVTRRVAWDPAIAAGTGVVPQAA

SEQ ID NO: 489824 - protein, 327 aa, unidentified
MLNFGIDISRDKLDCAVVDEHGQRVKRARTFTNNAQGVKELIGWALAVAVEQPRRFVMEATGAYHELAATQLHCAGLTVSVVNPAQVRALARGLGMLSKTDLIDAVLLAQYARLAKPRQWHPAKPQIRQFNAMLMRLDCLEADLRREENRREQAVVRSSADSVLSCIDACIDFLRGQCKEMRKAIDKHIATDDSLGQSIARLRTIPAVGEKTAKRMAAILYTNSFVSAKEVTAFLGLVPIKCESGSSLRGRSRLSKAGNPRVRASLYMAAVVAKKLNPDIKALYDRLCTQGKSKMSALGACMRKLVHLCYGVLKSDHNYMPPEAREA

SEQ ID NO: 489825 - protein, 344 aa, unidentified
MSKHTVRGGDVAGLLKRFAQLREKALGRTGKVFPLIVIQEAGLDGFWIDRVLQNEGIESHVVDPASVATSRRRRRAKTDGIDGEALVRALLAYKRGEPRVCSMVRLPTPEDEDRRRLCRERKVLTMERVQHVNRIKGLLFSQGVSGYEPLRRDRRERLDALQTGDGRPLPPHLKAQVRRELDRLELLLAQIKAVEAERDVLLAAEQTKAPVAPAMLLGVKGIGPEFAAVLWSEGLSRPFENRRQVAAYAGLAPTPWQSGSVDREQGISQSGNPRLRTTMIQLAWLWLRHQPDSALALWFHDRVKRNGGRLRKTTIVALARKLLVALWKYVTAGVVIEGVVTKTA

SEQ ID NO: 489826 - protein, 352 aa, unidentified
MTASYDYHIGVDYHSHLVVQDSSGKTLRSGRVKNDRQSLGGFLERYRANSHAVVEATRNWMVIYDWLDDICDDVVLAHPLKVKAIADAKIKTDKIDATVLAHLLRADLVPEAWVPSERSQDLRVALRERMFYVRLRTMTKNRIVTVFDRYPEQTAQLKKLGDLFGKAGRTQHGGVNVSEIDRIQIDRGLAFVGDINERIKQSDTTIRAMTKANANVKLLKTIPGIGEFFARLMDAEIDDVSRFRNAKKLAAYAELVPSTCSSGGKTYHGKIIKQGNKWLRWAFVEAVTPAINGNAQLRAQYEHLKIRGTNKARVAIARKLLTMAFQILRDQRAFEPRDTSPTESASTTSRLS

SEQ ID NO: 489827 - protein, 404 aa, unidentified
MFYIGIDWSKDHHDMCIMSESGAVVSQIEYKQSLEGFQRMEGECQKLGVSPRQCIVGIETTYNLMVDFLVERGYMVYIIPPQATKGYRNRKHSSNAHTDASDAALLASIMRTDRNSHRRLMPNSPLTQQILAQVRLIELLRCSIQRQENQLGAVLLRIYPQALGLFDKLGSQISLHFLVAYPTAQKATALSLEEFREFCTAHHYTRPSYIPIRYAHLIDPAPAANKAVIQAYQGHVSTLAEVLLPQVERRKKAQIRLTKLFDQHPDAFIFDSLPGAGKLLAPALLAKFGDQRDRFPNRADVQALAGTCPSTERSGRRKTVRFRRGCDKEFRRITQQYARSSIRESGWANAYCREIRSHHPSNSHAYRCLANRWLAIIWKIWQTRQAYDEGYHLRQRAARRRPRS

SEQ ID NO: 489828 - protein, 380 aa, unidentified
MPEAVIGLDVGKLSHWACVATRDGEILLSAPVANREGDLDSLFGRFPDALVVVDRSRNIGALALARAKAAGMSAAYLPGLAAHGAARLFAGDAKTDERDAMVIAKTALGIPDALLPVGDPGPTVAAARALAAQRNFLTCENTRSKNRLRSILLESCPAFEALVDLSDGPQLRLMASLGGAWSVADAGPRRAAALTRGAARGKIEALVRSTASSTRPDAAAIAAEDRAVRLLARRISENSAEIDVITAEISALLEGDDTYRCLLTVPGIGPKTASELAISIDIEDFPSHDRLASYCGLAPRNRQSGTSISSVTASRQGNKRLKNLLIFSCNCLTRTEGRWGDYYARCRERGMPHGKALKALARKRLKVIYAIMRDRVPYAA

SEQ ID NO: 489829 - protein, 368 aa, unidentified
MNDSHSIAWLGLDAHSKNCVLGQLDDQGHEIKWWSFPTQPQQLIQHIQAIPATDKRLMLEESNLARWIGQLLKPHLQQLIVCDARRNRLISHDHHKHDKRDAFALARLLRLNEFKPVWQPIEPQRVLFKRIAKSYENAVQRQTRLKLQLKSLFQHWGLFPAGATVFSKPGRNDWLKQLPYDPLRSQALLLYELLDQALAGQNQFRRLLCQTGQQFPEIQRLRTTPGVGLVGAHLFVAYVQDPKRFPKFGRLTRYCRLGIRDRTSDDKPLGYQQLDREGIGTLKAISYRAYLQAAKRRTGPVWDFYQLSLRHTGSTTHARLNTQRKILLTLWTLWLTGREFDPDQFFRSQPLDGQVPRPVGRGEVTGTR

SEQ ID NO: 489830 - protein, 410 aa, unidentified
MAERFVGIDVALREHRIAVLDRDGEAVGPSFTIAASPDGVTTLLRTLAARGATTAQTLIGLEASGHLWENLEAALGGAGYRVLVLNPLQTRRYRDVVRRKAKTDDIDAHVIAGLLRSGAAQASYVPDEQIQSLRELARLRARLLADRQDYQRQLIAQLDVVLPEHRVVLGDLLTARARGILAQFPTAQHLAHASPRAIRRAAEDAGARGFSLDDATGVRDHARRSLYSGKAAVARAHVVRTLVSQLERLTSAMDEVDHAATTLLPPSEPGTSPSDAELLQTIPGIGPQTAATLLGEFGALTRFTDARALVAYVGFYPVISESGDRAAPPRLSRVGPRIARHSLYLAAVNAVRHSREWRTIYLRKKAQGKTAKQALVVVAVKLLHAVYAMLKHREPYNPSRLLVPPATIGT

SEQ ID NO: 489831 - protein, 385 aa, unidentified
MRSVGLDLGVRHIAYCEVASGAVMRRGSVRRLSELATVVGPETEPARVAFEASREAWHVHDTVHGWGHEPLIVDTTRVKQLGVGQHGRKRDAIDAEMLALALDGGRLPLAHVLSPERRALRARLSVRSELVDMRARQVTVVRGLARAKGVLIASSTTSAFLAHLEKAALDEQTRALIAPLVATLRTAEMQIAVVDQELATLAKADPTICLCATAPGVALVVAATFVSTIDDAKRFRDAHSVASYLGLVPGEKTTGGTKQRLGAITKHGNAQARCMLVQAAWHILRAGSKDDPLHRWGTNIATKRGKKVASVAVARRLAGVLWAMWRDGTVYDAALVGRASATGLRRASQDLGVIADAMSRAVKKIQNRERRAHAIRTKTSGAAMT

SEQ ID NO: 489832 - protein, 422 aa, unidentified
MLQETQDREEIIERVAALDIGKAEVVCCARVPHEGRAGRRLQEVETYSTMTRSLLGMADRLASLGVTRVVMEATSDYWKPIFYVLEARGFDTWLVNARDVKHLPGRPKTDKLDAVWLCKVAERQMIRPSFVPPPPIRQLRDVTRYRIDLVGVRGAEKNRVEKLLEDAQIKVSVVASDIFGVSGRAMMAALIAGERNPKVLAQLARSRMRTKISALEEAFTGHFTDHHAFLLAKMLARVDAIDADIGELDAKIGELIAPFAAAAERLDEIPGIGPVAAAVIIAEIGTDMSRFPTAAHLASWAKFTPGVKESAGKKKGSGSTGHGNRYLARILGEAAVGASKTDSFLGERYRRIARRRGKKKAIVAVGRSTLIIVWHVLSGPDVRYADLGAGFYGQRIDPERRKRAHIHQLEALGYKVTLEPAA

SEQ ID NO: 489833 - protein, 401 aa, unidentified
MKMLTGGIDIGSESHHVIIMDGTGEVLYDRKVAHKFSKFHEAIREFRGIEEKQRGEITFAIEGKNGYGAPFDRILMENGFKLYNVDNLKLRRFRDVFGAEWRNDRRDAKMLAKMLRLKDHMDAEEEKAFIAIEKTLAVHEKLRILSRHQQSLIDEKVRIQNRLRKRLLEVCPDILEYGDTNSKKLLQLLKKYPDFSRYKKITLGALLKIETIGKKTAVSILEGLRNIQYMEELTGIYKAIISSCCRRILELKEEIAMLDRELQETGEKSSEVMKLKSMMGVGIKLSSRLAGEIGDIRRFNRESQLAVYCGVACIDDDSGKSKKTKAVYKANRICKATMIEIAGCTIRYVQESKAYYDKKRAEGKDHNHALRCLARQLIKVIFKMLTENREYIYKEALKKAA

SEQ ID NO: 489834 - protein, 354 aa, unidentified
MIIIGADYHPAFQQIAFVDTETGELQERRLDHPEAAEKFYRELAAEGKKVRVGMEASGHARWFERLLSELQLELWIGDAAEIHRKRERKQKTDRQDAQHILRLLLKDDFPRIWVPSWENRDLRQLLWHRHRMVQARTRMMNQLQAVALNEGLRCKKKLWREAGRKQLEAFRLAPWASRRRQDLLELLDRLNPTIAELTQAMEREVEKCPEAQRLMTHPGVGPLTALAFVLIIGGADRFQCGKQIASYLGLVPLEDSSGNRRRLGHITKQGNSLLRFLLVEAAQVTVRSLPEWRSKYVHLTMRRGRKIAKVAMARKLAVRLYWMMRKGRDYEQFRKFGSHAGQPGHRHGVKSNIE

SEQ ID NO: 489835 - protein, 411 aa, unidentified
MEEIYRRCAGLDVHKESVEACVRRIDENGRWQQQTRHWGTMTRDLLAMADWMASQGVTHVAMESTGVYWKPIYNILESRFRVLLVNARHLKQVPGRKSDVRDCHWIAQLLQHGLLKGSFIPPRPQRELRDLTRLRVQLVEEKTRIVNRLHKELEDANIKLASVATEILGASGRAMLEALIEGRKNPTQLADLAQRQLRGKIPELEKALEGHLTDHHRFMLRLLWQHLAQQEELIAELDAKIEEQTRPWAGEIERLDAVPGVDRCVAAVVLAEVGAQMTPFPSHQDLASWAGMCPGNEESAGKRRRRRITPGNRWLKRTLVQAAWGASHSKNTYLASQYRRLVGRRGKKRALIAVGHSLLVIFYHMLKNGTTYADLGGDFFDRLEPERLTRYYVKRLESLGHKVTLQSRVAA

SEQ ID NO: 489836 - protein, 386 aa, unidentified
MQASTVATPTAGHIGTIFVAIELSQRSWRVALHSPDKDKISHHKLEGGDHAELLALVGRVRERAARTLGGVPAVASCYEAGYDGFWLHRLLLAAGITNYVFDPASIAVDQRARRVKTDRIDGERMLRTLMAYLRGEPRVVRIVRVPAAEQEDARRGSRERDRLIKEQTAHTNRIKALLRLRGMAVGNPRRRDWLSWLATQRDWQGQAVPPRMLSEIRSEHARLMLVRDRLDALAQEAAAAEPSPAEAEMSRRSELLRRLKCLGPAFATTLTSEVFYKDFRNRREVGSYFGLTPSPWRSGGIDRDQGISKAGNPRARCAAIELAWLWLRHQPDSKLTLEYRKRTLDAGKRIKRVAIVALARKLMVALWRYLTTGLVPEGAALKAVKI

SEQ ID NO: 489837 - protein, 408 aa, unidentified
MRVIGLDVHRSMAVVAILENGNLNSGGRIDLTRDAVIAFGRKLRSDDEVVIEATVNTATIVRLLRPFVGRVVIANPLQVRAIAHAKIKTDKIDAAVLAKLHASGFLPEVWMPDEATETLRRLVAQRTQIVQQMTRVKNRIHSVLHANLIPPFAGELFSIAGRRWLEAQPLAQDEKLAVRRHLADLDHRAADLAALEQALAKRALQDERVERLMTISGVHVTVALGLLAAIGDIRRFASPENLVSYLGLNPSVHQSGNGTAHHGRITKQGRRHARAMLVEAAWAARRAPGPLRAFFVRIQNRRGKQVAAVATARKLAVLAWHLLSKAENYAWARPALLQAKLRQVELLAGQPAAKGRKPGRAHAYNSRAVRDRERAWLEQTEQAYTRFVVNWQTKPTRRTGAANGTRSS

SEQ ID NO: 489838 - protein, 343 aa, unidentified
MKYIGLDLHKKSIFATVLDGDGKILSKANIGSKREDISCYLKRQGSGNDLSIAIEASYNWLYYFRILESLTDNITVAHPLKTRIIGEAKIKTDKIDSKVLAYMLRADMLPRVYIPTRISMENKLLLRSRISLVRVRTQIKNKIHAIIDRNKDSYSGLENLSDIFGKTGTGILKDTDIPQPDYMILANYLDLIKDINKKIAELEAEIDRRIIPDKDIELLKTIPGVGKFTAFIIKSEIDDIDRFISKEKFASYAGLIPSVHQSGTKSYTGKITKQGNKFIRWALAEAAHSAIRYSAYFRYHYNKVKARRGANSAIIAVARRIAEIVYVLLKEKRGYIEKQVIYS

SEQ ID NO: 489839 - protein, 361 aa, unidentified
MKKKLEVTLQTALPSEPAVMGGADRGPIRLESPAITAADCTRTDAPPVAECWVGIDVAKAHLDVAIWPTRERLRVTRDEAGMAELIAGLRPRAVALIVLEATGGLETRVAGMLIEAQFPTAVINPRQARDFAKALGVLAKTDALDAGVLARFGQSIQPQPRPWKDEETQALTALLQRRRQLIAMLTAEKNRLASAHRQVQADIRTTITWLEQRLRALDDDLHGRLRASPVWREQDDLLQSVPGIGAVTAMTLLAALPELGTLDRRQISALVGVCPFNRDSGQGRGHRSIFGGRAVVRTALYMATLTASRFNPVINAFYQRLRAAGKPAKVALTACMRKLLTLLNAMLKAKTLWQPPEECRA

SEQ ID NO: 489840 - protein, 415 aa, unidentified
MEQIFMIKENYIYVGIDLHKETHTAVMIDCYNQKLGEITFPNRPAAFPKLVTKVKKCNTDGKEVVYGLENAYGYGRALAVWLIDKGYLVKDVNTAISHRQAKHRGAMYRKSDSDDAKAIALATLNMLDKLPDACPNDAYWSLGQLVHRRDNIMKQRTRLVNQLHEQLCIAYPSYKQFFNDISRPTALYFWEHYPSRKYLKGKSVEDLRAELVPVSHNKCSTKTCEKILDAVASDKVKNNNFQDARDMVTLSIVSDIQHYDKQLVEVDKMLEQMYKMLGCTLTTIPGVNVITAVKILAEIGDIKRFSNANKLAQFAGIAPLHLSSSGKGKDVATKQGNRRLQATIYFLAIQMVQVSSNGTPRNSVVRAYYEKRKAEGKTSQQALICISRRLISIIYGMLKHGTEYRMPVVESAGEK

SEQ ID NO: 489841 - protein, 343 aa, unidentified
MEYFAGIDVSLEQSSVCVVDGAGKIVREAKVASEPEALVGFFRGLETGVTRIGLEAGPLSQWLYAGLVAAGFEVVLLETRHVKAALSAMVIKTDRKDARGIAQLLRMGWFRPVHAKSPAAQEVRALLVARKLLQTKLLDVEFSIRGILRGFGLKMGEVSKGRFATRVRELAAGHAMLERITGPMLRAREALRTEYAKLHGEMLAIVKPDPVCRRLMTVPGVGALVAITFKSAVDNPGRFARSRVLGAHFGLTPRKYQSGETDVTGAISRVGDAMVRMALYEAAHIMLSRVTRFSSLKRWALDVARRRGLKRAKVALARKLATVLHRMWVDGTSFRWGKPAASV

SEQ ID NO: 489842 - protein, 420 aa, unidentified
MKSASNTPTDTTLPQEPPGGVTAGLDWARDDHAVSVVDDRGRELDRATVPHSAPGLRELIAFLRRHGVGEVAIERPDGPVVDALLLAGLAVVVISPNQVKNLRGRYGSAGNKDDRFDAYVLADTLRTDRARLRALIPDTDATVALRRACRARKDLVNHRVAVANQLRAHLRNVLPAAVGLFKDIDSAISLAFLTRFDTQDKIDWLTPKRLGDWLAKQGYSGKVDPAVLHHRILDAAPGATGSHGSTQAHITASYVALLGTLVAQIKALSTQIEAQLDTHADAHIFTSLPRAGRVRAARLLAEIGDCRARFPTPESLTCLAGAAPSTRQSGKSRIVGFRWACDKQLRDAVTDFAADTRLVNPWAADLYDRARTRGHDHPHAVRILARAWLHIIWHCWQDNLAYAPDKHRALQRILTQNEAA

SEQ ID NO: 489843 - protein, 322 aa, unidentified
MSDVNMVVAGIDIGKARLDVALHGVASRVVFDNSAAGHRQLIQWLRAAQVVRVGLESTGSYSQEVTGALREAGFEVAVLQPLQVRAFAQYRLQRAKSDPLDAALIAACTALLDRVHGAPDARLAPLAEHLRLIEQLEEDVVRAKTRLEAAHLAHVRRALRREVERLERREAAERVLLMKSIAAEPDLLARLQLIQSVDGIGERTALSLLLLLPELGHLEREPIAALAGLAPFVRTSGKWRGQSRIGGGRDRVRRALYAASLAAAFRWNPAIKNLYQRLKAAGKEHRKIMVACARKLLIQVNAVVARGTPWISARSAVMIVHS

SEQ ID NO: 489844 - protein, 405 aa, unidentified
MNAVGIDVSKGKSMVTILRPFGEIVSRPHEVRHSSTQINALIREIQSLDGDTRIVMEYTGRYHEPIARWLSDAGLFVSAVNPKLIKDFDNASLRKVKTDKADSVKIARYALDKWHDLKQYGLMDELRNQLKTMNRQFGYFTKVKTAMKNNLISLLDQTFPGANTFFDSPARSDGSQKWVDFVDTYWHVDRIRCMSLSAFTEHYQKWCRRKGYAFQPDKPEEIYEAVRDIIAVLPKDEVTKFLVRQAVTQVNTVSAAVEELRARMNETASQLPEYPVVLAMKGVGTSLGPQLIAEIGDVTRFAHKGALTAFAGVDPGKNESGSYAQKSVRTSKRGSASLRKTLFQVMDVLIKTMPQDDPVYAFMDKKRSQGKPYYVYMTAGANKFLRVYYGRVKEYLLEHTESSEN

SEQ ID NO: 489845 - protein, 326 aa, unidentified
MQGKETSEQETKVQSNVGIDISKCWLDAHVLPGDDRLHVANTCAGIRQLKRWLSHYRIALVAIEATGKWHRHLHRSLVASAIPVAIVDPYRVRMFAKAQGILAKTDQLDARVLALFAAIMAPPVRPVAPQAMAELAELVVARASAVEAQATLKNQFGTAESTFLKRQLDRRISRAGKDIAALDREILKRIKADGSLARRYAVLTSIPSFGFAVAATLIACLAEIGSATAKQIGMLAGLAPIADQSGDREGTRVIWGGRPAVRRVLYLAALSASRFNADMKAFYNRLIDNGKPAKVALIAVARKLVVLANTLVSEDRTWQPRAPIQA

SEQ ID NO: 489846 - protein, 358 aa, unidentified
MRMVVYVGIDVHKKYCQAALMNDNGKLERELRFDNTTKGAEGLVNLAKSIDPEIKAVLEPSANFWIRIYDKLEDEGVEMKLSNPLRTKAIAEARIKTDRIDAKTLATLLRGDLVAESYVPNRKNRERRAIIRHKASLMHMRVEIKNRIHALLDKHELTHSYSDLFGKEGLEWLRNQQLPTIDHQILQSNIQILETVTVEIDNADIQIAKDAVNENQAKLLMTMPGIDYYAAMILLSEIGDVKRFPTPDKLASWVGLTPQVHQSGETNWTGHITRKGSKRARWILGQCAQSARQHDPRMRNFYERIERKHGSSKAIVAVAHKMVTIMHVMLTRNEPYRGQNIQLTEKKHKRLNNIANSA

SEQ ID NO: 489847 - protein, 370 aa, unidentified
MKKNSTRPQSPRGAAARSKGPITIGLDLGDKTSRYCVVGDNGEVMSEGSVATTRKAVAQKFTGMGRCRIAMEVGTHSPWLSRMLTALGFEVIVANARQVQLISASSRKNDRMDAHLLARLARVDPELLRPIRHRSEQAQADLMTIRIRAALVEARTSLVNAARGFTKAMGERLPACDTDSLGVEKLEALPAALQPRLQPLLEQIEALTAQIKKLESNIEQIARIEYPETRLLTQVSGVGTLIALTFVLTLEDRERFQKSRDVGCYVGLRPRQSQSGQSQPQLRITKEGDRYLRTLLVQAAHLILNRRAPDTDLKRWGLKLAQRGGKNAKKRAIVAVARKLAVLLHRLWVCGEVYEPLRNSRPTPASKQAA

SEQ ID NO: 489848 - protein, 345 aa, unidentified
MEEYDGRQYVGIDLHKRRSVIVRMTPTGERIGPVVRIDSDPFELAAQIASWGEAPEVVLEATYGWYWAADVLAEHGARVHLAHPLGVKGFAYRRVKNDERDAADLADLLRMGRLPEAWVAPPAVRALRETVRHRAKLVALRSGLKAQVHSVLARQGARVEISDLFSPAGRKLISEQRLDPPFHARVLSLLRLIDAYDFEIDAVTKRITAELKPHPGYQAIQTIPGVGPILAAIFVAEIGDITRFRRPEQLCSWAGMTPRHRESDTKVHRGRITKQGNNLVRWAAIEAIQRVHYGPVAAVKARLTVRRGTNIAKVAAARELLTLVFYGLRDGHIRALAKAAQAQAA

SEQ ID NO: 489849 - protein, 446 aa, unidentified
MLPCASSLSPAEPDWAAFAAIDWASRKHAWSLAPVNGGPPESGILDNTPEAVELWAMALHHRFAARPIAISIEQKRGAVIYLLAKYAHFVLYPVPPSMAASYRQAFFPSGAKNDPGDAGLLLEILLHHRQRLRPRHLESPTTRLLQFLVEQRRQFVQQRVQQVQRLTDCLQQYFPQLRLWFDSLDSPLVGALLDRWPELPQLQRAHPGTLHRFFVEHNCRREELIQERIQAIYTAVAAIDDAVVIEACTRKTSTLLHLIRSLQQEIAELEKRIRTLTEEHPDAPIFASFPGAGPATVPRLIAAFGTCRDAYVNASDLQRVSGIAPVAISSGNAKSTRMRRACPKFLRQTFHEFAAQSIPYSAWAKAYYQHHVQQNKSKHHAAVRSLANKWIRILYRCWKDHRLYDESIFLESQRRRGSLLGADLASLAGVQWQSEAGFQKIQKKPS

SEQ ID NO: 489850 - protein, 369 aa, unidentified
MHNKNYISVGIDVGSAFSFMTILAPDETVILKPFKITHNNKDSLERAVSEIKKAEELYSLESRTFLESTGIYHFPLFCYLVDCGFNASIINPIITHSTKNGNIRKVKNDKIDSKGIAKLGLSKDIPVSQFPAKLVLELRSLTRKYYDLTDERSAHINKLKGDLHTVFPQYLDVFCDVTGKTSTMILRQYGTPDKILRGHKKTMIEKISKASRKGLAKASERYEKLCAAANAAKTFGCQIDSIYFNIFLTLDLVEKLDSALDSILNRIRQLITFNKNEKFIQQIKLLNTIPGVGFLTAVTIMCEIGDFSAFRNPKQLFAYFGLDPEVNESGKFVGTQRISLKTLILSSCSIRRRATGLSLQSSSTSPRSR

SEQ ID NO: 489851 - protein, 341 aa, unidentified
MDTIGIDLHKRESQLCTITDDGELIEQRIVTTRERFTAVLGNRPPARILLEASTESEWVARHLESLGHTVIIADPGFAPMYATRSSRVKTDKRDARTLCDALRLGAYRAIHRASDAQRHIRAELAVRDALVRTRTRYIAIVKAFVRREGLRLPSGEAEHTVAKLERLSVPAALTQELAPLVALFEPVNAAIAAADARLMALAKEQLVVARLCTMPTIGPVTAMAFVAALDDVSRFPSAHQVEAYLGLVPSEYSSGDRRFRGRITKRGDVRTRWLLVEAGWRILRSSHPDVAGLKIWAEQVARRRGKRIAAVALARRIAGILFAMWRDGQDYHASVGISNVA

SEQ ID NO: 489852 - protein, 356 aa, unidentified
MLNIYYENEKRQEETMNKSTTIGIDLAKNIFFAVSLSPLGKQLQRKKLRRAQMLPYLANQPPSVVALEACSGAHYWARQIQALGHEVKLLPPQHIKAYLRRQKNDYNDAEAIAEAAQHGRIRPVAPKTVEQVLTQNLHRLRKALVADQTRLINRTRALLMEHGIVIPEGKTRFGSTVAALLEEGENSLPWRLRQLLDRQYQQYRLGEQELAWYTQEVESQAKQDEVCQNLISIPGFGPISSSAFRSWMGNGQQFKRGRDAAAALGLVPKQHSTGGRSILGGITKSGDRYLRALLIHGARAVIKHAHKHNDRLRQWVLGLVERRGYNKATVALANKMARIGWAVVVRSERYQPVPCT

SEQ ID NO: 489853 - protein, 344 aa, unidentified
MQITTKITTIGLDIAKNVFQVHGIDAAEKVVVRKQLRRGQIMKFFAALPPCLIGMEACASAHYWARELTKLGHEVRLMPAKDVKAYVKRNKNDAADAEAICEAVGRPRMRLVRAKSAEQQGRLMQHRARDLLLRQQTQVINALRAHMAELGIVAAQGREGLKQLLKNIADEKDARLPIDARASLIVLAAQLQALHTMIGSIERRIVVQHRANEASKRLECIHGIGVIGASAITATVNDPGAFRSGRDFAAWIGLVPRQDSTGGKQKLGPISKRGDRYLRRILVVGAISVLRRAKLNPEKYPWLTQLLARRPFKVVAIALANKMARIAWALLANGSHYRPRLATT

SEQ ID NO: 489854 - protein, 455 aa, unidentified
MPKTTTGDRPELKPVNVGAAAIDIGSKMHMAAVNPACTDMPVRTFGTFTHDLHDLADWFKECGVTSVAMESTRVYWIPAYEILEQRGFDVILVNARYAKNVPGRKTDVSDAARLRQLHSYGLLRGSFRPDAEIATLRAYLRQRERLVEYAAAHIQHMQKALMEMNLQLHHVVSDITGATGMRIIRAIVAGERNPDVLATYRDVRCHSSTETIRAALVGNDRDEHVFVLSQSLELYDVYQAKMLDCDSKLEVLIAALNGKGAKPDGKLSKPRVKTKQVNTPTFDVRTALYGVLGVDLTEIHGLGPSLALKLVGECGTDLRAWPSAKHFTSWLCLAPGNKISGGKVLSSRTRRSSSRAAALLRLAATTVGRSDTALGAFYRRLSARAGKSKAVTATARKIAVLFYNTLRHGMSYKDPGARQYEQQYRSRVLTNLQRRAKSLGFVLQAIPAAANPAVS

SEQ ID NO: 489855 - protein, 355 aa, unidentified
MNQEKYIGMDVHAATISAAVKNAEGKVLMECVLETKAATILEFIQGLRGTLALTFEEGTLAAWLHDLLKPHVSRLVVCDARKNALMRDGNQNDRADARNLAELLRTNQVHAVYHGKHGIGALKELGRSYLTLTKDSTRVMNRIKSVYRSWAIPCAGTSVYSRRHRAEWLAKLVEPGVRIRAEHLYQQLDSLQPVRQAARRELLRESHKHAPVKLLRQIPSIGPIRSALLVALLQTPHRFRTKRQLWAYGGFAVQTYDSGEYRFVRGKLQRNRERITVRGLNHNHNHDLKNLLKGAAVSAIERPGPLQDFYAALVEKGIRPSMARLTLARKIAAITLIMWKKGVSFDPKQLQRQAA

SEQ ID NO: 489856 - protein, 409 aa, unidentified
MGVARWVGRAIGLDVHRGFCVVAICEDGRVRSAGRVPSTPEGIRSLAESLVASDRVALEVTGSCWEVARILEPHVNRVVVVSPDDTGIASARAKTDKLDARALALLLWRGELEAVWMPDERCRILRRRLARREQLVRSRSRSKNEIQACLQRRLQAKPPFSDLFGVKGRDWLAALELPLEERESVDAGMRQIEFLDAEIAAVEKVIAQQALAWPEIRRLMTVPGVNLICAASFIAAVGNANRFLTSRKLVAYLGLDPRVKQSGEEPARSGRISKRGSQSARWALVESAWSVVLQPGPLHAFYERTKGRRGHGKAIVATARKLAVLFWCMLTRGEDYAHQQPSLTKKKLRRLEITAGAQKNTSRAAGIWSTNEMMRQAELELARQAEVSYKRTVTDQQAGAPANRERARA

SEQ ID NO: 489857 - protein, 339 aa, unidentified
MAIVGGLDLHRKQVTFDLVDTVTGVCHRGRIAPADRESFREWLAGMDRQRVDLAVEGCTGWRFVVEECQTAGVRAHLAEPAEVAGLKGRRQHAKTDRLDARHLRELLEAGKLPECWIPPGHLLEVRAKVRLYKDLLEERCGWQQRVHATLFHLGVPAQTRLFDCDPGGLARLEALSPATRQTTAVALRMIDALDRELSALRAELVAFGRRQPGCRELQHEYGIGALTAVVIWSEFGDARRFRNSRNAVRHTGLDISVYSSDGKRSRGHLTRQGPPLLRWALYEAGRCAARQTSPDHAYYEQVARRVGKQRAALSVARKLARRCHHRLRALGEDALAPVE

SEQ ID NO: 489858 - protein, 315 aa, unidentified
MAMPVSVSKPIVGVDVAKNELVIYHAEVDLLETIPNTKAAIKKWLKALSCKVAIAIEATNIYHLEFADLAHDAGCVVYMVGGYELKHYRESVKIRAKTDALDAKLLVRYLRKEADELRPWTPPSPLYRHLLSLFRRRAALVQARVSLTQSWANEPLLKASFAEQVKSMQRLEGLIEKMISDCLKEAGLLGQLKRCLKVEGIGFLTGARLIATFQRGEFRNSDAFIAFLGMDLRVNKSGQKDGRRSLSKRGDSEARRLLHNAAMAASRTETWKAFYQAQRARGYSTTQALVILARKLARVVFALLKGQSEYQPKVG

SEQ ID NO: 489859 - protein, 391 aa, unidentified
MTILVGIDVAKDKHDCFFMNSEGEVLAKPFTIFNNKEGFDFLYEKIQSVSSSDNIKVGLEATGHYSYNIIGFLLNKGLATFILNPLHTNLYRKSLSLRKTKTDKIDSKTIAMMLLSDVSLKSYSDISYHNEDLKSLTRYRFSKVEERAKLKTSLSRLAQILFPELEKLVPTLHMTSIYQLLEEFPSASAIASVHLTRLTNLLSKASKGHYDRETAIKIRDAAKNSIGSNMPAKSLELKHTIKLIRALTIDIGEIEAEISKMMDMIASPITTIPGIGRNIGAMIISEIGDFSRFSSPDKILAYAGFSPSIYQSGKLDNCYAHMEKRGSRYLRYALFHAAKLVCHWDKTFADYLAKKRAEGKHYYVAISHAVKKLVRVIFHIEKTKQAFLKAF

SEQ ID NO: 489860 - protein, 422 aa, unidentified
MHEERRWFVGIDWASQEHVVTLCDAQGNKIGEREFAHGGTGLSDMIAWLLKASGGEAGEIHVAIETPHGPIVEALLERGFNVYSINPKQLDRFRDRFTVSGAKDDSLDAYVLADSLRTDMHLFRKLIVSEPLIVELREWSRIDEELKAECVRLANRLRDQLWRYYPQMLELADDLSADWIFDLWEVAPTPEKTARVREATVARILKKHRIRRFDAAHVISELRKPALSVAQGTTEAATAHIRLVIAQLRLLNRQLADAGLQLDRLCKKLAEPIARDEGENVPGQRQEHRDVTILDSLPGVGRTVLVTMLAEAPDALQRRDYHALRNLCGSAPVTRRSGKSCLVMRRRACNRRLRNAAFYWAQTASQCDPTSRAKYKALRARGHGHARALRSVVDRLLYVACAMLENRTLFDPSFGEKKATAA

SEQ ID NO: 489861 - protein, 349 aa, unidentified
MQIKSQIRSIGIDLGKTTFHLVALGVHAQVLVRKKFSRPQLLAYTANLPSSLIGMEAGVGSHFLGRALREQGHQVRLIPAQFVRPFVKSNKNDYCDAEAIAEAVERENMRFVPIKTEDQLDLQAVHRVRDRLVARRTSVINQIRAFLLERGISFRKGPASLRRQMPEILENADAKLSTSMRRLLDFLWQEWKGLQAQIESLNADLEHIASSDPSCVRLQQIPGVGPLVSTAVVSAIGNGAAFKKGREFAAWLGLVPRQWSTGGKAKLLGISKRGNPYLRKMFIHGARAAVLRVKREGSTLGKWMSGLETRAARNVVIVATANKLARISWAVLASGNDYHPMHKAAVFSN

SEQ ID NO: 489862 - protein, 311 aa, unidentified
MAELTTPFILGVDVSKQQLHVFDWVSQRHFCLDNDAETIRRFLRSLRGPVRLAVEPTSTYHLTLVEEAHALGCEVFLVNQRQLRHYRDAIGARNKTDPDDAWLLARYLAHEAEQLRPYRPLSGKAQQLWALLKRRALLVSTQTQLRQSLADVNVAPQALWREFARLLRHIDQQLLELIRELGWQDAYQRCRSIPGIGPLNAAALVAAFHRGAFSSADAFIAYLGLDVRLRDSGQLKGKRKLTKRGEAEIRRLLFCATQEARRRYAPFAAYLQRQLDKGLSKTAARVVLARKLARIAFALLSSQQSFQPATP

SEQ ID NO: 489863 - protein, 427 aa, unidentified
MTDEFAAYVGIDWADQKHDVALLPAGREKEEHRQLEQTPEAIDAWATELRQRFGGRPVAICLEQSKGGLIYALMKYEFLVLYPINPKQLACFREALAPSGSKDDPTDAGLALRLLVKHRDQLRPWHPDDAQTRLIRILAEDRRGLIAERTRLCNQLQDRLKQVFPLALEILGSLTTDLAAEFLARYSSFQELRQAKAEDIAALYRLHNLGPDKIQERLERIAAATPLTTDPALLSSGRLWVRSLATQLQALAEPLRQYDRQLADAMRLHPDATLFQSFPGAGDALAPRLLAAFGADRQRLENAAQMQSLSGIAPVTRRSGRTMSVLRRWACNKFLRQTFHEFAQHSLPRSVWDKAYYDLQRQRGKKHHAAVRALAFKWIRVLFRCWKQRLCYDELIYCARLLQRRSPLLAHIAASPNSTPPHHTTYA

SEQ ID NO: 489864 - protein, 361 aa, unidentified
MAGTVTWAGLDVHARSTHAAAINVMSGELVRARFGAGLAEPLAWLAALPGPVKACYEAGPTGYGLYRAARAAGVEMMVIAPGKTPRGPSDRVKTDPKDAELLARLLLAGSLTAVVVPPPEIEAARDLMRAHDACRRDLMDARHRVSKLLLRYGRVYPEKSTWTVRHRSWLGRQQFDQAATELAYLDALACVDAISARKTALAERLSQLALDERWWPTVARLRCFHGIDTLTAFALHLELGGDWQRFARAPQLAAWLGLTPTLSQSGESSRQGAITKTGSVLARRLLVEAAWHYAREPRLGVALAARQAGQGAHVLQISHRARLRLHRTHRKMRSRGKPGNVCVVACARELSCFLWAAAVAN

SEQ ID NO: 489865 - protein, 411 aa, unidentified
MRIIRKRCLGLDLHKKQITAHLRVHRSSNEEPERIDIRFGTMPEELLRLRGWIVEHQVSDVVMESTGVYWMPVYELLEPVTTPAVVNAAHVKKVPGRKTDINDAQWLSELHAHGLLRLSFVPPKEIRELRLIARYRTKLVALRTSARNRTIKMIELAGVKLSSVVCDSFGKTGRALLDALADGPVNPKTVKERAKGSLRNRTAQLEAALRTPLSDYQRELLAMHLRAYDAIDAQLAQSESKMMERAKPYAAAIEKLDAVPGINPLAAITVLAETGLDMSVYRDAHHLTSLAGLAPGNNVSADKRRRIAMPKGNRYLKRISVQIAWAASRKTGSFLRARFKRLSFRIGRNKAIVATARHILIIVYHLLADQQQYKDLGAQFYDKRNKERSIQRHVQRLEQLGFTVALKPTTE

SEQ ID NO: 489866 - protein, 352 aa, unidentified
MATYYIGADVHSNSIEMAIFNRKKIIKRYTIPARISAAAEILESLKGKKYMAIEEGPMSGWLYRNLRQQVDRFVVADPRRNKLISSDGDHDDRIDSAKLAMLLAGGYLREVYHSDDDKRVELKHWVSLYHDRVRDAVRNINKIRARCRMHGVTIPRKVLRQAEHRAAWLRKLKNTALSNQLSMLWIGYDATAKQARMAKQHLINLSKRYPIICLWKQLAGIGVIRAATIFAYLDTPWRFKKKNKLWKYCGIGLQRTASGTDKKGKPKPARLQLPWAANRILKNAILGAALTAINQKQNSFKADYERMVLNGIIPSNARHTVARKMLTVMWGMWKRSCQFDLSEVSLPGLIEQ

SEQ ID NO: 489867 - protein, 358 aa, unidentified
MRLQSKELNFKGQNIYVGIDVHKKDWKVRIQSKELSYRTFSQPPKVAVLVEHLHRNFPGATYYSAYESGFSGFWAHRELVGEGINNIVVHAADVPTTDKERAFKTDKRDCRKIARSLSSNELEGIHVPTIKTQEDRSLVRLRLTFRKDLTREKIRVKSMLNFYGKEIPEQFLSSNYWSKAFIKWLKEVRFETGSAEQAMKLLIDQVEYLRIGMLEVTKKIRILAASQDYSSNMKLLVGIPGIGLITGIAFLTQLETIDRFPSTDSLANYLGLVPNCHSTGDKENTGAMTYRGNKWLRELLVESAWVAARSDSALHLAYLNLCKRMKPNKAIIRIARKLLNRIYYVLKNKREYEKGTVQ

SEQ ID NO: 489868 - protein, 479 aa, unidentified
MNGKAKRTKKQVNVENTVINIFKQEELVKKANEIMNDLKSSTWRDLETRGKFTKNDKLTFISDDMLILGCDIGSETHYVRAIDSRGRELSRNVFSFSNTGEGFQNAKSWAIELAAKNDKKQIVLGLEPTGHYWFCLSTWMIANGISVVQVNPYAVKQTKELEDNSQLKDDRKDPKLIANLVKDGNYGMPYLPEGLYADLRRLSMFRDQLTEDRIRNINRLHREMKIYFPEYMDAFGKLEGAFTLEVLKKAPFPKDILALGTEGIRDIWHEAKLRGRGYSRASGIVRYAGESVGLTDGTDVGKITVKWFAEKITELDKQLTEIEIILHQKCKEIPYVENILEISGIGENILAGIIAEMGDISRFDDVKEIQKLSGMGLVACSSGKHKGATKISHRGRKRLRYWLFQGAKSAVSHADEFKQIHAYYTTRADNPLKKMQSLIAIACKLLRIIYAILKTGTRYDPKKMLKDIKLPATGQVQAA

SEQ ID NO: 489869 - protein, 319 aa, unidentified
MSNHTIVCAGIDTGKRKLDAAIGPGAGELQVANTPDGQAALSAWLRRHQVERVGIEATGGCEHEVVVRLRNDGFTVIVFQPAQVRAYARFHLKRAKTDRIDAALIADCAAARKAEDIHAPPDPRIAPFAEQLTLIEQIAEDIACIKTRRATVRDPAIRQHWDDEIKRLRQTKRASLKQLLAAIRQHPDLAEKLDLIASVDSIALPSAVEILVRCPEIGTLSREKVAALAGLAPYPDDSCDQHSPRHIQGGRERLRKALYNAALAGAFRWNKHLIELYQRLMAKGKHHKAALIACARKLLIFVNAVVARRAPWTTEYTGA

SEQ ID NO: 489870 - protein, 438 aa, unidentified
MSNKVIFNLDDLFISVGIDVGADFSWMSIALPNQQFVGKPYKILHSSIDSLTTAVSKIKEAEELYSLESRIFLESTGIYHYPLFCYLRDKGFNCSVINPIITKNSTNINIRKVHNDRFDSKKAALVGLKPDLKVSLMPSDLALNCRNLCREYYDLMDNRSAYVNKLQGELRMAFPQYLGIFSKVTINTSLTLLETYTSPSAFLEADKQEIINIIKSTARFGLTYAQNKYNAIIQAATDANQFGYIIDSNIKRIRLYISFIRKYDEEINNILESLHELVNANEDADFVKQIHLIETFKGAGFLSAVSIMGEIGDFSAFSKPKQLFAYFGLDPAVKQSGKFEGTKVQMSKRGSAIARRVIHTLTLQSISISRNGEAKNPVLREYYLKKCDSKPKLVAMGAVSHKVCNMIFAILRDNKSFEIITPQEHIKQYNASKCDMAA

SEQ ID NO: 489871 - protein, 477 aa, unidentified
MSKGSGTTRGDRRRNERRARLRRVLPRDGAVIGIDLAEEKQAIAVIDHDLRVLARKTVRVKVFRLGEALDWAVAQARAKGFGPVSVACEPTGPRWLQVQQLCAERGLPLVCIQPLVSHIAREQQDFTSRKTDEADCVMIARLAVELHCYLPEQLDETWAHLRHLGRRRNQLITAATASVQRIRDFLSVAWPVAAETCVRPFESVTWLAAMQVVMSRCGADPAKLAPCGVEAFAVLVRRAVPCWGGVRPSGRVCQAVFAALTDTQGVVASHRRGLLRRCTDELDDLQRTRARLRAVEADMVTVLAQLGLVRLADIPGLTAVGAAAILAEAGDPRRYDSSSSLVKHAGLSPADNASGAFSGQAHISRRGRPGLRLTVWRAVWAVLIHNPVMAAKYQAMTQAADTAAAQAASASADAGSRQVSAAAAAARARRAKARVACAASLLRWIYSMVVHGTGWDPAVASGAAACQHASSSRQQAA

SEQ ID NO: 489872 - protein, 339 aa, unidentified
MKLYSAIDLHSNNSVLVVLDEKDKTVYERRLPNQLPMILAELAPYKKRIQAIAVESTYNWYWLVDGLMEAGYEIKLVNTAAVKVYEGLKYTGDEHDARHLAHLLRLGVLPTGHIHPKEERAVRDLLRKRGQLVRYRTMQILSIQATVSRNVGHGLSTVEVRKLDDATIDRFCEGNVARALAIKSNLVMLRCFDTQIAEVEALALQKAKLKPEFKKLLTVDGIWEILGMTIMYEAGDMDRFAKVGHFASYARCVGSSRWSNGKKKGEGNRKNGNKYLAWAFIEAAHYAIRYNERIRGFYQRKLAKTNKIVAAKAVAHKLARACYHVLKEQTPFDEARAFA

SEQ ID NO: 489873 - protein, 353 aa, unidentified
MRKMTEIIVSGKQIFVGLEDAKRSWKLCVRCDGMIVHEVSMPAEYSALRGYLTGRYPDCHIMVMYETGFSGFNLYDRLTADGIGCVVTPAHTVQQAKVSRVKTDRTDARLLAGNLEAGRYVVCRVPDRQRREDRQVSRTTSQMQRHIVSVKNQIRRFLEFHGLDEGLAAGRWRDHDYRSLDVASLPSSLRISLGALLSLLTTLEQLHADLKQELKRLSDQPRYRAGVTAKEGCPGVGWLSAIRFTLEWGEMSRFQTGEQIASFVGLTAAETSSGESIHRGHITGQGSGQVRAWLIQCAWRAIRLDPVLLHKFRAVWSASSSKKKAIVAVARKLVVRMRTVELTGQPYVVGVER

SEQ ID NO: 489874 - protein, 387 aa, unidentified
MYFIGIDISKFKHDCAIIDEAGDTVTASWSFANNCEGFSLLKQLLDALDGQKKIGFESTGHYGHNLKLFLEANNFSFMEFNPLLVSKFVRSKSLRNTKTDSLDAVSIAQYLMTVEYKPYPPSFYHMDQLKSLTRFRDSLVRQHSRQLVELTNILDKVFPEFKPFFDGRFSATALYILTHYQSPEKIANMNAKSYEALRKKSRGKFSMVKFAQLKTLAKNTVGRSDAFLLKQMEITIDIENQLDAKIDEIESQILEFIRALNPPILTIPGIGELTAAIILSEYGNINKFENPAQLLSFAGLEPGYYQSGLAEHQGHMVKHGSSHLRYALMNACLPLITYEPVFAEYYAKKRAEGKPHRVALTHVAKKLLRVIFTLQTKNISYDPTLIR

SEQ ID NO: 489875 - protein, 336 aa, unidentified
MLYVGVDLHRKASQVAVVDEEGKLIFNRHVRSDRDELLRIFGEAGPSEAMQVAFEATYGWGWFADLLEDVGIPAHMAHPRANKAIASARVKNDAVDAKTLAQLLRTGLLPEAWIAPPEVRDARRLVRMRTAMVRIRSRLKNQIHALLADRGLHPEGSDIFAGDLTRMTEQLPAVVRQRAEANLRLIEELDEEVDVADAQIHKLFARDERVRRLLPIPGVGIITGAIIVAEVGDIDRFPAARQFASWCGLTPTEHSSAENIRRGHITKQGSRWLRWVLVEAAVHAYRNHELSRWQTAIANRRGDKIARVALARRIATLCFHALRSQHGCRAFPARTK

SEQ ID NO: 489876 - protein, 286 aa, unidentified
MTQNDLVVVGIDVAKDKVDACIRTVTERRTFPTTASGRRSLLAWLRKHQVGKAVMEASGGYERVWAKALRQTALEVRIVDTKRVRSFAESAGRLAKNDKIDAEMIAWFAETFSEAPSQVEDPAHEEIKALVKGRKSLIDLRTRLEMQKEHEVPALVGKAHARLLKKLATEATALTLLAGLPELGQVSNEVAAALVGVAPYDDDSGKRHGQRCIKGGRRWVRNALYMPCVGAATLNNPVFKAFYQRLIAKGKAPKAALIACMRKLIVILNTMIARGEKWDPKRYHVA

SEQ ID NO: 489877 - protein, 405 aa, unidentified
MKMNAVGIDVSKGKSMIAVMRPFGEVVASPCEVNHTSSELGKLADFLKSLDGETRVVMEYTGSYYLPIAQYLHEAGVFVSVVHAKLLHNYGNDTIRKVKTDKYDAVKIANYALDRWLKLAEYVPEEDLRQLLKTYNRQYAQYTKISTMLKNNLIALLDQTFPGVNKLFSSPPRKSDGHEKWFDFAKEFWHCKCVCGVSEKRFVERYKKWCKREGYNFSQTKAADIYIESFAHVNTLPRNDYSHFLITQAVSQLTAIAESRFAVLREMQRIAKLLPEHDTVLAMGGVGEVFAPQIIGEIGDVSRFAKKGSLVAFAGLDAPPYQSGMFESHNRRISKKGSPHLRRVLFQVCDALLKHSPQDDPVYQFLDRKRAEGKHYYCYMTAASAKFLRIYYARVNELFDAFGAE

SEQ ID NO: 489878 - protein, 352 aa, unidentified
MEQFIGCDAHKEFSVFVAVNEKGQAGEALRVTHDREVYREFLARLPAQSTIAVEATGHYAWLVDEMEALGHHPRLANPFEAKRRMGLTHKTDKLDAKGLAILLRNGTLPEVWIPPRELRDQRELLRLRMFLVRMRTRVKNRIHGTLARHNAQVKGVTDPFGAEGRRLLNTRLPDLPGHTREAVVQELSALDFLDAQIESAEHRLDAIMAVSVETDLLKTLPGVGKILSLVMMLEIGRVDRFPTAAHLASYAGLVPRVHSSGGHTRLGRICANVNHNLKWAFVEAANAVVLHQRSLAGTHVVRLYKRIKRKNYQKAVVAVARHLAEAAYWVLTKLEEYREPQAKRQALSSTHG

SEQ ID NO: 489879 - protein, 451 aa, unidentified
MKSYQSYQTKRSNVADKTIIGIDPGKSRHQAVIIDATGIPIGRTFSFSVNHKGYHEKLWNEIKKQIPDYSSSNLLFAVEASCNLWQTISDYLRLEGYEVVLISPMCTKQSRVMLNNDFSKTDPKDALLIALNTQRGYYIEMRNYSKISNNMHILSIAYNKLRKDHSRYRGRLRAAIELIFPEFLEVITLGTQTSFYLLGKYIFPEEYLNMNIELESLQIGTISRSKYGIRHLNKLQELAKHTIGISSHNELYDRTIVLTWLEGMKEIGSRMKVILDQLIKLASSMKELSILTNLMGISNETASLFLAEIRDISAFDNYKEIEKFAGYNLRLTQSGKHIGSRRISHLGNTRLRWVLYRMTEETMKYIPEVRIKYLKRQLKKQIYRKNLVSCVPQLLKLIFSLLKENRYYEYYEERVAEMEKLNIQYQVVKAERAAKHRKHKPIIKEKLRKTA

SEQ ID NO: 489880 - protein, 344 aa, unidentified
MEHFGGLDVSVKETSICIVDDTGKIVKEVKVASEPAALLKVLGNPSYRFKRIGLEAGPLSQWLFSALAEAELPVICVETRHMQAVLKAQINKTDRNDARGIAQMIRVGLYRPVHVKTLRSQKLRMLLTHRKLLQSKAIAIENDLRGTLRNFGLKVGMVGKVRFEARIQELVESIPDLAVLVEPLLIVRRVLREQIVILHRRLLAIVREDEVCRRLMTTPGVGPVVALTYRATVDVPARFRKSKSVGAVFGLTCSRYQSGEIDWSGKISRCGDEMMRTMLYEAAQSMMHSKKWSWLKAWAMQIARRRGMKKAIVALARRLAVIMHRIWVDGTEFCWTREQATAAA

SEQ ID NO: 489881 - protein, 331 aa, unidentified
MNLAGIDVANETFDIQKRCAEKITHRTFSNSKSGHQQAVAWLQRGSRRVRVCLEATGIYHLQLALALDRAPGIELMVLNPKAARRFAEAQMVRGKTDKVDALVLLHYLECMPFKPWSAPSHHRLELQSMAHRLAQLTKEQTRERSRLHAAERAGAHTRVAQHDTRVHIRYLERRYQLLEIKAIELMKQYASMAEDLALVDTVPGFAETAAMQVLAEVGVLPDDLQPQQWVAQAGLDPKPDESGTSVHSPRHISKQGNAKLRAALFFPSMSACRCDPNVRAFYEKLLARGKTKRAAQTAVMRKLLHSIWGILKHRQPWDGDKFCRIEKPMIA

SEQ ID NO: 489882 - protein, 341 aa, unidentified
MSKITTIGVDIAKNIFHAMCCDARGKTVKKRMLRRHEVLPFFARQEACLIGMEACASAHYWARQLTALGHAVKLVPAQYVKAYVRGNKNDYNDALAISEAVTRPQMRFVAIKTPDQQDVQALHRLRDRSVKMRTGLCNQIRGLVGEYGLVCGKGVATLRRQIPCWLEEADNGLSDFFRRLLAQSYQQLQTLDDDIDDYTRELKRYSQQSDACQRLQTIPGYGPIVASVFYSQVGHGEDYRRGRDVSASLGLVPRQHSSGGKDTLLGISKRGDRQLRSLLVHGARAVVSRAEKKDDRLSRWINKIRAERGINKATVALANKLARIGWAILAHNTIYKPTAQG

SEQ ID NO: 489883 - protein, 390 aa, unidentified
MIYVGIDVAKDKHDCCILGSDGEVLFSPFTIQNTLQGFDELYEKIWSLTYDLTEIKVGLEATGHYHLNLLRSLLDNGLPSFVINPLHTNLYRKGQSLRKTKTDKVDAASIAMMLLTDKTLKSYSDSSYHNEELKSLTRYRFDKVQERARLKTSVSRLVNILFPELEKLVPSLHMASVYTLLSEFPGASFISAAHLTRLKHLLHDASKGRYGRDMAVSIRDAATSSIGSVLPAKSLELKHTLHLIEVLTEEIDEIEDAINSIMDAIASPITTIPGLKNRMGAMILAEIGDFSRFDSPDQILAYAGLSPTTYQSGQLTSSYAHMEKRGSRYLRYALFNATRYACIWDPTFKAYLAKKRAEGKHYYVAISHACKKLVRVIYRMQLTGESYRTA

SEQ ID NO: 489884 - protein, 369 aa, unidentified
MLYLAIDQHAKQITVCVRNEDGDTVLRRQVSTRAEKIETFFQQLTEMDTQFMAILEVCGFNDWLIEVLRRWNCREIVLIHPERPSKRKTDRRDADKLADLLWLNRERLAAGQIVHGLRRVYLVTQKEREDRQLTALRKTLGQRRTRTLNKIHRIINRHNMIWNYPTKSFQTQAGRRWLEDVKLPEMDRLEMDMLLEEWKTWDEQIAKVDEKIAERACQVEPGKIFSPTQILMTAPGVSHYSGLTLACRIGPIERFARPRSLANYFGLTPRCRNSGNAQDRLGSITKEGSKIARFILGQLVLHFLKKDRKMRDWYRRIKLRRGSKIARVAVMRRITIVFWHMLTHEEAYSIGGPPPRLRHEAQTARGEAA

SEQ ID NO: 489885 - protein, 365 aa, unidentified
MNEHKYIGWDAHKKYSLFAELDEQGAVSCYQRVEHDREKVREALARLAVGSRIALEAGGSYYWLVEEMEKAGHQPQLTNPLEARRRMGDRKKTDKMDAKMLAQLLRAELLPVVWIPPGPLRDQREMLRLRMFLVHRRTSQKNRVQGMLQQYNLVVAGVKDVFSQEGQRQVLERLKELPEQTRQSMKWQLEMVEELERRIAEIQQRIEAMFEQSAEAKLLDDLPGVAKLLSLVMAYEIGDVNRFASAGHLSSYAGLVPRVNSSGGKTRLQGVSTEINHYLKWAYVEAANAVVAQQRRWQWRYVVQLYQKVTRKKNHAKAVIAVAHHLAESSWWMLKKKEGYREPRMTVCSTQGKRGLPLAELRPLV

SEQ ID NO: 489886 - protein, 377 aa, unidentified
MNETSNSINPIVQEARQEAIRNRYGGKRVLFIGVDLHKDSLTTVGVDTEGNIVFCTSLATKCRNQIIAFFMAQKTHWDHVLVAVESVGFYQWFWDLVQPLVQEIHLANASQVRAAAGKRAKTDKNDAETLARLLRDERLPTAFVPDPELRDLRAFFRHRMRLARRLSSAKNSIRMEMGKLGLAGPKVISTDSLHKWMTGQRNKLTAPALFALKDLAAHVRLLEEQLLDREDELRRLVEASPRFRAPVARAMTAPGIGFITAVALYVETGGLTRFAEEKEICCYVGLTPRVFQSAETIRHGRISKAGPPVLRKCLIQAAWTAVRECEDIRRIYETARRKSGKKRAIVKVARKILVWAWSMEKHQTAFDMAKIGPKKAA

SEQ ID NO: 489887 - protein, 345 aa, unidentified
MELHTIGIDLGKTVFHLVGLNLRGEVVVRKKFSRTQLLRFTANVKVGLIGMEACGGSHFLGRALREQRHEVRLIPAQYVKPYVKTNKSDYLDAEAIAEAVARPTMRFVPIKTDDQLDMQSLHRVRERWVMRRTAVINQIRGLLLERGITLRKGRCHVGAALPGILEDADAKLSGALRMLLAQLKLELDHLDMRIEEADALMKKTARENEACQRLVAIPGIGPVTATAVIAAIGNGGAFHKGREFAAWMGVVPREHSTGGQQKLLGISKRGNSYLRRLFVQGARAVMQQRTKQSSGLSAWLAQLTSRTHRNVAAVALANKLARIAWAVLAKNEPYRPPVLADVAAA

SEQ ID NO: 489888 - protein, 415 aa, unidentified
MLKTVYPICCGLDVHRDFVYACIATTVNGVTTYKSHRFSTFTKGLRELLSWLLASNCKDVCMESTGKYWIPVYNILETDCKIVLAHPKYVKAIRGKKTDKKDAKWIADIFKHDLVSGSFIPPADIRQLRDLVRYHAKLTNFTTGEKNRAQNCLTVSNLKLDSVFSDVFGKASSKIISHILANPSEKLSDVSAFRTKGMKATDEEILEAVDGEIYPEQAEKLRIIRDHMSSLDLCKANLQSLILSTAEKYIPEIDLVCTVPGIATFSAISVIGEIGVDMSVFPTSKHLCSWAGLTPQNDQSAGKKKTTRISRAGAYIKPLLVQCALAAVKSKNKHPEVYNRYSALKKRRGHKKATIAIARMLLTAIYNILKKHEPYNAEIYRKSDAPPEHRNVSVEEAIFILQRQGYLISSPVSIE

SEQ ID NO: 489889 - protein, 426 aa, unidentified
MRVLYDRVAAIDVHKDMVKVAIRVPGAKRGTRKTDVLEFRTFYGVLQAMGRELRGRGVTHVVMEASGVYTDPVYYALRELDFEEVMVINPAHAKALKGHKTDAKDAIRLLDLYECGLLSGSYIPDPDLREVRDLARYRMKTVQARTSEIQRLQKTLETAGIKLSSVVSDVTGGSATAMIEALISGERRGHVMAGLAQTRLRTAGKMADLSMALTGRFTGHHALMCRLHRDRITIFDDAVKDLDAKIAPLVARYAREADLLKSLPGFGDVIVAGWLGAIGPAPHQHFATASRLASWATLCPGNYMSAKKSKGGRTGDGGAYIKPLLIQAAWAAVRVPGRLQARFSRLVRKFGGPRNKGAQKRAITAIAHTLLKIAYSVLKTGTPYTDLGADFYTRRESPDARQDYLMRQLQKLNPGCVITITPAEAA

SEQ ID NO: 489890 - protein, 388 aa, unidentified
MQVAADRTDASTAIQTDLPAIFASLELSRSTWLITSLSPGAGEKMSKHSIRAGDVAGLLVRLAQLKEKARGRTGRDFPIIAIQEAGLDGFWIHRVLQSEGIESHVVDAASILTSRRRRRAKTDGIDGETLVRTLLAYKRGEPRVCAMVKAPTPEEEDRRRICRERKTLVGERVEHVNRVKGLLFAQGVSDYEPLKRNRRARLEELKTGDGRPLPAHLKAQISRELDRLELVLPQLKAVEAERDALLKPVSEGSATPAAMLAQLKGMGPEFTAILWSEGLFRSFSNRRQLAAYAGLAPTPWQSGSVAHEQGVSKAGNPRLRTTMIQFAWLWLRHQPTSALSVWFQERVQSNGGKMRKTTIVALARKLLVALWKYSTSGVVIEGAVMKTI

SEQ ID NO: 489891 - protein, 441 aa, unidentified
MAMRKREEEVVFPHAAGIDVGASSHWVAVPKHLADEPVREFGTMTDDLNALADWLLACGVDTVALESTGVYWIPIYEVLEQRGLNVWLVDARQMKYVPGRKSDVQDCQWLQRLMSLGLLRAAWRPGDEVCVVRAVVRQREVLLVEQASWVQRMQKALVQMNIQLTEVLTDVMGVTGQAIIRDIVAGERDPAVLARHHNARLKASAQDVRRALTGNWRDEHLFLLTQSLAIFDDLAQRVRECDAKIEALLAPLQRHAVKLKRSPKAKGKNAPSFDVRQAMANWAGVDLTSIDGLGVTIVMKLLSEIGPDLSRFANVKHFCSWLGLCPATKISGGKVLSAGTKRSANRARQALKMAAMSLSRSDSALGAFYRRLCSRMDKPRANTAVAHKLARVVYFMLTRGEDYVDQGRERYEELQRQRSIAALKRRAAALGFQIAPAAATP

SEQ ID NO: 489892 - protein, 383 aa, unidentified
MTQALGTVIDYERTLILAIELSNTSWVLAAQIPGLPGVKAKRSIDPTPEALMAAIENYRARAEKAGRNVDRVIAVYEAGWSGFWLVRWLAKHGVEEAHVIQPSSVPVDRRARRAKSDGIDAELLLRTLLAWLRGEPRVCSMVPIPAEADEDARRRVRERAELISERVGLVNRIGAVLATLGAGEYNPLRRDRRQRLDELQTALGDSLPTNAHAKIARMLDRLELLLIQITELEQSRDAVLEDESPDRASSMIQQLAKLRGIGVQSATVLVREGFVREFANGKALGSYAGLTATPYSSGGIEREQGIGKAGNARLRTVMVELAWLWQRYQPGSAQVRWFRERGGTGRRVRKVMVVALARKLLIALWRFATQGVIPEGAVMKPAS

SEQ ID NO: 489893 - protein, 425 aa, unidentified
MEQPTRFVGMDVHKDTIVVAVTATGDSGKATPYGTFPNTAAALEKLVKRLRQADSGPLKFCYEAGPCGYGVHRTLTKLGEDCMVVAPSMIPRKSGDRPKNDKRDAASLAVLHRGGLLTAVWVPDAAHEAMRDLIRARLAAVRAVRAARQQLSAFLLRHERIYPEGRRAWTRAHRGWLADQSFAQPAQQIVLEESIEAVRLGEQRRDRVDGHLRAQIPTWALFPLVRNLCALRGFDTIAGAGVAAAIGDPSRFASAPDFMAYLGLVPSEQSSGPKRRIGAITKAGDVHARTLLIEAAHGYRFPARIARHKLTAVDAVPEAVRVIAWKAQTRLCRRYRHMMAKGKPKQIVVTAIARELAGFVWAIACITSDPPAKDVTLTTASEGICPTGSPGRCRAPRRLPLRGTPRRAGRHGQTSAASAEASLTG

SEQ ID NO: 489894 - protein, 315 aa, unidentified
MVDVPCFVGIDVAKAQWDIALRPTGERWAVPHDARGIAPRVDRLQALHPTLIVLEATGGLEPAATAALAAAGLPVVVVNPRQARDVARATGPLAKTEALDARALAHFADVIRPTPRPLPDAQPQALRALLGRRQPRIVMRTAAQHRLAGTSARLTQAMAAPMTWRKADIAPRDDALETLLRASPLWRDNDDWLQSATGLGPVCAHTLRLALPALGTLTRQHIAALGGVAPLHGARGTRRGRRPIGGGRAHVRTVLSMGTLVATRFHPQSNVFYERLLAAGQGKKVALTACMHKFLTILNAMLKHRTPWQPQEVQS

SEQ ID NO: 489895 - protein, 342 aa, unidentified
MQISTIGIDIGKSSFHFVGFDARGGIVVRRQCSRTQLIRELAKVPPCLVGMEACCGAHHLGRILIAQGHDVRLIPPQYVKPFVKSQKNDLLDAEAIGEAVQRPTMRFVPLKTMEQLDLQAIHRFRTRLVARRTAVINQMRGFLLERGVTFPIGRRALVERFPEVLDNPALGLSVRFCRLLQQLRDEWRLLDSAIQEVDQEIHTLAHDDEACDRLMQVPGIGPLTATALVAAIGNGAAFAKGRDLAAWLGLVPRQHSTGGKTVLRGISKRGNAYLRCLFIHGARAVCRHHRQKPHRLGRWLANLEARAHPNVVVVALANKLVRTAWAVLQRNTHYDGRLLANA

SEQ ID NO: 489896 - protein, 338 aa, unidentified
METYAGIDLHSSNNFIGVINEQDKILYGKRHSNQLDDVLRALDPFQDSLKGVVVESTFNWYWLVDGLQEHGYRVHLANPSAIQQYERLKHTDDKWDSYWLAHMYRLGILPEGYIYPKEHRAVRDLLRRRLLFVQQRTSHILSLQSMISRNLGFKMSNNEITKLRPEDSAGLFGCPNLAFMAHNSLAAINFLKKIILDIEKNVKSQVKMRKEFLMLQTIPGIGNILGLTIMLEVGDIARFPKVGDYSSYCRCVDSNRISNGKKKGENNKKNGNRYLAWAYVEAANFARRYSVKAQSFYQSKAAKKKPVVAIKALSNKLSRASYYIMRDQVAFDEDKLFC

SEQ ID NO: 489897 - protein, 418 aa, unidentified
MSLLLEQPFTAYVGIDWADTKHDICVQAAGDPRRASSCIAHRVAAIDEWANALHRRFGGPIAVALELAKGPIVAALQKYDFLVLFPINPATLAKYREPFQPSGAKNDPKDAELALDLLLHHPERFGPLRPQSAAMRTLVSLVERRRQLVGDQTRLTNRLCDTLKQYYPQALEWFDDRGTVLFCDFIDRWPTLRSVKQARTATLEAFFHAHHCRSARRISARIGSIREAAPLTEDPAIIGPCRLHVLALAAQLRTVLAAIVQFEHEIAAVARTLPDYTLFKNLPGAGAQLAPRLLAAFGEQRKRFRSADELQKYVGIAPVTERSGKQSWVHWRLQCPKFLRQTFVEWAAQTIPRSSWAGAYFRQQRAKGSSHHIAVRALAFKWIRVLYRCWQTRTPYNETVYLNMLRKRGSLLAGKLGT

SEQ ID NO: 489898 - protein, 345 aa, unidentified
MKQYAGIDVSLEYSSVCVVDADGRIVREAKVLSEPDALIAWFAEHGVAMERIGLEAGPLSQWLHAGMTKAGLTVEQIDTRHVRAAFKTMPVKTDKKDARGIAQLMRLGWFRPVHCKSLPAQEVRALLTARKLIQGKLHDIEMSMRGILRGFGLKVGPTTRRTYALRIRELIEGHPTLEAIAASLLKVRDALADEFAGFERKLRGMARQDDKARRLMTTPGVGVLVALTFVSAVDAPERFRSSRAVGPHFGLAPKKYQSGETDYSGSISKIGDVGVRTALYEAANVILTRPVKGSDLKTWALAVARRAGPRKARVALARKLAVVLHHMLRDGTKFIPHKPMRAMAA

SEQ ID NO: 489899 - protein, 423 aa, unidentified
MLQETQETEEIIERVAALDIGKAEVMCCVRVPDEGRLGRRLQEVRACPTMTRSLLEMADRLRCLGVTRVVMEATSDYWKPVFYVLEAAGFDTWLVNARDVKHLPGRPKTDKLDCIWLCKVAERQMIRPSFVPPPEIRQLRDVTRYRADLVGARTAEKNRAEKLLEDAQIKLSVVASDIFGVSGRAMMAALIAGERDPKALAQLARTRMRRKITALQEAFTGRFTGHHAFLLAKMLGRVDAIDADIAELDARIEELIAPFSAAAARLDEIPGIGPVAAAIIIAEIGTDMSRFPTAGHLASWAKFAPGVKESAGKKKGKGSTGHGDRYLARVLGEAAAGAARTDTFPGERYRRIARRRGAKKAIVATGRSILTIIWHLLADPGLRYADLGPGYYEQRINPERRKRTHIRHLEALGYKVTLEPLAA

SEQ ID NO: 489900 - protein, 341 aa, unidentified
MKQATTIGLDIAKHVFHVHGADGAGHVLFRKRITRVKLLGFLAAQTRCVVAMEACAGAHYWAREIAKLGHQVRLIAPAYVKPFIKRQKNDAADAEAICEAAQRPTMRFVPVKTEEQQANGIVFRARDLLVRQRTQCVNALRGHLMEYGYVFPKGITHVESLVALVEDLQSSLPDSVRAILKLLVDTFTALEVQISVLDAEINQRSKSDPTARRLMTIPGVGPIVSTAITALVPAAEGFPAGRDFAAWLGLTPLQKSTGGKQKLGAVSKRGERTIRRLLIIGASAVVQQASRRGAPKGSWLAQMLARKPKMLVTVALANKMARIIWALLVKGGTYRTPIAAA

SEQ ID NO: 489901 - protein, 339 aa, unidentified
MELYSGIDLHSNNSHVAIIDDQQNRVFYRKLANDPEIIANAFAPYRERLKGVVIESTFNWYWLADFLIERGYPVHLANPCGIQKYSGLKHADDKHDAFWLAQMLALNILPEGYIYPKEDRPLRDLLRKRSHLVRVRTSLILSLQNVVLRNHGIKIRSSDLKKLTQDPVAEILKDQEELALAGKASKESIDFLTRQIQRIENAVRSKALLKEPFSKLLTLPGVGDILGMTILLETGPIERFKQVGHYASYCRKVPSRWTSNEKVKGKGNTKNGNPYLSWAFSEASDHARQTHGLSRDFYNRKLNQTNASVAHNALAHKLSRAAYFIIRDHVEFEEAKMFR

SEQ ID NO: 489902 - protein, 358 aa, unidentified
MKYVGIDVHKKMCQAAVLDNDGTLLDEIRFPNDGEGIEEFSDKLTTFRDDVKAVVESTGNLWIQIHDRLEEHGFDVSLSNPSKTRLIAEAKVKTDKVDAKTLAGLLRADMLPTCYVPGEELRSRRELLRHRLRLVRTRTEVKNRIHSLLDKHGLRMPETSSFSKVNIAWLRSLSLRFMDDAILRSDLALLETVDGQVEVIEEKIAALAAEDHQVRLLMTMTGVGYFTAMLIMVEVGDIGRFRSDKRFASWMGLVPSVHQSGERTRIGGVSGPGNKRLRWVMVECAHTAVRHDARLGALYERQLRRRSEGSAMVAVAHEMARIVYFMLRKDEPYRGENRGLTERKLKNMSVRALNGLRN

SEQ ID NO: 489903 - protein, 403 aa, unidentified
MNNVAGVDVSKGKSMIAVMRPFGEVVVSPFEVRHTASELSELARLLKSLDGETRVVMESTGNYHAPVAWLLHGAGFYVSVVNAMLVHDYGNNSLRRGKTDKKDAVKLANYGLDHWLTLPRYVPEEDTRLMLKTCYRQYQQYSKVQTMLKNNLISLLDTAFPDANRLFTSPPRADGSEKWVDFVATFWHCECVCGLSKKAFTAKYQKWCRKHGYNFSQDKALDIYASACGRFGVMPKTNTAKLLVEQAISQLQTTSAALAALKQEMQSLAASLPEYPVVMEMFGVGSTLGPQLIAEIGDVRRFHSKKALVAFAGIDAPPYQSGQIEVRSRSISKRGSASLRRTLFLVMGVLLQCAPMDEPVYQFMNKKRSEGKPYRVYMMASANKFLRIYYASVKAYLDSLEHD

SEQ ID NO: 489904 - protein, 336 aa, unidentified
MTMFQLGIDVSKNTLDLCLLREGIKGRIKTRKLKNTADAAKVVAEWLKKQSCELGEVHIIMEATGVYHEPLAYGLHFAGARISLANPHRTREFARGMNILTKNDKVDAWMLACYGSLKEPEAWTPPPESVRYLRALLRRRDALVADSTREKNRLEKSVFTDSPDAVRASIENMLQELSNEIEHLDVLIQEHIKTHPELNQDFRLLTSIKSVGYLLGLNMLAILKSHSFESAEQAAAFLGVVPVERRSGTSVKGKPKLSKIGPPEIRTKLYLAALCGLRFNPVMKQMYTKLCQRGKSKMCAIGALMRKLVHWCYGVLKTQLPFDAEYNQQSHYKTTS

SEQ ID NO: 489905 - protein, 391 aa, unidentified
MVCVGIDVAKDKHDCCILDSDGTIRADCITIPNNMDGFKQLLQTIRDCTKKSDKIKVGLEATGHYSYNILGFLLDNDLAVYVMNPLHTNLYRKSLSLRKTKTDRVDARTIATMLLSDVDLKSYTDTAYHNEELKSLTRYRFDKVRERAKLKQSVSRLVTILFPELEKIVPSLHIASVYALLSEYPGAKQISEIHLTKLTNLLVTASKGRYGKDKAIQIRDAARTSIGSVMPAKFLELKHTIKLIRELTSEIDEIEVSIQKIMDELNPPILSIPGVGIQSAAMILAEIGDFSNFESPDKILAYAGCSPSTYQSGKLTNCYAHMEKRGSRYLRYALYNATKYVCHWNPVFAEYLAKKRAEGKHYNVALSHATKKLVRLIYALQKSGKAYLVAA

SEQ ID NO: 489906 - protein, 347 aa, unidentified
MDITTIGIDLAKLVFQVHAVNAHGKVVLKKQLKRNQMAEYFVNLKPCLIGMEACGSAHHWARKLQSYGHTVKLMPPQYVKPYVKTNKNDAADAEAICEAVARPNMHFVPIKTLEQQGILTIHRIRQGYVKARTAQANQIRGLLAEFGIEIPLGIGYITKRVPELIEDASNDLPGIVRIEIQELLEHFKHLEERVNDCEKKIVCWHRKDGTSKKLEAIPGIGPITASALVASIGDSKHFKNGRQVAAWIGLVPKQHSSGGKQTLLGISKRGDSYLRTLLIHGARAVIHHSVGKIKPTGTQSWVNQLAARKNKNIAAVALANKNARIVWALLNHDRDYQDNHKTLRVAA

SEQ ID NO: 489907 - protein, 448 aa, unidentified
MSKSKTKNETVKRISQLTVLNPTAAGIDVSDKEMMVAYPIGSGQLEVRSFGCFTRDLHVIAKTLRKLSITSVAMESTGVYWIPLFLLLEEYGFEVCLVNAKHVKNVTGRKDDESDAEWIQKLHSCGLLRASFQPDNLTRTLRSIVRHRKNLESTCSVYINRMQKALELMNIKLHTVISDIDGKTGLLIIEAILAGERNPEILADLRDKHIKASREDIIKSLEGHYTTEHLFELRQCYSLYGTHRQLIGECDNEIEKQLIEQIASKNGGVIPDLPKEKRKATGKHKLSFNATTYLKEILGVDVTEVFGISELSAMAILSEVGTDMSKWKTEHHFTSWLGLAPNTKISGGKVISSRIMKKRHHAGQAFRMAANGLHNSKSLIGDYYRRIKAKAGAGKAVVATARKLAIIFYKMVANQQSFDPKALEDYQQKYKQKKISQLKRKLELLEAA

SEQ ID NO: 489908 - protein, 340 aa, unidentified
MSEITTIGLDLGKHVFQVHGIDAAGRTVLRKRLRRGQVLAFFSRIPSCLVGLEACATGHYWARELGALGHEVRLMPAQYVKAYIKRNKNDAADAEAICEAVSRPTMRFVPVKTAEQQAAQLLHRGRERLVRQRTMLVNALRAHLAEFGIVAAQGLRNVGQLIAIVRDDGETRLPEIARQVLQVLGSQIEQIEAAIIRLEKQLMAWHKTNAVSQRLASIPGIGPIIATAIATTVADPNVFRSGREFAAWLGLVPRQNSTGGKTRLGGITKRGNRYLRRLLINGASANLLRSKATKADPWVIGIRRRRPPLVVAVALANKTARIAWAVMLRQNEYQPRSVAA

SEQ ID NO: 489909 - protein, 338 aa, unidentified
MSVYAGIDLHSNNSVLAVMDEGGQALLQCRRANDLSRILADFEPYREDLNAIAVESTYNWYWLVDGLMEHGYDVRLVNTAAVPQYSGLKHGNDQTDALHLAQLLRLGLLPEGYIYPREQRALRDLLRRRFTLVRQAVQLLLTIQSSFSRTSGKQVSANALKRMPPAELQALFSDPNTRCGALAQYTVWLTVHEQIRQIEQRLSAQLLHSPEFTRLRSVPGIGPILGMTILLETGPIERFASVADYASYCRMVESVRLSNGKKKGHGNRKCGNRYLCWAYMEAANYATRYSPLIRHWYERKRSSKHRVVAIKAVAHKLARACYHLLKDGTEFDPKRAFG

SEQ ID NO: 489910 - protein, 382 aa, unidentified
MNDLSRSLTPLDPDHTLIAVIEMSQSSWLVAGIVPGIERHPLKKLQPNEAELLRLLMRWRAEATKMGRTITRIAVAFEAGRDGFWLARWLRARDIEAHVIHPTSVAVSREHRRAKTDRLDTGLLKRVFIGWLRGEPDHCHMAAIPTLADEDAKRPNREREGLVRERTRIVNRMKSCLARFGVRNFKPTLRKAPECLATLVTPEGVPLPPNTLLELRRDMARLRFVMDQIKEVEETRAQRLEQAPQEKSHAMVRLLARVIGVGIETADMLVHEILSRSLRDRRAIARYAGLTGAPDESGRKRREKGLAKAGNARVRRGMIQLAWRFLLFQKDSALAQWYRTRTDSAGKKRKTMIVALARKLLIALWRLVTIGEVPAGVVLRAA

SEQ ID NO: 489911 - protein, 357 aa, unidentified
MKSQEIKYVGIDCGKKTLEVIRIGDNSLHQRQQFSTTEIGISKLINWLNPNDVVGLEAGSQSFRIAKSILNKGIQVIVLNPGDLATIYQSLKKTDKEDSLKIARLIQRFPIEELPVVPIPNDEEEDNRRLCTEQENWTRQLTQSKNRLHSLFTQAGLTHITKKHLRTKANREISVALLPSRYQKEAERILKVLDLVELNLKLIEKEIQEALKKNKAYVQTIMSMPGIGMITSLAIMSYMGDCKRFSSAKQAAYYAGLVPRVDISGDTVRYGRIINRGCHSIRRVIVQAAWSLVRCQHGGKVKEFYQRLYLKKGAKKSIIATSRKMIEVLYVMIRTGKLFDSMPENILNRKLTQYGLM

SEQ ID NO: 489912 - protein, 350 aa, unidentified
MKKVAYLAIDVHASNCVLGHMDFDGTFLGTRRFPTSERHIIEALKSVKAKEKYLALEESNLAYWAAQVARPYVTEVISSDPRENALIYRSPNKRDKVDTHKLCRLLRLGELNRVYHAENDDRAIFKAAVQHYIDLRDQQVALKNKIKAMYRHWGVIDVAGQAVYGTSRDDYLQRVKHLHIRNQLHRLYCLMDETESMQKKALKAMKQLGRKYPEIKEFEKIPGIGEILSHIFDAFIQTPHRFAHKRKLWRYCRLGVTDRSSDGKPLGFKRLDRSGVSELKAVSYRAWLCALGSDNEVRRFYSRSLRQTSDHVHARLNTQRKILAVMYGMWKRGEAYRPQLFLDSPKMSVV

SEQ ID NO: 489913 - protein, 354 aa, unidentified
MSQTLNTAIAVVGIDIGKNSFHVVGHDERGAIVLRQKWSRGQVEARFANMPPCLVGMEACVGAHHLSRKLKALGHDARLMPAKYVRPYSKGQKNDFRDAEAIAEAVQRPTMKFVATKTADQLDLQALHRVRARLVSQRTGIINQIRAFLLERGVAVRQGLRFLRAELPRVLATPPDVLSPRMVRVIEDLAGDWRRLDERIEVLSSEIEAVARQDAGCERLMTVPGIGPIISSAMVAAIGTGDGFTKGRDFAAWLGLVPKQMSTGDRTILGKISKRGNRYLRVLFVQAAWVVLIKPKSWERHGLKPWIEAAKKRLHRNVLAIALANKLARIAWSVLAHGRNFEARVITHATAQTA

SEQ ID NO: 489914 - protein, 344 aa, unidentified
MSNITTIGLDLAKNVFQVHGTDERGRGVLRKRLPRSRVLAFFANLEVCVVGMEACGSAHYWAREISALGHEVRLMPPQYVKPYVKRGKTDAADAEAIAEAVCHPNMRFVAIKSAEQQAVLLLHRSRELLVRQRTMLINAFRGHLAEFGIVARQGPHHVRELAAVVGDIEDDRLPAIAREVLVTLLDQLRDTADKIDALENRLRVWHKTNAASQRLTTIPGVGLITATALIATAGSADSFRSGRQFAAWLGLTPREYSTGGKPRALGISKRGDGYLRRLLIHGARTVVRHRKTRAESHPKPWLDDLLKRRPKNVATVALANKNARTVWALLARGENYQENHMPVH

SEQ ID NO: 489915 - protein, 341 aa, unidentified
MENCGIDLHQKSSQVTVVDEEGEVLERASIPTTRAGLERWFGRRERMRILVEASGSSPWVVRVLLELGHDVDVIDPRRGRLIAQSTLKTDRIDADILAELARLRTKLRTLVWQRSETTQRQRGHLRVRRALVGARAAFIVTVRGLLRSFGVRVASCRSDRFAARCQATAIPPELAEVMTPLLDAIRDLDARIATMDAVVEQVGQDYPAVKSLQDIPGVGPVVALAYVLSIEDPGRFRRSRDVPGYLGLRPTLRASAATVRQGHITKQGDADVRRLLVQAAHAHLRSHVDTALKSWAESLIPRIGKRKAIVALARKLAVLMHRLWITGEVYQPFPNDVSKAA

SEQ ID NO: 489916 - protein, 345 aa, unidentified
MPMFAALDVSKKETQVHIVDVSGRCVWRGNVPTTPTNIATVLHPYAKQLEKVGLETGSWSSWLYHGLTDLGFDVACMDARQAHAALSVTVNKTDANDAEGLAHLLRTGLFRDVRVKPWCDLRRRALLRARATLVRTVIDLGNAIRSALRLFGFNMAAGSGSGGARAFERRVEQHLAEQPGLAPVVMPLLDAWRAARKQVARYESSIRAEVRADEQCQILMTVPGVGHLNALAFVAAIGDTKAFPSGRTAAAWIGLTPRRYQSGEINMQGRISRHGDKLLRSYLYEAAAHIMTRAKTDSALKRWGTALREKIGFKRANVAVARKLAVTLFAMLRSGKPFEADGVAA

SEQ ID NO: 489917 - protein, 359 aa, unidentified
MSGEQGAERCVVGGVDTHKDLHVAAVVDERDRVLATASFAATRQGYRRMLAWMRSFGAVRRVGVESTGSYGAGLLRFLQQAGIEVLEVTTPDAHDRRRRGKNDDLDAQSAAHAAFAGRRTVTPRSRDGMTEALRVLSACRKTAVAARRVALQVIHNTIVCAPDGLREALRRMTRMQLVRTLAAWRPDLTGYRDVEAAYRIGLKSLARRHLELHDEIADLDAMIGAIVDELAPELVARNSIGRNGAAQLLLTAGDNPERLRSEAGFAALCGVSPVPASSGKTVRHRLNRGGDRAANSALHIIAIGRLRTDARTKDYVARRMAEGHSKLEAIRCLKRYIAREVFTLITQRQRAINQTRIVA

SEQ ID NO: 489918 - protein, 420 aa, unidentified
MEEVTEEPAEMVERVAALDIGKASLVCCVRVPHESRPGARRQEVRTYDTVTPALLELRDWLICQGVTRVVMEATSAYWKPPFYLLEDDTECWVVNARDVKNVPGRPKTDKIDSVWLCKLAERGMLRPSFIPARPQRQLRDLTRYRRTLTQERSREKQRAEKLLEDAQVKLSSVISDIFGASGRDMLAALIAGQRDPYALADLARKSMRAKISVLRRALTGHFTDHHAFLLGMMLDRVDALTGQIDALTARIEDAIAPLAARVAQLDEIPGIGVTTAQEIIAEIGADMSRFPTPGHLVSWAKFAPKARQSAGRSKAAATGKGNPWLGGTIGEAAASAARTSTFLAGRYKRIVKRRGKKRALVAVGNSILTICWHLLSDPGAHFTDLGPDWHDRIAPQRRKHQLIAELERLSGKKVTLNDAA

SEQ ID NO: 489919 - protein, 344 aa, unidentified
MSEVSIIGLDIAKHVFHAHGVDEQGRAIFSKRISRRKLLDFFAAQPSCTVALEACGGAHHWARQLSQLGHDVRLIPPAYVKPFVKRQKNDAIDAEAICEAAQRPNMRFVAVKSEQQQAAGLVFRARDLLVRQRTQLINAILGHLTEYGWIAPEGPAHVAMLGDLLEQEEMASSLPEAARAMFRLMLDLLAGLDGKITDLDTEIARRAREDEVSRRLMTVPGIGPISATAIAALAPPAETFAKGRDFAAWLGLTPLQRSTGGKHKLGSTSKMGERTLRRLLIIGSSAVVQQASKRGAPKGSWLEQMLARKPRMLVTVALANKMARIVWALLVKQENYRAPVAAKA

SEQ ID NO: 489920 - protein, 429 aa, unidentified
MESLIERGCGLDVHQATVVACLLISLAKGKVKKVIRTFGTTTRELLTLRDWLLSEGCTHVAMESTGVYWKPVYALLEGSFEIVVANAQQIKKVPGRKTDVKDAEWIADLLRHGLLRPSFVPPQPIRELRDLLRYRRKLVESQTGERNRLLKLLEGANIKLASVATDVFGVSGQLMLDALLEGTQTPQEMAELAKGRMREKIPQLELALEGRLQEHHRFLLRLQRRRLQQVEKDLAELEQRIFEKLQPYAPQHTLLLEIPGVDRILAAVIIAELGIDMSVFGSASQAASWAGVCPGNDESAGKRRSGRTSPGNIYLKTALVEAANAAARAKGTYLREKFYRLKARRGHKRAAIGIAHKILVAAYHMLSDQVSYNDLGDAYLDKLSKTQLTRSLVRRLDRLGYQVSIRTSVPPVTARTSVNNPWPPIPPAR

SEQ ID NO: 489921 - protein, 393 aa, unidentified
MPSWTVTVKVGPSFTIAASPDGVTTLLRTLAARDATTAQTLIGLEASGHLWENLEAALGGAGYRVLVLNPLQTRRYRDVVRRKAKTDDIDAHVIAGLLRSGAAQASYVPDEQIQSLRELARLRARLLADRQDYQRQLIAQLDVVLPEHRVVLGDLLTARARGILAQFPTAQHLAHASPRAIRRAAEDAGARGFSLDDATGVRDHARRSLYSGKAAVARAHVVRTLVSQLERLTSAMDEVDHAATTLLPPSEPGTSPSDAELLQTIPGIGPQTAATLLGEFGALTRFTDARALVAYVGFYPVISESGDRAAPPRLSRVGPRIARHSLYLAAVNAVRHSREWRTIYLRKKAQGKTAKQALVVVAVKLLHAVYAMLKHREPYNPSRLLVPPATIGT

SEQ ID NO: 489922 - protein, 355 aa, unidentified
MKEVRKINFKNKSIFVGIDVHKTSWKVCIIFEGIEHKFISQAPSAEILGKTLRHTFPGGKYYSVYEAGFCGFSVHEALRVEGINNIVVNPADVPTTDKEKKRKTDRVDCRKLARCLSRGDLHSINIPEKEKQEDRSLVRLRRTMVKDQTRDKNRIKSAISCYGIIISDEKVGSHWSKKYIECLREELENRGSLSTTIDLLLEDMVSKRKRVADVTRKIRELAKNPKYSKKVEILSTIPGVSTLTAMTILTEFGDLKKYNRLDKLVSYVGLTPNESSSGEKENKLSMTKRGNKFLKHVIIESAWTAVRKDPSLMLSYSKYSKHMLKTKAIVKIARKLLSRIRYILLKEEEYKILTA

SEQ ID NO: 489923 - protein, 358 aa, unidentified
MSMQQVPAHRRVVIGVDTHKYVHVAVAITDLGAILESRSFAADSGGYAQLLDWAAGLGGKLTFAIEGTGSYGAGLTSAVRRRDIGVIEVMRTDRRDRRLRGKSDTLDAENAARAVLAGQATAIAKSADGVVEMIRQVKVAKDVAVKARTAAMISLKQVIVNAPTELREELQPLSKMALINRCAGLRPGPVTSIPAATKHTMRAIARRWQQLNTEITAHEKILAQLTSQAAPELSAAFAVGPDTAAEMLIVAGDNPDRVRSEPAFAKLCGVAPIPASSGMTTRHRLNRGGHRQANAALYRVVIVRMQHHEPTKAYLTRRTAEGKTKAEIIRCLKRLLARELWAAMRPLRATRETLPGAA

SEQ ID NO: 489924 - protein, 408 aa, unidentified
MLSLRYSLALFYSFEFEQNVRNTTCLVYPVYPIRRQDEGEFFHFLFKSNIEMNSKTIVRQVAGIDVAQNELVVSLGRRYDDFNLDLYANKVFANNAKGFEAFISWVRKLTQQTTDVIFVMEATGVYHEKFAYFLHGKGFKVSIVLPNKISNYQRTLEVKTITDKTSAAAIARFGLERNLDGWNPPKKIYRRMRQLTREREQIVEERTMVKNQLHAEESEAFPNKATVKRLKEKIKLLDKHEKQVKKELAELIKQDQSVKENIELICSIPGIGMTTAATVLAETNGFELIRNRKQLTSYAGMDVKEKESGTSVRGKAKISKRGNKYLRKALHMPTFCVIKNNERFKAIYQRLVSKHGIKMKAAVAVQRKVLELIYTLYKTGNKYDPEYFKSDQAVKTDQMDTLKKSERS

SEQ ID NO: 489925 - protein, 449 aa, unidentified
MHIRWGAAPRAPVQGTIRHRGGLAAKGSEGVVTEDVEWFAGIDWASQTHQVCLVDAGGKIVGEHGFAHGGAGLAELCSWLLTMTRAAPTAIAVAIEVPHGPIVEVLLERGFQVYAINPKQLDRFRDRFTVAGAKDDRRDAHVLGDSLRTDRHCFRRLSAENANVIELREWSRMSEDLQQERNRLANRVREQLWRYYPQALAISDDLAADWFLQLWAAAPTPATARRLRESTVEGILKRHRIRRITAAEVLASLRQKPLTVALGTAEAASAHIRTVAHRLRLVNRQIKQAHQRLDALSDRIAENEGDSDATGQKSEQRDVAILRSLPGVGRIVLATLLAEASEPLRRRHYHALRTLSGVAPVTRRSGKYCIVVRRQACHMRLRSAVYHWARVATQHDQRSRHRYAELRKRGHSHGRALRSVGDRLLAVACAMLTRRTPFDPDYPVKQMAA

SEQ ID NO: 489926 - protein, 321 aa, unidentified
MEYINYVGIDMAKRDFYACLAEDREPIKFQNNKIGIDMFFKCLGRSNFGKQDTVLGVESTGSYHLPICVASQSAGYAIKVINPLIVKKQNLTTLRRVKNDKKDAALIRYCLNRGNGYEYRASQDDFMLKALVRQRNAISYNKLRIRRQKDDLDYKGNIIKTKINTIYDELYVFLEQKQKQIEKELANYNQPIQKLLQSIPGVGPVTAASFVSEIGEIKKFKHPKHLIAYIGIDPRVHESGTSVRGKGYISKRGNKILRTILFNAASVAVLHNNMFRQYFQRKISEGKPYRVALVATMNKMARVIHAVWTRGTPFENKKTGS

SEQ ID NO: 489927 - protein, 339 aa, unidentified
MFIIGIDPHKRSHTAVAVDRSETVLDTIRVDADRHQRSRLLEWATRFEPRTWAVEGATGMGAMLAQQLVGAGEHVLDVPPKLSARVRLLERGRIDKTDPNDARSAAIVAWRTPALNVVTVNDEHRVVLRLLADRDHQITAQRTRSICRLHALLCVLIEGGTAKSLTVARAEKLLASVHADGPIILERLTMARQLLEEVRTLDAARAEIRRRHVTALEASKTTLTNVFGIGPLTAAIIVGRVGDVRRFPTAGHFARHNGTAPIEASSGPKTRHRLNPRGDRQLNHAIHMAAVTQVRNDTPGRAYYLRKQAEGKSRKEAMRALKRRISDAVYQRLITDAHR

SEQ ID NO: 489928 - protein, 324 aa, unidentified
MKVVFPTCCGVDVHKTFVVATIITTPADSLQPHYQKKRFSTFNSDLNRFADWLLEHNCLDVCMESTGKYWVPVFNILEKRGIRVVIANPKWVKAVKGNKDDTKDSKWIGDLFRIGLVKSSFIPELKIRILREFLRYRYKLVSMKSSEKNRFQNAFTVCNVALDSVVSDMFGKSATAITDYLTSDESFDPEHCVSLLQRSLKKKAEKVLESIEGYSISDEQKARIKIIREHYDFIEKLIAKVDTCVNEMVEKYEGEINLLCTIPGIDRNSAITIISEIGTDMSQFGSSKRLCCWAGLTPGNNESAGKKKSVRISRAGVYLKPALV

SEQ ID NO: 489929 - protein, 351 aa, unidentified
MPHKSTVHAVTAIGIDMGKNTLHMVGLDLRGAIVLREKVSRGRVASRLANLQPCLIGIEAGMATHYVARELAALGHDVKQVPPTYAKPFRQGHKNDFRDAHAVAEAVQRPTTRFVPAKTNEQLDLQALHRVRSRLVSERTAVINQIRGFLLERGIIVRQGLRFLRQQLPDILAKRTDVLSPRMVRIVTDLAGDWRQLDERIETVTDEIETLAKSDDNCRRVMTVPGIGPIISSAMVAAIGSGAAFARGRDYSAWLGLVPKQMSTGDRTILGRISKRGNGYLRTLFMQAARVILLRPANWPKHGFGAWLIRAAQRLHPNVLAAALANKLARIAWTVLAQERSYEARVTKAAA

SEQ ID NO: 489930 - protein, 348 aa, unidentified
MRYRHIHADYYAGIDVHPRRSQVCVMDKTGQIMLNRNFQNSMTHFKKIIQPFQDHIAVGCESTYTYYWLADGCRESDIPFYLGHAYYMKAISGNKQKHDPLDAKTIANLLRTSYFPEAYPYPKEMRPTRDLLRRRHRLVRIRAEAYSHIRMTAHQYAIDDLGGQHLKTKPARDEALSVFSKLGLQHLIASDLDIVESLNPVIDNIEKQIRVSAIYHNPRDFAMLQTVPGIGDMLSMVILYETHDISRFPKHQNYASYSRVVKCDRTSSGKKVDRKNQKIGNPYLKWAFSTVIIKGQSSEAIGKYIQRLEARHGRAKARARIAHKFCKAVYYMLKNGIPFDENKFLQNA

SEQ ID NO: 489931 - protein, 402 aa, unidentified
MYNAVGIDVSKGKSTVAVLQPAGVIIRKPFNVNHTSSELDELAKYIGSLECETRVVLECTGRYHEPVVKNLSEAGLFVSAVNPHLIKNFGNNSIRKVKSDPADAKKIARYTLDNWIELRQYSSMDNTRTQLKTLNSQFSFFMKQKVAAKANLIALLDNTYPGVNKLFNSPVRDDGSEKWVDYAYSFWHVDCVRKIGLKTFTERYQAFCKKHHYNFQPAKPAELFLASKDLIAVFPKEASYKLLIQQSIQQLNLASSHVEELRSKMNELASTLPEYATVMGMYGVGKTFGPQLIAEIGDISNFSHREALTAFAGVDPGVDQSGTHNSKSNKASKCGSNHLRKTLFQIMSTLLQTAPEDDKVYQFLVKKRAEGKPYYVYMTAGANKFLRIYYGKVKECIRNLEQ

SEQ ID NO: 489932 - protein, 348 aa, unidentified
MALTIVETRAITGGVDTHADVHVAAALDPIGGLLGVREFPATAAGYGRLLGWLGGFGTVCLVGIEGTGSYGAGLARHITTAGVRVVEVDRSDRQDRRRQGKSDPLDAVSAARAAQSGRARGASKGRDGAVEAIRALMVAKRSAAGERTQTINQARALVLTGPDDLRARFTGHAAAALVAELASLRPRPGSTVGYATRIALRELGRRAEFLDGQLERLDELIGPLVAARAPGLLALYGIGPNTAALLLIAAGDHPERLRSEAAWAHLCGAAPIPASSGKTVRRRLNPGGDRQANHALWRIVFTRLGSDPATRAYAERRTAEGKSKKEIIRCLKRYVAREVYPHLRATAG

SEQ ID NO: 489933 - protein, 374 aa, unidentified
MENTITYVAMDTHKKRHKIALHYPCQEEIVEFTINNTVRDIKKMVKKITKQAPGEVEFCYEAGVCGFTLKRRIEQFDCRCSVIAPSLVPRKPGERVKTDRRDAKKLLMMFKAGLLTEVHAPNEHQEAARELTRLRETAKENLKRIRHQLLKFLTRHGYVYSNGRHWTQKHITWLRTIEFTESMLTSVFENYFNEMIYCIGRLEALDKEVELLANSKEYKEIVGLLRCFHGIDTLTAITTLTEIFEFGRFESPRYLMSYLGLTPSEDSSGDKQKKGSITKAGNKRIRRLLNETSWHYRHRYVPSTALKKRRKGQPQWAIEIADAAGRRLSKRHRHLVNNGKMPCKANIAVARELAGFIWFVVTQYHARKNTKDAA

SEQ ID NO: 489934 - protein, 342 aa, unidentified
MRTIQQTNTLNLNTATFIGIDAHPSEHTALAINRFEEEKGVLRFDNTKAGMEAFLHWLPTLEPHADKVVIGVEGSGGNGHALVSYLLPLYEHVYEVNPLYTKQRRTLGTRGRKSDPIDAKLVAEVLTRKVWELPKLTLRGLSSQLVSLKKIIWFYEEKTQHGTRLKNQMQRLKREHGLCVNPDEKRILALTIREKHRELQSVKRVQTKLTKEMGMLLQGYGENLTTVPGIGLILAAKLVARIHGIERFGTVSQFLQYAGIAPKEKSSGKVKRHVQNNKGNRHLNSVFYLIALTQTQWNPKAKVYYQKKIAEGKTKKHALRYVMKRVACIVYGMLKSGEAYRA

SEQ ID NO: 489935 - protein, 338 aa, unidentified
MSNLIRIGMDTSKSVFVLHGVDAAEQPVLRRKLRRQQVAAFFAKLAPTRIGVEACGAAHYWGRELALLGHEVKLLPAQRVKPYVARNKNDAADAEAICEAMSRPRMRFVPVKSAEQQAALMLAGLCDQVTRRRTQLSNTIRGHAAEFGLVAAKGHDKIAPLLARIAADATLPMLARELFDLLGEQYAEVSRELRALQDRLLAWHKHNELSRRLAEVPGIGPIGAALLVMKVPDPRAFRCGRNFSAWMGLTPKDHSTAGKQRLGVITRAGDETLRSLLVVGATALIQQARRGRGHPSPWLVELLKRKPPKLAAVALANKTARIAWKLMATGETHKQAAA

SEQ ID NO: 489936 - protein, 342 aa, unidentified
MAITIGIDPHKASHTAVAIDNTECVLDEIRVRASTKQTNQLRTWAAGFPDRVWAIESARGLGYLLAQQLVATGETVVDVPPVLSTRTRLLGSGKAQKNDPNDARSVAIAALRTDGLARVRCDDHAQVLKLLAKRHRDMGRLRGQAACRLHALLMELEPGGMAKRMNVTRANIILDRVVIDTEMTAHRVGVAREFAADIAHCEAQMKTSKARLRRAVAATSTSLTDIRGVGVVTAAMIIGHVGDVARFKSAAHFASYNGTAPIEASSGENRRHRLNPRGNRQLNYAMHVVAITQLRYPCEGRVYYDRKRAEGKSAKEAIRALKRQISNVIYRALLADARRMEN

SEQ ID NO: 489937 - protein, 368 aa, unidentified
MEKGTTYVALDDSKRKIVAGILRPGAPAPELRELPNDPPYIRRLFERLKREGPVAACYEAGVSGYDLYRQITGLGVSCQVMAPALTPRRPGQRIKTDRRDAGKLVHLFRAGELTPIHVPDEAEEAGRDLVRCRDDVRRDVLRWRHRLLKLLDRHGRVYRAGKNWSRGHWTWIRDQRFDLPALQRAFEASLFALEQALARRAELDNEVEALAETAPYRDPVGWLRCFRGIDTLSAMILLVEVVDFQRFERPRQLMAYLGLVPSEYSSGDTQRRGALTKAGNTHVRRALIEAAWHYRHRPTVGHALAARSQGQPREVVGEAWRAQQRLHRRYRHLVGHGKRPPVAVAAVARELVGFLWAAMTQRERQAAA

SEQ ID NO: 489938 - protein, 372 aa, unidentified
MGHHTEAFVGIDTSKLRNAVAIADGGRGSEVRYLGEFPATEAAIRKLVTKLAAKCCHLTFCYEAGPTGYSLYRLLKSLGHDCLVVAPSLVPKKAGDRVKTNRRDAMSLAKLLRAGELTAVWVPDERHEAMRDLSRARQAVKKDLQGKRQQISSLMLRLGRIYPGKTTWGPAHMRWLMEQKLEYREQRIAFEELLEGIRQESERMERLEDAIREVVPEWSLAEVVAALQAMRGIDLIAAVGVLAEIGDLSRFQNPRELMGYLGLVPTEDSTGDKVKRGGITKAGNGRARRILVEAAWSYRYPPRVSRDKQPKVEAAPRRAREIAWKAQTRLCGRFRSLERKGKRRTVIVTAIARELSAFIWAINRELMPVREA

SEQ ID NO: 489939 - protein, 335 aa, unidentified
MQIKHFIGIDVSKDTLDLSLVVQGKCLQHLCIKNRTVEIKSAINKIMKSFGATVDDTIFCMEHTGMYNLPLVKCLQSHHGKMWLESGIHIRKTLGLVRGKNDKVDSIRIAMYAYMNRHQIRLWQAPRKLIERISALLSQRSRLSKAKKQIKTANLEQRLFLDKEIMKSLNKYTYKTVSVINAQIEAIENEILMLIKEDEKLNRMYQIITSVHGIGFVTAVYILVTTNEFININNPKKYACYSGVVPFEHSSGSSVRGKTRVSQMANKNIKSLLHLAALSTIRKQGELHEYYNRKVAEGKNKMSVLNAIRNKLVLRIFACVNQNREYEKNYCYKLV

SEQ ID NO: 489940 - protein, 385 aa, unidentified
MQKLNDLSRSLTPLNPDGTLIAVIEMSQSSWLVAGIVPGIERHPLKKLEPNEGELLRLLMRWRAEATKMGCTITRIAVAYEAGRDGFWLARWLRARDVETYVIHPTSVAVSREHRRAKTDRLDTGLLKRVFIGWLRGEPDHCHMAAIPTLAEEDAKRPNREREGIVRERTRIVNRMKSCLARFGVRNFKPTLRKAPERLATLVTPEGVPLSPNTLLELRRDMARLRFVMDQIKEVEEARAQRLEQAPQEKTHAMVRLLARVIGVGIETADMLVHEILSRSLRDRRAVARYAGLTGAPDESGSKRQEKGLAKAGNARVRRGMIQLAWRFLLFQKDSALAQWYRTRTERGGKKRKTMIVALARKLLIALWRLVTTGEVPAGVVLRAA

SEQ ID NO: 489941 - protein, 463 aa, unidentified
MSKKGPNHKSGKPDKPKVDWKALDLVHPDAAGIDIGGSEHWVAISPDRDEQPVRCFDCFTADLQRMADWLIERGVRSVAMQSTGVYWIPVFEILQQRGLEVFLVNARHTKNLPGRKSDIAECQWLLKLHTFGLLNNSFQPSDEIRTARTLWRHRGGLVVQASSAIQRMQKALIEMNIQLSNVLSDLSGVSGMAIVQAILEGQRDPRALAALADPQVKASKEVIAKSLEGNWRPELVFVLGQEVEMYRICHDKIAACDRQLQKHLRRMAPKVDLEAAPLGPRPKGKRARGNAPKFDLRTELYRITGVDWTQVDGIDVQVAQSVIAEVGADLAAFPSEKHFTNWLGLCPTNETSGGKVLKRRTPKVVNRAKVAFRQAASTLIRSQSYLGAQYRRLRTRLGAPKAITAMARKLACLFYRLLKQGQQYVDKGTEYYEARYHEQQVRFLIKRAGKLGLKVVQPPAQTA

SEQ ID NO: 489942 - protein, 424 aa, unidentified
MENTAARKRKQAPEGYLVIGVDPHKKKHAAVVITQDFTTRAKFKFDNTHEGLEMMLDRARVEMLKSGCRGVIFAIETGGHYWRNIAYYLDERGIPFRFINQYTLKRRREGKDLNRRKNDYRDAEVAAQLLCTGEFVESVIPQGVYAELRTSHNTYQRLVKERTRITNLVKGLLDALFPEFTQVFKDPGGLTALSVLSTCPIPRVIAGMTEDEFVATIEARHKGQRLMRKKLRALHHAAKTSIGIHAGARSLSSEIAFLVDKLELIRRQICIMEGTLVRLVDETEEGKYLLSIRGLNYIAVAGLLAELGCFKLYRSAKQMIKMAGSNPTESESAGKKRSKTPMSKQGRPLLRYCAWTSVIPMLRFNPDFRAWAKQRRERPVHANPLNGREIVGAALNRLLRLSFALVKNQAYYQDVKPALTPVAV

SEQ ID NO: 489943 - protein, 392 aa, unidentified
MVVSVGIDVAKDKHDCFILNSEGEVLADVFTIPNNMDGFNCLLQTICDCTTPQDIIKVGLEATGHYSYNILGFLLDNGLATYVLNPLRTNLYRKSLSLRKTKTDRVDARTIAAMLLSDVGLRPYTDTAYHNEELKSLTRYRFDKVKERAKLKSSVSRLVCILFPELEKLVPTLHGASIYALLEEFPGAVQVAGAHLTRLKSLLSDASRGRYGRDMAVEIRDAARNSIGSRMPAKSLELQHTIRLIRELDAEIEEIEAAIQAIMDELHSPITTIPGVGYRMGAMILAEVGDFSRFESPDKLLAYAGLSPSTYQSGQLKNCYPHMEKRGSRYLRYAIFNATKYVCLWDPTFAAYLAKKRAEGKHYNVAISHAAKKLVRLIFALEKSGQPYCLTA

SEQ ID NO: 489944 - protein, 346 aa, unidentified
MNHIGMDSHITTLEFAVVNEAGRLVKADRVATSVNGLMGFVRTVPRPRTIYMEEGTLAAWALETCVRFGEKLVITDPKKNHWIGSSGQKDDPIDAFKLAQLGRGGYIKEIHHPVGQRRRFRELMIAYHDTVRSTTRIKNKIKARFRQNGIQCAGITVYSEAYREKWKAKLPQETTLLLILEGLWRQLEQTEQAEKELLAAARAQAKHYPEIKHFQAIPGIGFIHAATISAMLETPYRFADKKKVWMYAGLGIMRRSSGGKVYSEKLSTDYNRLLKYTMKQAAGAAINAKDSPFRRKYLDMTLIHGIAPHRAKLTIARDMLATMWAMWRKGEKYNPAIREKAAYKQG

SEQ ID NO: 489945 - protein, 412 aa, unidentified
MEVVYPCCCGLDVHKKSITACVLWAEAKGKSRKEKKRFGTFTHDLLQLADWLAQCGVTHVAMESTGVYWKPVWNVLAEQFEALLVNAQHIKAVPGRKTDQKDSEWIADLLQHGLLRGSFVPPRPTSELRDLTRYRVSLVQEINRIANRIQKVLEDANIKLASVATDALGASGRAILEAMLAGERDSARLAEMAQGKLRNKIPELQLALEGRMTEHHRFLLRQLFDHLRFTESKRSEIEQEIDKRMRPFQDEVIRLCTIPGVDRVTAWGLLAEIGLDMNQFPSSGHLASWACLCPGSFESAGKRLSGKMRKGNVSLRRCLSQAAWAISMMKNNYLSALYRRIAARRGAKRAIMAVAHALLEIAYHMLKRKEDYRELGADHFDRIDVNRIRRSLVRRLERLGHRVTLEPLAQTA

SEQ ID NO: 489946 - protein, 346 aa, unidentified
MKHYAGLDVSVKETSLCIVDETGRICREAKLVSHPDDDLLAALNDPIWRFDRIGLEAGPLSQWLFSGLAEAGLPVICIETRHAKAFLKAQVNKSDRNDARGIAQMMRVGLFRPVHVKTLTSQKRRVLLAGRKLLQEKAIAIENDIRGLLRNFGLKVGIVGVIGFEQRIHELVGGQPELAELMEPLLVARRVLREQFTQLHRKVLLLARESEVCRRLMTIPGVGPVTSLAFISTIDVPARFKSSKAVGPSLGLTPVLNQSGESHRIGRISLCGDEAMRALLYEAAQVMLTRVQKWSWLKAWAMQIAKRRGQQKAIVALARRLAVIMHRMWSDGTEFRWTREATPAAQ

SEQ ID NO: 489947 - protein, 356 aa, unidentified
MDRFIGIDVHKDSCTVAVMGPSGKRIRCEVVETNGAALVEVIRLIPKERRVCIEESGQSDWLREILRPHVSEVVVEGTTEKKDRSQQKNDEKDAWGLAERLRTGTVRNRVFGAPRELSELRDAVRSYGIIVEDLVRTKNRLQAVYRSRGIAVEGEEIYRESKREAQLAKLPEGRRILAELLSRELDAQEKLLREAEERIEAKAQAHPAVARLMTAPGFGLIRAAQVVAIGITPKRFRSLRQFWSYCGLAVVMRTSSDWVRQDGQWVRSDNVSKTRGLTRKRQPMLKAAFKGAATVVVGRMKEHPLTCKYRQLCDAGTKPSLAMLTIARKIAAAVFAMWRNEEAYDPGHRSSQPRPT

SEQ ID NO: 489948 - protein, 466 aa, unidentified
MTPRQTPQGVRNKVFLSDYQKRNLLFKIIGAPTPQYPKARRFLVDKNDDSRLEVFRQMKREIRGSGDYLLVGIDVAKERHDAFFGSAQGKTFLRKLSFETTREGFEKLCLHADAIKMQHGLTRVAFGLEPTADYHKPLGEYLIQKGHTVVLVAGSAVKKNRELLDGRWDKHDAKDAANVADLVGQGKCLFYEFPSPDLRELRSLLSLKRKLKKSEQGYRIRIRNHLIAQYFPEMDSYFTCGEGPAIVEWCLDPRELADLSFEEFVRMVSSRNGGEKQRIRLREIHAKAGTSIGCSAHPSVAFEAKTLLEALRQHHTTILETDKKIAEVCRRFPEYPFLLTIPGFGPDVSAKVLGAIGNPHRFENHRQVLKTAGLDLSADRSGKRTDVTPVISKKGKADLRYGLYQAALIASTRNRHFMTYFTRKLKGREREKGIRMKMRVKLAAKMLIIAWTLMKKKEAFDPGCIE

SEQ ID NO: 489949 - protein, 376 aa, unidentified
MNKVRFVGLDVHADTIAVAVAEPDGEVRALGTIPNRPDSIRRLVKRLGPPDRLRMCYEAGPTGYVLYWQLTGLGVPCDVIAPTLVPTKAGDRVKTDRRDAMKLARSYRAGDLTPVWVPDATHEALRDLVRAREAAKKDQLRARHRLGKFLLRTGRRPPLTMKAWTQQHLRWVKTVQYDHAAQEATLQDYLQEIEHVADRIARLEQAIDEAVKSVPERMRAVIAALQALRGVAQVSAVTMVAELGELSRFASARQLMSYTGIVSSEDSSGTRTRRGAITKTGNAHLRRIVVEAAWAYRHRPGLGAAFHKRQATVSPEIKEIAWKAQHRLHTRYRWLMAKGKHKQQVVTAIGRELLGFIWAIAVKVEAQRSDGQATAA

SEQ ID NO: 489950 - protein, 338 aa, unidentified
MRAYAGIDLHSTNNYIGIINDKDQRLFKKRMPNNLDVILSALEPFQQDLHGIVVESTYNWYWLVDGLQDHGYTIHLANPSAIKQYEGLKHTDDRWDSFWLAHLLRLNILPEGYVYPKEERPVRDLLRRRMMLVRQRATHILSLQSMITRNLGINMSGNAIKRLTGDDAEQLFKDSCLVLAATNNISVMKFLKERIRLIEQSVLPRVKLRKGFAPLLTLPGVGKILGLTIMLEVDNINRFPKVGNYSSYCRCVKSERLSNGKKKGTGNTKNGNKYLSWAYVEAVHHAIRSYPHAKSFYQRKKAQTNGIVAVKALSNKLCRASYYVMRDQVPFDKEKLFR

SEQ ID NO: 489951 - protein, 398 aa, unidentified
MSTVFVGIDVAKEYSTAQGIDNNEKKLFYLRFSMDSKGLTELRNAMSKCSENLDEIAVAMESTGCYHINLYCFLCAEGVRCAIINPLLISKFAQRSLRKTKTDKKDAMTIAQFLLNNEKTLCTAIATQDTQDLKDLARERESLAWMIAALKNDLKRLLQTTFPELETLCKRLYTETMLNFLRQFPSARLIREAKKKDIEKALICPGEDRKRVRINVDDLIAAAGRSVASAGIAKELIVSEKVTTILYLQEHCDKITEALVDACKATRIEDLEIIKSLDGVKNITGSTFLAEMGDLSNFKSYRSLIAFAGLDPSTNQSGKYEGPSRISKRGNRHLRRVIHIMTLCPVRSQNIFREYFLRRKAEGLPPMKALLATSHKLIRAIFSMLTHKMPFKKEVSAV

SEQ ID NO: 489952 - protein, 413 aa, unidentified
MQVLYERCCGLDVHKKTVVACVLITSPDGQVHKQVRTVATTTAGLLALADWLATLQISHVALESTGIYWRPVFNLLEAGHTIILVNAQHMRAVPGRKTDIKDSEWIADLLRHGLLKASFIPPKPTRDLRDLVRYRKTLVQERAQEVNRLQKVLETANIKLSSVVSNVMGKSGQRMVAAMIEGVSDPEALAELARGTLRHKLPQLQQALNGQIEAHHRVLLGRIFAHMSFLEDSIQHLQLEIDQRLSPFTEAMQLLLSIPGIQAITAAAILAEIGCEMARFPSAKHLASWAGVCPGNKQSGGKRLSGKITKGNARLRAALIEVVWNISRMKDNYLSAQYHRLARRLGKLKAAIAVAHSLLVVIYHVLRDKQPYRDLGADYFDSVDKERLTRQALRRLEAMGYAVTLTPKQEEVS

SEQ ID NO: 489953 - protein, 307 aa, unidentified
MTAFVGIDVSKATLEVAVLGEPGARQFANTVRGWRTLSTWLKRRAPARVLLEATGGYEQAALDALHAAGLPMVRVNPRQARDFAKGTGQLAKTDRLDAQVLARMAAAVDVPRYAPREDWRRRLGQWQQRRGHLLQTLVAERQRLEPLDDALLRRAAQRHIAFLERELRALDEGIGQQLEARPELASLRSLRGAGPVLQATLACELPELGHLNGKAIAKLVGVAPLARDSGQWRGRRLIWGGRAGVRSALYMSALTATRFEPTLREFYQRLRDRGKAAKVALVAVMRKMLIILNARMRDALAGSASSA

SEQ ID NO: 489954 - protein, 345 aa, unidentified
MIIGCDFHPSWQQIAWLNTETGETGEQKLVHAAGDAKLFYQQLAAPVLIGMEATGNSQWFLELVQDLGHEIWIGDAAQIRASYVRKQKTDKGDAAHILKLVVESRFPRLWTPDREQRDLRQLVLHRHKLVEIRSRVKNELQHLSLNKGIQRKAKLWSQAGQKLLRELPLKPWAACRREDLLGLLAMLHQQIGKLDQAVQQAADEHPQAQLLMTQPGVGPNTALAFVLTIGDVSRFPRGKQVASYLGLIPREESSGGRQKLGAITKQGNRLVRSLLVEAAQIAVRFDPGMKKQYLHRCHQKPKGVAKVAAARKLAVRLYWMLRTQKPYPEIVRIESSPRVPLVGAS

SEQ ID NO: 489955 - protein, 439 aa, unidentified
MEAKRFIEFEVVHSHCAGIDIGSREIFVCCDGIEVVSFGTFTSDYVKCCNYLKNNGIVSVAMETTGVYWMSLYDLLEQSGIKVCLVHPREVQQVKGRKTDVKDSQWIQRLYSAGLLRESIVAEGILKELRMLVRERGDLIEMGSTYVNKMQKFLELMNIKLKNVVSQIHGESGLKVIKAIISGERDVEKLLRLCHRSIIEKKSESVKKSLEGNYNEYYIALLAENLRLWEEHQRSIKNIDNQISRLLDTMRLPNKDIEVKTPSSPARHHNPQIKGLHQKVVQINNGTDLSAIAGINDSTMLRLLGEIGIDMSRFPTVKHFISWLGLSPRNKQSGMMKRRIKVKEKNHAGLIFRQSAQSLLTSKKNAIGAFMRRLRARKEAPVVIKAGARKIAIAVYNALTFGLDYIEQGCKRYAEILALREKQHLLRLAKKLNLQIIEC

SEQ ID NO: 489956 - protein, 423 aa, unidentified
MTKYLSTPTNAVLVAIDMSKHRQEVLIERPEGGRRRRMTVMATKDDYDRLVEELTSMARPVVIGFEATGNYHRTLAYKLLLAGFQLRLISSVALARTREALHNGWDKNDPKDAQVILHMLRIGATQVYVDPLEAGINDLQELSKTHEVISKAKTQTWHRILNHYLPLYFPEIAHFAGNSRSDWFLALIERFPSPTSITSLGREAFVAEAWALVGRKVSKARLINDIYETACSSVALPIAEDAVAISMFRMIIGQGRSLIRERNRIEQIAQSLLADHQDYQLLCKIPGIGPINALTILAEAGDLRRFRHHRQFLKFCGLDLATSQSGTFRGRTKLSKYGNARLRRTFWMAAQVASRQRDNSFRDKLGRYMAGNANDADRRRKAMTALTAKMARVAHAVIKTQTEYRPFVERPETRWKDPSLQVP

SEQ ID NO: 489957 - protein, 313 aa, unidentified
MAQIVPTVGIDVSKDRLDVAVHPIDEQFSVSNDATGWRRLVRRLKPLMVRAIGIEASGGYERGVIGALLDAGLPVRSVNPWKLRLFAKAGGVLAKNDRLDARAIACFVATLPSREVRRDPAVEHLAELVHARRQLVDALQQTGNQSEQLRDAGLRRLQARRIRQLERDVAQLDRLIADAIAASPSLAARRDLLCSMPGVGPVLAATLLALLPELGSLANRSVAALVGVVPYDFDSGRMKGLRHIFGGRAAVRRVLFMAAQVAAMHNPTLKTFKQRLQAAGKKPKVAIVAVMRKLIVILNAMVRDQTPWRMAPV

SEQ ID NO: 489958 - protein, 343 aa, unidentified
MHTITTIGLDIAKSVFQVHGVDAEGNVVIRRQLKRRYVLAFFEKLLPCLVGIEACASSHHWSRELKALGHTVRLMPPAYVKPYVKRQKNDAADAEAICEAVTRANMRFVATKTPEQQSCLTLHRTRHLFIRQQTAVINSIRAHLAEFGIVASVGRKGVEELLDIVANPSDKRVPEIARACLAALGAQLHRLKEQILEFDRMIMAWHRSSEASKRLDAIPGVGPVLATALVASIADPKVFRSGRNFSAWIGLVPKQHSSGGKERLGSISKQGDRYLRSLFMAGALAVIRYAKIHGSKHRPWLTALLARRPTKVAAIALANKIARMVWAMMARGERYRAPVALAA

SEQ ID NO: 489959 - protein, 370 aa, unidentified
MIVIGADTHKRTHALAAVDAGTGRVRGKREIKAEEPGHLAAVRWARGLDEERVWAIEDCRAVSRRLEQALLAAGERVVRVAPHRMGASRKGERRPGKSDEIDALAIARAVVADGIEKFPAAHLDERAMEIRLLLDHRGDLVADRTRTVNRLRWHLLQLCPELERAIKPGAFNQARVLDRVDRRLRKLAAGARARVAREQVAHLRQLNRQIDQLKRELHELVRAHRPQLLAETGCGPLVAAILIGRTAGAEGFRTDASFALQSGTAPIPCSSGQRTQHRLNRGGDRQLNHALHIIAITRAHHDPDTRAYLERKETEGKTKKGALRCLKRHLARRFHRLLSPPAQARPQPHDASRSDTTTVGAAPMPMICLT

SEQ ID NO: 489960 - protein, 400 aa, unidentified
MIDTSSIDVYLGLDVGKGEHHATALTPAGNKTFDRRLPNSEPKLREVFTKLQAKHGTVLVIVDQVASIGALPLTVARDLGCHIAYMPGLTMRRIADLYPGEAKTDARDAFIIADAARAMPHTLRSVDLDDDTIAELQMIVGFDDDLAAEANRLANRLRGLFAQIHPHLERVIGPRIQHPAVLRLLDQFGSPAQIRKAGRRQLITLIRPKAPRMAERLVEDIFTALDEQTVVVPGTNAATLIVPSLAGSLQAVLDQRKLLAHRIEQLLEAHPLSEVLMSMPGIGIRTGARILIDVGDGTSFPSAAHLAAYAGLAPATRSSGSSIRGEHPSRRGNKQLKRAFFLSAFAALADPASRTYYDKKISQGKHHTQALLCLARRRADVLFAMLRDGTYYQPPTPIAP

SEQ ID NO: 489961 - protein, 368 aa, unidentified
MGKSITYVGLDVHKKTIAVAFADEGDSEVRPYGVIDSELSSLDKIVRKLVSRGGEPRFVYEAGPCGYGIYRHLKQQNIKCMVAAPSLIPKKSGDRIKNDRRDAKKLARLYRSGELTAVHVPNSEDEAMRDLTRAREDSKNAERKARQQLGAFLLRHGLIYSGKCHWSLAHWRWISDIKMEHEAQQFTLQEYVDTVRSCSERVERVTEKIRLLAGQWRFGAVVEALQALKGVCLVVAATVIAEIGDLSRFDNPRDLMAFLGLIPTQHSSGDNIKLGRITKTGNGHARRMLIQAAWSYRLPARVSRRLRDRQEKLPEKIWKIAWKAQVRLCTRYRRLIARGKPTQVTTTAIARELAAFMWAIFQTVEVYA

SEQ ID NO: 489962 - protein, 309 aa, unidentified
MDAKFHGVDVSKDKLDIACNGTVIEIENTKKAIKSFAEKMPAEAFVALEATNTYHLRMADICHSYGMHVYVINPRLTRRYREANGLRGHNDRMDALTLARYIEREHEGLREYVPLSADQRRLRTLVRRRFKLVGMRTQAAESLGSVKELGREFKALLAQMDALIAKLELLIDKQLEGNTGRTRIATIKGVGPVVSAVLVADLDAYEFASADAFVAYYGLDPMPNDSGRRRGERRLSKQGQDLGRTMLYNAAMSAVTSKVWKPLYERCQERGLEKVQALIVVARKIARCAWSIHKHNTIFSPERAYRHLT

SEQ ID NO: 489963 - protein, 321 aa, unidentified
MADASRWIGIDVSKRCLDVCVRPDMQQFQEANTEKGIASLVKRVRELEPALVVLEATAGMEAMVAAELAAEHVPVAVNPRQVRSFARATGKLAKTDSIDASVLAHFADAVRPQVRPLPDMHAKQFSELVGRRRQLVEMIVAEKARLAGICGVALADIKAHIAWLGKRLKRLDRELESAVANSPIWQAKSELLKSVPGVGDVLSLTLIAGLPELGTLSGKQIANLVGVAPINRDSGSMRGRQSIWGGRAQVRCVLYMATLVAVRHNPIIKTFYERLRAHGKPPKVALTASMRKLLVILNAIAKTKQPWSVQRNILGGAVEAG

SEQ ID NO: 489964 - protein, 377 aa, unidentified
MKKNIRFIGLDVHAETIAVAVAEANGEARSLGVIPNRAEAVRRLVKKLGPAESLQVCYEAGPCGYVLYWQLSELGVHCDVVAPTLVPVKSGDRIKTDRRDALKLAHNHRSGDLTPVWVPDAEHEALRDLVRAREAAKKDQLRARHRLQKLLLRRGLRSPEGIRAWTVRYLTWVKTLQLEPAALAATLLDYIAEVDHAHERIERLERAIDQAIEAAPDPIRAVIEGLESLRGVARISAATIVAELGQLSRFARAKQLMGYAGVVSSEHSSGERIRRGAITKTGNAHLRCILVEAAWAYRHRPYLGGELRRRQKNASERVKEISWKAQHRLHSRYARLMGRGKTKQLAMTAVARELAGFVWAVGVEVERQLALRPARAA

SEQ ID NO: 489965 - protein, 362 aa, unidentified
MKKHSNSVKKSESRMKRRNPRAEQRRDSSEVMAELVSQLRQQLEEKSVPAAESAVEERDAVGPNLDRLTVGVDLGDQWSNYCILGLGGETLREGQFRTRRQEVEEFFQGLAVSRVVIEVGTHSAWVRELIAGLGHEVLVANAQRMEGRKRRRRKNDRIDAVKLARLGRVDPKSLYPIQHRSTEVREDLLVIRVRDSLVESRTKLISTVRGMVKTMGARVQGCSSVSFSAKAAEQIPAEVRETLEPLLRLIQTLSEEIKSYEKRIEKLGSEKYMDTKLLRQVNGVGPVTSLAYVLTLETPQRFKRSRDVGPYLGLVPQQEDSGDSQPQLGISKAGDRMLRKLLVGSAHYILGPFGPDTHFFMF

SEQ ID NO: 489966 - protein, 334 aa, unidentified
MENIALIGIDLGKNSFHIHCQDHRGKAVYRKKFTRPKLIEFLATCPATTIAMEACGGSHFMARKLAELGHFPKLISPQFVRPFVKSNKNDFVDAEAICEAASRPSMRFVQPRTESQQAMRALHRVRESLVQDKVKTTNQMHAFLLEFGISVPRGAAVISRLSTLLEDSSLPLYLSQLLLKLQQHYHYLVEQIKDLESQLKRKLDEDEVGQRLLSIPCVGTLTASTISTEIGDGKQYASSRDFAAATGLGTPQYSTGGRTTLLGISKRGNKKIRTLLVQCARVFIQKLEHQSGKLADWVRELLCRKSNFVVTCALANKLARIAWALTARQQTYEA

SEQ ID NO: 489967 - protein, 343 aa, unidentified
MKLIRVGIDLAKNVFQVHGVDRNEKAVWRRKLTREHWLKTLLETVVPGCEIGMEACGGAHHWARKLQAHGCKVRLIAPQFVKPYVKSNKNDANDAEAICEAMSRPHMRFVAVKTVAQQDIQAVHRIRGELTKQRTAKANQIRGLVAEYGLVAPKELMHLRRALPCWLEDAENGLSQRFRRLLNGLWSDLRALDARMTELDREIAVIAQSDSVAKRLQQLRGVGPITATALVAAVGNGEQFANGRQMSAAFGLTPRQHSSGGKEQLLGISKRGDPYLRVLLIHGARSVIRTSKNKDDRLSQWVTRLAARSHPNIAAAALANKTTRMAWAMLKNGTDYQPVMATS

SEQ ID NO: 489968 - protein, 388 aa, unidentified
MHAVTDQSHAPSAIRTDLGAIFVSMELSQATWLITSLSPGGGDKMSKHSVPAGDIAGLLARFSLLQDKARARTGQHFPMVVIQEAGLDGFWIHRVLQAEGIESHVVDPASIATSHRRRRAKTDRIDGEALVRALLAYKRGEPRVCAMVKAPTPEEEDRRRICRERKVLIAERVCHVNRIKGLLFCQGITDYEPLRRNRRERLEELQTGDGQPLPEHLKAQVVRELDRLELLLQIKVVEVERDALVKPNPGAVTPTPGAMLQNIKGIGPEFAAILWLEGLFRHFDNRRQVAAYAGLAPTPWQSGSIDREQGVSKAGNPRLRTTLIQLAWLWLRHQPDSALSRWFQERVERNGGRLRKTAIVALARKLLIALWKYVTAGVVIEGAIIKAV

SEQ ID NO: 489969 - protein, 416 aa, unidentified
MEKKNRHIEFEQVIERGCGIDIHKMVLVATIRGIGIKEETRTFDGFTESIEGLRDWLKENSVTHVAMESTGVYWKPVYNILESDFEILLVNARHIKNVPGQKTDKKDSKWITKLLLSGLLKGSFIPPKPIRELRDLTRYKRKVIEQISSEKNRIHKLLEDANIKLSSVVSNLSGATATKIIDAMIGGEENIEELVKYRHGKMQSSVEDLASSLKGNLTDHHRFMLQTVKESIKSKEQIIFKLQEQIDKQLKENELMLDAELLATIPGVGKDGAAYIIAEIGNNMDQFPSEQHLASWAGMSPGSNESAGKKKSTRITHGDKYLKVLLVQFAWAATRTKGTYLRSKYDSLVGRRGKKRALIAVGHKILVAAYFILKDKVAYKELGAEYLQELKKGKQIKRHIQLLKELGVDIEIKKVA

SEQ ID NO: 489970 - protein, 334 aa, unidentified
MKELKSCVGIDISKDSFEVCIKQLRDERVVIKATHSFKNEFTGFENLLNWTLRKVLNPIFVMETTGVYHEDLTHYLYSNNQKVSVVLANKMKHFAKSLNLKTKTDKADAQMIAQYGLERQLEWWQPMMPQMKNLRDLSRERLSLKKDLVRCKCQVHALRHAHSTLDVVLQLKEQQIEFLEKNIQVIENEMIRITKEDKEFSQRVKNIEMVKGLRLLTIVTVLCETNGFAQFNNIRQVVSYAGLDIAERQSGLFKGKTRISKKGNARIRECLYMPALSAPSYNEPIKALYQRVVERNPTIKRKGVVAAMRKLLILIFVLWKKNEAYNAQYQWDAR

SEQ ID NO: 489971 - protein, 315 aa, unidentified
MQTNADGLYIGIDVSKTHLDIDGYPESHRAQFSNDAAGHLNLASKLQSLQPRWIVVEATGGLEMEMVSVLASAGLPVAVINPRQARDFAKAIGVLAKTDQVDALVLARFGEAVKPALRPVKDGELRQLEDVLTRRRQLVEMVTAEQNRKLQASPLIAKEIDEHIDWLKQRIKGADGDLGRAIKASPLWHAKANLLASIPGVGAVTVTTMLAELPELGTLNRREISALVGVCPYNRDSGKTRGRRRIWGGRACVRSVLYMAALVGVRYNPTLKAIYERLLAAGKMKKVAIVACMRKLLVTMNAMLRDGTSWTATVY

SEQ ID NO: 489972 - protein, 372 aa, unidentified
MRQDSKIYVGLDTSKLKISVAVAEAGRDGDVRFIGEIDSAPDAMERLVTKLAKRHRYLAFCYEAGPTGYGLHRQITRLGHDCIVVAPSLIPKRPGERVKTNRRDALTLAKLHRAGELTAVWVPDPEHEAVRELVRAREAAMEDLRRARQHLHSFLLRHGRVFTGRQAWTKAHTRWLCEQRFEHPAQYLVLAEYREAIEAAEIRPKRLDEQVAAAVSSWSMAPVIAAYQALRGVALLTAVTFVTEIGDRRRFDSPRQLMAYLGLVPCENSTGERVRRGSITKAGNGRARRVLIEGAWTYRFPARMSRLLQERQAGLTKAVRDIAWKAQVRLCARYRKLMARGKRQAVVTAAIAREMAAFLWAIGREVEPHSAT

SEQ ID NO: 489973 - protein, 355 aa, unidentified
MDNTKYIGMDVHQATISIAVLNSSGKLVMESVIETKAITIVQFVRGLRGDLHVTLEEGTWAAWLYDLLKPHVREVLVCDPRKNALLKTGNKSDRIDARKLAELLRGGQLSPVYHGEHGVRTLKELSRSYLAISGDLARVMTRLKAVYRSWAIACAGKQVYAPRYRAQWLGKISEAGVRRRAEFYYQQLDELSALRQQVRREMLAESAKHQASKLLCQIPSIGPIRAALLIAILQTPHRFRTKRQLWAYGGLAIETHSSADHRYVEGQLQPAKRQVSLRGLNRDHNHELKNIFKGAAIIAATKAGPFQEFYAALVAKGIRPEMARLTLARKIAAIALLVWKKGVSFDAQHLKSQTA

SEQ ID NO: 489974 - protein, 343 aa, unidentified
MKIKRIGVDLAKNVFQVHGVDRDEKPVWRRKLSRDKWVDALLKKIEPGCEIGMEACGGAHHWARLLQAKGFVVKLIAPQFVKPYVKSNKNDANDAEAICEAMSRPNMRFVQIKTVAQQDIQAVHRVRAELMVQRKSKANQVRGLTSEYGIVAPKEWRHLRRAIPCWLEDADNGLSSRFRGLLHGLWQDLLTLDERVAELDREIASIATTDPVAKRLQQLRGVGPMIATALLATVGDASQFANGRQMAASLGLTPKQNSSGGKDRLLGISKRGDAYMRSLLIHGARAVIRTAKAKDDRLSQWVTRIATNRHPNVAAVALANKTARIAWAMMKNETDYQPALAAG

SEQ ID NO: 489975 - protein, 367 aa, unidentified
MSQHFRFDSSRSLTALEQDSTIIAVIELSQTKWLVAGLVPGVERQPLKKFDAHEEVLLKLLHRWRREASQAGRNIKRIVVAFEAGRDGFWLARWLRARDVEAYVIHPTSIAVSREHRRAKTDRLDTELLMRVFLGWLRGEKRHCSMVAIPTMEEEDARRPNREHQNLVTEQTRIVNQIKAIFTRFGIRTLRPTMRKLAEGLEDLRTAEGTPLPQNTLSELRRHLARLRFVRDQIRAVEQERLRKLAEAPAAEKKSPDSMVRLIARVLGVGVETADMLVNEIFLRHLHDRKAVARYAGLTGSPDESGSRRRERGLARASNVRVRSGMIQLAWRFVRFQKEQHPGPMVRGANHRRTRRHTQDDDRRAGA

SEQ ID NO: 489976 - protein, 404 aa, unidentified
MKASVARNDARFCGMDVAKNKHVACIIDREGKLIVRSLSFTNDAEGFQRILDRLKEIGGPSKVAIAMEATGHYWYSLHDFLARHRYTVVVLNPIQTAKQVTKGIRKSQTDKIDAHHIAVLLKNGEHRPALIPGELGMTCRQLTRLHHTMVRQASRIKQLLWSKLHPVWPEYEALFATPFCKTGRVLLNTAPTPQDVLAMPREDLLNLIHKTSRGKYSTAQADKVRQAAENSVGMHRGVEAARASIRLLLAQLDALKPIREQLESQIQALMGRLPDYLATLPGASPLSIVSLFGETDPFEAFTSPSKLIAFAGLDLVVRQSGEYEASRRHISKRGSPFLRHTLWAMAHRACYQEGDLRDYWLRRKGQGLKHLAAVTAVAIKLCPIVWRIMTDRRNYLPQPPVTKP

SEQ ID NO: 489977 - protein, 425 aa, unidentified
MTPEPNPEFAAFIGIDWADAKHDICLQAAGSRQREFAVLAHRPDAIDEWAAALRQRFHGQAVAVCLEIARGPLVYALQKHDFFVLFPVNPATLAKYRQAFQPSHAKADPADAQIALEILLCHRDKLKALQPQSVGICTLERLLEERREFVDEQTRITNRLTSALKEYFPLANAWFDEKASALFCDFLSHWPSLKQLQRARRTTLLTFFREHHCYQPRLIEERLAALQRATPLTDDAAVIKPKALMVEGLVDQLRVTLKAIARFDAEIEAVAPTLPDYALFRALPGAGPNLAPRLLVAFGERRERFASAADVQMFVGVAPVTESSGKQHWVHWRLQCPTFLRQTFVEWAAQTITRSFWAGAYYRQQRAKGCAHQTAVRALAFKWIRILFRCWQLRTPYDESSYLNALQRRGSPLLASLALPSPATH

SEQ ID NO: 489978 - protein, 348 aa, unidentified
MAMPIVEASRPVTGGIDTHLDAHVAAVVDVNGGVLAVESFPTTTAGFAELHDWLVGFGEMERVGVEGTGAYGAGLARHLRGCGLEVIEVDRPNRQARRRAGKSDPADAIEAARAVVAGRASGIAKTGDGPIEAMRSLLIAKRSGREARITCLNQLRHLGFCGPDDLREAFRGVPRKALAARAAGLRPRAGSDDVTYATKLAMRTLGRRVLAIEADNTELDTLLADLVETTAAGLLAVQGVGVDTAAILLVAAGDNPERIRSEAAWAHLCGVAPLPASSGKVTRHRLNRGGNRQANHALWRIVFTRLAADPRTRTYVERRLNEGRSKPEITRVLKRYVAREVYRHLPRA

SEQ ID NO: 489979 - protein, 345 aa, unidentified
MTQYRRIAIDTSKAVFTLHGIDQQDRPVLRINLRRAQLIPFFAKLPATEIAMEACGGAHHWARELIALGHEVRLIPPQYVKPYVKRGKNDRNDAAAICEAAGRPGMHFVPVKSVTQQAQGMVLKVRETLVGQRTLLANTLRGHAAEFGVIAGKGPSKIAPLLAAIEQASNIPAEAKNMAILLGQQIADLDVKIKEIDVKLVAAHKANAVSQRLATIPGVGPVTALTLAIEIDPGAFESGRHLAAWAGLTPQEHSTAGKQRIGGISRAGNERIRVLLVTGATSVIKAAMKPGSQQMTEWLRALLQRKPRKVVAVALANKMARIAWALMTRGEVYRRPDATTGATAA

SEQ ID NO: 489980 - protein, 374 aa, unidentified
MKNFSKYVGLDTHKDTIAVAIADACGGKPRFYGEIENTREAIHKLVKSISPHGEVVKFCYEAGPCGYGIYRQIESLGHICTVVAPSLIPSKPGDRVKTDRRDSEKLSSLDRAEELTAVWVPGKEQEAMRDLTRAREDMKEFERIAKQRLKAFLLRHGQVYDTGRCSWTQTYFRWLEKIKFDIPVQQIVFQEYIEAVKQAQAREQSLVKEMEKALKDWDLTPIVEALMSLRGVKLVAAMTILAELGDITRFESPSQLMKFLGLVPSENSSGSKTCRGGITRAGNSHVRRVLIESSWCYRFPARKTAYLQRYAEKCSTEVQDIAWKTQKRLCSRYQHLMQRGKLKVQVCTAIARELVGFIWAIACEVTGKTIISAR

SEQ ID NO: 489981 - protein, 320 aa, unidentified
MQFVGIDIAKKKFDLALLREGKIRNKVFENTPKGHKSLVKWLTRQSCNPESTHVCMEATSQYYEGVAEFLWESGFRVSVINPLQIKAFGESRLSRQKTDKADAALIAYFGQQQSPALWEPPPAEVKELQRLVARLEAVQKMRVKEQTRRHESQGEALESIDRVLALLTEEQTKLEQRIRDHIDQHPDLRRQQKLLTSIPGIGERVSSYFLAWLQIARFTDVRQVVAFIGLSPRHNQSGSSVYGKSRLCKVGNARLRRILYMPALSAMRYNQAAKSFADRLKAGGKNGKLVVGAVMRKLVHWMFGVLKSGQPFNVKLAIAK

SEQ ID NO: 489982 - protein, 343 aa, unidentified
MQAVTTIGLDIAKSVFQVHGVDAHGNVVVRRQLKRRYVLPFFKKLPSCLVGVEACATSHHWSRELQVLGHTVRLMPPAYVKPYLKRQKNDAADAEAICEAVLRPSMRFVATKTPEQQSCLMLHRTRHLFIRQQTAVINAIRAHLAEFGIVAPVGRNGVEELLDVVADPDDDRVPELARECLAALGAQLRMLKAQVLEFDRRILAWHRSNETSKRLDEIPGVGPALATALVASIANPRAFRSGRDFSAWVGLVPKQNSSGGKERLGSITKRGDRYLRSLFTAGALAVIRYAKIHGTKHRPWLTALLARRPTKVPAIALANKIARMAWAMMAKGERYREPVALAA

SEQ ID NO: 489983 - protein, 342 aa, unidentified
MQVSTIGVDLAKNVFQVHGVDSAGKVVITRQLRRKQVIDFFSKIPPCLVGMEACGTAHHWAREVSKLGHTVRLMPPSYVKGYVKRSKNDAADAAAICEAVTRPSMRFVPIKSADQQALLMLHRTRDLLIRQRTQLINALRAHLAEFGLVAETGREGLAQLAAIITDESNREALPSAMKQALQAIVDQLAALELQIGTLDRAIHAHHRANDMSCRLETVPGIGVIGATAIASTVTDARDFKTGRDFAAWIGLVPRQHSTGGKERLGGISKQGDRYLRRLLVIGATAVVRHARQHPQKHPWIMRLLAKKPAKLVAVAVANKMARIAWAIMAKGGYYRAPELAAA

SEQ ID NO: 489984 - protein, 367 aa, unidentified
MKEVTTYVGIDAHKKDLFVAMIGTDALPVTWTIANEPNAVRRLMRKLERDAPGPVEVCYEAGPGGYALQRQMTTTRVRCQVIAPALVPRKPGDRIKTNRRDARKLVELLRAGLLTAVRPPTPEEEAVRDLCRARDDARVDLQRGQHRLSKLLLRRGLHYAGRNWTRVHRQWLASLTWTHAAERAVIDDYLLAIDHTEARLRELDARLAEVAAQDPYRAPVGWLWCFRGIDTLTAMLILAELHDFRRFASAAALMAYLGLVPSEASTGEKHRRGRITRTGNALVRRLLVEAAWHYQHRTGIGVALARRRKGQPGRVIAIADKAQQRLCRRFRTLAAVHKPAPKIAVAIARELAGFVWAALQPVTVPAR

SEQ ID NO: 489985 - protein, 360 aa, unidentified
MNTVTWVGMDVHARSTHAAAINLFSGEIERMRFGAGVQAPVAWLSELPGPVHACYEAGPTGYGLYRAAVAAGLRMDVIAPGKTPRGRSDRVKTDRKDAELLARLLLAGQLATVKVPPAEVEAARELTRLHDQCRRDLMSTRQRLSKMLLRHGRVYPEATTWSQKHRHWLGTQHFDEAMSELVYLNLLAQVDALTSRKLQTAAQIAELATDERWWPTVARLRCFRAVDTLTALSIHLELGADWARFEKAQNLGAWLGLTPSLNQSGESKSQGSITKTGSTLARRLLVESALHYGPKPAVGATLKARQDGQPEQVLQIANKAQHRLHHVYHQMKARGKAHHVVTVAVARELSCFLWTAATID

SEQ ID NO: 489986 - protein, 389 aa, unidentified
MYIIYIVVDATRNINRDRYASQKTGGQTMNNNSTGVYLGMDVSEKSIELFALSADNKTESKGKIVNNPAKIKAFLAGLKNTSKLTVALETGTHSPWLSKMLEEHDCKVLVGHARKLRAIWGDDHKCDQRDAEMLARIARMYPKLLHPIKHVSQEVRAEQAVIKARDVLVKTSTMLINHLRGTLRSFGISTSEIPTTSMHSKLMPLVPKELRPALRGVVKQLKEVRMQIKEYDKKLTELCKKHQETKILQQLNGVGPVTAITFALIIADPRRFSGAGRVGSYLGLTPKRDQSGEVDKQLGITKSGNGMLRKHLVKSANYIMGPFGIDCELRRYGERIAAKGGKIARRKAKVAVARKLAVTMWRLWIDEAEYDPFFKEHQRQKKKAARVAA

SEQ ID NO: 489987 - protein, 359 aa, unidentified
MSKRSRRSRNWQVLKTETGDRVVIGLDVHKKSIHAAIRVNGVETDTSVMPSAPETVVAAFVGLRGTPHKIVYEAGPTGFRLARALREAQLCVDVIAPGKVPQPANRGNKSDRIDCRKLALYAEKDLLSAVAIPSEDEEASRQITRLREQVIKKIRRVKQQIKSLLLQHAIAEPPGLAQWSLAGVAALRKCRVREELRFVIDTLLGELETLTKALRRTEQRMRRMARQRRYRVGEELLRSHPGVGPITAMTFLTEVYRPERFDEKSELTSYCGLAPRVCQTGESRQEGPLIKGGRKGLRRLLVEAAWVWIARDPAAMACYRRLVFNTGKSQKAIIGMARRLAIHLWCMVTRGEVYCARTA

SEQ ID NO: 489988 - protein, 430 aa, unidentified
MKSTQNKKIEQVKETTMIVGVDVGSEKHYFRAFNWRGIELTRKPIPFSNSMAGFDMFHSAVIELMENNHLEEALVGFEPTGHYWFNLGQFLSGKNIKFVMVNPHHVHKTKELDDNSPSKNDRKDPHIIANLVKDGRYFYTYMPTGVYAELRNASNRRFVLMEEHTRAKNRLQKWIAVYFPEYKGVYTHIDAKGGLMVLKKAATPDDIVKRGVDGIQQIWKDAKLRGSGFKKAMQIVTAATNSIGLKEGLEEAKMELLDLIEDYELQTKRIERVNDLIKNLCSQIRYVDKLLEIKGIGITTVAGFIAEVGDITRFGNAKELQKLAGLELVSADSGKHNGRTKISKRGRKRLRYLLVQAAVSVIGKNDEFKEIHQYYTTRDNNPLKKMQSLIAVACKLIRVFHVILTKGVDYDASKMLGDIRHPGAADRKVA

SEQ ID NO: 489989 - protein, 322 aa, unidentified
MTENTKVHVGIDVSKAHLDVSVGPHQASWQVENNLAGIGELVQKLSEVRPALIVLEATGGYEMAAAGALALAKLPVAVVNPRQVRDFAKSLGRLAKTDRIDALVLARFGEAVQPEPRALADAQTQQLQAILGRRRQLIEMLVAENNRLHLVHKDVLVNLKDHIAWLEQSLDNLDKDLQDLLKNSPIWHEKDDLLRSVPGVGRVLSTTLLAELPELGTLNRKKIAALVGVAPYNCDSGKMHGKRAIWGGRASIRSVLYMATLSATRCNPVIRAFYERLIQAGKEAKVALVACMRKLLTILNAMMRNQKHWESALAITKTRATP

SEQ ID NO: 489990 - protein, 400 aa, unidentified
MRTVFGIDVSKASSEVAILVNGERVHGYTMSNDIIGFSRLQKDLKTVRNPEIIFEATGVYSRRLQAFLEENSYDYTRLNPLEAKKQLDGLRVRKTDKIDAEKLASSQFVLNRKPTYVQEEVYQNLHDLSRFYQNLTEDIVRTKNRLHKVLQVAFPEIENLLSTPTGEQYWNLVSIFPTKHWVLELSEVELKETIRNSTSKRISENRVGNLAEKLVGLAKQSYSAISKTSPIIEEVKYNAQELIRLTNRRKQVLEQLIELAEPLPEYEILLSIPGIAETTATSIIGELGDIRRFKSANQINAFIGIDLKHYESGDFLAQEHITKRGNPYARKILYKCIHNIASASHTNPCHIADFYEKRKRQSQTTSTKPHTIASIHRLIRTMYYLIMHNKLYDYTLAQSH

SEQ ID NO: 489991 - protein, 340 aa, unidentified
MTITTIGLDLAKSVFQAHGVDETGATVLTKRLHRKQMLPFFSKLPPCQIAMEACGTAHYWARTLAAMGHVVRLIPPSYVKAYVKRGKSDALDAEAICEAMQRPTMRFVPVKTVEQQSILMVHRARSLLVRQRTMLANALRAHLAELGLVANPGIANLAKLAQQALSDENGLPSSARTTLEALVRQIKALSEEITALDRKLLAWHAENEASRRLAAIPGVGIVTATAIAATVTDPDQFRSGRQFAAWLGLTPQQHSTGGRTQLGGISKRGDRYLRRLLVVGATAVIRHTKDKPTPMANWIRKLMAKKPFRIVSVALANKLARIAWVVLTRKEAYRPYQLAA

SEQ ID NO: 489992 - protein, 453 aa, unidentified
MKEKNQISMEIINPKAAGIDIGSRSHFVAIGQREQDVKEFGVYNEDLKSISNWLKENEIQTVAMESTGTYWQALYAVLLNDGFQVMLCNGKFTKNIKGRKTDVQDCQWIQKLHSIGLLSGSFLPDLQTEQLRTYCRHRASLIDVAADTSKKMQKYLRLLNLRLDVIVKDTCGLTGLKIIEAICNGETNPEKLAELRNGNCKKSEEEMAKALQTNGRKDYLFGLKQEYKMYKNLQNQIKECDVEIEKLLQQQIDNDHNKKQHYTDPKIHKRINKNTPKNIDLNLIGYQYFEGVDLLKIEGFSHQTLLTLMSEVGLEGIKKFGTAKQFASWLRLTPNNKISGGKVLSSRVPKGSNRLKIALRNAANAIGNLKESTPLRDFFHRINFRKGRVSAISATARKLGVIIWNMVVKNIPYHNPENYLYLDQKRKLAVQKRLQKQVEKFQFSVDDFAFPTI

SEQ ID NO: 489993 - protein, 320 aa, unidentified
MEEVTFRQVVSRGCGIDVHQKIVVATISGEGLRTQTREFSSITSSLTEMKDWLLGYGITHVAMESTGVYWKPVYNILEPSGIKVWIVNARHIKYVPGHKTDKQDSAWICKLLLAGLLKPSYVPPKAQRDLRDLTRYRNKLVQHISSEKNRIIRILEDCNIKLSSVISSTSGATATKLIDRLCDGKIISREDIEEVYHGKLQCSKNDLYEACQGFITEHHIFLLQTIKRDIESTEGIISEVSSRIKENLLEYENAIDALRGIPGLNTKTVEDLIAEIGLDMTVFPTEKHLSSWAGMSPGNNESAGKKKVEEPLTGTNRSKQ

SEQ ID NO: 489994 - protein, 363 aa, unidentified
MNASTTVAVDLAKSVFQLAIADEAWKVVESHRLTRSQFERFFDNRSVGLVIMEACGSAHYWGRRLAGLGIRVKLLPAAYVRAYVKRNKTDAADARALLEAARASDMVPVRIKSEEQQALQGLHRIRSLWMGTRTSRINALRGFCREFGLVVPQGARTGVEAMSRALADPRVEIPGLIRASMTLLIEEIRLLEQRIAQLERELTEVVRHSPACVSLLTVPGIGLLTATAMVAATGGSVAHFQDARHFASWFGLTPREFSSGNRQVLGRISKKGDRYLRMLLTHGARAVLRAASVAKQAQRHLDDLREWALAVQGRTNHNKAACALANKLARICFAVLRDAAPYGQPVPRVFNKKSSRAAFAVAV

SEQ ID NO: 489995 - protein, 416 aa, unidentified
MGKQRDKACGADIHKNTIVATILSLTGTKNKAEFGTTLAELLRFKAWLIDNDCDVMAMESTGTYWIPVYTVLESSLRVIVANPYMIKHIPGKKTDVTDSEWLAELCLKDLIVPSRIFPKEASVLRSLTRAREGLVKIRTQLKNKIHRDLSSSHIKLSSVVADIFGKSGMHILMGLLEGQSIDEIINGIPSGRVKKNADKIKESIENNLDSTQIFLIDSSLDLMSCIQNKIDGIDTDLKRKISPRLNDLKIAMSIPGIEFTSAATILAEIGDYRNFATSEHLASYFGIVPFVNQSAGKLNTGCITKHGSKHLRWIMVQVAHAASKKIGSKLRKFYLRVRARRGANVAIVALARKILCILHHLLMNQEMYEEAGVAKRSRPVEINPSSSQKGFTAQEMIDILRRCGYEVKKIDRGAFG

SEQ ID NO: 489996 - protein, 456 aa, unidentified
MQNYYLGADVSKGYADFVILDAHKQTVEPNFQLDDTFDGHCKLYEILSRFLQEHPDGMLFAAVESIGGYENNWLHTLMRFQATLNMKSARLNPFGVNANSKASLRRVITDKISARDVAEYMISLPEKVSYQQEDYWGSLRKLWGFFNMLTKQKTQLFNQLESLLYSANPEIMAYCKKKSPLWLLEVLRRYPTAQKLSEAIPESLALIPHVSAVRAQELIDKAKRSVASRSDGITEELIVETVEQIIHLKTVIQVQEKKMGDLCSLPEIALLMTFKGIGITSAIGLMIEIQALERFASVKKLASFFGLHPVFKISGDNIGGYHMSKQGRKNPRRILFMVTMASLSNNPHIRGIYEEHTQKGMKGMAAVGLCMHKILRIIYGMLKHNQPYDPEIDVNNREKMVQKQIAIVKDKNRRYQSFDDKAPVSRRQYKKRTERKVSHSDNFTNCGIIVSAPSRN

SEQ ID NO: 489997 - protein, 345 aa, unidentified
MKILGCDLHTRYQQVAMLDEETGELVERRLEHESGEARAFYAALSAPVRVGIEATGHRRWFERMLGELGHQLWIGDAAQIRASMVRKQKTDARDAEHLLDLLLSDRFPRIWRPTLEERDLRQLVWHRQKLVWMRNAVGNQLHALAMGEGVCRKKKLFTKRGRVELESLKLGPWASHRRQELLEILDRLDESLHELDQAVEQQAEQNAKAVLLMTHPGVGPVTSLAFVLTIGPVGRFERSKQVVSYLGLNPREHSSGGRQRLGAISKQGNPMMRSLLVEAGHTAARLDTELRQDYQRLKLRRGSGVAKVAMARKLAVRMYWMLRNQASYAQLVRMQGSPRGTLVGQ

SEQ ID NO: 489998 - protein, 323 aa, unidentified
MQGKVLPEPNTMTPFYAGIDVSKAFLDVYLHPCAETLRVTNDGHGMRRLKRRLSSLEGVHVIMEATGKYHRAAWRSLAADGFTVSVTDPLRARLFAKACGYLAKTDRLDARLLALMAEALKPAASALPGPAMEALQELVNAQAAAKAEATALANRHAAAETAFLRAELTRRQAAMQRHIKRLDAEIERRIRADPELVRRQTILLSIAGIGPATAAALIAGIGELGTCSGKQITMLAGLAPIADDSGERNGHRAIKGGRKPVRNALYMAALSASRFNPDLAAFAGRLESNGKKAKVILVAVMRKLVVLANTLVAQNRLWSPIAP

SEQ ID NO: 489999 - protein, 344 aa, unidentified
MQAEYDGRQVVGVDLHRRRSVLVRMTEAGQRLDSVRIPNDPMLLAAEIAKAGERPQVVLEATYGWYWAVDVLTDVGAQVHLAHPSGVKAFTYRRVKTDLRDAADLADLLRMGRLPEAYVAPPAVRELRELVRHRAKLVAWRSGLKASVHAVLAKQGLHLAVSDLFGVGGRQLLAAAPLDGAYRLRVNALCRLIDAVDFEIDVVGGPLRAALAGHAGYQAVQAIPGVGPVLAAVFVAEIGEVHRFASSAHLASWAGLTPRHRESDTVVHRGPITKQGSSLVRWAAVEAAHGAHHADWLAAQRARVAERRGHNTATVAVARKLLTLVYYGMRDGHIRALATAGQAA

SEQ ID NO: 490000 - protein, 324 aa, unidentified
MLRPVLGIDIAKAKFDACLLRSDGRLLGKVFPNTLTGFELLMRWLAQHTTEPVHACLEATGTYGAALALFLHEQQHVVSLINPAAIKAFAASRLTRSKTDQVDATLIARFCATQTPPAWTPAAAEVQELQALVRRLDALIEMRTMERNRLSAGETLAAVRTSIAGHLAYLQQEIAQTEQLIQQHIRQHTALQTQFLLLLSIPGIGSATAALLLAEINFATFRNARQVAAFVGVVPRLRQRGSSVRGRSRLSKLGSSRVRHALYFPAVTALRCSPSMQRWADGLRARGKCELQIIGAVMRKVVHQAFGVLKSGRPYDPRLASSGR

SEQ ID NO: 490001 - protein, 339 aa, unidentified
MDQYVGLDVSQKSTAICVIDQDGRQLWRGSCDTSPGSIAAVLQQHAPRLQRAGMETGPLAVWLYHGLRHLGVPIHCIHARHVHAVLTTQLNKTDTNDAHGIAQLTRTGWYRPVEVKSMASHEVRLLLRARHKLVGLRTAMYNQIRGTLKTFGVVLPAGKGMTFEQLVLSQTPRSSLIQYVIHALLDTWRHLNLQIRDFDKAIARLASVSHVCRRLMTVPGVGSLTAVAFASAVDDPARFKRLQDIGPYLGLTPKKYQSGNVDRQGNISKTGCPLTRQLLFEAAGIMITRLKKECALRQWALGLASRCGLRKATVAAARKLATVLLTLWRQDKDFVLSSA

SEQ ID NO: 490002 - protein, 419 aa, unidentified
MHQPTAQPGLFIGMDWADQKHDIYVIDRQGKESHQQLEHSAESIDAWVGEMLKLAGGQPIAIMLEQSRGALIYALMFREDVLLYPVNPRQLARYRESYPGGGKNDPTDAMYLARMLRERIATLKVWRPDDEGTRLIANLSQQRRKIVDGQTKLRQQLTAVLKSYFPVVLELFGKQHQLPLLLSVLCRWSDPRQLRRADRRLIRRVLGDHSLRNEQQQNEIIERIRAAQLLTRDAAIITPSAMAAKLLANQIQQAVKTIEELDAKIAEAMKHHPDAHLFTNLRGAGSALAPRLLCAFGSQRDRWEDAESLASFSGIAPVTKQSGKHRHVHRRFACPKYLRQTFHEFAECARRYCPWSKARYRLLRDRGMKHHAALRKIARSWIRILFRVWKTRVPFNCDRYIAKPQQRCPEIVPYLAQEN

SEQ ID NO: 490003 - protein, 412 aa, unidentified
MKIVHEICCGIDVHAKMLVACLILADGKKEIHSFSTMTADLLRLRDWLVAAGCTHVAIESTGVYWKPVFNILEDALTVILINPDHARALRGRKTDVKDAEWLGDLLRHGLLRASFIPPLEIRELRELTRYRQSLVHEQSAVANRIQKVIESANIKLGQVASDALGASGRAILWELTRGETDPVKLASLAKGKLKEKRSELERSLQGRLTPNQRFVLRESLSHWEELERAEGRVTKEIDQYLNDRPKLAQARDNLDSIPGLATRAAENIVAEIGVEMEGNFPSDAHLASWAGMCPGNKATGGKRLSGRTRKGNTYLRSALVQAAWGATMKKNCYLSSQYTRLAKRLGRKKALVAVGHSLLIIIYHVLQSGQSYTELGGDYFDRNHVEQQRDYFIRRLQMLGLKVTIEESSAAA

SEQ ID NO: 490004 - protein, 358 aa, unidentified
METKRYIGIDLHRNCFTACVRLENGRNYLSEWKLEDLPRFAKKLRGSDEVAVEMTGNTRFFHEAVAPHVARFVAVDPNQFQVISHSVKKTDPNDARNLALYLAKDLLPEVRIKDKTEAQIASLTQTRDTLVKLRTALKNKINNILSAHGIHVAKEALSSDKALKAVLEMPFDEMVAIELQVIVEQIRALHQSIAKLEQTIKERGQQLKGHHNLTSIKGIGSLGASILLSVIGDIHDFADEGKLAAYFGIVPRVQNSNETERSGRITKRGSKLGRTTLVQCALIAKRYSPYLARYYDQIKSRRGGGKAIIALARKPRHHLSDLKERLGIRRFLELCSGGGGLNAGPDGMLDTARRTRAR

SEQ ID NO: 490005 - protein, 371 aa, unidentified
MNTVIHIGIDVHKDSYSLSAFHLTSNRNFGESRIASKSSLVFKYVERLRKEYEGCDIVCAYEAGPTGYGLYRDLQRAGIPCVIMAPTTMPKATGNRIKNDRLDAQEIARHLAFGTYSAVHVPTPEDEAVKNFTRLRNTRKNAMKKAKQNLLSFLLRVGRNYTEGKNYWTTTHLQWLRKQKFDDLVDQETFNEYLQEVFDQQEKVKRYDMRIEELAGQEAYREMVGRLCCFRGIETHTAMSIVSEIGDFSRFANAPQFSAFLGLVPSENSSGQRQWRGTITKAGNTRLRLLLIEGAKAAMRSSLYGQKSKRLMARQKGNSPEVIAYADRANRRLHRVYSKLVSHGVHHNKATVAVARELSCFIWGMMNDKIS

SEQ ID NO: 490006 - protein, 400 aa, unidentified
MSVMIGVDPHKGSHTAAAIDGAEMALGQVTVRANDSQLERLLGWAGQWPERAWAIENATGLGYLLAQQLVAAGERVLDVAPKLAARVRLLNSGDTNKNDPNDARSVAIAALRSPAVREVAAEDHTEVMKIWAKRHRDLGSARTRVVCRLHAVLCELVAGGVSKAITAKRAAELLESVEAGDAIAAARVELAGEYLADLIRIDGQLKDTNRRMAVAVKASRSTLTDIYGVGPYVAAITLGEVGDVGRFANRDHFASYNGTAPIDVSSGPRKIHRLSRRGNRRINHAIHMTAVTQVRHRATPGRDYYDRKIAEGKTRKEALRALKRRISDIIYATMVADARAANTPVKTGPGGQTGNDSAPSATGSHPATPALRKSHSRTTTNTTSPRSRPTANRKISRRAS

SEQ ID NO: 490007 - protein, 411 aa, unidentified
MRLFIGDDWAEDHHDVEVMNEAGTVLAKKRLPEGVAGMADLHALIGRFVPEDADEAEVVIGIETDRGPWVAALAAAGYTVFPVNPLQASRYRERHGVSGAKSDGADAHMLADMVRTDSHQLRRAAGDTPEAAAIKVVARTHKTLIWDRTRAVQRLRHQLREYFPAALEAFEDLDAPDALELLAKAPDPARARKLTRAQVAAALKRARRRAIADKTTAILAALRSDQLGQPAALTAAYAATVRALIAVITALNEQVKALEEQVKDHFGRHPDAEIYRSQPGLGAILGARVLGEFGDDPHRYADGKARKNYAATSPITRASGKKKVVAARFIHNDRLVDALNAQAFAALGASPGARAFYDELRAKGLEHNDALRRLANRLVGILHGCLKTRTLYDEATAWGHRENLPQSSVAA

SEQ ID NO: 490008 - protein, 359 aa, unidentified
MKKVYYAGIDYHKNYSTVCILDADRSVVVEATVRPNTKENFATVFSRVDGPIKTTFECGLNWGRLFDILESLPMVSEVVLANALQTRIIAEAQVKTDKIDAQKLAWLLHSDLIPSIHIPGPKTRKRREVIRQRMYWVKARTKVRNRVHRILERQPDLQMPQVSDLFGKKGIAAMKKAEIADPDCFLLEQDLRMLKTLDELVKDDEALMKKEIENDKDLEILMSLPGVGLTIGSVLRNEIDGVDRFLNAKRLCAYAGLVPTTHSSGGKTRNGRMMIGCNKWLKWAFIEAAWVAVGCNAYFGGLYRDQKARGKQANTAITIVARRMCRISWQLLHEQRKFENQKPSSGCSHRGLTKAAVNQ

SEQ ID NO: 490009 - protein, 420 aa, unidentified
MDVLIERCAGIDIGKNEVVASVRTPAPGGRGRRKHTRTFSTFTGALEEMADWFAAEGVTDIAMEATGPYWKPVWYVLEERAFGLRLVNAHHVKILPGRKSDVLDAEWLAELLEHGLLHASFVPPQAIRELRDLTRYRKRLIQGHTAEQQRIQKTLEDAGIKLDSVASDVLGTSGRAMLEALIAGERDPVVLAELARGTLRKKIPALRQALRGRFRDHHALLIGLCLEHTDHLEAAIARLDERIDALTAEHTSEAGIPFARARDRLTTITGVGKRAAECILAEIGADMTRFPSAGHLASWAGMAPGNNITGGKRGSGKTTDGDKWLTDILTQCAWAAARTRDNYLAAQFWRLARRIGKKKAAVAVGHSILVICWHLLTNDCDYADLGGDYFTRRVNPDRQRDRLTSQLHALGYRVTLDHVA

SEQ ID NO: 490010 - protein, 391 aa, unidentified
MSMYFIGIDISKYKHDCCIISAADQKVVSKVTIKNNKAGFNELLTIIHSLANPADIRIGFESTAHYALNLELFLENSLLTFMEVNPVLISEYKKSKTLRRTKTDSVDCESIARWLMTVEYKPHSKGFYHAYSLKSLTRLRDKLIRQRSFYLVKITNVLDHTFPEFKPFFNERLSKTALYLLENYGSAEKMARMNSASYEKLRSVSRGKFSPQQFLRLKELAVNTVGVNNSIFDVELNSLLSLYKSLVKEIDTIEKEINKLIEEVHPHYMSVPGIGPLSAAVIYSEYGDISNFTNPGQMLAFAGIEPGINESGTESHGGKMVKRGSSQLRYTLINCCLPLIRFDMTFATYYAKKRGEGKPHRVAITHVAKKLIRVIYALESQDIDFNAQKLR

SEQ ID NO: 490011 - protein, 338 aa, unidentified
MAIVFVGIDLAKNVFAVHGIDEHGKPALVRPAVPRARLHELIASLPPCTVAMGACSGGHHWARLFAACGHSVRLIAPKFVAPYRMSGARGKNDAADAAAICEAVQRPSMRFVPVKSIDPQARLMVHRARQGFVEARTATIDRVRGLLSEFGIVLPLKATTVRRAAGACLGDLPGWANTVVGDLLSELHRLDERIEQYDRHIAAIAREDGRARQLMRLPGVGPTTATAILALIGNGHEFKCGRQFAAWLGLTPGQYSSGGKTRLGRITKAGDAYLRTMLILGARAVLVAAKNKTDAVSRWAMALEQRRGYCKAVVAIAAKNARMCWPMLARGEQFKLPA

SEQ ID NO: 490012 - protein, 391 aa, unidentified
MIFVGIDVAKDKHDCFILNSEGTVLADVFTIANNRIGFETLLSRIQSCSQGESKIKVGLEATGHYSYNLLGFLLDSGLATYVINPLHTNLYRKSLSLRKTKTDRIDARTIAMMLMSDVDLKSYSNTAYHNEELKSLTRYRFDKVKERAKLKSSVARLVNILFPELEKLVSSLHIAVVYALLSNYPGASYIANANTEELAETLCTASKGRYTKSKTAEIQVAAGVSIGSKMPAKSMELKHTIALIRELDKEISEVESAIDKITSQMDSPIFTIPGIGRHMGAMILAEVGDFSNFASADKLLAYAGLSPSTYQSGQLQNCYAHMEKRGSRYLRYALFNAAKYVCLWCPTFSAYLEKKRSEGKHYNVAISHAAKKLVRLIFAMQRSGKAFLADY

SEQ ID NO: 490013 - protein, 367 aa, unidentified
MRARTASRIRVVRAAGTAVDCRVRKEADVYVGIDLHKAFLQVAAIDKSGKILLEEKVANDRNKIRRFLARFPKRTRYVLEASSVSQGVTEFMLDDLGLDLVVSGPFHNKVIAMSKKTDKVDARVLAAMLRDDAIISSYVPDRQTAEDRELVRHRQSVSRSRTTYKIKIRSILLQAGTKVKGHAWSEEFVDNLRRLKDYRIDNYLDMIRTLDGMAGVLDIRIAARASEIDDAMRLKKIPGVGYFWALVFVSEIGDITRFRHPGQLVSFAGLAPSVRGSAGKVRGGGGITKRGDSLLRHAAVQVAMTHVRVARDTAFTRFYERLAEGRGMPKARVATGAKILRAVFRMLADGREYAPHHGQNPRPRLNS

SEQ ID NO: 490014 - protein, 331 aa, unidentified
MVETKRFVGIDVAKAQLDVAIGPNGESFSVANDETGISELLRRLEPADLVIIEATGGLEVPVASALATAGIAVAVVNPRQVRDFARATGRLAKTDRLDAQVLARFGEAVKPEVRPLKDEQAQALEALVNRRRQLVGMLTAEKNRRANSPKVIHQSIDEHIRWLEKRLSGLDDELAGLVHETPIWRERDELLRSAPGVGKVLSTTLLAHLPELGALNRKQIAALAGLAPFNRDSGSLRGSRCIWGGRAQVRRVLYMAVVAAVRSNPVIKNFYAQLRARGKYPKSALTACMRKLLVILNAMLRSKLSWQTPAPPSSTATLSPLLGAVPQHGCR

SEQ ID NO: 490015 - protein, 457 aa, unidentified
MELEAKRLEEFRRLREEIRGSGEHLIVGIDVAKDTHNAFLGTATGETLYKRLIFENTLEGFEKLLVQVEAVKVQRGLKRVVFGVEPTANYHKPLGEFLIERNHAVVLVATDAVKKNRSLLDGRWDKHDGKDCANVADLISQGKCLYYEYPSPELRELRNLLSFKRKLKKLEHGLRMRIRNHLVAQYFPEMDQSCNWGEHEGLALVRWCLDPAVVSGLGIDEFLGRLHTQGRTLSQRRRLRAVWENASTSIGCQFGSSVEFEAQMLVKLLKETRQTLADTDDKIREVCVKFSEYPCLLSIPGFGPSLSAMVLGAIGNPWRFSNGAQVLKMVGLDLSASRSGKYSAQASASISKKGKSELRYALYQVALIASSRDKHFIVYFTNQLRGREKEKGIKTKKRVKLAAKMLIIAWTLMKKKQLFDPERLRIDLSLSERAGPKSGEAEKGGMPRVIPGAARGL

SEQ ID NO: 490016 - protein, 404 aa, unidentified
MDVHRDFCEIAIAEPDGQVRSAGRVNSKVEELELFAGSLAADDVVALEATSGAGLIAEIIQPHVAAVVVANTRKLPQISRAKAKTDRLDARTLARLAASGFLETVWAPDERTRALRRLCARREALVRARTRAKNEAHAVPARNLCGRPPATDCFGKKGRAWLAELQLPVDERLTLDGCLRQIDFLDGEIGALEAALATQALGSPEILRLITVPGVNLHTAAAFMAAIGDIRRFPSARQLVGYLGLDPRVRQSGNADARHGRISKAGSSLARGMLGEAAWSVAQTPGPLRAFFERIRARKGPQVAATATARKLACLFWCLLTREEDYAYARPSMTRSKIRRLELAAGAPPRKGVRGIAGNKNAQTREAEREIARRAETAYRRTIADWKATAPTRAGAGATPGRAS

SEQ ID NO: 490017 - protein, 404 aa, unidentified
MSLFCGIDWSERHHDVAVIDEAGKLVAKRRITEDPDGLRQLLDLLAEAGDTVQQPIPVAIETSRGLLVNCLRATGRPVYSINPLAVAAYRQRHSVSGAKSDHADAMILAHILRTDADAHRPLPHDTGLVQAIAVLARAQQDAVWNRTQLSNQLRSTLREYFPAGIQAFERKNVGLTSPEARAVLAAAPTPTAAAALTETDLAILLRAAGRQRNITVWTQRLAEIFDRPQLHQQPLVERAFGHHAANLIRQLDAACRAADDLADQVTAALAQHPDAPILLSFPGLGPLTGSRVLAEIGDDRHRFVDARHLKAYAGAAPITRASGKSHLVRHRKVKNQRLAATGYHWAFAALASPGARVHYDRRRTTGDHHTAALRNLFNRLLGQLHHCLHTGQPYQEATAFPPVT

SEQ ID NO: 490018 - protein, 401 aa, unidentified
MHYVIGIDVSKATSQVAVAVDGKVTQHFKITHDVLGFNQLNTIIMQFIEFPDIVFEATGIYSRRLKSFLDWHNYPYTYLNPLAAKKQLDQLRPNKNDLNDAKNLAETQFILARAKSYVQNSIYIELQDMSRFYQQINHDIVSTKNRLHRILQLTFPEIEGLFSATDSPHYWELLTIVPHAIITRRSRQGLMHTIQAGISWHIGHERLRKLVDQLMSMGQISAPAVAANSYNVAQVIYYAKRLIELHGTKGDILTAMVDKAKDLPEYSICQSIPGFSDKTVVSLIAELGDLHRFRTANKLNAFVGIDLRFNDSGDYKSTGFITKRGNSTARKVLFRAISNIASTASYGHPSHINDWYQKKKQSSLSKGTKKIAIGAMSRLLSTIHYLVINHQLYDYKAVSKH

SEQ ID NO: 490019 - protein, 388 aa, unidentified
MRPTDKTRNQNLARSQGDRSTLYVSLELSRSSWLVTSLSPNSDKMSKHMIAAGGAPKLLALLARLRGRAEQLVGGSLNVVVIHEAGLDGFWVHRLLEANDIESHVVDPASIAVSRRRRRAKTDMIDGQTLLRTLLAWKRGEPRVCEMVVPPTPEQEDSRRLSRERAILLRERVQHVNRIKGLLAGQGITGYDPLHKDRRTRLDGLMTGDGRPLPARLKAALLRELARIELLLLQIADLESERNAAIKPDAEGRPSPVALLTQLKAIGPQIGAVLYNEGLYRNFANRRDVAAYAGLVPTPWRSGSIEREQGISKAGNRRLRHIMIELAWLWLRHQPGSALSGWFRARVGNERGRIRRITIVALARKLLIALWRYVTQGEVPEGAVLKAA

SEQ ID NO: 490020 - protein, 494 aa, unidentified
MGACELESGDVALATIPIRKMTIGIAQTLLLIIEWRIAMPKKRTAGDRPELKPVNVGAAAIDIGSTMHMAAVNPACTDVPVRSFGTFTRDLHELADWFKTCGVTSVAMESTGVYWIPVYEILEQRGFEVILVNARYAKNVPGRKTDVSDAAWLRQLHSYGLLRGSFRPDAEIATLRAYLRQRERLVEYAAAHIQHMQKALMEMNLQLHHVVSDITGATGMRIIRAIVAGERNPDVLATYRDVRCHSSIATIRAALVGNDRHEHVFALTQSLELYDVYQAKMLDCDRKLEVLIAALNNKGAKPIGKLSKPRIKTKQVNAPTFDVRTALYGVLGVDLTEIHGLGPSLALKLIGECGTDLRAWPSAKHFTSWLCLAPSNKISGGKVLSARTRRSSSRAPALLRLAATTVGRSDTALGAFYRRLSSRAGKSKAVTATARKIAVLFYNTLRHGMHYRDPGADHYEQQYRGRVLANLQRRAKSLGFVLQVIPGASDPAVS

SEQ ID NO: 490021 - protein, 308 aa, unidentified
MTIHQTYIGCDIAKAVIDVFDPLSRRFSRVANEPAALAGFAAGLAPGSFVVFEATGHHDKALRHAFARAGIPCARLNPMMVRRFAQARGRLAKTDRVDARILSEMGAMFRPDADTPPCPGRERLAALARRRDQLVATRALELRHRDETGEATVVADIEAAITNLSLRIAALEAEIASHVETLDGLAEQAARLTSAPGIGKVTAVTLLAHMPELGTISPKAIASLAGLAPFANDSGTRTGRRSIRGGRPRLRRALYMAALGAIRANQRFKAFYQAIAQRSGSKKCAIIAVARKLITILNAMIRDQKHFA

SEQ ID NO: 490022 - protein, 429 aa, unidentified
MKEKANFNEFAALLGLDWADEKHDVALRTPGAATVEHSTYAHAPEAIAAWVGSLRQRLGSGPIAICLEQSRGALLNALSSHAGLVLYPINPQTLAKFRTALHPSGKKDDPVDAGLLLELLEKHGDQLSPWQPEDPATRQLALLVEARRGFVDRRTALINQLQSVLKSYYPQAFELMGEDLGSPMATDFLKRWSTLAAVQNAKPSALRAFYYGHNSRSADLLTERLRLIKNGLALTNDTAVLAAQSLAAESLAAELAALRPVIARYDQQIERLFAAHPDAPIFASLDGAGAVMAPRLLAAFGTDRDRFADAQAMPCYSGTAPVTEKSGKQKWVHRRWSRPIFVHQSFLEFAGHSVRLSAWAKRCYEGLIQKGKGHWAALRVLAVKWQRIMWRCWQDRRPYDEAIYLQSLHQRGLARYADLVVAGAKTHGE

SEQ ID NO: 490023 - protein, 405 aa, unidentified
MTWHPAARKQTGEKEMERASIIGLDLAKQVFQVHGISKDGRKAFSRKLKRAELHAFFKEQKACIVAMEATSGSHFWGREIEKLGHTPRLIHAQYVKPFVKRQKSDALDAEAIAVAAAQAGMRFVPVKSTEQQAIITLMRARTLFIRQRTSSINALRGLLGEFGFVVPSRTTNIVKLAQLLDTEEKRVPEPARTVLRDVYQHIEAVNRQIANMERLIDEQIKLDTAIQRLMTIPGVGKITAATICASVIDPALFKSARHFSSWLGITPRSFSSGGKQIFGRISKRGNAEIRKLLVLGAFPVVSAARRNGSPQPWLQSLVQRKPYKRAAVAVANKTARIAWALLAKGGSIIPTGEAWIGSQYNGFSASHSITLTQGNQALLVQIVKEVEQQADGNVARFCGHSHRQT

SEQ ID NO: 490024 - protein, 364 aa, unidentified
MLTSTTTKEAPVSEEYSDRQIVGIDLHRRRSVIVRMTAAGEKLETVRIDNDPIALGLEIAKAGPDPEVVLEATYGWYWAVDVLQDAGARVHLAHPLGVKGFAYRRVKNDERDAADLADLLRMGRLPESWIAPPAVRELREQVRHRAKLVALRSGLKAQVHAVLAKQGVAVPMSDLFGVGGNKLLDRLGLDAPYAARVGSLRRIIDLLDFEIDVVSKRVAAQLSSHDGYRAIQALPGVGPVLAAVFVAEIGDVTRFPSARQLTCWAGLTPRHRESDTTVHRGPITKQGSRLVRWAAIEAVQRTPNSAGWLVATRAELTGRRGRNIAAVAVARRLLTLVFYGLRDGHIRALDLDHGQRRPSTTAAA

SEQ ID NO: 490025 - protein, 408 aa, unidentified
MELMHRRCAGLDVHKATVVACKRIVEQNHVRREVKTFKTTTGALYELFDWLQQDGVEHVVLESTGVYWKPVWHVLEEGFELLLVNAKHVKNVPGRKTDVKDAEWLAELLAHGLVRASFVPPEPIQQLRELTRTRKQFVQDRSSNVQRLHKILEDANIKLDSFISDILGKSGRAMLEAIIAGVTDPEKLARLAHPRLQATPDNLKAALRGRINDHHRLMLRIFLDQIDATNVNIQRIEEHVQTALEAYREAVELLCTIPGVGREMSACIVAEVGTDMSRFPTAGHLISWAGLCPRSDESAGKRRSTRIREGAPWLKTGLVQAAWAAIRVKGTHLKAKFYRIKSRRGAGKAAIAVAASILGAVFHILKNRVPYKELGDQPRDQKNAAKAIQALTRKLEGFGFQVELKPAA

SEQ ID NO: 490026 - protein, 365 aa, unidentified
MINDKLSSNGISVPSLVNCLNRVLHLGLDMHYQQVTVAMQENGGRIKAAGKMSHVGFLNWVRKKLEEGWEIHSCYEAGACGYWLHRELVKLGVKNLVVVPKAMGQGGKKQKTDKRDAGELCDCLDRYVRGQDKALSVVAVPTEEQEEKRALIRYHRQIMADRGRCEARGKGLLCAQGIEVHGRWWHSNAWIEVQSDPRLKDWMKEQLIGWRNKILSTDEEQGALRERIAALAPAILPKGVGAYSAAVLHYEMRGFERFKNRRQVGSMTGLCPGIHQSDGRGKEGSINRCGIGIVRWTLVEMVWRLMIWQPQYPPVRRLAAGLVKGKRARKRLVVQAARRLAIDLWRLSTGQTTPEELGLIMHCAK

SEQ ID NO: 490027 - protein, 376 aa, unidentified
MVRPCSCPASDKLARGTKTRSTPCLQQHRPIAAIGIDIGKNSFHVVGQDTRGQIVLRQKWSRHQVEARFANMPPCLIGMEACVGAHHLSRRLKALGHDARLMPATYVRPYSKGQKNDFRDAEAIAEAVQRPTMKFVATKTADQLDLQALHRVRERLVSQRTGIINQIRAFLLERGIAVRQGQRFLRAELPRILATPPDVLSPRMLRMIEDLAGDWRRLDERVEGLSNEIEAIARQDTGCERLMSVPGIGPMISSAMVAAIGAGDVFTKGRDFAAWLGLVPKQLSTGDRTILGKISRRGNRYLRVLFVQAAWVVLIKPKIWERHGLKPWIEAARKRLHHNVLAIALANKLARIAWSVLARGRAFEARKMDQAANQSA

SEQ ID NO: 490028 - protein, 341 aa, unidentified
MKNKSFIGIDISKNVIDVSIFCEETPIKDFSHDVFNNSRKGFGEMCTWLKQNHVVLSNSLFGMEFTGSYSMELEKFLNTRNYQFCMLSTHVVKHYPMGPKDKSDKIDSAKIADFLYRYNGTECVKPYNMPDKTMQRLKALMNERKFLVEQRTCFMNRRQLCITKEDAQLYDGYIKKFSRDIENIELEEQKLLATDDSLLSTYKNLLTIPGIGFVNAINVIVITRNFTAFETARQYASYVGVAPHFRTSGTSVKWRPRPSARCDGQAKADLSMAATVVVQYDAELQSFYNRKLGGKLDSDTKRKALNAVKFKLVLRMFAIGKQNRKWEPLDSKSSNEKLAIS

SEQ ID NO: 490029 - protein, 391 aa, unidentified
MFYIGIDIAKKNHEASIIDSSGKSLSKSISFPNSTKGIEKFNNFIAEFGVTTNNCIIGMEATGHYWISLFSYIVDLGFTCYVINPIQSDAFGKMYVRQTKNDSVDSFIIAQIMRFGEFSISNFSDENTFALRNLTRYRFALVDECSDWKRKLIAILDQVFPEYSSLFSNIYGVASKELLSKYPLPEDMLSIPAEELGDLLCKCSKGRLGINKAEEIQSCARETFGIKFAKRSFSFQIKQIISQISFLEEQLKEIEIEISYLLEDICPIITTITGIGSILGASIVSEIGNISRFERANQLVAYAGLDTRIKQSGDFSATNTKLSKRGSPYLRRSIWLAATVAAFKDPALSIYYQGLRARGKAHGTAIGAVARKLTNIIFAVLRDQKPYTPNI

SEQ ID NO: 490030 - protein, 357 aa, unidentified
MPSLNHRKGTALAIVEDTRAITVGVDTHADRYVAAALDRLGGLLGVREFPATAAGYADLLDWLSGFGTVALAGVEGTGSHGAGLARHLAAAGVRVVEVDRTDRQDRHRPGKSDPLDAVSAARAAQSGRAGGAPKGRDGSVEAIRALMVAKRSARAERTQAINQARALIVTGPEELRGRFARHTPAQLVAGLAAMRPWPGDVPGYATRVALRELGRRARFLDAQIGHLDELIVPLVTGRAPGLLARHGVGTDTAALLLIAARDHPQRLRSEAAWAHLCGAAPIPASSGKVTRWRLNRGGNRDANHALWRIVITRMSSHPATRAYVARRAKEGVTEKEIIRCLKRYVAREVYPYLRDAR

SEQ ID NO: 490031 - protein, 444 aa, unidentified
MKALPVLDPKAAAIDVGSEKLHVSIAGDAPKVFGTFTGDLEALRDWFKQQAVHTVALEATGVYWLYLYEVLEAAGLEVVVVNGRHVQNVPGRKTDMADCQWLATLHAHGLLRGGFVPPADIRQLQDYQRLRADHLIGAASQVQKMQQALERMNVKFHDVISDLTGVSGLKVVRAILKGERRPGELLALCDEQIQKKKSAAVKQSLQGCWKKEHLFALRQALELWEIYQQKIADCDREMEAILQQIAKPQGPQGGSGILGPVKLAPAKAPSKNAPVIERCQELLARICGGRDATQIPGLSVYLVLQLISEVGTDMTCWATEKHFTSWLGLAGGSKQSAKRRGSIKAHRNRAGRMFCAAARALAQSIDKALGGFYRRLRGRIGGLAANVALARKLAQLFYRLLRYGMEYVEKGLRVYEVKVLETEARLLRKLAKKQGFTLVPAAAN

SEQ ID NO: 490032 - protein, 312 aa, unidentified
MANLVYAGIDVGKDKLFVNIHLDSQVRDFPNTHSGLERLSRFLIKNAVNLVVMEASGGYERLPASDLRARGLSVAVVNPTYVRRFAQGMGTLAKTDTIDARLIAHFAFVKQPKPQQAKTVEEEKLAALVERREQLVGLLSVEKNRLSKASDYSKASLQISIQFLTGQIASIETEIKALVAKSPERLARMRCMCSFIGVGDITAVTLLTEMPELGMESGKHIAALAGVAPINRDSGKMKGKRRTYGGRARVRRTLYLAALSASRHNPIIRAFYERLLAAGKEKKVALVACMHKMLTILNAMLKKGELFNPEYS

SEQ ID NO: 490033 - protein, 341 aa, unidentified
MKKNLFFIGLDIAKADFAASIYQTPDQPIVTKEAIPNNPEGFDLLLLWLKEHHIDKTNSHICMEATGIYSQAVAYYLLFQGFPVGIKPPLKVKRAFDPVGHKTDPVDSKQIAEYAYRFQDELTSWQPRDEILEKIRQLLSLREQFTKQKVALKNAIQAYSKQRVQVALIKKAQKETLDQLKRQIARIDKELEKLIKQDPEIFQKANNLDSIPGCGMLLAAHLLVITENFTKIQKPKRLAAFIGIVPYQNKSGASVFKRAKIRHFGPGPSRKLLRLAAQSVATHDVTFRHYYLRKLAQGKAKALVLNNISNKLLKIACTIIQNNTRYIKEHRSIHPMYLKSA

SEQ ID NO: 490034 - protein, 367 aa, unidentified
MEESTKVHVGLDVHKDSITIGAAEPGRAPARVIGKTAHDVNKLLKVLVKLGRPEQLHIVYEAGPTGYGLQRALQARGYLCEVIASPGDRVKTDGRDCVQLAECSRAGQLRAVWVPAPADEAIRDLSRAREDAVNSRTKVRQQLKGFLLRHGVRYTGKTSWTKAFYRWLATLSFGAGASQTAFTEYWLAVQAADDRVQRLTQALQPSIAGWRFEPVVAALQALRGIDVISAIGLVAEIGDLSRFDHPRKLMGYLGLVPSERSSGERVSRGSITKTGNTHARRLLTEAAWNYRFKARIGRQAQRRQEALSEQIRSMGWKAQLRLSRRFAALLERGVQPNKACVAVARELAGFVWAIGTTASREQTATQQ

SEQ ID NO: 490035 - protein, 430 aa, unidentified
MKSNTQNAKIEAITEKTLVLGIDVGSETHYARAFDYRGIEYSKKPFKFSNTEAGFVTFKEWILDIKERHEKDKVVLGMEPTGHYWFNLGKFLQDNEMKPVLVNPHHVKKSKELDDNNPTKNDRKDPKVIAGLVREGRYMIPYLPDGVYADLRTASNIRFQLQAELTRIQNRISRWFNIYFPEYRTVYGKPDAKSGILILKAAPLPEDILTLGIDGVNQIWRDAKLRAVGKARAKTLIEAAEHSVGSKEGAVAARMEIRMLLEDYESRSIRLQEVMTLIEGLVKQIPMAEKLLEIKGVGIRTVSGFLAEVGDISRFNNPKELQKLAGLALVENSSGKHKGETTISRRGRKRLRYLLFEVAMSLVSKNQEFRELHNYYTTRRLNPLKKMQSLMAIAAKLIRVFYVMLTKGVNYDPKKMVNDIKRPAVYLQTA

SEQ ID NO: 490036 - protein, 367 aa, unidentified
MGWMAPLRHLSAKVLVDRKPPANREPSMNEITTVGLDLAKHVFQVHGVDAEGTTVLRKQLRRGQVLAFFSRLPRCLVGMEACATAHYWARELRALGHEVRLMPAQYVKAYVKRNKNDAADAEAICEAVGRPTMRFVPVKTAEQQAAVLLHRGRERLVRQRTMLVNALRAHLAEFGVIAPQGLRNVGRLIAIIRDDDDARLPGLARQVLQVLAVQIEQLEAAIAALEKRLMGWHKSNPVSQRLATVPGIGPIIATAIAAMVAEPSGFRSGREFAAWLGLVPRQNSTGGKNRLGGISKRGNQYLRRLLINGASANLLRSKATNADPWVIGLRRRRPSLVVAVALANKTARIAWAVMHRQENYQRMATAA

SEQ ID NO: 490037 - protein, 338 aa, unidentified
MKTHVGVDLHQRFCYLTAVDASGKLCKQGQVVNEGAALRAWLRQLPCPRQVVVEASGFWPAFARAVAPEQERLVMVHPQRVKAIASAKLKNDRVDSETLAHLSRCDLLPEAWMADEATQQLRLRVRLRITLGRQRARAKNQLQAVLHQEGFKKPVTDVFGKRGRAWLAGLELSASGRLVVDTWLREVDHLDVELAEQTRELERLAKADGRARFLQTVPGIGAYAAMVILAELGDVERFGSKRSLASYAGLTPVVRESAGKRKRGGITHQGSNTLRWMMLQVAQVAARCSPGARSYYAGLRARKPAQVAKIALARKLLTVVWALLHHGECFDEELFARG

SEQ ID NO: 490038 - protein, 401 aa, unidentified
MESPIVSIDVSNGNSHYMCFIKNNKRFGKVKKIDHYIEGFKRLLEDIQKLEAETNEKVCAVFEATGVYTKPLERFLSKNSIKTYIINPLESARKRKEEIHNKKTDKLDPISISKVYYDKEEMMELKKKDETHNWLRKKNRLYEDQLNHLRKYKVTFQNQLSICFPGYLDLFKDGYSDIPMTILKKYPHPDLLKNKKAETVARYLEKNTCHTHKVSLEYALKIIEFAKKTYPGCEKDDVEVEIFKILLDKVIETQRECEKTLNEMITVASTLEEYRYISSIDGIGPNLAARIIAEIGDIEEFKSREALVAYAGLDPHIYQSGDQDGKHLKISKKGNKYLRCLLFLAVGCSIRGAKDNPVNRFYQKKKQQSNPLNSKAAKTACTAKLLKIIYGICKNKTTYER

SEQ ID NO: 490039 - protein, 324 aa, unidentified
MIDGILGIDVSKNTLDASISSYNKMRARSFANSSDGWRHLLDWLITQKIRRVHACLESTGRYSLGLARALYEAGHVVSIVNPAQIRDFARTKLGRNKTDGVDASHIREYCELFKPQPWTPPSEAHRRLGELQAIRAGIVAGLTEWKNRKNSGMVDAVAQSLADVTILHFTSQLGAVDEAIAQTIDNDSSLRRKRDLLLSISGVGETLAGVVLAELPGPDMLRSSAEVVAYAGLNPRQHQSGTSIDRVTRISKIGNAVLRAALYMPAMSAMRFNPAIVALVTRLKSRGRLNPKQIVVAAMRKLLVLCFGVLKTGKPFDPAIAMGC

SEQ ID NO: 490040 - protein, 404 aa, unidentified
MEHVIIGVDPHKVSATIEVVDHHERRLGSGRFTTDQAGYTAMRTYAKSWPERVWAVEGANGAGRPLAQRLLEAGEHVVDVPAKLAARVRLFDTGHNRKTDALDAHSIAIVAVRTEGLRVLKVDGQLEALRMLSDRREALSRRRVQTVNRLHALLGELLPGRAKKDITPLRAKALLASVRPRDIAGKTRRRIAAEELAELVAVDAKITKATAELKAIVLARGSHLMNIHGVGPVVAARALADVGDVARFADRNRFASWTGTAPLDASSGEQNRHRLSRAGNRRMNHMIHIAAVTQLRLNTDGRAYYRRKRAEGKKPLEALRCLKRRISDTLYRQLIADHQRAAGGQEAGAGPGGHCGASQESSAAGSHPLTGTSDQPLPGPATPTLQPAPTTRKTHRGGTLVATG

SEQ ID NO: 490041 - protein, 424 aa, unidentified
MSKIEIFPTAIAAWIGIDWADQTHVYALEVSGSAKIETGQLEQTPEAIHQWAQQLEQRFAGQPVAIALEQSRGALIFALMAHPFLLIYPINPHAMAQYRKAFKVSGAKSDEADARLQLDYLLKHRDQLRLWQPDTVETRLLTLLCEDRRQAVDQRTALHNQLTAQLKICFPQALDWIQPWDYPLACAFLKRWPSLHSLQRSSPNTLRRFLAKQGCRKLQRYEPLIAQIRSSQPLTTDQALLRAGWMKITWLVDQIRCLTEAIENYNQQISKLFSQHPDHDLFCSLPGAGSALGPRLLCALGTDRSRFQHAQEVQTLFGIAPVMECSGQSRWVHWRWACPKFIRQTFHEFAGASIPLCPWAAAFYQKMRGRGKRHHAAVRALAFKWIRIIYACWKNKTPYSESQYLTALKKRQQPPLAAGVVNAR

SEQ ID NO: 490042 - protein, 340 aa, unidentified
MHKWSEEVFLCCGIDVSAAQLVVALEGEGSRGLQRSFPNRASGHQALILWLQNRGTRIRVCLEATGLYSLDLALALHRATGIEVAVLNPKKVNRFAATLCRNKTDPADAQVLAEYARRMPFQSWHPPQAAALELRAITRHIAALTQQHTQQSNRLHALSASSASSRCVQQDLKRSLRDLERRTEKMRRAALALIAQDTELRPRFALLLSMPGIGEVSSLNLLGELALLAPTLSVRQWVAHSGLDPAHHDSGTSVHQRARISRAGNRYLRRALYMPALVAARHDPHLRAFYQTLLARHKAKLQALMAVARKMLHAIFGMFRGLTEYDGARLFPVLELAVPA

SEQ ID NO: 490043 - protein, 329 aa, unidentified
MNVHTQDRDAATVARINAGIDVSKAWLDACWGQHARRFTHDADGIKQLAASLGQAQVDLVVMEASGGYEMASVAALQAEGFAVAVLNARQARDFARSMGVLAKTDRVDARVLRDFANVIAVHPKRDRYLRALPDEQRVQLAALVLRRRQLLDMRIAEANRLTTAHRSARKSLAAVLQLLDAQLKSVDADIDGCMRQHFKETLRWLDTVKGVGPVLKSTLLALLPELGHLSGRAISALVGVAPIARESGQWRGKRQTWGGRHDVRAVVYMATLSAVRHNPVLKQFYQRLIGAGKLPKVALVACMRKLLVILNAMARDRTTWRAPTLNLST

SEQ ID NO: 490044 - protein, 383 aa, unidentified
MQRKVNHVSGRNQAEKLVTVGIDMGSDLWSTGITRWDTGRYSYHKYEGTTKDMGLYRKIEELVNEGNKVQVYYEAGRNGFTPAREIKKRGAEPGVIAVSRLEIFQNGKTVKTDRIDAKFLAGLHPLDNLPLVWIPSEEQEQRRMAVRETERISEDISRNNNRMISLLERWLPGVEKKHHCSVEWKKRIKECASIGAMKNVPLEAERLRNMARELEVLESNLERWEKIQAVKEKEHKEDIRDKGKVSDIEILSQYRGISGSARKLSWELGEMERFKNGRKLSSYLGLTPTPWASGKMMREQGISKKGRGELRALAIELAWGWVKWQPECDVVKKWKDRLSVKGRSRRVAIVALARQLMVALFRRVVFGEEIKGAIISRPLKCGC

SEQ ID NO: 490045 - protein, 411 aa, unidentified
MRLFAGDDWAEDHHDIEVMNEHGSVLARKRLPEGVAGMARLHELVGRQLGEDAEDAEVVVGIETDRGPWVAALIAAGYTVFPVNPLQASRYRERHGVSGAKSDGGDAHMLADMVRTDSHQLRPAAGDSPQAEAIKVVARTHKTLIWERTRHVQRLRHQLREYFPAAVEAFEDLDAPDTLELLGKAPDPARAAKLTRAQVSAALKRARRRGIAGKTDAILAALSGEQLGQPPALTAAYAATARSLIAVIITLNEQVKVLQAQVEAHFGQHPDAEIYLSQPGMGAILGARVLGEFGDDPHRYADAKARKNYAATSPITRASGKKKVVAARFVHNDRLVDALNAQAFAALNASPGARACYDDLRDRGIEHNDALRRLANRLVGILHGCLKTRTLYDEATAWSHRQNLPQSAVAA

SEQ ID NO: 490046 - protein, 405 aa, unidentified
MYSVGIDVSKGKSTVCILAPLGEVIRSPYEITHTEPDLKELVKRVRSYGGKNDIRVVMEATGSYSLPVLHYLLDQGLFVCQVNPLAMKKYRSDINFRGVKTDRIDALSIAQYGIDKWQQLCEFQRADQTYETMRLLSRQYLAYQRPHVLLTQNLDHVVDLVMPGIKDEFDGYDPATGIDRLSDFLEEFWHYGCITSLGPKKFEDRFRRWAKKKGYRSRADKPSRIYQIASEGIPSLACDQITKQMVQHTIEALRGLNHVLYEILAQIRELAEHRPEYQAVRAMSGVGEVMAPLLVAEVGDPRRYHSGKALVACVGIDVPPYESGQFKAKERRITRKGSKQLRKLGYLAVQGLDKIKPTKDTAVYDKLMKKRAEGKPYKLAIVAAMNKFYRIYYARAMEAYEAIGQ

SEQ ID NO: 490047 - protein, 350 aa, unidentified
MEQNNEVILGVDTHLDAHVGAVISETGKLLGTLSVSTDTAGYLNLVTWANSFGHLLRAGVEGTGTYGAGLARVLRDHEIEVLEVNRPDRATRRSRGKSDPTDAENAARAVLSGKATAIPKEQSGAAEAMRAVSVARRSAVKAKTQAINQLRALLVSAPQEIRERLLKTKTAECVASCARLRSLGNTPMLQTLTTTLRLLAKRWLALAEELNTLDAMLDRLTSQHASRLRERFGVGPQTAAVLVAVAGDNPERLKSEAALAALCGTSPLQASSGKTVRHRLNRGGDRSANNALWTIAMVRMRSDPRTRAYVERRTKEGMSNKEIHRCLKRYIVRELYPLILADLAESTRVP

SEQ ID NO: 490048 - protein, 424 aa, unidentified
MRLVDAVIGVDAHKRSHTLVAVNPLGRKLAQLTVATTTEGHSEALRWARARFGRDLVWGVEDCRTLTARLERDLLAAGQQVIRVPPHLMSRSRASSRELGKSDPIDALAAARAVLREPDLPVACHDAHSMELRLLVDRREDLVQHRVALISRMLERIHQLDPAWAEPRNWEYRKPREELRTWLATQHGLLAELARDEFDEIVALIDTAQALERRIDGRVHEAAPALLGIHGCGNLTAAKIVAEVAGIDRFKSEAAFARHVGVAPIPHWSGETTRPLRPIRHGNRQLNVALHRIAMVQITHPGPGRDYFQRRIDEGDSRQRALRSLKRRLARVVYARMKADSRNGGRNGRFPTLPRVMMLPLANLTSATQPPTAGACVGRPRALDAYQAALACRMRNYGEKPTSIAAQLGVSVSTIKRALNQGNR

SEQ ID NO: 490049 - protein, 347 aa, unidentified
MNGDYAGRQVVGMDLHRRRSVLVRMTEDGRKLGTARIANSPAALRAELARAGENPRVVLEATYGWYWAADTLAAAGAEVHLAHPLGVKAFSYRRVKSDARDAADLADLLRMGRLPEAWITPPEVRDLRELTRYRHKLVGLRTSCKDQVHAVLAKLGIPVTCSDLFGAWGSRKSSSQALPQPYAGKVTSLRQLTGELSTEITMLNEVISDLLAGHPGYLVIRQLPGIGPVLAAVIIAEIGDVTRFRRPGQLASWAGLTPRHHESDTTIIRGHVTKQGSRLLRWALIEAIQRTPAGFGPRDAKDAIIARRGAGARNIAKVAAARRLLTLIYYGLRDGQIRCLPEPARAA

SEQ ID NO: 490050 - protein, 359 aa, unidentified
MLNDSTTFLGLDLGDKHSHLAILDQGGEMIEETRLPTTQAAFHRKFSTLSACRVAMEVGAQSRWVSHLLKELGHEVLVANARKLRAIYANPRKDDRTDAETLARLARLDPSLLSPIHHRSPKAQADLAVIRSRDALVRSRTLLINHVRGIVKSFGDRLPSCSANYFAKKVASDIPEPLQPALMPILETIASLTQQIRAYDRQIKSLCEIKYPETKLLRNVSGVGPLTALAYTLTLEDPQRFPKSRDVGPAIGLVPKRDQSGGRDPQLRITKTGNIFLRRLLVSSAQYILGPFGPDCELRRWGLRLAERGGKNAKKRAVVAVARKLAVLLHHLWKNGEVYDPFYHTQKEETGSAVLPTAA

SEQ ID NO: 490051 - protein, 338 aa, unidentified
MKLYCGIDLHSTNNWLGIYDEEDRAVVSKRLPNDLGVVLESLEPYKAELAGIAVESTYNWYWLVDGLMEQGYRVLLTNPAGNEQYNGLKYTDDRHDSRWLARMMRLGIVATGYIYPKEERPIRDLLRKRMRLVQHRTAHIVSVLNTIARNTGSSLSWSKIEAMSDDQISKLLGDELIGMAPRASLEVIKSLDGQISKIEKTAKARAKLRSEYELLKTVWGVGPILRLTIMYETGEISRFSQVGDYCSYARCVGSVRISNGKKKGENNTKNGNRYLSWAYVEAANFASRFYPQAHRFIQRKRAKANHTLAVKALGHKLARASYYVMRDQVEFDPARLFG

SEQ ID NO: 490052 - protein, 391 aa, unidentified
MSMYFIGIDISKYKHDCCIISAANQKVVSKVIIKNNKAGFNELLTIIHSLANPADIRIGFESTAHYALNLELFLENSLLTFMEVNPVLISEYKKSKTLRRTKTDSVDCESIARWLMTVEYKPHSKGFYHAYSLKSLTRLRDKLIRQRSFYLVKITNVLDHTFPEFKPFFNERLSKTALYLLENYGSAEKMARMNSASYEKLRSVSRGKFSPQQFLRLKELAVNTVSVNNSIFDVELNSLLSLYKSLVKEIDTIKKEINQLIEEVHPHYMSVPGIGPLSAAVIYSEYGDISNFTNPGQMLAFAGIEPGINESGTESHGGKMVKRGSSQLRYTLINCCLPLIRFDMTFATYYAKKRGEGKPHRVAITHVAKKLIRVIYALESQDIDFNAQELR

SEQ ID NO: 490053 - protein, 341 aa, unidentified
MVIKAIGIDLAKSVFSLYGIDDHGKCVLRKTVKRHQLLNEIAKQPACLIGMEACSSAQHWAREFIKLGHDARIMAARFVIPYRKSQKNDSNDAEAICEAVTRPNMRFVAIKSAEQQAVLCLHRLRRGLIKDRTARINRLRGLLAEYGFSAPNGRYPGQATMYALLEDAENGLPDLARRLLKECWDSIETLSKQILSYDRQLSELAKQSAAAKRLMTIPGIGEITATGLVATICDGKQYDNGRQLAAWLGLVPRQYSTGGKNRLGRISKQGDSYLRTLLIHGARAVIRTCKDKEDRLSLWVKSLLARVGFAKTAVALASKNARIAWAILTKETEFKTEIVTS

SEQ ID NO: 490054 - protein, 387 aa, unidentified
MPPTAVALIPNAVDYERTLVLAIELSNKSWVLAAQVPGLPHTKAKRTVNPEAEALLTAIAGYRARAAATGRSIQRVIAVYEAGWSGFWLARWLKRHGVEVHIIQPSSVPVDRRMRRAKSDGIDAELLLRTLLAWLRGEPRVCSMVPIPNEADEDARRCVRERTELISERIGLTNRIGAVLATLGVSDYNPLLRNRNRRLAELRTGLGEQLPRNAHAKIMRLLARLELVLAQIAELDRERDAVVETEASDKASKMIQQLASLRGIGIQSATVLVREAFVRCFANGKALGSYAGLASSPFNSGAIEREQGIGKAGNRRVRTVMVELAWLWTRYQPDAAQVCWFRERVGSTGRRVRKIMVVALARKLLIALWRFVTDGVVPEGAVLKPAA

SEQ ID NO: 490055 - protein, 432 aa, unidentified
MDIVHPRVAGIDVHKKVIWVAVRLPGQEPGQRAVTVRRFKAFWRSLQTMADWLAELGVSDAAMESTGVYWWPVYHALAGAGIEVCVCNAAHMRNVPGRKTDLKDCQWIAELHEYGLLRPSFIPGAQVAALRQRTRYRKKLIEQRSSEGQRLAKVLEDAGIKIDSVASDMLGKSGRAMIEALIAGERDPARLAGLALGVLRRKTEELAMACDGRFTAGHGQMCRLHLDAHDHLTAKIAELDALVAEAAAPFAALIARLVTIPGIGQRTAEVIIAETGGDMTRFATAARLAAWAGLAPGDNESAGKRKKAPARQGNPHLRTAMVEAAWATWRTATRPGARFRRLARRFGKGNEKKAAIAVAHTLLSIAWAVMRYDADYIDAGADYYERRDQRNREHLVRYHQNALARLGLQVIITQPGDGAPPPSSPDNPGQAA

SEQ ID NO: 490056 - protein, 364 aa, unidentified
MEGKKKPVTRYVGIDLGKRTYEVAIVEKGAVKKSNGRTCVTGRQSLYKKLRPTDKVAVEAGNLAFIIAKELKAVVGCRVYVLNPSHLPLIYGSMKKTDKEDSLKLAHILEDFQEERLPVVPVPSEEEMKKRKLLAGYRRAQQGRSREINKLHALFLAQGITTVLRKDLSSGEQRKETIKALTGLEREEAEYLVACLELHERRIEAMSLQIKNESACDEVIQRLQSVPGVGPIVAFAFVSHVGAERFENASQVSNYLGLVPRVYISGETVRYGRITKRGNGYLRALLVQAAWSLTRTRKGGKLKERFEYMTVEQSKSKKKAIVAIARRLAELLYTMMRDGTKYVSKPFIREKKALEELAQLAISA

SEQ ID NO: 490057 - protein, 373 aa, unidentified
MPKYSTAFGMDVHLRSTTVCALDADTGEAVTRRFPGNPWGEIAGWMDGFPGPSLAAYESGYLGFAPQRELAGLGVECVVAAVSKIPRSAADSASKNDRNDAARMAKAILAHDISPAWVPSPEVEGIRDLAGAYDGATARLATAKQRLLAFLARRGFVYGGTTPAGNPRKYWTYDFLRWLDKVRPEDDGGVRTLAALRNEVEAAAEARADLLSEYRAAVDASPIAAEVAALQSIKGCAFALAAAFSAEVGDFTRFRSGRQVTAYFGLAPSQRSSGGSVRLGGISGAGNALVRKLAVEGSWCYAAARHQPKLMPRDTGVPLEIRMHGRKGSERLLRRREEMLARGTPAAKANAATAAELVRWLWALGMMCREGAE

SEQ ID NO: 490058 - protein, 348 aa, unidentified
MVHFVGLDVSVKETSVCVVDDAGKVILEQKVPTEPADIIALLASLGVSFGRIGIEAGPLSQWLVNALTAAELPVICVETRHMKALLTAQQINKTDRNDARGIAQMMRVGLFKPVHVKTLVAQEQRMLLTSRKLLQRKLLDVESDLRGTLRNFGLKVGVASRSRYEARVRELVEGFPRLAAIVEPLLNVRRVMRQQLAVLHKMLLDTVRDDPVCRRLMTAPGVGAVVALTYRATVDQPQRFVHSRAVGAHAGLTPKRYQSGEADYDGGVSKCGDALLRTVLYEAAHSLLTHNGKWSWLKAWGVRVAQRRGMRRAIVAVARRLAVVLHRMWVDGSEFRWRKDSATVPAVT

SEQ ID NO: 490059 - protein, 482 aa, unidentified
MKPKSPEKAKPATRRPMQGNWHQMNRKQRREMTRRIQSEDLSLAVIHPDAAGIDIGNESHYVAVPPTRDSQPVRRFGCTTAELKEMAVWLKQCAIRTIAMQSTGVYWIAVFDILEAAGFEVYLVNARETKNLPGRKSDVQESQWLMKLHTYGLLRNSFRPSQEVRTLRTYWRQRNDLVQAAGRHIQRIQKALTQMNIQLANVLSDVSGMTGQAIIKAILSGQRDPHELAAFRDPRVKASAEEIARSLEGNWQEDLLFVLRQEQHGYEFCQKQMAECDQQLQQYFSHSEDRSQGASMPQEKRKERLRKKKGNKPQFDLRAELFRITGTDLTRIDGIDVMTAMTILSEAGWDMSKWKDEDHFVSWLRLCPDNRISGDKIIGKGRLPSKNRVTIALKMAACTLRTSNSYLGAQFRRLRTKLGPPVAIKAMAAKLARLVYHMLRDGMQFVDRGAQFYEAQHRNLQIKSLKRKAAALGFQIIEAAAA

SEQ ID NO: 490060 - protein, 414 aa, unidentified
MEVMHTRCAGLDVSKKDAKVCVRVAGKGRTKTVETVTTWSSMTNQVLALREHLIEQRVTCAVMEATGDYWRQFYYLLEDAGFEVMLVNARHARNLPGRKTDVSDAAWLAQLAAHGLVRGSFVPPEPIRHLRDLTRTRTAITRERGREVQRLEKLLEDSGIKLSAVASDIMGVSGRAMLEALIAGQHDPAQLADLAKRRLRSKIPALTEALTGRFGEHHAFLARVHLDLIDKHTQAIAELTDRIEVVIEPFRGFRDLICSIPGISTLVADVVTAETGTDMTRFPTAGHLASWAGTCPGSNESAGRVKSTKTRPGNPYLKGALGTAAMSAGRSKGTYLGARYRRIAARRGPMKAIVAIEHTMLVAIWHMAQTGELYNDPGPDFYTRLHPDKAKRRAIEQLHAMGYHVTLNPLPESA

SEQ ID NO: 490061 - protein, 369 aa, unidentified
MTVYIGVDLHKTQFTVHERTEETVESIEQIKQYPTTEVGYAAFLARITEYKIGGFTVKIGVESTGNTRFFKAQVEKVGAHVTVINTLKFKVINESTKKTDKHDASTISEFLSKDMLPESYPCSKETENLRRLLKSRERLVHSIVGQKNEIHALLVSMGLQDESRSLQSKKGRQEVLDALSSRSDLVLEAQSVKLMIEIIEQMSQSVKLIEKQLSELTKDDEMVSRLMTIRGCGKITAWIIRSYTEDIGRFASAKKYAAFCGLVPWVQDSNETVRHGRITKRGPQELRTAYVQLVLGIRRCKDTSGWRIMQRLDYMKKNKGSGKSIVAAARKMAEIVWALLTEKQDFDSTKMMGRYKPMSLAEQALVAMN

SEQ ID NO: 490062 - protein, 369 aa, unidentified
MKMAIGIDVHKETSTAYAVYAGDSEEKGKQKEYLESFNKEFGRFTSTPEEYKRLMAFVRGHECHILLENSTKTHEVYWILKNGGLSVTVAHSTDLHRITRSVKKTDHHDSVELAGYMRRMLRGEVEFAVSFIPSPEWMVKREMCRGVLAEKEYLANTKKRIRAHLLLHGISLSREYEDIAVNTALIEMSIINDPYLRMLVRFADDAKKRVHMGEKTIEGMFSGDKTCELIDSVTGFGHTSAAYMSALIVDVNRFRSRSEFTASFGVVPKMRSSGESNPSCATTHRGDDLMRKRLMDCTRAHVRFEKDSVVAVMYNRLVNKGKSKREAQVAASRKLLTVVWSVLKSGVPYSSDSKVLKDAREMEESSAED

SEQ ID NO: 490063 - protein, 316 aa, unidentified
MLYVGIDIAKNKHDVTALNVPGKTVLKPLTFSNNKAGFELLDLSLRQLNQDCLIALENTGHYAFNLLNFLHEQGYKVYTYTPLLIKEFAKSLSLRKTKTNKKDAHGIALKLLSDPNREQFQHDNRQVELKILARHIHRLKKKQSDWKVQYTRCLDIIFPELDKIVEKHSEYTYQLLTCYPNPQKRLEAGFDKLIEIKRLTASKIQDILSVAPRSIGTTSPAREFEIIENIKHYKRLIDKAETCVNDLMAEFNSIITTVTGIGNRLGAVILAEIQNIHAFDNPAQLQAFAGLDSSIYQSGQIDLAGRMVKRGSPHLR

SEQ ID NO: 490064 - protein, 353 aa, unidentified
MEYIAFDAHKHYTLASVARPDGQLVREQRIAHERGALQQFLERCEPGSPVAVETVGNWYWIIDEIEAAGCVPRLVHARKAKLMMGEINKTDKLDVRGLNQLQRTGTLPTVWIPPGELRDQRDLPRTRMVLVRQRTQLKNRIHSTLAKYALHDIEVSDLFGARGRALVRQRLELLPPCTAYTTRHLLEQVERLDHQVREFEQQIRTLFKPTPTIQHLLTLPGVGLTLAVVIALEVGDVVRFPTAEKLAAYAGTTPRVHASGGKTRFGPSRPDVNRYLKWAFVEAANAICLNRGRTPRRHVTRLYERVAQRKGHQKAIGAVARHLAEATYWVLTKQQPYREPKTAAVSSTGDKRG

SEQ ID NO: 490065 - protein, 411 aa, unidentified
MDVLYRCCAGLDIHKDTVVACVRRLDEHGHLSEEIRTFGTMTVALLSLADWLAEHGVTHAAMESTGVYWKPVYHVLEGQFELLLVNAQHIKQVPGRKTDVKDCAWIAQLLQHGLLKGSLVPPPFQRELRDLTRQRTQMVREQARVAQRIQKVLEDANIKLASVATDVMGASGREMLRALIAGTTDAKEMAKLAKGRLKAKKASLQQALTGRVTDHHRFMLSMHLTHYEQLEALIAQFNERIGGQLVPFVQEVELLKTIPGIAERTAEVLLAEIGPDLTPFPTADHLASWAGMCPGNNESAGKRRSGGTRKGNQWLRSALIQIAWAASRTKDTYLSAHFRRLKARRGAKRAAVAVSHTILVIIYHVLTRKSIYQDLGADYLDRLGADRLTHQLVKRLERLGHKVTLQPQQAA

SEQ ID NO: 490066 - protein, 359 aa, unidentified
MDKTLNSNKAVGHGQPVYVGLDVHKKSWSVSVYSSQGEYKTFSQPPEADKLVNYLKRTFPDSQYYSVYEAGYCGFWIHDQLQQQGVVSMVVNPADVPTKQKEHQHKRDRIDCRKLARNLCHGEMEGIYIPSPAMREDRTLVRTRQAFVKKRTRCKNQIKGMLFFYGIHLTDEEAYAPWSADFIKWIESIRMQRDSGNAALKAYLEELAYLRQVINQVNQEVLKLARSEEYAVPVKVLKSAPGISTLSAMILLTELCDMARFASLDTLCSYVGLIPAIKSSGETEYVRGITPRRNAYLRWILIEAAWVAVRKDPSMMMAFNEYCTRMRKNRAIVKIARKLLNRIRFILKHRTPYVPVRAQ

SEQ ID NO: 490067 - protein, 412 aa, unidentified
MPNDEYQLYVGVDWATQAHQVCMLDPGGDRVAEHSMPHTGAGLAALRTDLRQRVSDPARIAVAIEVPHGAVVDALLEHGCHVFAINPKQLDRFRDRHTVAGAKDDRRDAFVAADALRTDRGAFRRLHPEDPLLLQLRELSRLHDELVQELGRLANRLREQLWRFYPQLLTLSPAADEPWLWTLLQQAPTPAHGRRLARRAVRALLTRHRIRRLTADAVRAVLQEPALPVAAGTVEAASEHVGLLLPRLRLVHEQRTRCERRLEELLERLAAPAPGDDPEEHRDVTILRSCPGVGRVVAATMLAEASRPLAARDYQTLRAHAGAAPVTRQSGKTRLVSMRRSCNGRLRAAVFHWARNSIRLDLHCRAHYQRLRQRHGHARALRGVADRLLDVLVSMLTTRTLYDSQRRRRHAA

SEQ ID NO: 490068 - protein, 429 aa, unidentified
MNMNTNPLPQPATAPAAAAPPPVAWIGLDWGHHTHAFALQDRSGPPAEGTLLHSAEALHTWLRDLEKRFGGRPVALAIEASRGAVIHALVQYPWLTVYPINPVTSARYRSAFTPSGASDDLPDARVLLELARDHAAKLRPLETQDAQTLKLTGLVEARRDTVDRRTQVLNQLTSLLRAYYPQALELVGGLDTELAVAFLSRWPDLLTLKAVQPGVLKRFYYAHHLRRPELLTARLQFIQQAVALTTEDARVSVAVLQLRCLLDQLRAFRKHVAILDAEIKTTFAAHPEVALFRDLPGAGPALAPRLCVAFGTLRTLYPDPASLQKHAGVAPVREKSGQSLWTHWRWLAPTFLRQSWVEWAGQTVVHSAWAKRYYERMKAKGKGHHAILRALAFKWIRVLWKCWQTRTPYDETRYLKQLVHRKSPNAVPA

SEQ ID NO: 490069 - protein, 347 aa, unidentified
MEKVTRIGVDTSKNVFQLHGVNAEEKPVLRKKLTRPKMIAFFKDLAPTVIAIEACGSAHHWARQLSSFGHEVKLIAPQLAKPYVKRGKNDAADAEALCEAMSRPTMRYVPVKTADQQAALMLVGMRDRLVRNRTQLANAIRGYAAEFGLTVAKGICRVEVLLTDIASDDTLPELARDLFAIHRREYELLQVEIEKVEARLMEWHRKDECSQRLSRIPGVGPIGASLLMMKTPDPRLFKSGRDFAAWMGLTPKDHSTAGRARPGGITRAGDELLRSVLVNGATAVLKQVRAGRGRNASPWLQKLLEHKKPKLVAVALANRTARIAWKMMVSGESYRATPVQPVLAKAA

SEQ ID NO: 490070 - protein, 408 aa, unidentified
MSIVFGIDVSSRDSSVCVLQSGVTREYKVTNDTIGFKTLLIDLKEYAEHPQIILEATGIYSRRITRFLDEYDYDYVLLNPLKAKKEINQGLRRNKTDRNDAYHLALAQDRNQHQPNRKEPEAYHQLQSLSRAYEELTHDIVSSKNRLHKYLQLTFPELETIFNNSRGVNYWYLVELFPHCQDVRNLDVSTIAKQIKDFKGYGINRAQKLAIKFKHLADLAYPAVDQDDPERDEVVYYANRLLWLTADRERRSEAMIKLAKTLPNRDLEILMSIPGIAEITAVRILAELGDIRRFSNPNKINAFVGIDPGRYQSGEKDSSLRISKHGNAVARKILYRAIGQIDLAAKTSPCHIADYYERKKQFSQTKGFKKIAIASIHKLLRTVYILIITDQMYDYNVANNNQKDFCRN

SEQ ID NO: 490071 - protein, 361 aa, unidentified
MKRGHFIGIDTHCKFCAIAVVDSLGNVVYRDRCDTSIAALLKIMEKVRRPRALMIEEGPLAGWLWRELHGAVDRMVVSQPRRNRLIWEEGDKDDDIDGEKLAQLLRGGFFKEVHQVESLDRAVFKHQVALYHFRVRQRVRESHRLSSLFRQHGVMIRERHFASDTDRPTLLNRLPGHGPLREAVQLFLASYDEAVKQEELWRKRLVRLAQKEEVLQRFAELPGISWIRAATLYAYLDTPWRFRSKSALWKYVGIGLERAGSGNGPEHVGVPLLTHRLIKSTILAAAQTAAAHADNPFAELYRRWLKQGLSARLARRNVARALSATLWGLWKNGSAYRPEWVGVAAAAQRSDADVSARTMAH

SEQ ID NO: 490072 - protein, 421 aa, unidentified
MNMSKSMFCGCDVSLENNTAWLLLDDGSQPTKMFGVDNNQLGAEILVERIYAIAKEHCVSDILIGTEATSMYDWHLLEYLSETKLSTEFSLKLYRFNAKWIKNFKKSLSPRGKTDPVDSFAIAERLRIGRLPKEYIPDSKYQPLRKLTRFRFHLMQQIAREKDFFLANLFLKASAYSSVKPFGSTFSATSLAVISDFFSVDELAAMPIEELTEFILEKGKSHFSKPGEIVDNLKRVARESYRLKPELAPTVNLILASTFNNIRCYKDQVKLVDQAIAENLKAFKHTLESIPGIGPVYAAGILAEIGDVHRFPNDSSLAQFTGLTWPKYQSGKFQAEETRMSHTGNQYLRYYLVEAANSVKRCDATYKAFYEKKYAEATKHHHKRALVLTARKLVRLIWTLLTRQVLYQPGYCSFEDLSKIG

SEQ ID NO: 490073 - protein, 339 aa, unidentified
MKLYAAFDLHSRSSHLAVVDEQGNKVFKTKLANEAENMLLALEPFREGLAAIAVESTFNWYWLVDALMESGHHVCLANPVAVQKYKGLKYSDDASDAIWLAEMLRLDILPQGYIYPREQRPIRDLLRKRTHLVKLRTSLINSLANIVARNMGVSLGGNKIKQLTCDHVAPLLDGDDDLALSGRVSKEAIDYLTRQITTLEKVLECKLPLKQEYALLRTIPGVGTILSLTITLETGPIGRFPQVGNYASYCRKVPTRWTSAGKQKGSGNKKNGNKYLAWAFSEAAELARRFDPKIKAYYDRKAARTNAMIAHSTVAHKLSRAAYYIMRDKVPFDRERLFV

SEQ ID NO: 490074 - protein, 322 aa, unidentified
MAMLSFGGIDVSKDRLDVMVLPEEQCSSVSNDAAGWAKLVEQLRGSSIAAIGIEASGGYERGVMRALLAAGVPVRHVNPFKLRQFARASGVLAKNDPLDARLIASFVTIMPTRPAQRQTPAAEKLAEMLAIRRQLSAEKVAAENASRLLEDAMLQRLSRRRIVRLAADIDLLDKRMVEIVASDDALVHRYRLLTSMPGVGAVLACTLIALLPELGRMSRKQVAALVGVAPYAFESGAFKGRRCIWGGRAHVRQVLYMAAMSASNWNPVLKAFHDRLTTVGKLPKVVIVAVMRKMITMLNAMVRDNVVWADRLSGRQNVPTAR

SEQ ID NO: 490075 - protein, 338 aa, unidentified
MTIVMGLDQHRAQITAEWIDTSTGEVSRQRVAPAHRAGVRRFAERFRDQELEVALEATTGWRFVVEELSAVGARVHLAEPAETAARRGTKKRAKSDRADARHLRELLMVGRLPESWIPPEHLLDLRARVRLRQTLVDARREWQQRMQAVLYHHGVPPRSWLLGAESRAWLTSLALPAAAREQIMVALAMIDAIDAQLAPLDRELRAYARRQAGCRALMRHYGIGPLTSVTILAELGDARRFSSSREAVRYAGIDITVHQSDARRAPGRLSRQGPSALRWALFEAAQCARRPASPDHDYYLQTAARLGGNRACLAVSRKLLKRSYHTLRELGEEALQPA

SEQ ID NO: 490076 - protein, 379 aa, unidentified
MKDSIIWVGLDVHKVSIRVAILRPGAKGVEECEVANRPQDLRRFARRQVREAQGAEVRCCYEAGPCGYSVQRVLEAAAPLVCEVVAPSLIPVRAGDRVKTDRRDARKQARLNRAGQLTVVHTPSEEQEAVRDLTRCREDAVEDLRRARHRLEKMLLRRQLIYHEGRMWTQKHERWLRSLKWERAVERVVFEDYLRAIDAVRERLLDLELAVQKVAEQSPYREPVGWLRCFHGIDTVTAMTIVSELGPVERFEKASHLMSYLGLVPSEWSSGEREQRGGLTKTGNVHLRRVLIEAAWHYLRRPALGPTLRRRRQGQPSWALALADRAQARLHRRFWHLLSKGKPRNKAVAAVARELVGFIWAALRQQALPGEANEERPAA

SEQ ID NO: 490077 - protein, 340 aa, unidentified
MDEVGIVGVDLAKQVIQVHGSAADGRVLFRKKLSRAQFAKLMAGLRPCVVAMEACGTAHYWGRELAGHGHDVRLIPPVYVKPFVKRQKNDAADAEAVAEAAQRPTMRTVAVKTAEQQAQAMLFRTRSLLVGQRTQLVNALRGHLCEHGILAGRGRGNIARLAADLAAAEVPALVTEMADLYFAQIERIGTEIATLDRRIAAAARADAQVRRLQAVPGIGPVCAMAIATFAPDLREFRRGRDFSAWLGLVPRQLSSGGRQKLGRTSKMGQRDIRRLLIVGAMSVVRWKGRDGGRPGSWLSRMLARKPRMLVAIALANKMARVIWAMSVRDETYRDPTGAVC

SEQ ID NO: 490078 - protein, 414 aa, unidentified
MLTERSPAPATRFVALDVHRQYLMVGAVDIQQQVVLSPRRFGFAAFAEWAHVHLTHADAVVLEATSNAWLLYDQLQPLVSEVVVAHPQAVKLIAAARVKTDSRDTIKLASLLAANLIPAVWVPPQEVRELRALVTHRNRLVQQRTQAKNRLHSVLQRHNFDPPPGTPFAVHQREWWLTLDLSLAEKLRVQQDLSLYQTLETLIQEIEAELGRLSTCDPWVKQVPFLVQLPGLGVLSALRILAAIGEITRFPSAKHLVGYAGLGASVHQSGETNRGGRITKEGRSDLRGVLVEAAWVAVEHHPHWKAQFERLAARIGKQKAIVAIARKLLVTIWHVLSQQEADCHAQVEAVTRKLLNWISHTGTIPGKKRDRLLLLYDYLDQLGLSEEVEQVNYYGSTYRLSARQKLLRATHQRG

SEQ ID NO: 490079 - protein, 403 aa, unidentified
MTLAEDCEHVFGGVDTHENSIHVAVVSDRGKDLEDREFPTTPPGYRRALAFLASFGQIVAIGVEGSSSYGAGITRAARSEGLVVVEVMRPERAERRRLGKSDPIDAYQAARAAMATHRVSPVKDAGAIEGIRALHNARRSARKARTAAMVQIYHQLVTAPAEIREKYRDLASDKRITTLARLQIRSDRPAAERAVLLALKTLAIRCQQLQDEHERLGKLLDQLVTAANPGLRGAYGVGPDTAAQLLITGGGNPDRLRSEAAFAALCGTSPIPASSGKTVRHRLNRGGDRAANGALHRIALVRMSSDPRTRAYVAQQREKGLSSKEIQRKLKRAIAREIFRYLNTPMLIPEITDLRPTRQAKNITLTAAANHFAVWPSVISELERGLRRDDTLANAYREWLRAA

SEQ ID NO: 490080 - protein, 366 aa, unidentified
MLQKAELSGQADSENNLGGSSETMYYIGLDVHKKTISYCVKDAAGHVHSEGKIGSTRRELDAWVRTLPQPRMMAMEATIFTGWIYDHLLPHAEKVKVAHPLMLRAIAAAKRKNDKIDAGKIADCLRCDFLPECHMAPTAIRDRRRVLRYRNLVIKQSVQMKNRVSGLLMETGVSYNKQRLHKVGYFSDLLSHNEEVSDSIRPLLKICREQIERSRKLDYALVSKLERDPLLKDRLERLRTVPGVGSITALTWALEIGDFTRFASIKEAISYCGLCGEENSSADKVMRMPLSRQRNKHIQSVLIESAKLATRYSHELAMVYDKERLRGNPNRATLAVARKLVAYMLAVERRKQNFVPAEEFRATAAA

SEQ ID NO: 490081 - protein, 344 aa, unidentified
MTYYAGIDVSLRTVNICVVDDDGEFVGETKLSSDVQEIIAYLDDLEQDIDVVGLEAGTLAQYLTYGLQSAGFDVVCMEARQVKAALSAMRNKTDKHDARGIAQLLRSGWYSRVHIKSMQSHHIRMLLTSRKAVLNKCIDLEQEVRGLFKIFGIKLPPKLGHGAFDRTVRAVIEADETLSHALLPLLDARLVLYKTFRVLDNRTRHLAQGDSLCERLMTAPGIGFVTALTFKAGVDDPTRFKRSRTVAAHFGLTPRRLQSGEMDIEGRISKSGDAEVRRTLYTAANSVLTRSSRWSSLKAWGMKLKKNRGHKKAVVAVARKLAVILHRMWIDDAQFQWGREGVRS

SEQ ID NO: 490082 - protein, 353 aa, unidentified
MMVVGVDPHKQSHTAAAVDELGRKQAQLTVRARRDGHRELIGWARQACPGGRVWAVEDVRHVAGGLIRELLAAGELVVFVPPKLMAGVRRGGRERGKSDPIDALAIARAALREDAHLPAARLDEQVLEVRRLADHRDDLVGERTRVINRLRWMVHDLAPELAPAPRTLGGSRGRAKLEAGLHALPDSAGRRIALSQLARITALTAEADQAERELAALVRRLVPALLQVTGVGVITAAKILGEIGDIRRFRSLAAFARHNGTAPIPASSGTGKDGPHRLNRAGNRQLNTALHRIALTQARCHDGARALLQRRGETAHETRKASLRVLKRHLSDVVHRALAADAWRLDAPAQQAA

SEQ ID NO: 490083 - protein, 349 aa, unidentified
MPVRRPVAAAIYGIDLGKIRFDVIANDAAGKPVQRVKLGRDTILRFFESASPALIGMEACPGAQWLARKLAAMGHTVRIIPAQFVKPFVKSNKNDARDAEAIAEAVVRPTMRFVEIKAEAQIDLQALHRVRDRIVSNRTQLICQMRAFCLEYGIAMRQGAGVFKIDISRVITDESNDLTQMMRAMLKELWDEFVLVDTRLAAVTRQVEAIAERLDAARRLMSIPGIGPLGATALLAAVGDGRQFRKARDLAAWLGLVPRQNSTGGKTTLLGISKRGNPYLRRLIIHGARSCVAHLNRERDRLGSWLDQLEQRMHRNKVIVALANKIARIVWAVLTRPGNLYERVDPAHA

SEQ ID NO: 490084 - protein, 312 aa, unidentified
MNTQQIFVGIDVAKAWLDIHVLPDGEGRRVANRPAGHRALARSLTARRVARVVLEASGGYERAVVAALRRTGIAVDIANPRQVREFARGRGVHAKTDAIDARILALFARQDPVHATAAPEPARDKLREYVTFRDWLGQELIALGNHLEHLQDRDLRADLEVRRQQLRIRIKKIELRLLQMVRAVPALARLYRRLCAVPGVGLITACTLIARLPELGRLSHRQIAALVGVAPFPRDSGNWHGKRMISGGRAAVRKVLYMAALVATTHNQTIKARYRKLRAAGKPPKVALVACMRKLIVALNAIVRDDAEPKTV

SEQ ID NO: 490085 - protein, 351 aa, unidentified
MRTSQKITGIVTTIGIDIGKNTFHLVGFDQRGAIILQQKVSRGQLERRVANIPRCLIGMEACSGSHHIGRQLAEIGHDVRLIPAQYVKPFLKGHKNDYRDAEAIAEAVQRPTMHFVTIKTPEQMDLLALHRVRSRLVGRRTGVINQIRGFLIERGITVRQGPRPLRKALSEILSSDTGALSPRMVGLIADLAQDWRRLDERIAAVSAEIEALAEQDHSCQRLMTVPGVGPIISSAVVAAIGNGTGFKQGRDFGAWLGLVPKQESTGDRTILGKISKRGNKYLRTLFVQAAHVVLERRPSAAMRGLWPWVEQASKRLHRNMLAIALANKLARIAWAVLARGGTYQPRITHAA

SEQ ID NO: 490086 - protein, 400 aa, unidentified
MAVAVGIDIAKEIHWVCLKITETGQLLASHKVDNTPADIAGLVDEICATAEQHGAATVGIDILGGIAALVEAMLLDAGITLVHVPGLAVNRARRATVGGEHKSDPKDAAVIADQVRMREDLRPVTAQRDVDVDLRLLVGRRSEIVTDQTRRAARLRDLLVSIHPGLERVVDVTGKAGLHLLTRYVTPAEIRAAGRRRLLAHLRRAGHLRETTMTALTDAAVAAAQAQRITVPGETVAAELIRALATEMLSAREQLKMIDARIEAILAEHPDAALVRSLPGMGATLTAEFLAITGGIDRYTSGDQLAAAAGLAPVLKQSGKSRYLQRATAGDKALKRVFYQSAFIAISCDPASKTYYQRKRTEGKVHHQAVISLARRRVNVLHAMLRNRQPYNAGHGASAA

SEQ ID NO: 490087 - protein, 345 aa, unidentified
MESMYYIGLDVHKKTISYCIKDRSGQVLQEGKIAATRGELDGWMKTLPQPWSVAMEATIFTGWIYDHLLPHAAQVKVAHPLMLRAIAAAKKKNDRIDAGKIADGLRCDFLPECHMAPTEIRDRRRTLRFRHLLVRQRVQLKNRVSGLLMETGVSYNKQRLHKVGYFRELLSSNEDIHPNIRPLLKLSRDAIVRLQKTEYGLVSSLQRDPLLADRIKRLRTVPGVGPITALTWALEMGEVSRFPSIKQAISYCGLCGDEKSSAEKVIRTPLSKQRNKHIQRVLVEAAKLAPRENHELALVYETEKQKGNANRATLAVARKMVAYLLAVDRGKRNFVPAEDHRGVAA

SEQ ID NO: 490088 - protein, 412 aa, unidentified
MPHDFEARYNVVPLNAITLIKEVSMLGTDIIKAKFLPRDYDVFAGLDVDKKHIDVTFSDHDQRMKSIKIPYSADHLLAYARRHYPGQPIAFAYEAGGTGYGLYDQITAAGYRCLVVAPSMVPTAPGQRVKTNRLDSKKISTALRGGELTSIHIPSEPYRHLRHLVHLRDTFVRQATASQVRIKALLLFEGIPFPDPQGRWSTNAWAQLRTLPCASPVRFKLDRLISMATFADEQARQTARELHRFCRHNTELSSTLELLMSAPGIGRITGTHLLARIGDWRLIRHVHQLPSFLGLVPCEDSTGDAANRGPITRTGDRRLRAKLLQAAWVAIRQDPELDDFYIRIYQRNPKPMAAQKAITAVANKLCRRIACILKEQRPYVLRDASSRTTKEETASPQGETRFPAETSAPPVP

SEQ ID NO: 490089 - protein, 411 aa, unidentified
MYIVGIDIAKRTHVGAIIDDTGKRCGKAFKIDNSVEGFNILLGKIAEISQDISQFVFGMEATGHYWLNIYTWLCDRGFTVHIINPITSDAARRLEIRRTKTDPIDAFLIAEVIRMGKYTKTQLADDDMMSMRDLCRQRFYIVDMASDVKKKVICLLDRMFPEYQSLFSDIFGRTSRELLKEGASPEEILALDTTKLAEILRKASKGRFDKEKAEELQNQARNSFAVLLSSQTVSLLIKQMIEQIELLESQIDEIDKLIANLYSSFNVKLTKIPGIGTTLAAAIYSEIGDISRFEKPKQLVAYAGLDPELKQSGDKRGEGYHVSKRGSPYLRRALWLASSCVIQHDKSFAYAYQHKLSQGKNKMQALAFISHKLLNVFFTILKNGIDYVPVFPPDVDVSKLAKKALDSQSSN

SEQ ID NO: 490090 - protein, 356 aa, unidentified
MIIIGVDAHKKSHTLVAVDGVGRKVGEQTVSATDDGHAKAVRWARATFGADVVWALEDCRQVTTRLERALLTAGAKVVRVPPHLTARMRRSARTPGKSDPIDALQVARVAQRETDLPVAVLDPVSREMKLLVDRRGILIAQRTAAISRLLWRIHELDPEHAVVGAQLNRTGHREDLAAWLADQPGLVAELARDELADISHQSELVDALTKRIKAQARTVAPSLVAMPGCAELTAAKIVGEAANVTRFRSVDAFAAYAGVVPVPNWSGGVIRHQASSRPGNRQLNSALHTIARIQIQYGHAGKAYYEMRVEKGDDPRKARRALKRRIAHAVYRRLRTDQRAQKTASLDARLDTLDES

SEQ ID NO: 490091 - protein, 343 aa, unidentified
MNKVYYVGLDIHKKTISYCIKTVFGEMIKQGMIAAERSSLREWVDSIPQPWIGAMEATIFTGWIYDFLKPYATQLKVAHPEMLKAITAAKKKNDRADAERIVDLLRVNLLPEGYMAPTELRELRRILRYRNHVVRAATSMKNKISGLLMEVGASYSKNRLHSRKYFETLLERVEDVPISVTELLKLSRTSLEMFQAVQRRLVDTLHNNKLIGQRVRKLMTIPGVGEITALTWVLEIGEEHRFNSLRQAISYCGLCSAQKESAGKEQRGPISKKRNKHLQTTLIEAAKIAPRWNPQLDELYRKELKKGNRNRATLAVARKLVAYLLAIDRRQAGFIQRGEDQVA

SEQ ID NO: 490092 - protein, 339 aa, unidentified
MHVTTVGLDLAKNIFQVHGITEDGTIAFNRSLRRAQLLAFFERLEPCLVGMEACGSSHYWARELSKLGHEVKLIAPIYVKPYVKRGKSDAADAEAICEAVMRPTMRFVAVKSPEQQAILSLHRARDLIVRQRTQTINMLRGLLAEFGVIFAQGVGHVVKFAKNATEGLLPDLPPAACEVILDLSEQLLALHLRVNWYGRRMTAAAKSEPRIALLQTIPGIGPITASAIVATVGSGEQFQSGRDLSAWLGLTPINKSTGGKERLGRISKMGDRYIRRLMVVGMTSRIKQIKSAPERFDPWFADILHRKPAKLAAIAMANRTARIIWAVLSRNQPYEVRAV

SEQ ID NO: 490093 - protein, 337 aa, unidentified
MFMRVYGIDLSMEKFDVNFIDQKGKERNREVKNGVVSISRFLSSVPKDVILCAEHTGAYGDLLVSLCNQANVPIALVPGYTIKHSLGLLKGKDDPIDARRIREYGERFTDKLVFSEYDEECIVELKQLYTLRHQLVKARKALLTSDKGRCHLPMQNVSVHNHIHTVLAALDTEIAAVEEEIEALIKANEELNENYELVKSIKGIGPVIATDLLIKTGNFKNIDTARKAASYAGVCPFPNTSGKMVGKSKTSPFADKKLKSLLFMGAKSAVKHNKEYKLYYQKKQLEGKPHYLIMNNVSNKMLRTIYSVVKNKTPYSQDYICLDPRERNINSSTKKVA

SEQ ID NO: 490094 - protein, 383 aa, unidentified
MKAVCGLDVHKDSIFLCILHSDGELFEQVFGVLTFQLEEMRKLLQKHHVFEVCMESTSIYWIPIWRVLSPHFTLRLVNPYFIKQLPGHKSDIKDAQWIAECTLKELVRGSFVPPEIIQQLRQYDRRIFDLNAEIVRKVSKVDGVLQRCNIRLSNYVSNIECKSYRDVVRRLSEGVTNPNELMKLVHGRIVNRHGAETILASLTGVVSQAEIDVLRQLHEEIGIAESHRNECQQRMLEICEKHFPEELERLQKIPGIKERAATSLIAEIGTDMSKFETANHLASWSGLRPRNDESNKKIKSRKITHGNVYLRNTIIQCAWAASRQKDCFFSRFSYHQTIVRRKNKMKVIVAVARKLLVAVWHVLHDKTDYVDFKPDREESANNG

SEQ ID NO: 490095 - protein, 310 aa, unidentified
MDIIAVGIDVSKDRLDVALRPSGEIFAVERNASGLDRLIERLRQLAPRIVALEATGGFETVAAAALASASLPVVVVNPAQIRAFAKALGQRAKTDPIDAAVIAHFAEATRPEPRPLPDEATRLLADLVARRRQIIEMIGAERQREKRTSMPRLRKSIGRVVGMLEKELAGLDADIDDAVRGSPAWREKEDLLASVPGIGTTIARTLIADLPELGTLSRKQVAALAGLAPFARQSGQWRGRSFIGGGRASVRTALFMGALVAMRHNPVLKGFFERLRAAGKPKMVALIAVARKLLTILNAMVRDNKRWQNA

SEQ ID NO: 490096 - protein, 393 aa, unidentified
MKQRKNAGSEPGNDTEIPSSMFISGLPACLNLDPDSRLTSIVKVIRLSSSPFFTENFRDKSMENFYFIGVDVSKKKLDFCVMFEGKVVHEEETANHQSAIMSLLHQLEEDYGIANDQILVCAEHTGQYTFPLACACKAVECKLWLENAAEIKYSSGVQRGKNDKVDAKRIAIYARRFQDKVQYYERPTEDIERLKQLESERTLYVADLAKYKGQMKDQKDYMPKALYERKMKRLQALMEDLEEAIQAITDEMDEVIVSCPVLYRQRELLMSIDGVGRVVATNMIITTEAFTRFDDPRKFNCYAGVAPFSYSSGSSLHSKARVSHRADKVMKRLLHLAAVAITHRIGGELKKYYERKVAEGKNKMSVINALRAKIVARMFAVIKRNEKYKPILS

SEQ ID NO: 490097 - protein, 407 aa, unidentified
MEVIYPRCAGLDVHKQTVVACVRIAGDGPALQEVRTFDTTTSGLLALADWLDSFGVEQVGMEATGVYWKPVWHVLEGHFELVLANAAHVKNVPGRKTDVNDATWLADLLAHGLIRASFVPPVAVQELRTLTRTRKQFVRERGSHVQRIEKVLEDANLKLSVVISDILGKGGRAVLQAIIDGHSDPQRLASCITTRVKASRAELLEALRGRISAHHRFMLKLHLGHIEALDKAIADIEKEVGLGLEPFRHAAKLLSTMPGLSSVSAHVVVAEIGIDMSRFATPGHLLSWACMCPRNDESAGKRRSTRLRRGGKWLKTTLVQAAWSAIKVKGSYLQAQFHRLRARRGAKKAIVAVAASMLTAAWHMLRDGTEWHDLGAAHFDRADAQKTANRLIRRLQQIGYVVQATPA

SEQ ID NO: 490098 - protein, 381 aa, unidentified
MKNKQAQGTLPNPNSGVLYMAYELGQNQWKLGFTTGLGQRPRVRSIQARDIAGLQQEIRLVRQRFQLPTEAPVISCYEAGRDGIWLHRYLHSQGIVNKIVDSASNEVNRRARRTKTDRLDVNKLLTMLMRYQLGEYQVWRIVTVPDPAVEDRRHLHRELASLKKDRTRHNNRIKGWLTGQGISLPVKGDFRDQLEALRLWNGHALPASLKSGLVREFERMQLVNQHIRQLEIHRREMLKTSSQACIQQVRDLMRLRGIGFNSAWLFVMEFFSWPAFHNRREVGALAGLTPTPFQSGRTNQEQGISKAGNRHIRSLAIEIAWGWLRFQPDSELSHWYQERFGHGSSRMRRIGIVALARRLLIEQWRYLETGTPPAGASLKTL

SEQ ID NO: 490099 - protein, 343 aa, unidentified
MAVMIGIDPHKGSHTAVALDDGEQFLGELRVRSAASQLERLLGWASPFEERTWAVEGAGGLGYLLAQQLVAAGERVVDVQPKLAARVRLLATGDTNKNDPNDARSVAVAALRSTVPEVRAEDHVKVMKVWAKRHRDLSRHRTRVACRLHAVLCELTPGGFSGEITAAQATRLLDELEPVGAVAAARHAVAVELVTDLCRLDDQLRDTKKRITAAVKASKTTVTELFGVGPIVAAIVIGDVGDVSRFPTRDTFAAYNGTAPIEVSSGERRRKVFRLSRRGNRRLNHAIHMAAVTQIRHRHSPGRAYYDRKHTQGLAGRAALRSLKRRISDAIYRRLVADAARPS

SEQ ID NO: 490100 - protein, 328 aa, unidentified
MAGTRCVGVDVSADEITVAIDGRAEVATLPNDTEGHERLVRLLKRRGRAARVCLEATGIYHLDLALALHRAVGIEVMVVNPVAARDFSRALLQRSKTDRVDAGVLLEFAQRMPFEPWRPPAPEILDLRAIVRRIGALTVTRTQERNRLHAAGRCAELTEAIAWDIEAHLEHLAQSLERLQQQALELVHAHSELERRFGRLVSVRGIAATSALRILAELAVLPADMTPRQWVAHAGLDPRALDSGTSLHKPARISKKGNRHLRAALYMPAMVAAREEPSVHSFYEKRLAGGLKPVQALVAVERKLLHAIHGMWSSNRDFDGQKFFAINA

SEQ ID NO: 490101 - protein, 342 aa, unidentified
MQVTSIGIDLGKTTFHLVTLGEQSKVLVRKKFSRKQLLAYTANIPGSLIGMEACSGAHFIAAAIRSQGHEVRLIPAQFVKPYLKSNKNDFLDAEAIAEAVARQNMRFVPIKTDEQLDLQALHRVRDRLVQRRTAVINQIRGFLIERGITFPKRPANLRNNMVALLEDAEANLSPRMRRLLEGVWQEWKQLEADIDGADAEIERIASADANCQRLRKIPGVGPLASTAMVAAIGNGAAFRKGRDFAAWLGLVPKQRSTGGKARLFGISKRGNEYLRRMFIHGARAVLYRVKYDTGGFGRWAHQLEARAPRNKVIVAIANKLARIAWAVLSSGEAYRHQPLGTT

SEQ ID NO: 490102 - protein, 461 aa, unidentified
MQIIHRCCCGLDVHKKLIVACLISLNEAGEFQKEIRHFTTMTKDILVLADWLTSVGCTHVAMESTGVYWRPIWNLLEGQFELLLVNAQHMKTVPGRKTDIKDAEWIADLLQHGLLRPSFVPPAPQRHLRELTRYRSTLLAERARLVNRLHKVLEDTNLKLTAVVTNIMGLSARDMLDALLQGETNPEVLAKLARGKLRKKREDLEQALVGRVDDHHRFLLTSLLTHIDFLDEQVADCNGKIEQFLSAPSDEKAELVSSASDDQRQEQALVSSTPVGTGSMLAQDQVPEEGPKVPLSYQQAIALLDSIPGVNQRIAEIFLAEVGTDMQRFPTAGHLASWVGICPGNHQSAGKQIRGTTRKGDRWLRHALIEAAQGAMRTKGTYLSAQGRRLTHRRGKKRAVVAVAHSILIIAYHVLQRQQPYQDLGSNYFDERERSAVARQSVRRLEQLGFKVTLETAGEAA

SEQ ID NO: 490103 - protein, 433 aa, unidentified
MVTPNSDTQAYWVLGVDCGEQKHRYVLEDEYKNRQGELWVDNRMDKIREALIKMLIKLPDGYRLEIVTEGLRSIGGMQVQAAIELGIRIWQVNPNALDHYRDVEGQPRKDDDRDADLLARMRINRVEGCRLALDVRPEERVLCRLTRLHTQLVEQRKRVAARVRSRLLELSPEVVASTWSGPKYNSEGMCAVLERWPGFTGLERAHAATIERELRSITKKGAGCKEMAKALLEMARRITLGIAEREVISMELDMAMQQLRLAKASLAKIDKEIKKAVNAHPIGQKLLAMPGVAHFTAGVLIGEILPLARNVPEGKAATYGGVTPLSRRSGKKDGPSRLARGVNKHAVRALYLSGVSAKSRSALDNAYYEKQLERHKGHPKPHVKAFLSLARQRFKVMYKLMTSDADYDKETLIASHLKRQELERAKKGRRSAA

SEQ ID NO: 490104 - protein, 414 aa, unidentified
MEGMVEVLHQRCAGLDVHKKTVVAAVRLVEGNKVITEVRTFATTMAGLLALADWLTQNGCTHVAMEATGVYWKPVWHVLSDGEIELVLANAAHVKNVPGRKTDVSDAAWLAELLAHGLIRASFVPDGQTQELRALLRTRKQLVRERSRHVQRIHKVLEDANLKIDAELSDMLGKSGRAMLDAIVAGVTDPVRLAALAHPNVKSPQAKLAEALRGRVTRHHRFLLQLHLQQIDGLNTALGTMADEIEANLAPFRTAVEIMTTHPGISTLSAQAIVSEIGTDMSRFATAGHLLSWAGLCPRNDESAGRRRSNRLRKGAQWLKTTLVQCAQAAKNKKGSYYQAQYLRLCSRRGPQKAICAVAASILTAIYHMLKNGTLYQDLGADHFNRRSKITQTQRLVKRLEHLGYAVEIQPLAA

SEQ ID NO: 490105 - protein, 412 aa, unidentified
MSPMLIGIDVSLRSHHVQFMDGDGRSLASFAVPNDQSGADTLIHKMLDTASKEKLKHLHIGMEATSNLGWHLAHYLKNELQNYEPNVKSQVYVLNARKVARFKKGYDNLPKNDRIDAWVIADHLRFGRLPHEMKDIIQYEALQRLTRTRFHLMKNIKRDKTYFLNQVFLKFSGMRQDNPFSNTFGNTSLAVIQELEPDQIMAMSMEELIEFLQDKGKNRFENPEEIATYLKKIARSSYRLDKAMADPVNISLATTLSVIQHLESEVKKLDKEIAKIMKGIPETLTSVKGIGPVYAAGILAEVGGIDRFANHADLAKYAGLVWNQNQSGEFEAEETSRMRTGNKYLRYYLVQAADSVRKHDAEYGAFYQKKYDEVPKHKHKRALVLSARKLVRLVFMLLKTNTLYTPPERRNH

SEQ ID NO: 490106 - protein, 400 aa, unidentified
MLSIGIDVSKGKSTVCGMKPGGEIVYTPFEIQHTREGMSELVSLLHNSGEEVRAVLESTGSYHCPVVAALLENGIFVSVVNSLRMKRFCSQSIRKVKTDRIDAMQIALYGLAYWQELQPTRLPEDTYRELQLLARQYYQMTSILIKAKVDFNAICDQVLPGMQELMNDHAGRHKLSDFVLRYRHTTHILEMGETRFRKDYCKWAEKKGYRNRERMAAHIFATAQNGIPVLPNAPSTQIVITEAIRVLHTVEASRDAILTQMQALAKTLPEYSLVREMPCIGDTLAPRLIAEIGDVRRFHSKRALIAYAGIDAPPYQSGKFCANNRHISKRGNRYLRKTGYEVMQSYVMHKPANDPIFTFIEKKRGEGKSGKLAMVAGLNKFLRVYYGKVTELYRSLSAIE

SEQ ID NO: 490107 - protein, 357 aa, unidentified
MSYDIILAVDYHDENTVIRQFDERRKVESTCTVPSSAAALLQVVQEARKQRWRGGQVVWIQESTSGWARVQALLQDQVKFQLANVVQMPRLPKGHRQKTDRTDTARILREYRNGSLPQAHQPSAWWRQIRRLVCLRENLVNRRTALRNWINRYLAHETWESRVGLWSAKGMVRLRHYAEGLPEWDHIVVGIKLTELEQLEVPLSRVEAQMHEVYRHWPEAQQLDAVKGIGVIAAVAIAARIGPVQRFRNAEALIAFAGLAPGVRQSDATRRTGRIGGGGTDFHLRHYLIEATVWARALPRYRPTYERVAKRRGTKVGRLVVARLLLRSIFKVLRDGQRFNGEASNQAVPIDLTPATP

SEQ ID NO: 490108 - protein, 330 aa, unidentified
METWNVILGVDVSKKTLDICCAERRLPTRIDNNSEGFGKLKKWCKDNEIDLKETFIVLEYTGGYEYRFIQFCESQGIAYCRVPGLEIKQSLGMARGKSDKADAYRIGRYGEEKIKRLEPSKPLDDNVIALKELLSFRKRLVRDGAGYQSTAKERKHMYEVNNQDMIMRIARKKITEDKRDIKQLEKRIMELIKSNSAMWLNYRIITSIKGIGPINAWMTLAYTENFSSFPDGRHYAVFVGVVPFEHTSGTSIRGRRRVSHIAHKELKQELNMAARTAIAHDPEIKAYAERKLKNKEYGLVLNNVKFKLILRMFALVKRGEMYVKNYRKSA

SEQ ID NO: 490109 - protein, 350 aa, unidentified
MILFEERPPRAHQEPVYKAGRRWCRVGGPDRMVKQTEPQCPSHEIVGIDVAARKLVASGERAGLAATYDNSSAGHSQLIKDLRRSRRTVRVVLEATGIYFLDLACELVAAGIAVMVVNPKATHHFAEAILQRRKTDPVDAAMLREFGRRMDFVPWQPPRQELLAFRALTREVQALSKAVTAAKNRLHAVTATQLAPTVLIGALERQIAHNQALIDELVAVALAQTKGDPELARLVARTDSAPGFAAKAAVVVVGELAVLPPMTARQWVAQAGLDVREECSGASLARRPRLSKRGNKRARGSLLSRADRSAVLPGGDRLCRAAGRARQNPAAGDRRADAQIAARIARDVAP

SEQ ID NO: 490110 - protein, 338 aa, unidentified
MSNVTTVGIDLAKNVFSVHAVDGSGTVVLRKTVNRARLVALIAQLPPCLIGLEACSGAHDWARRFAQFGHQVRLMAPKFVAPYRRSGKNDSNDAAAICEAVSRPTMRFVPVKSIEQQAVLTLHRVRLGFVEERTATINRIRGLLSEFGVVIAQRAIEVRRNAASSLNGLPCQAARAVRDLLEHLQVLDSRVAEYERELEQHARHDEQAKRIQQLSGIGPISASAVVASVADAHEFKNGRQFAAWLGLTPKQYSTGGKTRLGRITANGDPYLRTLLIMGARSMLQTAMRRTDRLARWALNVRARRGYHRACVAIAAKHARIVWAMLAKNEPLRLVRSEG

SEQ ID NO: 490111 - protein, 403 aa, unidentified
MNAVGIDVSKGKSMVTILRPFGEIVSSPFEIKHTSSDILSLIKLIHSIEGESRIVMEHTGHYYEVLAQQFSAAGLFVSAVNPKLVKNFNNDSLRKVKSDKADSIKIARYALDKWQNLKPYSTVDELRTQLKAMNRQFHFYVKQKTAMKNNLINLIDQTYPNANTYFNSPPRSDGSQKWVDFVYTYWHVDCVRKMSLNSFVKHYQNWCKQKKYIFNKSKAEEIYTKATELVPVFPKNEITKRIIRQAIAQLNSTSATVETIRILMNETASKLPEYPIVMQFKGIGPSLGPQLMAEIGDITRFTHKGALTAFAGVDPGVNESGSYAQKSVPTSKRGSSNLRKTLFQVMDVLIKTMPQDDPVYQFMDRKRAQGKPYYVYMTAGANKFLRIYYGRVKEYLCILSESS

SEQ ID NO: 490112 - protein, 361 aa, unidentified
MTKAMSLVGLDVHARQTHAAVLVPDTGELSVSKLRMEPAGVVSFLEGLGPVRAVYEAGPTGFTLARAARDHGIEVRVVAPGSIPKGSGDRVKTDRRDAIRLARLLAAGELSFVFVPSVEDEHFRDLIRAIEDVRGDLMRARHRLGKLLLRRGERYPGPGASWTIKHLDWLRALDFDDACLKATFVDYLASVQLLMGRRTGLISALEAQIPDCSHAPVIARLRCFRGIDTLTAAGLCAEVGDFHRFPSPSLLSGFLGVVPSERTSDTKRRQGSITKAGPTHARRLLVEAAHHYRYKPAIGEKLSRRQAGADPRVIEIAWRAQRRLHQRWQHLHHERRKPAGVVAIACARELAAFCWEAATLD

SEQ ID NO: 490113 - protein, 400 aa, unidentified
MISVGVDVSKGKSTICVLKPYGEIVCSPFEVLHVEKELEGLDNLLQKLDGEIRIVMEATGIYHLPILSFLQEKGYFVSVVNPYAMKKYAKDNSIRGAKTDRLDSSMIANYGIEKWYKLQKHESDEETYAELKLLGRRYRYYMELHVKALQELTHILDYVMPGIKKLFNSWDEASGKDKLSDFAERFWHFDLITSMSLDEFVDEYLIWAGEKKYHRSRSKAETVYELASGGIPTLSSSTPSTKMLVQEAVTVLRAVDNSLSLILSRMQELAKSLPEYSTVRAMGGVGDVLAPKLIAEIGDVRRLHSAKALIAWAGIDPPPYESGQFVGSKRKITKRGSSTLRKVGYEVMRVLKSHKAPKDDVVYNYILKKEREGKDKKHAKIAGLNKFLRIYYARVMAVYQ

SEQ ID NO: 490114 - protein, 418 aa, unidentified
MSDPKRWYAGVDWGSQSHCVFLTDDQGRKRGEKFFKHSGEGLAEMADWLLKTSGAEEAGQILVAIEVPHGPVVEALIERGFAVHAINPKQMDRFRDRFSMAGAKDDSRDAEVMSSALRTDTRCFRKLSCADPVLVELREWSRIAEELGVERVRLANRLREQLWRYFPALLELEEDCSAEWLLEFLVLAPTPAKAARLREAKIAQLLKQRRIRRLDAATILKVVRAPPPMLAAGAVEAASAHVATIIPRLRLVNRQIREAEGKIGALIDSLTAARENPESEPGRKKQHDAAILASLPGVGRTVLATLLAEAWEPLQRRDYPALRSLAGVAPVTKRSGKSCIVVRRQACHDRLANALYHWARVAVQHDPRSRAKYAELRKRGCTHGRALRSVADRNLSVACAMLRSGTTFNPSLAAQKTA

SEQ ID NO: 490115 - protein, 323 aa, unidentified
MSNKATTKRRSFIGIDVSKKLLEVGVHQSDYHLRCPNDPKNFPALISELISLRPARIVLEATGGLERALLQALHAVGLPVVVVNPRQVRDFAKALGLLAKTDRLDARVLAHFAAAIQPSIRAVKTQQESELDALMGRRTQLSDMLAQEKNRRGSAATKATRDDIEEHIEWLEDRIKELDEKLKEQLACSAVWQQKDKILQSVKGIGFVTSMSLLADCPELGQLNRHQIAKLVGVAPLNRDSGQQRGSRHIYGGRAQLRCKLYMATMAAIRFNPVIKSFNERLIAKHKPKKVAIVACMRKLLTIINVMIRENKLWNVEAHQLSA

SEQ ID NO: 490116 - protein, 334 aa, unidentified
MEQITTVGIDLAKNVFSLHGIDAAGKTVLRRTVRRDRLVETVAALSPCLIGMEACSGAHEWGRRFQQHGHTVRLMAPKFVAPYRKSGKNDGNDAEAICEAVTRPSMRFVPVKSTEQQALLAMHRVRQGFVVERTAIINRLRGLMSEFGVVLPLRSVTVRRQAAQAAEALPELARRAIGDLLDQLRLLDERIGAYDREIEAQARLSEPARRLMKIRGVGATTALAIVATVGNAREFKNGRQFAAWIGLVPGQYSTGGKSRLGHISKRGDAYLRNLLVQGARSVLQTAVAHQDRLSRWALELQERRGYYRTLVAIANKNARIAWALLAKNEAVRTS

SEQ ID NO: 490117 - protein, 428 aa, unidentified
MRKHSFSKLEAITPNTVIVGVDIAKNVHWARFTDYRGIPLGKALKVANNKEGFENILTTIKGVCKQQNLSKVILGLEPTGHYWKPLAHYLTSHEIKVVLINPYHTKKAKELDDNSPTKNDKKDALTIARLLRDGRFYQLYLPQDVFAELRVLSSTRGSLMKRQNAIKNTIKAVLDEYFPELVTVFKYPLAGKACRQILKSCPFPSLILQLGRDKVLAEIKKAVKKTIGQKRVEQLFQAAKDSIGVTYGIQSARLKLTLLIGELELMEKQLDQLEQAMEQALTNTGLQEIILSIPGVGIITAAGFLGNTGDPLRFTHPRQISKLAGYNLTEDSSGLNKSKTTISKRGRKQLRNVLYQMARTTVAVNSEMKELYHYLKTRPRNPLKKKQALVVISKKMITIIHSLVKKQSRYQAELVFNQFRKNQLKQVA

SEQ ID NO: 490118 - protein, 357 aa, unidentified
MRKMQESIVEGKRIFIGLEDAKRTWKLCVRSEGMVVHETSMPGEYEVLRSYLQKKYPECTITVMYEAGFHGFWLHDLLKVDGIDCIVTPPNKVTQAKDDRVKTDRRDAQRLSKNLETGDYVSCHVPDRERREDRQVSRLLNQLQKEIVRTKNRIRRMLEYHGLDRGLKAGVWCDRDYHELLRKSWLEGLSSSLRKVLEVLLAVLDFLCSQKEDILQELKHISEQERYRCSVASKKSCPGVGWLSATRFTLEWGGLERFTTGKRFASYTGLTASEYSTGETIRRGRITGQSNPYVRSWLIECAWRAIKRDPVLLKKFTSVYRSSGSKKKAIVAVARKLAVRMRALDVNNDSYIIGVVE

SEQ ID NO: 490119 - protein, 415 aa, unidentified
MGRVFVGHDWAEAHHDVCLLDGEGRCLASTRLPDGLEGVAGFHALVGGFIEEPAEVTVATETDRGLFVGALVAAGYLVLAVNPLSTSRYRERYSTSGAKSDSGDARVLAELARTDAHNHRPVAGDSDLGEAVRVLARAHQSMIWARGRHTNQLRSTLREFYPAALEAFDDLDSADAMSVLAVAPTPQLGRRLTRSQIAAALRRGGRQRRVDQRAVEIQSALRTEQLAAPQLVADAMGASVAALVAVIAELTTQINNLETRLADRFEQHPDAKTIRSMPGLGMVLSARVLGEFGDDPNRYADAKSRRNYAGTSPITRASGTRKVVLARHTRNRRLGDACYRWAFAAISASPGARAFYNQRRANGDTHNRALRALSNRLVGILHGCLHHGTPYNEHTAWGHRTTACPGNPDTRQAAA

SEQ ID NO: 490120 - protein, 359 aa, unidentified
MQEIVRDRMLIGIDVHKDTHTAVGMSPFGEKMFELTVGNYQKDFAMLTTKVEAAARDAKLSPYFGLEDCHGYGERLAMYLDAAGYPVVHVASTLVDRQRHVNTHPEKSDSLDAYGVAEVMLRKSDTLPRYTVTEASTIAKDIKDVATDRQNIVLERTRLKNQLHDILHRIWNTAYKERFIDPFSQKALRHWSRAECKDASLFLMRMMKRKVRRLQALHIEIKEIDRELTRLLKESGITIATASGCGTVVASTIIAEIGDISRFHSPGALAKYAGCAPREYGSGKKQRYRKTRSGNRRLNSAFHAMALTQISPTGNDKARTYFKKKMSEGKSKSQALVYLRRQLVNVIWCMLKYKTEYRS

SEQ ID NO: 490121 - protein, 460 aa, unidentified
MNNYYLGIDVSKGYADFVILDDKKRCVGENFQLDDTFDGHCRLYEILCTFCEDHPECTIYAAVESTGGYENNWFNDLVKFQGTLNLRTSRLNPLGVNANSKADLKRNITDKISAQSVAEYMIAHAEKVSYQHHDHLASLRKQWGFINMLTKQSTQLFNQLEPLLYTANPELLAYCKDGVPGWVLRLLLRYPTASDLSKARAVSVSRIPYISSARAQDLIIIAKRSVASATDKITAQVIMETVKQILHLKKIITYQIDLMAKHCSVPEVDLLKSFIGIKDYSAIGLVLEIQAAERFLSVKKLASFFGLHPVYKISGDGVGRFRMSKKGRKEPRKILFMVTLTAIRANPLIRSIYLEHIQKGMEKMAAIGLCMHKTLRIIYGMLKHNMAFDPEIDRKNREKGYQCRTRVNKDKNRRYQDFDAKAPISRRQNSKRKEQKQSHSDNLTKSGIIASAPTITLTDI

SEQ ID NO: 490122 - protein, 337 aa, unidentified
MKKYVWFMGIDVSKGKLDIALMKGAEKCVQATIENNVAAIKDFLKETRESLPKFSMVSCLVCMEHTGIYNNHLLRVSEQQKWNLCLEAAVQIKQSGGLQRGKNDQIDALRIAQYAYKNRDTLKLWQPPRKVITRLKKLSSMRERLIGAKKQLTRTLKEDAPFQTREETKSLADCCESTIIALKEDIEKTDKAIAEVIKGDPELKRLFAIMESIPCIGKVTAVTMLVTTNEFKDIKDPRKFACYAGVAPFEHTSGSSVRGRTRVSKKANLRVKSLFHLVAVTAIGHNDEIKLFYTKKVKAGKHPMNVINAIRNKMIHRIFACVRDGRMFENNYSPKFG

SEQ ID NO: 490123 - protein, 438 aa, unidentified
MERFTLVNPNAAGIDVGCSEMVVAVSPEVCDQNVRTFGTFTCDYQQIVCWLRECKVTHVALESTGVYWVQLYLLLQREGFEVTLANAKHIKNVSGRKDDENDAMWIQRLHSCGLINGSFQPDLQTRGLRDLMRHRRSLVRDQSRCTNRLIKALELMNIKVQTVLSDIDGKTGKDILAAILAGERDATVLASLAHGRVKASKEILIKSLQGNWDDRLLFLLRQQHETYNFISGQIKELDRQIEKQLQALTASVHEGELLPIHLEHPRKRSTRKNAIPFNATAYLITLLGVDLTEIPGISEVSALEIISETGTDMGRWPTENHFTSWFGIVPNTKKTGGKIISNKIMKKKHRAGQALRIAASTMYHSKSTLGDFFRRKQAKGGPSKAILATATKIAISIYMMIKNKTPYQPEKMKEAQDKFKQAQIRKLEARLAMLKSAA

SEQ ID NO: 490124 - protein, 345 aa, unidentified
MEHFAGLDVSVKDTSVCIVDDTGRIVREVKVASEPEALLAVLKNPAYHFKRIGLEAGPLSQWLFSALAEAGFPVICVETRHMRAVLKAQINKTDRNDARGIAQMMRVGLYRPVHVKTLRSQKLRMLLTHRKLLQSKAIAIDNDLRGTLRNFGLKVGMVGTVRFEARIRELVENLPDLAALVEPLLVVRRTLREQFCILHRRLLAIVRDDEVCRRLMTVPGVGPVVALTYRATVDVPARFRKSKAVGAVFGLTPSRYQSGESDRAGGISRCGDEMMRAMLYEAAHIMLVRSAKWSWLKAWAMQIARRRGMKKAIVALARRLAVIMHRMWVDGTEFRWTREQAAAAA

SEQ ID NO: 490125 - protein, 347 aa, unidentified
MNVYIGFDISLQSTHICVVDDEGNLVREGVERSEIADLDGWLRKHSQKWAIERIVFETGQLSAHLYHGLRKSWPVVCIDARHAHGTLKAQRIKNDRNDARGLAQIARTGWYKAVHVKSEECQALRALVGGRKELVMLRLGLENHIRGRLKAVGIKLGAVTTAAFSTKVKGSLDDENPLFRQAVLTLLQARDDLLARQRVLDKQCVSIARADPVCKRLITVPGVGSITALSFRAEIDDPLRFRKSRDVGVHLGLTPKRYASGETDRSGGISKCGNRALRTLLFEASVTMLTRSNRWSRLKAWGVRLAQRTSFKAASVALARKIAIVMHRMWVDGRDFAYGEPPALQAA

SEQ ID NO: 490126 - protein, 406 aa, unidentified
MRVVHERCAGLDVHKSSVVACALLPEGKQLRTLGTMTWQLEQLAEWLRSLEVQVVAMESSGVYWKPIFNILEVAGFELLVVNARHIKAVPGRKTDVKDAEWLADLLRHGLLKPSFIPNREERELRELTRYRRTLIEQRAHEVQRLQKVLEGANIKLEDVISNVVGLNGRRFLSALMAGDYDPEAVAATANYGLQRKQALLAQALHGTLGAHQRFLLDQLLSHIDFLEHRIAALDQEVKQRSRPFEAAIARLDQIPGVGIRAAEEILAEIGTDMSRFPSDRHLASWAKVCPGNNESAGKRRSGYAGKGNRWLRSILVECAWCATRKKDSYFKAQYHRLAARRGKKRALFAVGHSLLIVIYHLLRDGVAYQDLGTNYFDQRNRSHVARQAIRRLERLGYRVSLSEGAA

SEQ ID NO: 490127 - protein, 467 aa, unidentified
MTPRAGKQFRRSAQAEDLAIRHRHAAGIDVHSREHFVAVATEDVPAGFINADDQLPPGVRKFGTNTGDLEAIAAWLKDCGVTTVAMESTGVFWIPLYDLLASQGFEVLLVDPRQTKHAPGRPKTDVVDCQWIRRLHSYGLLTGSFRPDDDIIRWRGLQRQREMLIRYAAMHVQHMQKVLEEMNVKLTEVVSDIVGQTGMKIIKDIVRGVRDPLKLAKHRHERCQRTEAEIASALYGNWRLELLFALKQALKLYEFYQTQLRECEGQIEACLRSLKDQSDGRPLPPNLRKCKPGKNEVRFGARALLFRMSGVDLTQIEGISESTALVILSELGTDLSAFAYEKNFVSWLGLCPQHRGSGGKIFKRRIRRGANRVSRALRMAAQGCHHAKNALGAFYRRIQSRAGGPKAIVATARKIAERVYRMLKYGQEYVRQSEEAYEQKYQLKLVKSLAKRAAHLGYKLVPETITT

SEQ ID NO: 490128 - protein, 330 aa, unidentified
MKKWDYTIGVDVSKNTLDIHCSELNVHIQISNNQDGFKQFLKWCKTNIIDLTKSFLVMEYTGGYEYKLITFCEASSIQYARISGLEIKKSMGITRGKSDKVDAARIAQYGEEKHKKIQPAKPLNKNTIELKETLGFRKRLVRETAGYKATLKERKHMYPDLKKDIISKALESKIKENTKQIAKLDAELLKMVEADKAIKTNYELLTSIRGIGMVNALMTIAYTENFVCFRNPRSYAVYVGVVPYEYSSGTSIRGRKKVSSIANKELKQELNQAARSAIQWDKEMQEYAVKKMNSKCYNIVLNNVKFKLILRMFAVVKRGEKYVDNFKKAA

SEQ ID NO: 490129 - protein, 447 aa, unidentified
MSNGRGLSRGDNRRNARLARLREVLPFEHAVLALDLANDKQVFALTDHDSRILARKTVRCRPWQLAEAIEWGRRQALAAGFTGVTLACEPTGHRWKVVNELASVAGIELVCVQPLLVHRAREAEDFTRDKSDDKDALLIARLATQLHVYLPERADPTWARLRHLGSRRVEWVTDLGAARQQLRDLLECAWPAALSTASAPLDSLTWRAAMAVAGCDPARIRRLGLVRFTRAVAKELPRWGGQRVSHRIVAALHRAAADPRGVPSQRPGGLERARFALADLRHAQAQRDEVEALMISVLDELDLTALVTTIPGLSAVGAAAILAETGDLTRFDSARAVVKHAGLCPRENASGTYAGKTTISGRGRPLLRVAAWRAVWGALPHNPVLAARHAHLTSRADNPLTDAQARVAVAGSLLRQLFVVITTRTAWNPDIAAGQVDPRQQVTAPAA

SEQ ID NO: 490130 - protein, 350 aa, unidentified
MIIGVDYHPSFQTIAFLMEETGECGEQELNHSDGQAEKFYRDLKQRGISVRVGMEATGYSRWFERLLAELGFEVWMGDPAEIKAKRVKKRKTDREDARLLLKLMLENNFPQVWVPGPENRDLRQLLWHRHRWVQMRTRIMNQLQALAMNEGYRWKKKLFSQQGRAQLEKLTLAPWASRRRQELLELLDRMNPTIEELTAAVEREARKRPEALRLMTHPGVGPLTALAYVLIIGTPTRFQRGKQIGTYVGMIPCEESSAGKQRLGHISKQGNSLLRFLLVEAAQAAARINPEWRRRYIHLAMRRHRSIAKVAMGRRLAVRLYWMWRNGCEYSPSLEFGSYAGQLGLVHGGK

SEQ ID NO: 490131 - protein, 340 aa, unidentified
MRIQKVTRSCDRGKSRIMYDHYIAIDWSLKTMAIGHMLRDDDHPRVFERSTDLKELKEYLGLLKGRTIITLEESGTAHWLYLELLDCVERILICDPFHNRLLCHGPKTDKIDAGKLCELLRGGLLKEVYHSDNGLYELRTLVSAYQDVVCAGVRALNQKEALKLGHRDKGKSASFIGEILQENIDLYRRSKQQYERRLGDVARRNQVVRFQKEIHGIGTIGAVKIVATVVDARRFPYAGKYLSYCGLVNHEKFSGGRSYGRRKPRYSRVLKSVYKTAALAALRGANPIREYYDHLLAQGVAKHNARHAVARHIARISYGMLKTGTRYEPYRWRSRTKEAI

SEQ ID NO: 490132 - protein, 417 aa, unidentified
MNSSPETIPIDRYIGIDIHKYYVMVGGQNRRQEWTLRPRRIQMNRFRDWAEKNFRMSDAVVIETTGSVWDIHDIVSPLVGMTLVANARSIRQIAEAKVKTDKKDIERMLTQLISGTVPEVWVPPVHVRELRSLISFRWRLNKQITMSKNRLQSVAQRFNLDLPEGGLLTEKNRGWWEEQEFTDLTGFEVKRDLEIVKLLEDQKESLDQKLAELSNTEPWASDMVFLMQIPGMGLILSIAVLSAIGDITRFSHAKKLVSYSGLSPGVHASGETNRSKPITKEGRKELRWAMVEAAWVAVRFNPYWKAQFKQLEKRMHRNQAIVAVARRMLVSIWHILSKREPYRHFDEEDLAYKMLIWAWAMDESSRKGMTPQQFAKYGLLRLGIGQDLERIVRGGAPRRIAPTEEILALKPELAPPR

SEQ ID NO: 490133 - protein, 336 aa, unidentified
MLHVGLDMHKHFSAVAVLDDEGRVLDEQRLDHADRDRLVEYFQKLAGRAVVVIEAVRNWYWLYELLEGLGVTVRLVHTRKVRLIAESTVKTDRIDAVILAQLERTGFLPVAYIPTRQVRDQRELLRFRLSLVHLRTEIKNRVHAVIDKLGIQHCFSDLFGQAGRKFLAAVELRPVYRRELDNYLELLEELDQRIAAAGREIQAQLRPDPRAELLMTIPGVGVLTAHLLLSEIGDIGRFASAKRLCAYSGMVPITRQSANHLWQGRITKEGNRYIRWAMVEAACKAPSHDYGLGQFQRRVALRRGALKARVAVARKLLVAVWYVLTYSESYRTRTVA

SEQ ID NO: 490134 - protein, 375 aa, unidentified
MNKYTTKYVGMDVHKETIAVAIAKEGRGEAVYYGEIANNAEAIRKLVTKVTSNGERASFCYEAGPCGYEVYRQLVDLGQRCDVVAPSLIPKKSGDRVKTDRRDANTLTRLHRAGELTPVWVPDKEQEAMRDLTRAREDMKAMEGHAKQRLGAFLLRHGKKYPGKSKWTQAYFRWLEGIKFEIPVQQIVFQEYVDTVKQMKERVAAMEEEMRQAMEGWSLAPVVTGLMALRGVDMITAMTVVAELGDISRFDTPRQLMAHLGLVPSEYSSGARRQRGGITKTGNGHARRVLIEASWSYRLPARKTAHLQRRAGKTSAVVQAIAWKAQKRLCKRYWYLINKGKLPVEACTAVARELSGFIWAIACEVLGKNYACVTA

SEQ ID NO: 490135 - protein, 310 aa, unidentified
MEHSFIGIDVAKDHLDVHVRPTGEVFRVPSDDAGLGTLLTRLRVLSPTVIALEATGGYEVPVAAALASAALPVAVVNPRQIRDFARATGQLAKTDTVDARVIALFAEAVRPTPRPVPDAQAQALGELMARRRQLVDMLGAEQNRRRLLRDRRLQRQLDAHIAWLEEALRRLDHDLTTLVRSTPIWREADDLLRSVPGIGPVTACTLIADLPELGRLDRRRIAALAGLAPFARDSGTFRGRRMIAGGRAPVRRVRYMATLAAIKHNPVIRLFHQRLRTAGRPGKVAITAAMRKLLTILNAMLRDRRPWQPA

SEQ ID NO: 490136 - protein, 413 aa, unidentified
MKYYTSTSEYNCGIDLHARQMYVCVMNRQGKKLVHTNVLHNDFDYFLKLVEPYKHDLTVCCECMFGWYWLADACQQAGLTFVLAHALYVRAIHGGKNKNDRIDSEKLTHLLRSNLIPPAYVYPADKRPLRALLRQRLFYVWRRSELLARIYSHQLAHNRTPARQTRRVRDSWEQALLKAEEHPLRQIALQNDLAMIKHFDHQIFQLEEELQRQTKKAAGRDYELLKGVPGIGESLGLTILYEIGDVQRFPTVKDFLSYCRLVKGTVASAGKIKGLRGAKLGNPYLRWAFGEAAVIAKRDHYVVGPLSQRLEAQMGGNKFKSNTVVAIKLARAVYFMLKNKTVFDPERLVASMQKCLKPTRKVAAPLSQPDGDLRRLAAAVEKQLSPGRKQPARLTGCAKQARPLPAADQTCCA

SEQ ID NO: 490137 - protein, 387 aa, unidentified
MYFVGIDISKFKHDCAIIDELCDTVMPSWSFSNDREGFSHFKALLDSLEGEKKIGLESTGHYGQNLKQFLESNGFAFMEFNPLLVSRFVRSKSLRNTKTDSIDALSIAQYVMTVEYKPYPSSFYHLDKLKSLTRFRNSLVRQRSRQLVELTNVLDKLFPEFKPFFKDKFSVTALYILAHYQTPERIANMNARSYEALRKLSRGRFTLSNFTQLKALAKNTVGTQSDYLLDQMNILLELYSQLDSKVDELDAQIKECVRGIDPPCLSIPGVGELSAAMILSEFGDFSKFQNPSKLLAFAGLEPGYFQSGQSEYTGHMVKHGSSRLRYALMNCCLPLISNEPVFAAYYAKKRSEGKPHRVALTHVAKKLLRVIYTLQTKNIRYDPTMIH

SEQ ID NO: 490138 - protein, 359 aa, unidentified
MQTQSNKIDFTGQNIYIGFDVHLKSWTVTVMTERLTHKTFSQPPKPEMLYNYLAKNFPGATYYSAYEAGFCGYWIHNKLVELGVNSIVVNAADIPTTGKEKVMKTDPRDSIKIARSLRNGDLKPIHVPSIKTLEERGLIRMRSTLVKDLTRYKNRIKSFLYFHGIEYPEVFNRPKTHWSNRFNQWLEGIEFNDLISKATLDMLLGQSNSLRGSVLQITRQVRELAKTDRYKMQEKLLRSIPGIGILTAMIILTEIETINRFSNIDQLCGYIGLIPSTCSSGDKEVIGDLTPRGHSILRTAIIESSWVAARLDPALNKSYHDYCKRMEPNKAIIRIARKVSSRIRFVLKNNQPYVFSVVK

SEQ ID NO: 490139 - protein, 428 aa, unidentified
MNEVDAIRIEQFRQFKKEIRGSREYVVVGIDVAKEKHHAFFGTATGKTLLRNLVIGNDLDGFCKLIEQAEALRVQEGLSKVVYGLEPTGDYHKPLGEHLIKCAKLVVLVSGVAVRRNRELLDGRWDKNDVKDAANVADLISQGKCMFYEYPNANVRDLRVLLSVKMRLRKQEHGLRVRIRNHVVAQYFPELDRVWGQSETENLAIVRWCLDPSVIAGLELDEFVSRVSTRDRGARQKARLKGIWEAAVDSVGCRMPEAASCECKVLVESLKRLRQEIKEISDDIHQICLRFDEYPFLLSIPGFGPEVSAQVLGALGDPHRFRSAAEVLKMAGLDLSASRSGNTSETAVPVISKRGKAHLRYMLYQAAMIASIRNRLFINYYTEKLKGRQQERGIKTKMRVKLAAKLLVIAWTLMKKKEPFDPKHLTMQ

SEQ ID NO: 490140 - protein, 243 aa, unidentified
MKNTSKGIDHCVKLCHELSPELIVMEATGGYETHLASHLQAEGFAVAVVNPRRIRDFARALGKMAKTDKIDAQVIAKYAATLEPMPTKFIDSNSRKLKALVSRRKQLLEMHTAEANRKEHAFDNEVKQSIEAIVSAIEKQIENVDKEIDNAIKQVPELKQKAEFLQSIPGIGKITAQMIVTELPELGILNRRQIAALVGVAPMNRDSGIFRGKRMTGGGRRHVRARLFLPTLVATQHNPVIKT

SEQ ID NO: 490141 - protein, 389 aa, unidentified
MTVRTVSNLPAAMHVEMARCLFAIELSKQSWVIGFITPLSSRISRRILSGGDWKGLLELIEEVRARVSREMGRTVEVMSCYEAGYDGFWLHRQLEAHGVRNYVIDPASLQVDRRVRRVKTDRIDTERLLRSLMAYLRGEPKVWSVVRVPSVAEEDARRLHRERDRLVSERVQHVNRIKGLCALQGIYDYNPLRPQAMARLEQLRTAQGGAFPPRLKSEIMRGLQRLEMVVEMIATLEAERNAIVENEASTHLNAKKIQTLHKLKAIGPEFAAVLVGEIFHRDFNNRRQVASYVGLAPSPFQSGNVAHDQGISKAGNRKGRTTGIELAWMWLRYQPESDLSVWYRARVGATKGRIRRIAIVALARKLLVALWRYLETGLVPRGAVLKGDQ

SEQ ID NO: 490142 - protein, 343 aa, unidentified
MQTVTTIGLDIAKSVFQAHGVDAAGQGVIRRQLKRRHVLAFFRKLPPCLVGIEACASSHHWSRELQALGHTVRLMPPAYVRPYVKRQKNDATDAEAICEAVARANMRFVPTKTPEQQSGLVLHRTRHLFMRQQTSVINAIRAHLAEFGIVAPVGRRGVEELLNVVADPTDQRVPAIAHACLSALGAQLRKIKEQILEFDRMITAWHRSSEMSRRLDDCPGVGPTLATALVATVADPKIFRSGRNFSAWIGLVPKQHSSGGKDRLGSISKQGDRYLRSLFVIGALAVIRYAKIHGTRHRPWLTALLARRPAKVAAIALANKIARMVWAMMAKCERYKEPVALAA

SEQ ID NO: 490143 - protein, 421 aa, unidentified
MTPTSHDTFAAFIGIDWADAKHDLCLQAAGTAQRERFQLEHTPEALDAWATTLRTRFNGQPVAVCLELDKGPLVSALRKDDFLVLFPINPLTLARYREAFTPSRAKDDPTDAELQLELLLPHRDKLQPLQPQSPTMRALAQLVEHRRRVVGDKVRITNRLTSALKNYFPQVLQWFQDKDTRIFCDFLSRWPTLKAAQLARRSTLETFFRAHHVRPADVLATRMHAIKTATPLTTDEGVIAPNALLVQTLVSQLRVTLDAIEAFDHAIAQRAQHHPDFPLFQALPGAGPVFASRLLVAFGEQRERYASAAALQKYAGIAPVTERSGKKAWVHWRLQCPKFLRQTFVEWTAESIRHSFWAQVYYQQQRDKGNTHQAAVRALAFKWIRILYRCWQERTPYDESTYLQALTRRGSSLLQNLAKVS

SEQ ID NO: 490144 - protein, 394 aa, unidentified
MKLVGIDVGKNSHHFCVMDKETGEFNVTPTSFSNNKEGFDFLINSLKPYSKKSILIGMEDTGHYHVALLKFLLSNGYTVALINPKTTDLTRKMEGGITKNDKLDTITICDVLDTPERKKQYRITKVDRFDLYEQRQLTRHHHNLKEELNVYCNRLQKSIDLVFPEFNTLFSSKYSIVYMNLLKTFGSAEAIASTDIRTIRKCFEIKCRGNRISLTPEKLKECAKNSIGISSEVETIQIKHLVSQITLIKEQIAEIDKKIEEFSITNNSPILSIPGISHFSGTSILAELGDIGNYSKPSQIIKFAGVAPYHYESSQYNAQHTGRTKKGSKYLRKTLYQIILTVINNNPVFKKYYLLKISQGKGHRCAQGHCIRKLLRIIYHLLETGQSFDPALLR

SEQ ID NO: 490145 - protein, 338 aa, unidentified
MKITTIGLDIAKSVFHAVGVDKSGKLIKKKMLRRKDLLPFVAQIEPCLIVMEACSGANYWTREFELLGHSVKLIAPQFVVPFRQGNKNDYNDALAIAEAAQRPNMRFVKPKSVEQQDVQLLHRMRERLTKQSTALINQVRGMLAEYGIVIAKSKTAFKVQFPEILANETNALTTKGRTIFYQLYEEFTDIERRLKDCDTQVLTETKNNVICQRLETIPGIGPVTATAFYAAAGEGKDFSNGRHFSAWCGLVPKQHSSGGKDNLLGISKRGNAYLRTLFIHGARAVLQHSCHKQDKFSCWAIQLAERRGFNRACVAVANKLARMAWVIAAREEEYRLPV

SEQ ID NO: 490146 - protein, 341 aa, unidentified
MVEVSVIGVDLAKNVFQVHGAAADGSVVFRRKLRRGQVLSFFAAQPVCTVAMEACASAHYWARAIGEFGHTVKLIPPAYVKPFVKRQKSDATDAEAIAEAAARATMRFVAVRTEAQQASAMVYRTRDLFVRQRTQAINALRGHLAEFGVVAPTGVAHVGLLTALIEGKEGVLPDAVVELARVLLAQIDDLSTRIDTLDKEIRERAAQDEAVARLMTMPGIGVITATALVTFAPAPEVFAKGRDFAAWLGLTPRQHSTGGRERLGRITRMGQRDIRRLLITGAVAVVRWAARKGAPEGSWLARMMAKKPRMLVAVALANRMARMAWAMMSKNESYRVPATVA

SEQ ID NO: 490147 - protein, 286 aa, unidentified
MEEPTRFIGMDVHKDTIVVAVTATGDIGTATPYGTFPNTTAALEKLVKRLRQAGSGPAKFCYEAGPCGYGVHRTLTKLGEECMVVAPSMIPRKSGDRQKNDKRDAANLAVLHRGGLLTAVWVPDAAHEAMRDLIRARLAAVRAIRVARQQLSAFLLRHERIYPNGRKAWTKAHRRWLMGQSFAQSAQQIVLQESIEAVRLGEQRRDRVDGYLRAQIPTWSLFPLVRNLGALRGLDAIASAGLAAAIGDPSRFASAPDFMAYLGLVPSEHSSGPKRRMSYGRNWVTA

SEQ ID NO: 490148 - protein, 341 aa, unidentified
MMIIGADYHPGFQTIAFVDQETGEYGERKLKHPQEAEAFYRRLAGQQVRIGMEATGHAAWFEALLAELNFEFWLGDPATIRSKRVRKQKNDREDARLLLRLLGNGEFPRVWIPDLGNRDLRQLLWHRHRLVQMRTRVQNQLQAIALNAGIRRKKGLWSRAGREQLEALPLAPWSRQRRADLLQLLDQLEPRIAELSAAVKREAEQCAAARLLMTHPGVGPITGLAFVLILGNAERFQCGKKVSSYLGLIPSEDSSGGRQRMGHISKQGNTLLRFLLIEAAHAMVRLDADWRRRFVHLAMRRGRTVAIVAMARKLAVQLYWMWRKGQSYAQARALGAHVGQA

SEQ ID NO: 490149 - protein, 327 aa, unidentified
MMFIGFDISKDKVDLCWLRDPITNKKKTKVFKNNHLAFREIKQWLLSTTKTIAEEIVITVEPTGVYHEPLMYFLYQQGFNIILANPSKAKKYAEALNVVHKTDRSDAIMLASYGYAKQSTVNFWQPEAKEIRELKALLRRLDALESNKQREQNRLEASEFNATSERVTQSLKETINFLDDEIKKLKSDIDSHINSFPDLKKNRTLLETIPGIGPVMSRELTYIFAAKNFSRAKQAAAYCGLIPRLHESGKMKGRTTMSKLGPSKIRSKLYMAAVVAGQWNYKIQQQKIALLNNGKTSMQIIGANMRKLIHICFGVIKNQEAFKLQES

SEQ ID NO: 490150 - protein, 407 aa, unidentified
MKEKEVIEFEQVVECGSGMDVHKDIIVATIQGKGIKTQTKSFKSFTSSLIKLREWLLKNKVTHVAMESTGVYWKPVFNVLGDDFMILLVNARHVKNVPGHKTDKKDSRWLAKLLLSGLLKGSFIPERRIRELRDLTRYKTKLTNQISAERNRFQKILEDANIKLSSVLNDVFGATGTKIINHILSCEDYRPEQLLQYVHGRVKASREDIKEALTGYITPHHKFMLKTIMGNISKVESTVSEVEAQINNCIEPFKIEQELLESIPGVGKDGANKIIAEVGVDMEQFPDQNHLASWAGVCPGSNESAGKNKSGRITYGNKYLRSLLVECGWAASRTKNTYLSAKYKSLAGRRGKKKAIIALGHKILIATYFIIKDKVAFNELGADHLNNFRRDRLIAYYKQQLEKLTAA

SEQ ID NO: 490151 - protein, 313 aa, unidentified
MMFTGIDVSKTELVVTCRPTLTRWTEPNSATGIEALTRQLAEVAPEVIVLEATGGYERDVTAALVAAGLRAVVVNPRQVRAFAKATGQLAKTDRIDAGVLALFAERVQPAWRPLEDEATTDLAAVVLRRRQLSEMLTAEKNRLGLARRPVRPSLKKHIAYLERELRITESELREWIEASPIWRVNDDLLQSAPAVGPVTSQTLLAELPELGRLSHKQISALVGVAPMADDSGASRGKRAIVGGRAPVRQVLYMAALVATRCNPLIRQFYQRLLAAGKPKKVALVACMRKLLTILNAMVRDQKPWSPSLTPASR

SEQ ID NO: 490152 - protein, 330 aa, unidentified
MEPEYIGVDLHKQFLQVCALTATGGRAWETRLPRSPGGLAAFCGRCGPHSHVAVEATSPTWAFVDAVLPTGARVCVVDTRKTKLKAGYAAKTDRLDARRLADALRRDSVVSVYIPPPAIRELREICRGRHQVVRLRTRVSQMIRALLLRSGVADLPVRQVYSARGQRWLATVALPPEAATTLQRLVRVLDSLHAEATEAEAVVVARAEVDPIARALDTLVGIGPVLGLTLRAEIGDGTRFRAGAELACYAGLVPRVDSSGDRYYVGRITRQGSPWLRWALVEAARHAIRRDDRLGRWARRLAVRKGGMKARVALARRLSDEVIAMWPRSA

SEQ ID NO: 490153 - protein, 454 aa, unidentified
MSRRKKKAKNFQVTNLPAQLRHVNLDAAGIDIGSDRHLVAVPEGRDQVSVREFGTFTADLEALADWLAQCHIRTVALESTGVYWIPIFEVLERRGFEVKLVDARRVKNVPGRKSDVLDCQWLQQLHTYGLLAGAFRPPDQICVLRGYMRQREMLVQASSMHIQHMQKALQQMNLLLHNVVSDITGTTGMKILKAIIAGERNPEVLANHRDPHCQNSAQTIAKSLVGNYREEHLFALTQAVELYETYQSKISDCEAAIARHLATQPNSTDELPPPSGKRLQAKNIMRGGVDVRTQLFKLTGVDLFSISGMGADTLLTLVGEVGIDMRPWKTEKHFTSWLALCPGTRTSNRKILSTKTRRSSNRAAAAFRMAATSLGRSKTALGAFYRRISARVGAPQAVTATARKIAVIYYSMLKYGTQFVEIGQLAYEQKYQRRRLKGIKQQALALGYQLVPIN

SEQ ID NO: 490154 - protein, 398 aa, unidentified
MLGAGHQPMERPMPKPNDLSRSLIAFEQNSTLIAVIEMSLSSWLVAGIVPGVQRRPLKKLDTDENALLKLLHRWRDDAVKSGRKITRIAVAFEAGRDGFWLARWLRTQGIEAYVIHPNSVAVSREHRRAKTDRLDTELLKRAFLGWLRGEPDHCSMAAIPTLAEEDARRPNRERENLVGQRTRIINRMKACLVRFGIRNFKPTLRKASEQLETLNTPEGAPLPPNTLAEMRRDVARLRFIIDQIKEIEAARLKQLKQAPKEGSQAMVRLLARVIGIGIETADMLVHEILSRNLRDQRAVARYAGLTGAPDESGKKSREKGLAKAGNARVRRGMIQLAWRFLRFQKDSALAQWYRAVTKDGRGAIRKIMIVALSRKLLIMFWRMVTVGEIPENLVLRAA

SEQ ID NO: 490155 - protein, 418 aa, unidentified
MADEIMAEETIRWFAGLDWGSATHQACLLDEAGTVVGERAFAHGGAGLAALCDWLVSLAGDPGSVAVAIEVPHGPVVDALLDRGFAVYAINPKQLDRLRDRISVAGAKDDRRDARVAAAGLRTDPHLFRRVLAGDPSVIELREWSRLAEELQQERVRLGHRIRQQLWRYYPQLLELSDDMTAEWVLALWNMAPTPAQAARLREATLARLLRQHRIRKLDAPAVLAILRQPAIPVAPGVTEAAVLHLRSLVARLRLANQEFRQAERKLEELCTALSETQPTAQDSGPGDATILRSLPGVGPVTLATLLTEATGPLARRDYPALRTLSGVAPVTKRSGKSCIVVMRYAAQVRLRNAVFHWARVAVLNDRRCRGRYEALRARGHSYGRALRGVGDRLLGVACVLLRRGMLFDPDYGSSASA

SEQ ID NO: 490156 - protein, 333 aa, unidentified
MKFETFIGIDVSKKTFDVAISFDSVDLKHSRYVNDVSGVKSFLKELRQHKVVIKKCLVCLEHTGIYTHILLKHLHSKGANIWLEQALNIKRSLGVQRGKNDKVDSMRIAQYAQRFQDKVTLWQPARKEIARLKNLISLRERLVRVKKSLATPLGELIEANSDAKNYIKKLTRPVIEKMSSQIIKIEHQINQLIKNDKHLNRLEEIITSVDGVGKITAWQVIATTNEFKDFKGSRQFACYSGVVPFDHSSGTSIYSKPRVSHVANKRMKELLHMSALSATIMKGELNDYYQRKVAEGKNKMLVLNNIRNKLVQRIFSCVKENRKYEKIYTSTLA

SEQ ID NO: 490157 - protein, 365 aa, unidentified
MTVIHYIGFDVHKKTISYCVKAADGRIVQEGKLAATRPALHEWAKAQRVPWHGAMEATLFSAWIYDTLKPYAERLVMGHPARMKAITAGKKKSDSIDARTIADLLRCDLLPSCYVMAPAMRDLRRLLRYRNMVVQQSVRMQNKMAGLLMESGTSFVKDKLHGKKYFAELMKSLQEVPESVKDLLRMSRSAMEMFESTQKQLVERLLSEPALEQRVERLMSIRAVGPITALTWALEIADPHRFASIADAVSYCGLTAAFRSSAGKQQRGPISKQRNAWLQSVLIEAAKLAPRWNLQLAALHGHELERGHANRATLQVARKLVAYLLAVDKSGQSFQVRTPPPSANTKAKNKTRRKNKKAAALLPAA

SEQ ID NO: 490158 - protein, 274 aa, unidentified
MDKVPVRCGLDIAKHVMAIHAVNHSGNVVIQKNISRKKVLEYFAQLPPCTVGIESCGGSHYWARELKKLGHNPKLISVKFVIPYRRKGKNDANDAEAICEAISRPGMGFVAVKSEDQQAILMAHRIRSQSIATRTALINQIHGHLQEFGVVVSKGRHKLKRDLADIFSDETLPPLLYELLHDLLAALLREEERVDSLDKRISSWVDGNEMASRLTQLDGVGPITASAVVATTGHASAFENGRQFAAWLGLVPRQYSSGGKNKLGRITKQGDRYL

SEQ ID NO: 490159 - protein, 347 aa, unidentified
MIYCGMDIATKSSYVYVTNARGRKLTLGEIPTTRAGMEARLRRYVGRGLRIAIEAGNQTAWIYDALTEMGAKVTVVNPTKVKLIAESRCKTDKIDARILCELLRIKALPYPVHMPGKRARTLRGLLVARRQLVSARTKLCNVVRGMVRQEGIILPTRALSTFVGWQRLMGNGFDQPYLLTVVSAYYDSFVSLTRSIQELDRELAEREGKDKRVARLQTMPKVGRIASLTFLAAVDDVKRFRSSRKLVGYSGLAPTVRSSGERTEYGSISREGRRELRAVWVQIAHLVAADKSRGTQPLRTWFNRVARRRGKKTATVALARRLLVIAYHLLRDETVYEPARLKRKRAA

SEQ ID NO: 490160 - protein, 410 aa, unidentified
MIEAILERCAGIDVGKKFVVVCVMTGGAKDEPHTQIKKFGTIVSELQRLAGWLVAEGCTHAVMESTGSYWKPVFNLLEAHVQVILANAADVQNRRGHKTDPNDSRWLAHLLRHGMIRPSFIPPLPIRELRDLTRRRRQLIGENSRERNRIQKVLEDANVKLGDVLSDVFCVSGRLMLAALLDGQMAAEQIADLARKKAREKIPQITASVANHRLSDHQRFLIRHALRHLEFLDQEVEALNQEVRRRMEDPTLAEAFHLLQSIPGIKEESAASILAEIGADMEQFPTAAQLSSWAGLCPANHESAGVKKSVRTNRGNVWLKTTLTQSAWAATNRKGSRLQSRYHALKARCGNKRAIVALGHTLLKTIHAVLSAKMPYREDPPITQEDRNVERAQHHLRCLKKLGYNTFSVE

SEQ ID NO: 490161 - protein, 346 aa, unidentified
MEHYVGLDVSLKLTSICIVDRTGKVEREGVVASDPEAIATFIKLHAPHVVRIGLETGATSTWLWTELNKIGLPVICIDARHAKAVLKMQINKSDRNDAAGIARIMQCGWYKEVCVKDLDSHATKALLVSRALLVKIKRDIENQIRGLLKNLGLVIGRAKMNMFAMRAAQLAEDRSELFAAVDPLLKAREAVEQQIVDLDRKVLRLARNNAQVRRFMTAPGIGPVTALCFLATIDDPARFKRSRSVGAYVGLTTRRYASGEIDWTGRISKCGDKMLRSYLYEAANVLLTRVAKWSALKAWGIRLAKRSGLRKAKVAVARKLAVILHRMWIDGTEFKWSSKDAADQPA

SEQ ID NO: 490162 - protein, 360 aa, unidentified
MGEVTTVGIDLAKDVFAICLLDARGAVVERKVLRRAAFERWAESLSKPCTVAMEACGSAHHWGRYFAAHGHTARLIAAEFVVPFRKGGKNDGNDAEAIAIAARQPTMRFVAVKTVEQQAILAWHRMRQGWVEERTALLNRVRGLLAEFGLVPGRSPAVLIAAMARLTDEADAPAPMRAIVQQAREQLRQLDERLAACEAQIQAHARCSPQAERIRALLGVGAITASTEVATVPDATLFRHGRLFGAWLGLTPRQHSTGGKTRLGASSKRGDAYLRGLLVNGARSALQAALRAAPDKATRLQQWMVALAGRCGYQKALVAIANKHARMIWAMLARDEAYDPQAWQRHARAAMPAAPAIATA

SEQ ID NO: 490163 - protein, 330 aa, unidentified
MHFVGVDLHKRFLVVRAEDDRGVRTGSGRFDSQDRTGILEFFEKMKPFRCVIEASCSYRWFHELVSPLGDVVLAHPLRLRAIVAGRAKTDKLDAALLARLLRAGLIPEAYIPPRGYQELRDLARARARLSQQASSTACELHALLTRENIRMPFANVFSKSAQRWLAGLDLSEVDGFLRDELLARMRHYRDEMAKLDVLLEEMSVRFPEHEALTMLHGIGLYSALLIIAELGEPERFGDARQVGAYAGLTARVSQSGEQSRHGHITHQGSPWLRWILVEAAMKLVRRDQQLGNLYQRIRKRSGAKIARVAAARKLAGICWSRLMRWQRRAA

SEQ ID NO: 490164 - protein, 423 aa, unidentified
MDILHERVAGLDVHKNTVVACARIMTGKETTRECRTFATTTDGLLALRAWLSECQCRHVAMEATGVYWTPVWRILSEGDFELIVANAAHIKNVPGRKTDMNDAMWLADLLAFGLIKASFVPTEPMHELRSLTRTRKQLVREQTRHVQRIQKTLAEANIRLDSVISDIMGASGRRIIEAMIAGVRQPHKLADLAGKQIKATPKELYDALHGRLTDHHRFLLDLHLRQWDGLDTTIRTIDLEIDQRIDRMDKDRATGESPFRTLIGNADTVPGVSAVSAPAILSEIGCDMSRFPSAGHLLAWAGMCPGQNESAGKRKPSRLRKGAPWLKTMLVQCAWAAIRKKDSYYQAQFLRLRHRRGPQKAICAVAASILTAIYHMLKDGTEHHDLGADYFDRRSTETKAKHLVASLTKLGFTVQLQPSAKAA

SEQ ID NO: 490165 - protein, 357 aa, unidentified
MDDGSKGTPRMTVGVDLGDRYSYLCFLDTESGEVLEESRVRTTPEAFERRFGSERHLHIAIEVGTHSPWVSRLLEECGHEVLVANARKVRLIYGDKRKNDKLDAENLARLARLDPKLLYPLRHRGEDSQAHMAIIRSREALVGSRTQLINHVRGAVKSFGARLPRCSARSFHKVAEDLPKELMPALGPLLETIGELTARIREYERKLEEIATGHYPETGILRQVGGVGALTALSFVLVLEDPSPFKKSRAVGAYLGLVPGKDQSGESDPQQRISKEGDEMLRRLLVGSAHYILGPFGSDSDLRRHGEKIASRGGKNAKKRAAVAVARKLSVLLHRLWVTAEVYDPLYNTHRRGELAA

SEQ ID NO: 490166 - protein, 302 aa, unidentified
MKSIVYVGMDVHSEDNCMAVYLDNRGEPEYESTIPNTEAKVQKFFQKLKEKYPDCTIQTIYEAGPTGFVLYRQLKALSITCMVAAPSLLPHASGDRLKTDRRDAKSLAKALRSGMATPCHIPSKEFEAVRDYQRMVADTKDAVGAAKKRLIMFLHRQDCPSYEGTYWTQRHLQWIKTVSLDPVDRETCDEYLMMVKELQDRLDRQLVRLEEFAAMKEFSEEVAKLKCFKGISTQTALALVTEVEDFQRFPTARSFMAYLGLVTSEHSSGGRHVQGGITKAGNRHIRSLLVESSWCLMSTEFP

SEQ ID NO: 490167 - protein, 444 aa, unidentified
MVFSGMILIREVADAPVIMGISKPAGLKFPCGEVKMMNPLFVGIDVGSRNNVAYLMKPDGSKHSSFSVQNNLGGAKLLSERIVSALGSMQLSDVIIGLEATSIYGDSLVYALREDGSLGRFQRKIHVLNPKQVRKFKDAYPDLPKNDWVDAFVIADHLRFGRIAKEVYMDDYRYQALRTLTRARFDVIQNLTREKQRFANYLFLKCSGMAQDKDIQNTSATTIALMERFETVDDLANADLEELTAFVTETGRGRFADPAATAKAVQAAARGSYRLPKTVNDTVNQAMSVSIASMRALKEQIKVLEKAIEQQFEIIPNTLTSIPGIGKVYSAGIIAEIGDIHRFNSQASVAKFAGLVWHKNQSGEFEAEHSQMIKSGNRYLRYYLLEAANSVRRCDSEFRRYYDLKYHEVNKYQHKRALALTARKLVRLVFRLLKDNRLYIPPEG

SEQ ID NO: 490168 - protein, 321 aa, unidentified
MTYVGIDVSKATFVVAYSSAKSSKTKTFKNTTKGVHEFIQTLSASEHHCVLEATGNYSSLLVYLLSQVGITVSLENPFKIKNFARVMLSVTKTDETDARLIALYGEKMQPAPYRLRSDAILTLKQKRTVIRQLKKQLIATRNLKGSMEALPFFDPKCKKAIEKTIAFLEKQVKNLEEELAVLAQCEYKKQMDLLISIKGIGVTLAAALIMATGGFTYFDNAKQLTRYLGLSPTYQQSGTSVNVKGHINRNGDSSLRGQLYIAAMASLRCNAECKECFDRLRSNGKPGKVAVVAVANKLVRQAFAVVSQEKPYVDGFKSEKP

SEQ ID NO: 490169 - protein, 465 aa, unidentified
MGSEGCRIFRTQIPLLKLAIIISRMHECVFERAWENVPFEDDNSCPYQEQNKMEKQKNIVCGADIHKKFIMATILSRDGNKIRRRFGMTLDEILRFKEWVINNNCEAVAIESTGIYWISIYTVLEGSVEVILANAYKIKHTPGRKTDKRDSKWLAELCLNGMIEPSRIFPKDDRELRALTRAREKLVNNSTQMKNRIHKELESACIKISSVLSDIFGVSGMKIINGLLEGKNIDEIIKMITSKRILKKEQELRKAVTNSLDPARILMIRTYLGLIEKIESEIEILNKEIMNRMQKLKEDLEIAMSMTGMGFSSASTILAEIGNYKDFETAEQLASWCGLTPKVSQSADKLVTGSITKQGSKHVRRMLVQVAHAIAKTKNSKLKKFFLHILAKKGKKKAIVALARKVLCILHHLLVNREKYQDAEMLKTKKVKLNWASSPVQMTEQDMINVLVGAGYTVQKMRECV

SEQ ID NO: 490170 - protein, 394 aa, unidentified
MIPADITLIVGVDVGKTHHHAIGCDRTGATILNQVVANDEGAIRTLLATAGAADAVLLVVDQPASIGALPVAVAQAMGITVGYLPGLTMRQLAEILPGTAKTDARDAQVIAAAAWRMPETIRGIVPLAEHLAEVRLLSGFDADLAQQGTALQNRLRGLLTQLHPALERVLGPQLQAAGVLALLQRYPTPAALQKASRGRIATLLTRHGSRKADPLADAIREALARQTVVVAGTGAADLIVPRLAAQLATILADRTAIGQAIETRVIDHPLYPVLTSLPGVGLRTAATILVETDGKVFPSAAHLASYAGVAPVTWQSGTSVRGTRRARHGNLRLKDALFQSAFSSLSAPASRTYYDRKRARGASHTQALLALARRRTDVLYAMMRDGSPYHPSAP

SEQ ID NO: 490171 - protein, 354 aa, unidentified
MVTLISDELPRIVVGVDSHKETHQAAVLDTTGALLGNECFAASTAGYRELEQWLATLGTIDRVGIECTGSYAAGLTRFFRERQVDVFEVNTTHRATRARRGKDDAIDAEMAARKVLSGEARARAKDTTGDIESIRLLKLSRESAIKARTIALLQIRDVLITAPAELREWIESAGGARHRVNRAWALRPDLERLGEPLQAAKFALRQLSRRVKFLDEEIAGVDRQLAALVERCAPHLLQCRGIGTQHAAQLLITAGQNLVRLHSDGAFARLCGVAPVPVSSGKTNRMRLHRGGDRQANRALHLIVIARLRLDPKTQVYMARRQAEGLSKMDAVRCLKRFVAREVYNSLKLDLLQN

SEQ ID NO: 490172 - protein, 387 aa, unidentified
MEARIVNTPSAALDNEPARCFFAIELSKTNWLVAAQGPAGNVSRYQLPGCDANALLELIERIRARVKRETGRPVEMVSCYEAGYDGFWLHRFLVARGVRNCVIDPASLQVDRRARRAKTDRIDAERMLRALIRYLRGEPDACSVVRVPSVEEEDAKRLHRERHRLVAERVQHVNRIKSLCALQGIYDYQPLRPDRMERLDHLRTGNGQALPVRLKSGIERELERLQLVLEMIVSLEAERNAITKDKAPTAHLHADKIRKLVRLKAIGPEFSTALVGEVFYRQFANRRQIGSYVGLTPSPFSSGAIARDQGISKAGNPKARTMMIELAWMWRRHQPGSALTVWFNERVGNLKGRPRRIAIVAMARKLLVALWRYLETGLVPTGAILKA

SEQ ID NO: 490173 - protein, 416 aa, unidentified
MEVLYRRCAGLDVHKDTVVAGLRLAEAGSVITEIRSFATTTPGLLALSAWLGEHGCTHVAMEATGIYWKPVWHILSDGDFTLILANAAHVKNVPGRKTDVADAIWLADLLAHGLIRASFVPPPATQELRALLRTRKQLVREQASHVQRLQKTLEDANLKLASVLTDILGVSGRAILEALIGGECDPDALLGLVRRGVKASPDTLRAALTGRVSERHRFLLRLHLRQIEALDGAIAEIDREVDRDLAPFHDAVRLLCSIPGVSDLTARVIVSEIGTDMTRFPTAGHLISWAGLCPRNDESAGKRRSTRLRKGAPWLKTTLVQCAWAASRKKDSYLQAQFRRLRHRRGPKKAICAVAASILTAVYHMLRDGTFYHDLGAGHFRRISPEAQANRLAKLITKLGFTCTLAPIQLNSAVSV

SEQ ID NO: 490174 - protein, 367 aa, unidentified
MKQQTSATTETTSKGRTRIDYTGKTICVGVDSHEKDYQVAKVINGICLGNHRMKASPQELIEHLRSHYPGATFKCAYESCAWGFTLQRQLQQAGIECIVVHAADVSTTDKEKRRKTDKVDALKLARDLESNHLKAIHVPDEDIQKERNLIRFRKRLKGDLNRSKNRLKSLLKYQGINIPAQFGKACWSHKFMNWIEEEAKKDILLQDTLLLMLEQIKQLRQLLLNTEKKLQELMKRKYEQQATLLMSAPGIGRTLAMLFLLEVGDISRFKGFDPLNDMIGFCPDTDSSGDTERDKGITTRRHKQLRSGLLQAAWRAIRIDPALLEAYQQLTKRMKPHQAIIRIARKLLRRMRAVLISEIPYQKGIIA

SEQ ID NO: 490175 - protein, 390 aa, unidentified
MILVGIDVAKDKHDCCIINSDGEFPEEVFSILNNREGYETLYKRICSLAVDLAKVKVGLESTGHYSSNLLAFLLDKHLTAYVINPLRVNLFRKGQSLRRTKTDKIDSRNIAHLLMTDSSLKPYSLSSYHMEELKSLTRYRASMVRERTKLKTSIARLVTILFPELEHLVSSIHIHSIYAMLEKFPGSAYIAAAHLTRLTALLLKASRGRFGRETAIRIRDTAKQSVGAVSPAKSMALRHTIAHLRVYDQEIGEIESEIEKIMDDVNSPITSVPGIGMQMGAVILAEIGSFCRFDSPDKILAYAGMSPSTYQSGKLTGSYSRMEKRGSRYLRYALFNVTRYVCHYDPGFTAYLSKKRKEGKHYYVAISHAVKRLVRVLYAMEISGNRDKTA

SEQ ID NO: 490176 - protein, 337 aa, unidentified
MKVTLIGIDLAKTIFQVCGVNQAGKNVFNRQLRRNKLTAFLMQHPEATIAMEACSGSNYWGRELERRGFTVMLIPPQHVKPFVKGNKNDRNDAFAICEAARRPAMRCVQPRSLAQTDTMLIHRILERRVGERNSLMNQIRGLLNEYGVVVAQGKEKLRNELPFILEDAENELTETARYYLHRQLLEWYELDAAIAELDKAIAQQVKSSEQSSRLKKIKGVGNKISSAAEAFMGNGSGYRSGRHFAANLGLVPKEHSSGGKQRLGRITKRGNAYLRRLLIQGAWSVIRYADHSQDRLSRWAKPLIERRGKHKAAIAVANKLARIIWAMSYHQTEYRAN

SEQ ID NO: 490177 - protein, 455 aa, unidentified
MAKSRVQKRKVVVNALDQINPNAAGIDIGGEEIYVAVPPDRDEESVRCFGVFTEDLERLADWLKACRVDTVAMEATGVYWVPLYEILEKCGIRVFLVNARHLKNVSGRKTDVLDCQWLQQLHTYGLLQASFRPPEQIVAIRSLVRHREMLVQYRSAHVQHMQKALILMNLRLSNVLSDITGVTGMAILRAILAGERDPHKLAEFRDKRCAKSEEEIVKSLQGHYRPEQLFVLKQAVELFDYYAAQIQACDGALETLYRQFDPPENPGTPPPAPRSTARRKNQAHFDLAPALYRMTGVDLTPIDGVDALTIQKVLSEIGTNMSPWPTVKHFTSWLHLCPNNRITGGKVKQTGVQPTKNRATIALRIAATSLKNSDSALGAFFRRIRSRHGTPVAVTATAHKLARVIYFMLKEHKPYQDVGALSYEQAYHQRMVRNLHRQATKLGYRLEPATVMASA

SEQ ID NO: 490178 - protein, 389 aa, unidentified
MKIFVGIDIAKLNHFAAAISSDGEILIEPFKFTNDADGFQLLVSKLESFDKNSIIIGLESTAHYGDNLVRYLVAEFYQVCVLNPIKTCQMRKNNVRKTKTDKVDTFVIAKTLMMQDDLRFITFFDLDMMDLKALGRFRQKTIKQRTRLKIQLTTYVDQVFPEIQYFFKSGLHQNAVYALLKEAPSPKEIASMHMTHLANLLKVNSHGHFTKEQAKELRILAQKSVGANDSAISIQITQTIQQIELLDSQLEKIEAEMTDIMKFNDSVIMTIPGIGYINGGMILGEIGDIHRFSNPNKLLAFAGLDPSVYQSGNFQAKTTRMSKRGSRVLRYALVNAAWNVVRNNATFKAYYDAKRAEGRSHYNALGHCAGKLVRVIWKMLTGEVEFNLK

SEQ ID NO: 490179 - protein, 337 aa, unidentified
MEKPAVYVGLDYHQDAVQACVMDAGGRMLANIACVNDCVAIVRAVERHGVPRGVAVEACAGAANLADELIAHAGWAVDLAHPGYVARLKQSPDKTDFADARILADLTRVGWLPRVWLAPEPVRALRRLTRWRQTIVDDRRAARLRVRALLRDLRRRPPRGVRPWTAAWRAWLDALELPPSARFVLDALHRHIADLSVHLRAVEAELDRASAADQVVARLLAMPGIGRVTAWVLRAQIGRFDRFRTGKQLARFCSLCPRNASSGERVADSGLIRAGDPQLRATLIELGHRLARHDPRWGELAARLRAAGKHACVVAAAIANRFVRWLHHQMQETPRMT

SEQ ID NO: 490180 - protein, 408 aa, unidentified
MTSCTMQPERYVALDVHRDYIVVGAVNAQQEVVLAPRRLSLDELLPWAQWHLQASDAVVLEAMSNAWHVYDQLSPLVGSVTVAHPFLVKMITASRVKTDRHDVLRLARLLAANLIPAVWVPPQEVRYLRRIVAHRRNLIRQRTQLRNRLHGVLQQHDIFPPEGDPFAAERRCWWEALPLPAIEHLLVLHNLALLDALTPLIAQVDKEIIQLSTSERWQSSATRLVQLPGISVTNAMALLSAIGDISRFPGPKQLVGYAGLGASVHDSGQMHHHGRITKQGRTEMRSTLVEAAWMAVRYSPYWAERFETLARRIGRGKAIVAIARRLLVTVWHVLADESVDRHADPQAVARKLMHWGDDCRREARHGLSRIEFVRGRLAHLGLLSQVPKFNYVGDVYKLAGSEPTSAQG

SEQ ID NO: 490181 - protein, 457 aa, unidentified
MTRQSPSRRQRDLAPIHPHAAAVDIGARMHVAAVSPRSDPEPVRTFGTFTGDLQRLADWFEQCRVTTVALESTGVYWIPLYEILTQRGFAVVVVNAREVKQVPGRKTDVCDAQWLQRLHEYGLLRASFQPQGEIATLRSYLRQRERLLEAAAAHIQHMQKALTQMNLQLQHVVADITGQTGLRIIRALVAGERDPDRLATLRDGRCKTPLATLRAALVGNAREEHIFALAQALELYEVYQTKVAACDERIAAVLERLQAQSPPPATALPPPRRAQPQANEPAVPVRAALHAILGVDLTQIDGIGPYLALKLVSECGSDLAAWPSAQHFASWLGLAPHNKISGGKVLSSRTRRSGSRVAALLRLAAGAVGRTQTALGAFYRRLAARVGKVKAITATARKIAVLVYNTLRHGMAYADPGASYYEERYRQRVLSNLRRRAKSLGYVLEKAEPASTEVVVS

SEQ ID NO: 490182 - protein, 332 aa, unidentified
MMDLQGTVIDEFTFTNNHDGIASLASRLTMDDRVVMESTGSVWTNLYNHLDDAHIPVVLANPLKTKAIASARIKSDEIDARILAHLLRTDLIPESYVPTKEIREVRALIRHRTSIVKIRTMVKNKVHAIVDKNGLEHDELFSDLFGKAGMQWLGTIRLPSLDRLMLDNHLDHLESLKKQIHAVDQEIHARASRDEDVRLLLSMTGVDIFTALLVRSEIGNISRFPEYKKLISWAGLAPSLHQSGSIEYHGSITKQGSKMLRWVMVEAARVAVNHDEKMRAFYARVKYRRGDQKAIVATASKMLKIIWFMLARREPYLSRNQRRYEEKLNTIE

SEQ ID NO: 490183 - protein, 346 aa, unidentified
MHVATVGLDLAKRVFQAHGADAEGRAVLRRKLGRGEVLAFFAKLPPCLVGMEACGGAHHWAREIAALGHEVRLMPGAYVRPYVKRGKTDAGDAEAICEAVTRPGMRFVAVKSPDQQAALMLHRTRDLLVRQRTALVNALRGHMAEFGIVAPVGIARVGELVTILLDEEAAAMPSLARRALLALAAELETLGVRIDEAEAAILAWHKGNEASRRLAAVPGIGPITASAIVATAGDASQFASGRHFAAWLGLVPRQNSSGGKQRQGGTSKAGDGYLRRLLVLGATSLVRQAQRRTKEPAFAWLRGLLERRPARLASVAQANKTARVAWALLARGEAYRRPAPAVAAAA

SEQ ID NO: 490184 - protein, 338 aa, unidentified
MTIIAIGIDLAKNVFAVHGVDETGKAVLVRPSVKRDALLEMVAKLAPCVIGMEACSGAHHWARQFQVYGHTVRIIAAKFVAPYRLSGRKGKNDAADAQAICEAVQRPHMRFVPIKSEHAQGQLSIHRVRQGFIETRTATINRIRGLLSEFGVVLPQKAEVVRREAGLRLEALPGWANTAIGDSLSELHHLDERIAEYDRHIEAMAKADDRGVKLMAMPGIGAKTASALLASVGNGHDFKCGRQLAAWLGLVPGQYSSGGKQRLGRITKAGDSYLRTLLILGARAVVAAGKNKTDRLSRWAQNVAERRGYWKAVVAVAAKNARMAWAMLSKGEAFKPLT

SEQ ID NO: 490185 - protein, 322 aa, unidentified
MKSQELFIGVDVCKDRLDIANDSNSEVWSSANDDLGVSLLVEKFTALKPTLIVMEATGGLETLLYSALVTAGLPAVVINPRQVRDFAKALGKLAKTDAIDAWVLARFGALMRPEVRPVKDEQTRELAALVTRRRQLLGIRTAEKTRLRQAAKWTRKDIKSLIKVLDKRLAKLEKEIGNNVKNTPGWKEKDEIITSVPGAGPNLSSYLLANLPELGKLNRKEIAMLVGVAPLNRDSGKFRGGRIIWGGRSQVRSALFMSTLSASIHNPHIKGFYQRLIEKGKKPKVALTACMRKMLTILNTMVKNNTTWNISYPLTLDINHGC

SEQ ID NO: 490186 - protein, 355 aa, unidentified
MNSGKYIGLDVHQATICVAVMDAKGKVVMESILETKATTILEFLAGLRGTLSVTFEEGTWAAWLYDLLKPHVANLVVCNPRKNALLKHGNKSDKIDARKLANLLRLNDLEPVYHGESGVRMLRELARSYLTIVKDVSRVMSRLKAIYRSWAIPCAGRDVYYTRHRGEWLGKIPEAGSRRRAEQLYQQLDMLQPLRQQARRELLAESRKHTITAKLRQIPSLGPIRSALAVALIQTPHRFRTKRQLWTYSGLGLETRDSGEYHYVEGQVRRRKKQVFIRGLNKDHNHDLKGLFKAAATRASVQPGPFQDFYQRSLAKGIQPTMARLTLARKIAAITLTLWKKGENFDVEKLKAQAA

SEQ ID NO: 490187 - protein, 338 aa, unidentified
MKQFSNFVGVDIASASFMACAGITPWKLVIKPVKFDNHEDGFASFLAWLQVNNLKAENTVVCMEATGVYSEGVAYFLVASGYTVAVESPGNIARKFPINASKTDWLDCQYIAEYACRYADKLAFWQPRDEILEQVKVLLTTRQQFSVQLTAHKNALHAVNRKKILSNLAKQAHEDIIGHITKLIAEIDAEIRRLIDSDPTFKATLLLLLSVPGIGLQLAAHLIILMQQSLDPRELAAFVGISPIQHQSGTTVYTTPTSRHYGPPALRKLLYLAACSVRTHRKEFKKYFLRKTAEGKSGKLVLNNIQNKLLKIACAVVRSQKPFIPNYVSVNPLLLKNT

SEQ ID NO: 490188 - protein, 410 aa, unidentified
MPEPTYALYVGVDWGNQTHQVAVLDTARGLRGERGGAHDGPGLHALASWLAELAAPGTVAVAIEVPHGAVVDTLRERGFAVYALNPRPMDRFRDRDTVAGAKDDRRDAQVLAAALLTDRPAFRRLHVDDPQVVQLRELTRIEAELSEALRRLANRLREQLLRFYPQALELCPAADEPWFWALLTQLPTPPAAARRRRGPVAALLREYRIRRLTADEVLTVLRRTPLTVAPGTLEAATEHIALVLPRLELIATQRRACAPRVETMLAVLAAAGQQQGHRDVTIRRSFPGVGRVVAATMLAEASQLLAARAYHRLRASGGAAPVTRQSGKQRGVPMRYAWNPRLRNALYYWAFIAARHDPAPRQHYEGLRARGHSQGRALRGVADRLLAVLIVMLKTQTLYDPSRREAKFAA

SEQ ID NO: 490189 - protein, 369 aa, unidentified
MVRLVLLPHHETVKPKEVAMPQRNVPRPAAVYGIDIGKNIFHVVGLGSDGAPVQKVRFRRDTLLQFFERAAPAIVGMESCAGSQWMARKIQALGHKVRLIPAQFVKPYVKSNKTDIIDAEAIAEAATRPTMRFSALKSEEQADLQALHRVRDQMIGTRTRLINQMRAFCLEYGIALRQGAGLFKLDLPQVLEDQSNDLSSAMRKLLTDLFADLRQLEQRIGDVTREIEAIASREDVARRLMTIPGIGALGATALLAAIGNGRQFKKARDLAAWLGLVPREYSTGGKQKLLGISKRGNRYVRKLLVHGARSCFRHLDRTRDRLGSWLDGLQARMHPNKAVVALAAKMARIVWVVLTRPGALYERRDPAFT

SEQ ID NO: 490190 - protein, 490 aa, unidentified
MQRLLGISCGLDVHKDIITACILDVRGREEPKVIEAEFTTMRGDLLRLRDWLVKFGCLNVAMESTGVYWKPVYEILEEVEGINLCLANAYHMRNVPGKKDDEEDAQWIASLYMCGLLNKSFVPERGIRDLREYTRFYVKMVQSRVRLINRIEKLLQTHGFKLSSVLSSIVGVSSLGILEKLCNKGEISVSDVAGTLQRGVKKTPAEIAYAINGKLSLPTQMLLRQMLNGLYSYDRQLAILFEKMMVVAEPYMSYIKLVATIPGIDILSATCIIAEIGVDMSRFIKGAGSLISWAGLSPRDDKSAGKIISRKILKGNSHIKAILCQCAWAATKTRNIRLSNWYWRNAKRLGQKKAIIAVARKLLVYVYNIIATEMPYNNMLDIADTELFKAFKLESAKQQVAMLESNTSGTQVVGNINKIIANLAKETALKKARSINKGLKSPNSRPLDLDPLWEDMTHPAYSSLESEPTPLDSFIAPRNRGRPKKNLTPC

SEQ ID NO: 490191 - protein, 341 aa, unidentified
MNQQILACNVGIDISKSEFNACILVRYNDFSYANLGTNVFENNPKGFKAFFSWCNKAIDFENKTFTMEFTGRYSEKPASFLHEKKATVFLVSPFKSNRFRQSYDADVKTDQTDAYTLAVMGLERKLVQWQPDSEFFANLKIIVRERYGLIKQRTAIKNKLHALHYAAASTLPTVKRLKEQMKLINTQIREIDKQVEEYLKTDESVWQKVESLQTIPGIGLTTISTILVETDGFRKTKNVKELTAFAGYKVTINESGIYKGRSHISKRGNKFIRHALHMPILCVIQVNPLLKPKYLSLKARKAKPIIATTAIERKTLILMYSMYKNNTSFDANYLKSNTLMN

SEQ ID NO: 490192 - protein, 403 aa, unidentified
MNMNAVGIDVSKGKSMVAILRPYGEIISKPFEVKHTVSGIRSLIEQIQSIDGESRIVMEHTGRYYEPLVRELSKADLFVSAINPKLIKDFGDNSLRKVKSDKADAVKIARYTLDSWTELRQYSLMDKIRNQLKTMNRQFDFYMKHKTAMKNNLISILDQTYPGANTYFDSPAREDGSQKWVDFSATYWHVDCVRKLSLNAFIDHYQKWCKRRKYNFSRSKAVEIYEASKELVSILPKDDLTKLIIKQAVEQLNTASQTVEQLRTMMNEAASKLPEYPVVMAMKGVGKSLGPQLMAEIGDVSRFTHKGALTAFAGVDPGVNESGSYEQKSVPASKRGSSTLRKTLFQVMDVLIKTKPQDDPVYLFMDKKRAQGKPYYVYMTAGANKFLRIYYGRVKEYLSSLPE

SEQ ID NO: 490193 - protein, 356 aa, unidentified
MLYLGIDQHARQLTISLRDESGDVLQARQVSTQPEKIQAFFAKLTRDCAHDGESFIAVVEVCGFNDWLIRLLRDYRCHKVILIQPEERKKRKTDRRDAAALSELLWVNRDRFLAGKPVRGLRQVDIACTTDQENRRLTTLRKEASQTRTRITNKIKHMLRRHNMQWNLPTKTFPTQRAIAWLKQLALPEIDRLEMNYLLVDLEQAEQRVQELEQVITERCGHSADAQLLRSMPGVSYFTATSLACRIGRVQRFPRARSLANYWGLTPGCRNSGEHNQRLGRITKAGSNMARWLLAQVAHQALRKDARLRQWYKRIKRRRGSTVARVAVMRKLATIIWHMLSKRQTYAECRAIALAS

SEQ ID NO: 490194 - protein, 317 aa, unidentified
MSVANEVFVGIDVSKAELEVCWLPQRERLQVARDEGGLVRLVERLKELGPSLVVLEASGGYEMPVAMALAGASLPCVVVNARQVRDFAKASGKLAKTDRIDAQVIAEFAQAIRPQVRALPDAAAAHLIALVARRRQLVEMLTAEQNRLALSHAAVREDLKQNIAWLKSRLQDLDGELARAVRSSPLWRENDKLMQQVPGVGRVVSAVLLALLPELGRLSPKKIAALVGVCPFNRESGRWNGKRAIFGGRAGVRSVLYMAIVSAIRWNPLIKTFYQRLLAAGKPKKLAMTACMRKLLVILNAMMRDRSDWNPNGALAT

SEQ ID NO: 490195 - protein, 477 aa, unidentified
MPLLGRNHNPTNMKSKTPKSKKKKQKISVEQGWEAINPHAAGIDIGAKEHFACVPANATPKNVRSFGTFTADLGALADWFKECGVTSVAMEATGVYWIPVFQILEERGLAVILVNARQTKNVAGRKSDVQDCQWIQRLHTYGLLQGSFRPEDPYCVLRTYLRYRDELVSARSTQCQHMQKALQQMNVQLVQVLSDITGVSGMAIIQAILEGERDPVKLANMVDRRVRATPVQIQKALGGDYRAEHLFVLQQAFSLYGTYEEKINACDEQIVRETATLSDKVDPQLRPLPPRKEGRPASKDKMQGQDMREVLYRKFGADLTAIEGIGVTTALVMLTEVGPNVTGFKTEKHFCSWLGLCPDNRISGGKVLSSHTRRVINRASDALRMAAVTLERSQSALGGFYRRMKGRLGAAEAITATAHKLARIIYRLIKHGEAYVRQGMEDYEKKFRERKLHALRKTAMSMGFNLIAKQELASAVS

SEQ ID NO: 490196 - protein, 409 aa, unidentified
MNKVDIAPFEVFCGIDVGKSLNHIVALDRYDDKPLINRKVPQEEAEIRAALEEAGDFGLALVTVDQFGAFGRLVVGVAKSMDIPVAHMSPRRFRQVAETYGEDKFDEKDAFILADASRTTPRNIEFVGNRAESMAEIKVLSSRRDDIVEERTRCYNRLHDFIHQVSPPLEELFSKRKLHNDLEIRLIARYGGPIGFRQAGRARASTWAAELKYHCVDGPKKVEQVFDVLDRQTVMLPGAAVIEEQIRSIASRIIELLAEEKRLNLMIDQRAKMIPEVDLLQSIPGVGPVYAALIAVEIGDIGRFRNSNHLASYAGVAPRKEESGTSVHKRRKRKGGNRRLKNALMQSSQRSVQCDPLARAYYERKRAEGKKHLQALRALARHRVTVIFAMLNEGTFYEPPAEVDENGRG

SEQ ID NO: 490197 - protein, 460 aa, unidentified
MSLTGLVSQNSQEDVVVQGSGLSRGDKRRNAKLARLRELVPTDNAILGIDLADEKQAIVLTDHDSQVLARTRVKAKAWRLGPVLRWGREQARKHGFADVTVGCEPTGHRWQVLDQLAAQQNMVLVCVRPLLTGRARESEDYTRDKRDDKDAVLIARLVAQLDCYAPERTDETWARLRHLGARRDRLISESTACVQQLRDLLECAWPAVLSAAAQPFDSVNWCAALAVVLERCNGDPRRLARLGPQGFEAAVRRELPRWGGQRAWRRIITAVFTALTDAAGVFAQRRGALERARWVLADWRTCQARLAEVETRMVEVLDELGLTEYLTRIPGISAVGAAAILAETGDPTRFDSPRALVKHAGLCPRENTSGTYTGQSRISRRGRPRLRLAAWRAVWGALPNNPVMAARYQHLTTRERNQLNDGQARAAIAAALLRWIHVIVTRRVTWDAALAGANELPAAA

SEQ ID NO: 490198 - protein, 342 aa, unidentified
MESKLVIAGIDVHKRMLAVVLVDADNPQKELERRKFATGTSALDACAAWLESQGVNVAVMESTAQYWKPVWLALEGKFLLHLAQAQSNGAPRGRKSDFVDALRLARRFLAAELKLSFVPDEEQRGWRCLARSKYQLRSQQVRLHGQIEALLEESRIKLSSMVSDLLGATGRRILGALVKGETNAEKLAALAANNVKASREELADALRGPMQPAHRKVLGMWLEQVEMIDRQIVDLHLELGKALRSHQEPIARLCEIPGLKEDAAQQIIPELGPGAAVFETAAQMASWIGVCPGREESAGESTSNRSPKGNRTMRRLLNRSLGARCVPKTAFSRNCSIVWCPG

SEQ ID NO: 490199 - protein, 417 aa, unidentified
MQMKLSAFTAVIGIDWADKKHDVCVQALGSDKRQFSKIPHQVDKIDEWAQAMYVRHGGQMAVAVELAKGPIVSALQKYNFFVIYPINPTTLAKYRQAFNPSGAKDDPTDAELALDLLLKHPDRFEALNPQSVEMRTLMTLVEQRRRLMNDRVRITNRLRNALKQYYPQALDWFEHIDTSLFCAFIRQWPSLTQAKRARRATLEKFFHQHNLYRKPVLERRIQAIKSAMPLTTDDAVIMPHRLQTLVLVSQLEVALQSIGMYDDEIAVRAPRHPDYALFSCLPGAGPHLAPRLLVAFGEQRERFASAAEMQKYAGIAPVTERSGQKNWIHWRWQCPTFLRQTFVEWAAQTINKSYWAGLYYYQQRAKGCSYQAAVRSLAFKWIRILYRCWITRTPYDEAKYLKALKERGSPLLSAESA

SEQ ID NO: 490200 - protein, 307 aa, unidentified
MSPTATTYVGADVAQDTIAFCGPTAATIKNEPAALRAYLGTLPAEAHVVCEATGRHHYALHQACALVGRPLTVLNPAHARAYARSLGKLEKTDALDAAILRRFGHERRPAATPPPSAAQQTLRDLLMVRSALVETIADHRRRDRLLVPAAQRQLRMIIRTLQTRQRALDGQLAAWLEAAPADCQDRVQTLCLVVGVGVLSALQLLAYLPELGSCNRGQIAKLAGLAPLPWDSGTAHGVRCIQQGRAPARRVLYQCAVVAARWNETLRPHYQQLRARGLPAKPAYVAVARKLLIYLNALLRPTDAPGV

SEQ ID NO: 490201 - protein, 313 aa, unidentified
MAIIGGFDLHRRQLTYDYLDVVTGQVDRGRVVPADRSQLRSFLARFEGQGEVAFAVEGCTGWRYVVEELERAGIGAQLAEPAETAAKRGPKRRAKTDRSDARHLRELLGKGDLPESWIPPVQVLEARARVRLYKDLEEERTAWLQRVQATLYHQGVPVIASLTSAAGQARLATAELSPAGQQAVQVGLRQLDRLTAELDPLRADLARFSRRQPGCRALRTTHFGIGPITSVAIWAEMGDTRRFSSSDDAVRHAGLDITVYASDTKRARAASPGKGRPRCAGRCLRQPCAPAGRTRPTMPTSWRSSAGPTATWA

SEQ ID NO: 490202 - protein, 408 aa, unidentified
MKTLHRRCAGLDVHSDSVVACARLTVRTKVSHEVRRFSTTTRGLLELADWLAAQGVTHVAMEATGVYWKPIWHILEGRFELVLANAAHIRNVPGRKSDVNDAVWISDLLAHGLIRASFVPPVPIQDVRDLTRTRTQLAREIAQHIQRIQKTLENANIKLTSVISDIVGTSGRRILKAMITGETNPAKLAELGSTRLKCPRAELTAALDGRVTAHHRFLIAHHLRLIEELERHIAAFDARIEELLAPFRNAVAQLITIPGVSRVSAQVILAEIGTDMTPFPTAGHLLSWAGLVPRLDESAGKRRSTRVRKGAPWLKPVLVQCAWGAARTKCTYYQAQFFRLKARRGPKKAAIAVAASLLTAAYHMLKDGTFHQDLGADHLVKRDKARIAGRLAKRIKDLGYNVSFTATA

SEQ ID NO: 490203 - protein, 391 aa, unidentified
MIFVGIDVAKDKHDCFILNSEGTVLADVFTIANNRIGFETLLSRIQSCSQGESKIKVGLEATGHYSYNLLGFLLDSGLATYVINPLHTTLYRKSLSLRRTKTDRIDARTIAMMLMSDVDLKSYSNTAYHNEELKSLTRYRFDKVKERAKLKSSVARLVNILFPELEKLVSSLHIAVVYALLSNYPGASYIANANTEELAETLCTASKGRYTKSKTAEIQVAAGVSIGSKMPAKSMELKHTIALIRELDKEISEVESAIDKITSQMDSPIFTIPGIGRHMGAMILAEVGDFSNFASADKLLAYAGLSPSTYQSGQLQNCYAHMEKRGSRYLRYALFNAAKYVCLWCPTFSAYLEKKRSEGKHYNVAISHAAKKLVRLIFAMQRSGKAFLADY

SEQ ID NO: 490204 - protein, 370 aa, unidentified
MLDTTTFVGLDVHARSIKAVSLDVMTGEVRAATFGYDAGAVAEWVRSVDPRARCVYESGVTGFDLQKRLSGLGVDCVVGAVSKMIKPSADRRRKNDRNDAEFLARMLSVGNVVEVWVPDDECEAARDLTRALEDARDDLSRSKQRLSKFLLRHGLVFDERTPTGRRKGNWTRAHWSWIESIRFAEGADNDVLAYYVDAVRRAAEEKARLEGLVEAEARKPRWRKRVDSLRCLKGVDTASAADLVFEAGEFSRFRNARSFAAWVGLTPSEHSSGESDRRGAITKAGNKHLRKTLVEAAWHYLTCSGRPKDLAKGQAPDRGARRHAAKGVRRLVERRGALLARGVHNNKANVATARELACWVWAVGLMAEEA

SEQ ID NO: 490205 - protein, 323 aa, unidentified
MNKYKETFGADISKDVFDVHGSASGHDQFNNDEKGFASFLKTLPPGALVVMEATGYYHYRLAQFLHKNNVVVAVVNPLSVKRFIQMKLAKVKTDKSDARAICEYALANEVPLYNALTAVQAECLQLFRLLDSYLKKRTATKNKLHGEETLGIPSRFVYRSLKRDKKHLDREIAGIEERLLTLVKKEQQQQLTLLTTVPGIGTKTALFLIVVTDGFSKFETAAQLCSYVGITPTIRESGSSVRGRSRISKVGNKKLRNLLFLCAFNACKHNSACRELYERIVNKGKSKKLALIAVANKLLKQCFAIAKSGLAYDAEFVSVIAVK

SEQ ID NO: 490206 - protein, 350 aa, unidentified
MQKIYIGVDFHARQQTICYLTTDSGEMLFQQLQHQDKAAVRAFYAQFSGDVIVGLEASGYSPWFERLLEELGCQVWLGHATEIRRRARGRHKNDRRDAELILDLMLHDEFPRLYLPPLPSREVLRMLRYRQKLIKMRTIGKNSLQALALQSGLAKGPHLFTKAGLQELRTVAMSPAMQWQRDQWLQLLEPLNQRLLETMLWLKQQSQADQRIHRLRTHPGVGLLSALCLVHSLEPVSRFANTRKVTAYAGLDPLERSSAERKRFLGISKGGSRVLRFLLVEAAHTALRKDAELRRFYQRLAARHGRPKAQVAVSRKLLIRAYIMLRDEIDYAEFQRRAVAARPAPPAHGH

SEQ ID NO: 490207 - protein, 408 aa, unidentified
METIHPICCGLDVHQASVSACLRRVNAQGAVNVESREFGSTVKELVALADWLVAEGCPIAAMESTGVYWKPVWNILSPLLDVWVVNAREVKQRRGKKSDRADAKWIAELVAHDLVQPSFVPPRRIGVLRDLVRMRTVLVQTRTQVKNRVLAVLEDTNVKLASVVSDPFGASSRKMLDALVNGERDCKVLSEMAKGVLRRKIPQLEVALQGGFTEHHAFMIRLGLESLDQSNRQIAELDAQIERLMDPLQEEALRLTSIPGVGHNAARVVLSEIGTDMSRFGSAERLASWAGLCPGNHESAGKRYSGRTRKGNRYLRRVMAECAWAASKTNTFLGRTFRRFQIRVGGKKAAVAVGHKILVIIFHLLNEGRLYDDGRYDYINQREQIRQKNRALTTLQRLGYQVALTPAS

SEQ ID NO: 490208 - protein, 381 aa, unidentified
MSIVALDIASKSATFCVMGTQGVQNQGSLTFDHDGFSSFIASTQVSDASLFVMESTGGYHLPLYHFLLNHGRKARIINPLLIKHFHDGQTLRRTKTDALDAVTIARYAQAHMSALQEDRMQLDSESKMLARRRAANAEDLAKAKTILKSDLAVAFPELLAFNVYTKTLLAFLGVYGSARDVLDATDGQLQQALEVQRGRKSEEITVQHIKDLAQTSIGVSYRAAMVRDSAKAVLACQQRDEELTKALVELEKTLHRRQMEILVSIPGIGEVTASHFLSEIPDISQFATYQKLIAFAGTNPGIYESGNTSKQLRISKHGNPVLRKYLYLMADSCVKHNIVFNAYYHKKRDAGFPHRKAMVATMNKLVRTIYALLSKDEMYSR

SEQ ID NO: 490209 - protein, 349 aa, unidentified
MSIMTEVNPCGITVGIDLAKNVFAVHGVDENGKAVLVKPKVARERLLELIAQLPACLIGMEACSGAHHWARQFRAHGHSVKLMAPKFVTPYRMSGKRGKNDAADAAAICEAVTRPKMRFVPIKDVDQQATLCLHRTRQGFVTERTAVYNRIRGLIAEFGVVLPLKIERLRHDILLQLEELPGWVNRCVGDLLRHADTLEERIAEYDKAIAQVARQDERSRRLMRLTGIGPNTATALLASIGAGHDFKHGRQVAAWIGLVPSQYSSGGKTRLGWITKTGDAYLRGLLVMGARSILAGLGDKQDRFSRWARSLVERRGYWKAVVAIAAKNARLAWAVLKYGDEFRLHADAV

SEQ ID NO: 490210 - protein, 411 aa, unidentified
MKKLSESQAKRKANGRTRKTGERMPQDTKQAMTKLVAELTHRLAAESAAGNTENDPRATGVCPNLNRLTVGIDLGDKRRRYCILGPAGETLAEGDLATTKEGFDDMFQAIAASRVVIEVGTHSAWVRDVVVSWGHEVLVANARLMDGTKRRKRKNDRIDAYKLARLGRVDPQSLYPILHRSTEVRQDLIILRARDALVCVRTELINTIRGLVKSLGGRLPKCSSPSFPDKVADSLPAQVRQVLLPLVSQVKTLTESIATYDQRIEDLGNTKYQQTKLLRQVKGVGPITALAYVLTLEHPERFPKSRDVGPYLGLVPRQEDSGDKQPQLGISKAGDQMLRRLLVGSAHYVLGPFGPDTDLRRYGLRLCERGGKNAKKRAAVVVARKLAVLLHRLWTSGAIYEPLRQLNPAAA

SEQ ID NO: 490211 - protein, 366 aa, unidentified
MTSVPSAAELIHLGMDTSVGEIVVGVLRPGQEIPAVDRIRNDEESVRRLVGRFPDRRLLSACYEAGPGGYELHRLLASMGVACDVVAPSLIPKGSSERVKTDKRDSARLALTHRAGLLTAIRVPSPAEEAVRDLVRARADLVDDRKRMQQRLNAVLLRHGRVWRGGSKWTYAHRAWIDKQVFAEPALAETLALYRGALEAREAELAAVDRQLSAWARRDPLAGPVARLGGYRGIAELTGLSLAAEVIDWRRFASARAFVGFTGLTCSEYSSGSRTRRGSITKAGPEAVRTALVEAAWAYRSRPRIGVDLRRRQDGLQAATLARSWKAQQRLHATYAKMTARSKPPGVVVTAVARELAGFVWAEMTS

SEQ ID NO: 490212 - protein, 344 aa, unidentified
MALTIVETRAITGGVDTHADVHVAAALDPIGGLLGVAEFPASAAGYARLLGWLGGFGTVCLVGIEGTGSYGAGLARHMSAAGVRVVEVDRSDRQDRRRQGKSDPLDAVSAARAAQSGRARGAPKGRDGAVEAIRALMVAKRSARSERTQTINQARSLIVTGPDDLRARFARHTAAGLVTELALMRPRPGDVVGYATRIALRELGRRAEFLDSQLGRLDELIVPLVTARAPGLLGLYGVGPDTAALLLVAAGDHPERLRSEAAWAHLCAAAPIPASSGKVTRHRLNPGGDRQANHALWRIVITRMSSHPPTRAYAGRRTGEGKSKTEIIRCLKRYVAREVYPHLR

SEQ ID NO: 490213 - protein, 346 aa, unidentified
MLYVGLDLSRQRLDVHVLDEEGRTVEVTAVHPDADALKTLAGRVLRHGQEVSAVIESMTGSRFVHDTLERLGWDVAIADPVKAKGLAPLAAKTDKIDAHVLAELARRDLVPEIWLPTPGVRAERERARFRLHLVRHRSALKCRIHATLMSFGHTVPVTDLFGNSGREILAGFELPEPWATTLATSLVMLDELDERIDECGRELARLGADHAYIPLLLTVPGVGPLLAYTIASEIGDIGRFASPKKLTGYTGLCPIVRQSGNRDVRGPLAKNGPKYLRWALVEAATHAARDVRYRERYERTKHRLGRQRGAKVARVDIARQLAEAIWHVLTKKEPFAPAGPAIKLVA

SEQ ID NO: 490214 - protein, 398 aa, unidentified
MTESSDYESVQVFIGVDVGKDTHHAVAINRSGKRLFDKALPNDENKLRSLISDLKQHGQILLVVDQPATIGALPVAVARSEGVLVGYLPGLAMRRIADLHAGEAKTDARDAAIIAEAARTLPHALRTLKLADEQIAELSMLCGFDDDLAAQTTQASNRIRGLLTQIHPALERVLGPRLDHPAVLDLLQRYPSPEKLASLGEKKLAAQLCKLAPRLGKRLAADIAQALAEQTVVVPGTNAAAVVLPRLALQLITLRKQRDEVALAVEQRVLAHPLYPVLTSMPGVGVRTAARLLTEVACRAFASVAHLAAYAGLAPVTRRSGSSIRGEHPSRRGNKALKRALFLSAFAALRDPLSRAYYTRKMSQGKRHNQALIALARRRCDVLFAMMHDETFYTPQAS

SEQ ID NO: 490215 - protein, 308 aa, unidentified
MTTIYAGLDIAKLNLQLHLAGRIYDQPNTATGHRRLLKLLAALPGVHVVCEATGGYERDITAALHQAGVPVSVLNPARVRHFARATGQRAKTDDIDAAVLSAYGRALQPKPTPPRTAQEQQLAELIRRRVQVLESLVAQRQQVERLTLPALRRQGQSLVRRLERDLEQIQAQLKTLRAQATPLDERLQKLEAITGVGTITALGVLAELPELGTLNRRQAAALAGLAPHPRQSGQWQGRRSIGGGRPPVRRALYMAALVAAHANRQLKEFYQRLRAAGKPAKVALTAVMRKLIVLMNQILKNPNFVLSN

SEQ ID NO: 490216 - protein, 428 aa, unidentified
MNYNTQNAKIASITEKSLIVGIDVGSETHYARAFDWRNYEYSKKPFAFSNDEDGFASFKAWMDDIAEKHEMEKVIPGMEPTGHYWFNLGAYLQDNGMKPVHVNPHHVKKSKELDDNNPNKNDRKDPKTIAALVNEGRFSYPYIPTGIYAEIRSLSNLRLQTQEEITRIKNRIARWFSIYFPEIKDVYRNPDSVSGLMILKEAPLPQDIVKLGVDGINKIWRDAKLRAAGLKRAKTLVTAAEHSIGSQEAPDSARIELKNLLNDYEIYKNREEDLMSLTEEKLSEIPHIDKLLEIKGVGLKTVSGFVAEVGDITRFDNPKQLQKLAGYAIVECSSGKHKGESHISYRGRKRLRYVLYEAAISLIARNEEFKEVHRYYRTRKENPLKKMQSVIAVACKVLRIFYTILTKGVTYDGAKMMQDIKRPQMLAA

SEQ ID NO: 490217 - protein, 329 aa, unidentified
MLRGVFFMSVSVLGIDIAKQKFDAALLVDGKTKHKTCKNSAEGFETLMLWLEKQGIQKVHACLEATGNYGEDLAIYLHEAGHIVSIVNPARIKGFAQSELIRTKTDKLDAALIARFCLAMKPSVWIPPSAEIRVLRALVRRVDSLIDMRSQEKNRISTAHESVISLIKEHIAYLDQEIEKIRQQIAGLIEQDPNLKRKKDLLDSIPGIGKATIPHILAELDDLEKFNHVRQMVAFIGLAPKETLSGSSIKGKPRLCKIGHARLRKALYMPALVSIQCNPVMIAFYNRLKDKGKNGKVIVCAIMRKLVHVIFGVLKSGKKYDPNYKPVSA

SEQ ID NO: 490218 - protein, 465 aa, unidentified
MRQSDDRRPRKPRVSPSVLDRINPHAAGIDCGSAEHYVAVPPDRDATPVQSFSTFTHDLHRLADWLTACRVTSVAMEATGVYWIPVYEILEARGIEVQLVNARHVKNVPGRKSDVSDCEWLRELHSVGLLRGSFRPAAVIVALRAYLRHRQTLVESTAMYIHRMQKALAQMNLQLTLVVTDITGDTGLRILRDIVAGQHDPTHLAQYRHRRCNASEAEIAAALTGHYRPEHLFVLQQNLELFDACQGQITACDRAIETHLQAVAAAVPLPTSPLPAARVKRTPRGHDPRFEIRTPLHQLAGVDLSQIDGIAPYTALRLVSEIGTDMQRWPTEKHFTSWLTLAPKNKISGGRLLSSRTQPSANRAAAILRMTAMSLGRTQTALGAFYRRLAVRIGKAQAITATARKIAILVYRTLKGEFVYRDPGATGYDAQQRKRTLRSIRQRAEALGFALVNRQTGELLGTVVS

SEQ ID NO: 490219 - protein, 377 aa, unidentified
MKRIKFVGLDVHAETIAVAVAELDGEVRSIGVIPNRCESVRKLVKKLGPVEELRFCYEAGPTGYVLYWQLTALDAKCEVVAPTLVPVRAGDRVKTDRRDALKLARSYRAGELTAVWVPDAAHEALRDLVRAREAAKRDQLRARNRLTKFLLRHGKRPPEGVNPWTLNYMNWVRKDVHFEPLAQQATLLDYLHEVEHMAARVTRLEQAIEEAVQLAPHQMREGIEALQALRGIAKVSAVTIVAELGELSRFGEARQLMAYSGTVSREHSSGESCKRGGITKTGNVHLRRIVVEAAWAYRHAPAVTACLRKRQERVSEEVKEIAWKAQHRLHGRYRKLTARGKNTGKVITAVGRELLGFIWAIGVKVEAEQRKALGQAA

SEQ ID NO: 490220 - protein, 343 aa, unidentified
MQEITTIGLDIAKSVFQVHGIDASGEVVARRQLRRRQVLPFFRKLPACVIGIEACATSHYWAREIAKLGHEVKLMPPRYVKPYVKRNKNDAADAEAICEAVTRPNMRFVPIKSPEQQSVLMLHRTRQLFVRQRTALINAIRAHLAEFGIVAGVGRNGIEKLLELIAEGEDERVPPAAHECLMALAAQLAMVKRQILEADRRVLTWHRTSKLSQRLEAIPGVGPLIATALVASVPDPSIFRSGRDLSAWIGLVPKQNSTGGKDRLGSISKAGNRYLRQLLVVGALSVIRRAKQLGYTRHPWLVRLMERRSVKIAAVALANKIARIAWAMMARNESYRTPLSVSA

SEQ ID NO: 490221 - protein, 371 aa, unidentified
MRFKQELENQECWVLGVDCGEQHHRFVLLDEFKNRRHSQWCGNRRDKIRSALLEQLIRLPGGYRLEIVTEGLRSIGGLLVQATTELGIQVWQVNPKALEHYRDLEGQPRKTDDRDAYLLAKMRLNEVEGCRLAIDPRPEERVLCRLTRLHTQLTQQRTEITARLRSRLIELSPEVVSKTWKGPRYNSTGLRVILKRWPGFEGLDRAQVRTIERELRPVTRRREAWIEMAKALKEMACRITMEDTERQVISMELSMAIQQLDLIKTSLAEIDRKIKAAVEAHSVGEKLLAIPGIGHFTAGVLIGEILPLARNVSEGKAATYSGVTPLSRRSGNTNKRSRLARGVNKHAIRVLYLSAVSASNRSALDSAYFQK

SEQ ID NO: 490222 - protein, 327 aa, unidentified
MWLIMSLSAVLGIVLAKQKFDAALLVDGKTKHKTCKNSVEGFEALTLWLTKQEVEKVHAYLEATGSYGEDLAVYLHDAGHIVSIINPARIKGFAQSEMIRTKTDKMDAALIARFCLAIKPKEWTPPLPEMRSLEALVRRVDSLIDMRSQEKNRLSTSHESVTSMIKEHIAYLDREIEKLRKQIDELIRKNPQLKEKEELLESIPVLGKATIPRLMAELDDLDKFNHVREMVAFIGLAPREKLSGSSIKGKPRLSKIGHAKLRKALYTPALVSIQCNPVMIDFYKRLKNKGKNEKVIVCAIMRKLVHVIFGVLKSGKKYDPNFKPILA

SEQ ID NO: 490223 - protein, 435 aa, unidentified
MTLHENAVPLEAEDFAAWVAIDWADQKHVWALQETGSPRRQQGELKASPEAVDAWVSELLLRFPGRRIAVALEQKRGALLCLLSKYEALVLYPVHPATVSRMRAALYPSNSKDDPKDADLLLDILLHHRKRLRRLDADTVETRKLQILVEDRRQLVDQGTAYSNQLRAKLKLYYPQALRWLPDLHAVVAGEFLKRWPTLPLLQKSRRETIEKFFHQHNCRSEELIQKRLEEIPQAVVATTDAAIVDSSVAMVRALVDLLAVLHTHIAALDREIAATAAVHPELPILASLPGAGPVMVPRLIAALGTQRERFACASELSAATGIAPVKQASGQSEWIHFRWACPKFWRQSFHEWAGHSLAKSTWAQAFYQEQIRKGKGHHAAVRALAFKWQRILFRCWQDRRPYDEQKYLAALRQKVPRTRRRPHKNIFYRGALSS

SEQ ID NO: 490224 - protein, 412 aa, unidentified
MDVLHRRCAGLDVHQAQVTACIRISPERTTPWAQGRRFDTKPAGLAELREWLTHHDVTHVAMEGTGVYWLPVFTALEAAGLDLTLCNAHHVKNVPGRKTDQSDAAWLAQLLASGLLRKSFVPPAAVRQLRELTRARVHRIEDRGRVVNTLHRMLERAGLKLCSVISDLQGKSAQAILHALAEGQTDVTALVALARGSLCGKRAKLAAVLGVPLSTVERTLLKQSLAQLTMYDMQIAELDAQIAEHIRPWRASLDRLLTVRGIDTVSAAAILAEIGPDVSAFDDPYRLAAWAGLAPGQRESAGKRMRAGTRSGNAYLRRILVQVAMAISRIKRASDLADFFRKKMPALGYKKAAVATAHKLLVRLWAMLHHGKDYSPPAPPPLSERQRARRAKRALEALDALGVKVVIQPAST

SEQ ID NO: 490225 - protein, 349 aa, unidentified
MNYFTGCDAHKKYSIFTGIDDECKAQFTHRVEHERTGFRNYLEGLPPGLSIAVESTGNWYWIIDEIEKAGHHPQLVNAGKAKLMMGNVNKTDKLDARGLAVMLRNGSLPAVWIPPAEIRDQRELPRMRSALVHMRTMLKNRIHATFAKYAITFEETSDLFGKRGHELMKKAMEDLPSQTRSSVEQELELLNQIEAQISLAEKRIKEVIAVTPSMKLLTTIPGVGPILAISIALETGDIARFPDSEHYASYAGTVSRVSSSGGKTRMGRVRTDVNHYLKYAFIEAANVIVLNQDRLARRHAVQLYLRIRDRRGHGKAVVAVARHLAEATYSMLKKNEPYMEGKRVARMGS

SEQ ID NO: 490226 - protein, 388 aa, unidentified
MTVYVGVDIAKELHYAAIMDSDGVVANPFSFENNNKGFCLLLSHLSPYLKESVLIGFESTAHYQDNLAYFLRSHGYRIAVINPLQTSALRKANIRNTKTDSVDAKLICLALMQHNIHGDQRDSSRLDDLYQLCKMRMDLIKKRTSCKIQLVSAMDRIFPELASFFSNNLHINTAYRLIESYPLPSLIKKTRIDVLTRLFHKASKGHFGKEKAQALKNLAKISVGIPSATYAFQAQQLIHQIEFYSEQIQAVDEKIDSDPEVMSSPLMTIPGVSSFCAACILSVIKNINDFDAPCKILAYAGLDPVIRQSGKFNARQTRMSKRGNSLLRYALVWTAGNAVKNNATFNEYYRHKTQDQGKSHYQALGHCAKKLTKSIYHMLKYNESFNLA

SEQ ID NO: 490227 - protein, 360 aa, unidentified
MVSMVHGGLDVHKETIEAYLIGEETGEVVSEQLVNDRTKVLRAVRRWSKLGELRLCYEASGAGFVLKRWLEAVGVHCDVVAPSLIPKAPGNRVKTDRRDARQLALLYRAGMLTPVRVPDREEEDARSLMRLREDLTQDCVRLKNRIGKYLLILGHIYRGTSFTLKHRRWIDELPLEPLQRVVLDSYLVQLDHQVEQQRELDGRIEELASSERYRVGVQRLMSLKGVGLYSAMVLLTEIGDAHRFSSPVKLMSYFGLVPRESSSGERRCTGSITKAGNNHARWILVEAAWHQVSKPGRSLRVCKHWQTQPAPVVSIGKKAEKRLHHKFWSIAMRKDRKTAATAVAREMVGFVWALLTLEVA

SEQ ID NO: 490228 - protein, 407 aa, unidentified
MEVIYPRCAGLDVHKQTVVACVRIARDGAPLQEVRTFDTTTSGLLALADWLESFGVEHVAMEATGVYWKPVWHVLEGHFVLVLANAAHVKNVPGRKTDVNDAMWLADLLAHGLIRASFVPPAAVQELRTLTRTRKQFVRERASHAQRIEKVLEDANLKLSVVISDILGKGGRAVLQALIDGHSDPEVLASRITTRVKASRAELLEALRGRASAHHRFMLKVHLSHIDALDKAIAAIEMEVGAGLAPFRQAAKLLSTMPGLSAVSANVVVAEIGIDMSRFATPGHLLSWACMCPRNDESAGKRRSTRLRRGGKWLKTTLVQAAWAAVKVKGSYLQAQFHRLRARRGTKKAIVAVAASMLTAAWHMLRDGTEWHELGAAHFDRADAAKTANRLIRRLQQIGYAVQVTPA

SEQ ID NO: 490229 - protein, 371 aa, unidentified
MVRITKYVGLDVHKDTIAIASCTGGPMTEAKDEGTVPHDLPRLLRKLLSLAPAEHLRVVYEAGPTGFGLCRELRAHGIACMIVAPNRVPQLPGPRIKTDKRDARYLAWQLRMGSLSGIAIPDEELEALRDLVRAREDLLHARRRTRQQLSGLLLRHGMPWRGKHSWGLQHVQWIQGLRMGSEAQELAKKYYLQAVAHFDERIDELTADIERLTPQLQGVHGRLYRWLQALRGVSTIVAATLVCELGDLRRFKTASRLMSYVGMVPREHSSGPRVWRGSITKAGNPHVRRVLIEAAWPGRLRPTRSKALLRRQAGVDPTVVDIAWRTQKRLHDRYRRMRARGKPQNVTIVALAREMLGFIWSIGQHVEQQPA

SEQ ID NO: 490230 - protein, 395 aa, unidentified
MAGTMTWVGLDVHARSTHAAAIDAMTGELSRVRFGAGVEASLAWLRSLPGPVRACYEAGPTGFGLYRALTEAGIAAEVIAPGKTPRGPSDRVKTDRKDAELLARQLLAGSLTAVVVPSPEVEAAREMTRAHDVCRQELMRARHRVSKMLLRHGRVYPKQKTWTAEHRRWLSAQRFPEAPSDAVFADLLAAVDGITSRKSTIALTLSHLAADERWWPTVARLRAFRGIDTLTAFSIHLELGADWRRFEHAPALSAWLGLTPSLNQSGESSRQGAITKTGSMLARRLLVESAWHYSRPPRLGASSRQGAITKTGSMLARRLLVESAWHYSRPPRLGATLANRQQGQPDHVLAISNRAQQRLYRVNRRMRARGKPHNVTVVACARELACFLWAAATAD

SEQ ID NO: 490231 - protein, 343 aa, unidentified
METITTIGLDLAKSVFQVHAITQDGRVIVRKTLRRSQVLDFFRGLQPCLVGLEACASAHHWANAIGEFGHTVRMMPAVYVKAHVKRNKTDAADAEAICEAVTRPTMRFVPIKTQDEQAACMVLKTRELFVRQRTQTSNAMRAHMAELGIISATGMASIDKLIAILRDETDARLPSAARASLLEMAEQIERLSSHIAALDTKIVKAMKEDETARRLTSIPGVGPIIAASVRAAIQDPGAFRTGRDLAAWIGITPSAHSSGGKERLGGITKRGNAQLRSLLVVGATSILKQAKRGVKLPVWVVSLIARKPYKVAAVALANKMVRTIWTLLVKGGTYRAPMVMAAA

SEQ ID NO: 490232 - protein, 347 aa, unidentified
MYPFYLGIDLHLKRTFMVLMDANGEVVDKQRISNQEITNYLLEKVPQETYAVLEATRNWPFMYDLLNEHVQHVDLVHAKGVRAIANAAIKTDQIDASTLAHLARLNYIPKAYAAPKETRDLRQLLRHREWMVNQRSKAKNRIHAVLAGYNLVSPVTDLFGVAGRQYLNEVMEKELRPAALMVVSDHLAIIDHLSERICCLEKGIALNEAQTQVMKLLMSMPGVGKLIAMILLAEIGDISRFNSPKSLCSWAGLTPKVHNSDAVVQHGHITKEGSRYLRTAMVRAATVTCRVSPKWYGTHSHLALHCGRRSARVAVARRLLTVIYYMWKREQPYHENYGQNQSEALGA

SEQ ID NO: 490233 - protein, 341 aa, unidentified
MDYYAGIDVSLECSSVCIVDVNGKIVREGKVASEPEALIGWLRSAGLGLTRIGLEAGPLSQWLYAAMREAGLPVELLETRHVRHALDTMPVKTDRKDARGIAQLMRLGWFRAVHCKSMGAQETRAMLTARKLLQQKLRDVEASLRGTLRGFGLKVGRTTPKRFAGRVKELVVGHASLEAIAEALLAVHAVLLRELNGFERRVRTMARHDAKAQLLMSAPGVGAIVSLTFASAIDDPARFKSSKQVGAHFGITPKKYQSGETDYTGRISKNGDKGVRTALFEAAHVILTKPVKGSALKSWAMRLAKRAGMKKAKVALARKLAVIMHRMLVDGTTFNFAAAAA

SEQ ID NO: 490234 - protein, 392 aa, unidentified
MPDEDRPQRRLQEVETYSTMTRPLLGLADRLRCLGVTRVAMEATSDYRKPVFYLLEAHGFQAWLDGARDVRHLPGRPKTGKLDAVWLAKIAERQMIRPGFVPPPQIRRLRDLTRYRAGLVAARTAEKQRAEKLPVDAQIKLSVVVSGIFGVQGRQMLAALIRGQRDPKALAQLARGVMRRKITTLQEAFTGYFTDHHAFPLATMLARVDAIDTDLATLDATIEQMAAPFTAAVQRLAEIPGINATAARAILAETGTDMDRFPTAGHLVSWAKFAPGVRESAGKKKGKGTTGHGNRYLARVLGNAAASAGRTDTFPGERYRRIARRRGSKKAVVATGRSMPVIIWHLLADPGTRHTDLGSDFYDTRINPERRNRNHIRQLEAPGYQVTLEPAA

SEQ ID NO: 490235 - protein, 363 aa, unidentified
MKKLIRRAVRFKGLTLGLDVHKKFIEYCVLDRQGDQVKAGRIGSSAVELLKLTTTLKQSGPLQASLEACGCFIWIYDLLIEQLSRETVHVAQPHRIHVVANSMEKNDANDAWWLAYLLFEGRLPESFVAEGELRDLRIAERELRSYTDARADELRRFKSHLAQAGAGVPKNWQSSESGRKKVKAVIKSIKGERQRALQMLLKQIKKLSSQMQYWRKRVEELSRKLPAVETISENMPGFGPVLSGTVVGELGEPARFHSEKAYAKATGLTPGYRESGGKSSPMSMSREGSSHARWAYTRAVMSCLRCKKGSGAQVRKWVAARCKHKPKRKVIVAAARKMAEGVWRLFKFGEVFDLAKAFPVKSA

SEQ ID NO: 490236 - protein, 388 aa, unidentified
MPKPVDLSKSLAALDQDSTLIVVIEMSQSSWLVAARAPGLARDPLKKLPPEPEQLFKLIDRWREESRRAGRVVRRVCVAFEAGLDGFWLARLLRHHDIEAYVIHPTSIPVKRDHRRAKTDRLDTELLMRAFLGWLRGEADYCSMAAIPMLAEEDAKRPTRERESRVNARSRLVNRLKGALARLGIRGFNPKLRKAAEKLEALRTGAGEPLPPNTLAELRRDMAQLRFVSDQIKQIEKAREARLEKAPREGAHPMVLMLASIKGVGLETAEMLVAEVLSRKLRDRRAVARYGGLIGSPDESGSRSREKGLARSGNARVRRGMIQLAWRFLMFQKESALAKWFEARTANGPSGVRKTMIVALARKLLIDLWRFVEDGTVLVGVELFDSRA

SEQ ID NO: 490237 - protein, 337 aa, unidentified
MIVIGVDVHKHSLTAVAVDELGRTLAERTGQVEEELVDWARSLSEERMWALEDCRHVTRALERTLQDEGERLVRVPPRLTAPQRRRGRTRGKSDAIDALAIARAALQEPELDGPRAGEQTLRELKLLVDHRDDLVDERRRCQQRLRWHLHELDPGLHVPLGALDRAVWLERLSRRLSRGEQTTQVRIARELIARCRSLNRSIGELERELQERTTTIAPRLLALPGCGALSAAKLLCEIGPIDRFRTDAQLARHAGVAPLDASSGKHQRHRLDRGGNRQLNCALHRIAVTQGRVHAPARAYLERKQKEGKSRREAIRCLKRQLARTVFSTLKVEPALT

SEQ ID NO: 490238 - protein, 351 aa, unidentified
MLIMGCDWHPRYQIVAWVEEETGEVMSRRLEHENGEARKFYASLPPGAVVGIEATFPSHWFEGLLAECGHELWVGDAARIRASEVRRQKTDTRDAEHILDLLLAGRFPRIWVPSIKERDLRQLLVHRMKMVRTRTAVKNQLHYLAMSQGVCRKRKLWSARGRAELEGLRLLPWASRRRQELLGWLDQLDRSVEELDRAVEEAGRARAEVALLRTHPGVGPVTGLAFVLTVGPIGRFANSRKLVSYLGLNSSEHSSGGRQRLGAISKQGNSMLRWLLVEAAQTAARYDPELRRAYQRLKFRRPSGVAKVAIARRLAVRLYWMLRAQADYAQLVRTSGSPSSAVVPSQSGSTV

SEQ ID NO: 490239 - protein, 349 aa, unidentified
MTRISAGVDVSKNRSTVCIMDQDGKFIMRPFLVWHSTEELDFLADTLKRLNGEVRVIMESTSIYQYPIALQLKERGLFISIVNAYEMKQFANTDFRGGKTDKKDSRTIASYGISYWDKLVEWQIPKDTYFNLDLLNRTYMNAKKHRQIILQELQHYIDCAMPGMDKELHSLNLSTKKDFMLDFVEKFWHRDEIVNMTEAEFTEVFTAWAKKKGYRPVEGKAAKIYAIAKSCIPYYPANPTVKTILQCIVDKLSGVNRTLVTIVTQMIEEAKKLPEYQIVREMPGVGDPLAARFFGSAGDIRRFKNSKALVAYAGIDSPPDESGDFSSTHMHWSTYFGHKISKIRCQKIK

SEQ ID NO: 490240 - protein, 304 aa, unidentified
MFGIGIDVSKATLDVAVHGEQFRQFSNDKRGFVRLIRWLKTWPIKQVVLEASGGYERAALDVLHAAGLPMVRINPARARRFAQGTGRAAKTDRLDATVLAQMAHLLPLTRYVPPAPWQQRLAEFAQCRRQLVQMRVSEMQRLRRLIDPDLIAMKQRHIAQLSDDLKQLDKAIAEQLEGQPGWKNIGALKGVGPILISTLACELPELGSLGSKAIASLVGLAPMNRESGTWQGQRRISGGRAVVREALYMAALTAIRYEPRLRAFYAGLKAKGKASKVALVAVMRKMLVILNARKRDAEVALGCP

SEQ ID NO: 490241 - protein, 328 aa, unidentified
MEKVVVGLDMHLKKTEGVVMAMDGTIVKQERFETSKENLRNFLRGLPPGTKVALESVGFCWPWIDFIESLGYEPLLANPIKVKSRAEDVKTDKVDSELLAHLLRMDWLPMVYVPSKELRALRNLLRHRAFRRKIATAFKNRTWSELRKRDVQIDANLSTCRGRERAASSNLYEVAQNVEVIELIENQIKRIEMKLKIHYRKIKPVKLLQTIPGIGFLTALTLYAEICDIKRFSSPEKLAHYAGLVPRVRQSGEYRRMGRETKGNKWLKWILIEAAWSHIRFCPNGRLARIYRKAYERKKDKRKAIKIVARKLVNIIWAIWTYEREFRE

SEQ ID NO: 490242 - protein, 345 aa, unidentified
MSVTTIGIDLAKDIFQVHGVNEHGKPILRKQLKRHQIVAFFANLPGCLIGMEACASAHFWARKLQTLGHTVRLMAPQFVKPYVKTNKNDVADAEAICEAVARPNIRFVPIKNVDQQAVLALHRARQGFVRARTAQANQIRGLLGEFGLVMPRGITSIAQHVPQLIEDASNELPGSFRLLIQRLTDHLKELDRQVAEIETQIKAWHHASDASRRLAEIPGIGPITASALVASIGDGKCFSNARQLAAWLGLVPRQHSSGGKPTLLGISKHGDTYLRTLMVHGARAVVRYCANKDDAFSGWLHRLLTRRHKNVAVVAVANRNARIAWALLTQGTAFRSDYAPSAAAA

SEQ ID NO: 490243 - protein, 480 aa, unidentified
MKSKPQEKNKKAIDHPTQHHWHEMNRKQRREMMRKIQSPDLSLEVIHPDAAGIDIGNESHYAAVPPDRENQPVRSFGCTELKAMAAWLKQCRIRTVAMQSTGVYWVAVFDILEQAGFEVYLVNARETKNLPGRKSDVQESQWLMKLHTYGLLRNSFRPSQEIRVMRTYWRQRNDLVQSASRHILRIQKALTQMNVQLANVLSDISGVTGQAIIKAILKGERDPHKLAAFRDCRVKASEGQIARYLEGNWQPDLLFLLKQEQDGYEFCQKQMAECDRQLAQYLREREDRSQGTPLPEEKRKGRLKKKRANKPRFDLREGLFRMIGTDLTRIDSIDVMTATTVISEAGYDMSKWKTENHFVSWLRLCPDNRISGNKIIGKGRLPTNNPISIALKMAASTLRKSKTYLGAQFRRLRTRLGAPIAIKAMAAKLARLVYRLLRYGMKYVDQGAALYEAQHRQSQIKQLKWKAAKLGFQIVQAPAA

SEQ ID NO: 490244 - protein, 425 aa, unidentified
MHSKHYSKQLEKRQRITGHTLVVGMDIGSEFNAACFMDKEGNILGRYPTIYNSRKGFDYFHTMLTKTRRKHKLTDVIIGMEPTGHYWRKIAFFAKEKGYEVRFVRTTAVKHQRELDESSSGKSDSKDAYTIGNIVREGKYIDTIIEESVFRQLRTLAHARERILRYIVGSTHGLQAHLSDYFPELRHLFWSMQAKGLWRLLETYPFPEDVRRAGVAAVASLLSKGTGKKRHVREQAEKVYQAAEHSVGLKAIGKADRVRLTMYLDEIKRSDARRILLEREMEELLREIPLVPYLLSLPGMGKVSCAVFLGELGNPEYFQNPRQIIKYAGYDPKENDSGSRVGRKIISKKGRWLMRKCLYFIALNVIHRSSFFKEHYEHKKKGVGRPLEKKEAICAVILKLIGVLFALMRDGRMFTEEMPRCEKAA

SEQ ID NO: 490245 - protein, 351 aa, unidentified
MLIIGCDYHPGVQQIAWVDTETGECEGRRLTHSGGEAEQFYRELKKKGVSVRVGMEATGHSRWFERLLAELNFELWVGDAAQIRAKQVRKQKNDRRDAEHLLKLMVENHFPRIWVPTPENRDVRQLVLHRHRLVGMRTRVMNQLQAIAMNEGKRWKKRLWNEQGRAELEKFQLAPWASRRRQDLTELLDRLNPTIEELTTAVEQEAKKRPEVLRLMTHPGVGFLTALAFVLIIGTPERFECGKQIGSYVGLIPAEDSSAGRQRLGHISKQGSTLLRFLLVEAAQAAVRSDPDWKRRYIHLAMRRQKSIAKVAMGRKLAVRLYWMWRREWDYQQFRKFGSYAGELVTGHGVN

SEQ ID NO: 490246 - protein, 390 aa, unidentified
MQALCPRPDEHIAVRTDLNAIFVSLELSRSTWIITSLAPGGGEKMSKHSVPSGDVAALLARLSQLQEKARARTGRIFPIIVIQEAGLDGFWIHRVLQQEGIESHVVDPASIATSRRRRRAKTDRIDGEAQVRALLAYKRGEPRVCAMVQAPTPQEEDRRRISRERETLTAERVRHVNRIKGLLFAQGIGDYEPLHRNRRERLEALITGDGRPLPECLKAQIRRELDRLELVIEQVKAVEAERDAVLARAQASPGVPAPAALLLALKGIGPEAAATLWSEGLFRTFSNRKQVAAYAGLAPTPWQSGSVHRDQGVSKAGNPRLRTIMIQIAWLWLRHQPQSALAVWFRERIKRTGGRLGKTMIVALARKLLVALWKYATAGVLIEGAILKPA

SEQ ID NO: 490247 - protein, 348 aa, unidentified
MLIIGCDFHSRFQQIAMLDAETGEVVDRRLEHESGEAAAFYASLHGKARVGVEATGSLAWFERLLRRHGHELWVGDAAQIQARRIRQQKTDARDARHILELLTSDRFPRIWMPSAEQRDLRQLLRHRGKLVGMRTAVKNQLHALAMGQGVCRRRKLWSAVGRQELEGLELDPWAGRRRRELLGMLDQLSASIEELDQAVQQEAHRCAAAVELMQQPGVGPVTALAFVLTIGPVERFRRSKQVVSYLGLNPREHSSGGRQRLGSISKQGNSMMRYLLSEAAQTASRKDEELRRDYQRLKFRRGSGVAKIAIARKLAVRLYWRLRQAAAAPARMQGSPVRPLVRSAEPFR

SEQ ID NO: 490248 - protein, 343 aa, unidentified
MQAVTTIGLDIAKSVFQVHGVDCNGQVVIRRQLKRRYVLAFFEKLAPCLIGIEACASSHHWSRQLLALGHDVRLMPPSYVKPYVKRQKNDATDAEAIGEAVSRANMRFVPTKTPEQQSGLVLHRTRHLFIRQQTAVINAIRAHCAEFGIVAPVGRQGVEELLNVIANAKDEQIPAIARACLSALGDQLHRIKAQILEFDRMIGAWHRSCEASRRLDEIPGVGPALATALVASIADPRTFRSGRDFSAWIGLVPKQSSSGGKPKLGSISKQGDRYLRGLFTAGALAVIRYAKIHGIGHRPWLTALLARRPTKVAAIALANKIARMAWAMMARGEHYREPVALAA

SEQ ID NO: 490249 - protein, 341 aa, unidentified
MDHYAGIDVSLECSSVCVVDANGKIAREGKVASEPGALIGWLRSVGLGLTRVGLEAGPLSQWLYVAMRESGLAVELLETRHVRHALDTMPVKTDRNDARGIAQLMRLGWFRAVHCKSMGAQETRSILTARKLLQQKLRDVEASLRGTLRGFGLKVGRTTPKRFAGRVKELVVGHASLEAIAEALLAVHAVLLREFNGFERRVRTMARHDAKAQLLMSTPGVGAIVGLTYASAIDDPGRFKSSKQVGAHFGMTPKKYQSGETDYTGRISKNGDKGVRTALFEAAHVILTKAVKGSALKSWAMRLARRAGMKKAKVALARKLAVIMHRMLVDGTTFDFAAAAA

SEQ ID NO: 490250 - protein, 361 aa, unidentified
MKVQRTSIGLDVHARSVVACGLDGDTGEVFERRLCPDHREVLEWIMGLPGPVAVAYEAGPTGFGLARALTLAGIDCRVAAPSKLQRPAGDRVKTDARDAAHLARLLHLGQIVEVAIPTVEQEAARDVVRAREDCRRDLLAARQRVSKLLLRQGIIYSGGQAWTGKHQLWLQAQRFEAAPLQWAYDAALDTLLATLDRRKRLDAWIDQLAAEGDYTPVVQRLMCLRGVSTLTAFALAVEIGDWSRLTGRSIGAYVGLVPTESSSGATRSQGSITKTGNGHVRRLLVEAAWHHRKPYQPWSPTLRRRWDAASPAARARGQLANRRLHDRWRRFDARDKRAAVANTAIARELAGWCWSLAVLDN

SEQ ID NO: 490251 - protein, 316 aa, unidentified
MMSAAIAKIFVGVDVSKATLDVYLPDTKELLKIENSDDAINQLCLQLEKKKRQVMVVMEGTGGYEFLLLKHLASHKLDAAVINPKRIRDFAKGIGVDAKTDQIDAKVISRYGEVVAPRPMATKSDHELKHSALVARRNQLLELINQENNRLKQSWDDDAKQSIREVLEMLKKQLKSVDSHLAKMLATDTANERKIEILQSVKGVGAVTISTLIAELPELGKLNRGEVAKLVGVAPINRDSGTKSGKRFIGGGRGQVRRVLYMATLVAIRHNPTIKAFYVHLKSKGKEAKVAIVACMRKLVTILNLLVKSNQIWQTK

SEQ ID NO: 490252 - protein, 343 aa, unidentified
MEYYVGLDVSLKQTSICVVDQAGLVVREGVVDSDPEAISVYVTSKAPNAVRIGLETGPTSTWLWTELKRLGLPVICIDARHAKAVLKMQINKSDRNDAIGIARIMQTGWFKEVHVKDIDSRSVRALLASRALLVKIKRDLENHVRGLLKNLGLVIGRAKFNVFAVRAEELIEGRPELIAAIRPLLEARNAVEQQVSELDRKVMKLARHDAQIRRFMTAPGVGPITALCFKSTIDDPARFARSRSVGAYVGLTSRRHASGELDWTGRISKCGDAMLRSYLFEAAGVLLTRVPKWSSVKAWGVRLAKRNGLRKAKVAVARKLAVILHRMWIDGTEFNWSKKEIAA

SEQ ID NO: 490253 - protein, 391 aa, unidentified
MIYVGIDVAKDKHDCFITNSDGEVLFKPFTISNNREGFENLFQRIESVSDDFTKVKVGLEATGHYSYNLLGFLLDKGLTTYVINPLHTNLYRKSLSLRQTKTDKVDARTIASMLMSDVNLKSYSDTSYHNEELKSLTRYRFDKVKERAKLKTSVSRLVCILFPELEKLVPTLHMASVYALLSEFPSAKHVATAHLTRLTNLLSESSKGRYGKDTAITFRDSARASIGSNMPAKSLELKHTIKLIQELDSEIDEIENEIKIIMDEINSPILSIPGINYRMGSMIIAEIGDFNRFDSPDKILAYAGFSPSTYQSGQLDGAYAHMEKRGSRYLRYALYNATKYVCHWDPTFAAYLAKKRAEGKHYNVAISHAVKKLVRVIYHLEKTKQQYIKAA

SEQ ID NO: 490254 - protein, 430 aa, unidentified
MSYRIAGIDVHKKMLAVVVADVEVEGEYQFERRRYGSNPEHLRLLSEWLLERQVEEVVMESTAQYWQPVWGALERYWKPSCQKRESAGPISGGLHLAQAQSNRGRRGRKKDFPDAERLVKRLVAQELILSFVPDAEQRLWRTVTRRKYQLVQNRVQLHNRLESLLEEAHIKLSSLVSDLLGVSARRMLNALADGESNPSTLAALADGRLRATEAQLCDALGACTNLHAVYRRLLKMALEELQLIEQQINKLEQEIAALLRPHENAVKRLAEVPGLGVDSAQQIVAEVGATAATFPSAKNLASWVGACPGDQESAEVSYSHRSPKGSRHMRRILNQAANAAVRMKGSIFQIVYRRLAPRLGHNQTIGAIAHRLCRLIWLILHQGVRYEERGPSVSQKSTQMRTYKMIRELRHLGYRVEPSSVVTGTEASAY

SEQ ID NO: 490255 - protein, 344 aa, unidentified
MAIVGGLDIHRRQITYDWIDTTTGEARRGQLSPATRVEVRAWLEQFHGQPADFALEATTGWRFVAEELQRAGFHAHLAEPADTRALRGPKRRAKTDRTDARHLRELLRAGTLPESWMPPAHIADARTQVRLRRALVGERTGWYQRIHAILFHHGLPDRSQLLTADGRAWLARAKLPAVARQAVDLALQMIDYLEVELDTLDAVLAGIARGQPGCQALQRRYGIGWLTAVAIWAEFGDVRRFANSRQAVRFTGLDVTISESDGKRARGHLARQGSPVLRWALHEAAMCAARPGSPDHAYYLAVKQRLGGKRAALSVARKLTREAYHTLQELGDQALVPAELPTAA

SEQ ID NO: 490256 - protein, 460 aa, unidentified
MNEDSEAGSGRKEEGIAALGRRVAGVDVGSKQHWVCAPVREGEGREVGVFGATTAQLEKMATWLIERKVESVALESTGVYWIAVYEVLEARGLKVLLVDSRALARVPGRPKTDRRDCQWMQRLHSCGLLQGAFRPPEQICMLRTLVRDKGNLVAEQGDWVRRMQKSLEQMNVRVHRAVADLTGATGMALVRAIVKGEREAGELAKLRDPRCHKSEEEIAEQLKGHWREDHLFSLGQALKMYEAIQERIQDYERAILEKLKAMEREECREQEPPELKNKKKAQTILHRGQEPLRQALYRASGADLTAIDGLGVETVQAVTSEYGTDLSAFPKEKQFVKHVLLAPNQSTSGGKPVKKKQKHGTASSRVAAALRMAALSLRHSQTALGAYYRHIARHKGDDVAVFATARKLATLIYRMLRWGRDYVDEGAEAYENRYREGRLRRLTSLARELGYQLAPLPAKP

SEQ ID NO: 490257 - protein, 430 aa, unidentified
MKSNTQNAKIEAITEKTLVLGIDVGSETHYARAFDYRGIEYSKKPFKFSNTEAGFVTFKEWILDLKERHEKDKVVPGMEPTGHYWFNLGKFLQDNEMKPVLVNPHHVKKSKELDDNNPTKNDRKDPKVIAGLVREGRYMIPYLPDGVYADLRTASNIRFQLQAELTRIQNRISRWFNIYFPEYKTVYGKPDAKSGMLILKAAPLPEDILTLGIDGVNQIWRDAKLRAVGKARAKTLIEAAEHSVGSKEGAVSARMEIRMLLEDYESRNIRLQEVMTLIEGLVKQIPMAEKLLEIKGVGIRTVSGFLAEVGDISRFNNPKELQKLAGLALVENSSGKHKGETTISRRGRKRLRYLLFEVAMSLVAKNPEFRELHNYYTTRRLNPLKKMQSLMAIAAKLIRVFYAMLTKGVDYDPKKMVSDIKRPAVYLQAA

SEQ ID NO: 490258 - protein, 416 aa, unidentified
MALIRWVGRAIGLDVHRDFCVVAICEEGVVRSAGRVPSTPEGLRALAASLLPSDRVALEVTGSCWEVARILEPFVQRVIVVSPDDTGISSARAKTDKLDARTLAGLLWKGELDAVWMPDQRCQVLRRRLARREQLMRGRTRAKNEIQAVLARRLQAKPGFADLFGVTGRRWLADLELPLEERESVDAGLRQIAFLDAEIAAVDKLIARQALDWPEIRRLMTVSGVNLICAASFLAAIGEPSRFLTSRKLVAYLGLDPKVRQSGEAPARSGRISKRGSANARWALVEAAWSVVKQPGPLRAFYERTRARRGHGRAIVATARKLTVLFWCMLTRGEDYAHQRPALTKKKLRQLELTSGAPARSKEAAGIWSTNRAIVHAERALAMQAEVSYKRMVADQQAGAPARKVGASATPERAST

SEQ ID NO: 490259 - protein, 332 aa, unidentified
MYLGIDVHKRYAQVAVMDEAGEIVEEVRVENANLDDLAQRYAGAKAALEATSNYYHIHDTLSEHLDVTVAHPKELNQIADSDKKTDRVDAKELARMVRLNSVPESYVPTDEVREARALVRGRQTLVENRTKYANKIHGLLSDHGITEDVKPLTKQGREFLRELSLPTPWDSLLESYIELIETLNEEIRNLEETIEERAGSLKETQLLMTIPGVSYYTALTIYAELGEIGRFDGDKSVVSYVGLNPVIRESGDSRIEGSISKRGSGRVRWLLVQAANTAVHTCNDEYLSRFYERLASRKNSQKAIVACARKMLVSIYHMLDRGEVYDPPDVSA

SEQ ID NO: 490260 - protein, 321 aa, unidentified
MEPAIVGIDIGKKELSATLLLGDKETNGVFRNGTAGFAMLGRWLGKHGVERAHICMEATGTYGEALAQHLHDAGHVVSVVNPARIKGFGQSELSRTKTDKADARLIARFCRAMKPEPWQPPTPEVKELKALVRRLDELKGMLTQEKNRLGSADDVVKPSIQDMIGLIESRILQVTQQIRDHVDRHPDLRGKRDLLETIPGIGPGTSAMILAEFGDVSRFPDAGSMASFCGLTPRHRQSGTSVHGRSMLSKTGSSRIRKALYMPALSAIRYNPTIRAFRARLLANGKLKMIVVGAVMRKLVYIAYGVLKSGKPFDPSIATTA

SEQ ID NO: 490261 - protein, 319 aa, unidentified
MNILEKTWIGIDVSKQNLDIYIHPEGITLTVAQNNEGLRKLIKVIKKYKEKMVVLESTGGLENLVVEKLTKALIDVAVLNPRPIRDFAKACGILYKTDKVDAKIIALFGEHMKPRKHVMLDDKTKQLKMLLIRRTQILSMVTMETNRLNTADKYIACEIKKHIAWLRNEIKKADQRLKEFITKNPEIKSEAETMQSMPGIGEKTFLSLKAFLPELGKLNRREIAALSGLAPFNRDSGFFRGRRRICGGRAAIRKILYMSALTAIRCNPVISEFYERLRNKGKEHKVAITACMRKMIVIANNMCKNDSVWNLKKKAEITT

SEQ ID NO: 490262 - protein, 331 aa, unidentified
MYDHYIGLDWAQSNMAIARMTKEASAVKAVNVPSSVKELQIYLGRLKGKKILTFEETTTSQWLYVELKNYVDEILVCDPYRNHLLSDGPKTDELDAAKLVQLLKGDFLKPVFHSADEFIYLRKLISGYEDVIKAGVRLKNQRAALFRAQGKDKREKNLPQQGESFVLEGVDRGIEAYEKEKTRYEAEMDRQRRKHLMIRNLDQIFGIGVIGAVKIVARVVDARRFENRGKWLSYCGLVRQEKISGGRSYGWKGSRYCRTLKSVFKTAAMSVIASRSENCFNRYYKFLLDKKHYSEHNSRHAVARKIATIAWAVMKSGKPFDPERMEKGFQN

SEQ ID NO: 490263 - protein, 409 aa, unidentified
MEVLYPRCAGLDVHAATVVACVRVASGATVTYEHRTVSTTTRGLLELAEWLTAHQCTHVAMEATGVYWKPVWHVLEDHLTLVLANAMHIRNIPGRKSDKNDATWIADLLALGLIRSSFVPPAPIQELRDLTRTRKQLVREVVRHTQRIQKTLEDANLKLTEVVSDILGVSGRAILTALVAGETQPERLADLTHGRLKAPRAQLVAALEGRVTAHHRFMIKLHLAQVTALETAITDLEARIGEALAPFRAAVNLLMTMPGLRDTAAAVIVAEIGDDMSKFPSAGHLLSWGGLCPRLDESAGKRRSTRTRSGAPWLKTTLVQGAWAAARKKDSYFHAQFLRLKSRRGPKKAILAVAASMLTDVYYMLRDGVEFHDLGSQYFAQHDKEHLTNRLLRRLRALGVEVEVKSKVA

SEQ ID NO: 490264 - protein, 324 aa, unidentified
MNRIFVGIDISKQRLDWCIRPLGLQGTVASDPAGLTELLQQLAPLADHHPLVVIEATGGFEKPVGAALVQAGIECCIVNPRQVRDFARALGQLAKTDRIDAGVLALFAERIKPEPRPWASEERQQLEAFLARRRQLLDMLVAEQNRLAQSRQPAVSKSVKAHISWLRKRVDQLDRDLDGLIQESPLWRVQENLLRTVPGVGPILSRTLLAELPELGQLSHKQIAGLVGVAPYACDSGAWRGHRRIWGGRAAIRAVLYMATLAAVRHNPLLGAFYRHLCQQGKPKKVALVAAMHKLLTWLNAMAKANAPWNPQSALSPQQPTFTP

SEQ ID NO: 490265 - protein, 356 aa, unidentified
MRKGNTKSAKSKGVLATASDRVVVGLDVHKKQIHAAVRVNGQDVGTHVLPARPAAVERFLSPYRVGLTHVVYEAGPTGYGLARHLRSAGVPVDVIAPSKTPQVPGDAAKSDRLDCRDLARLDEAHLLRPVAVPTEEEEADRQVIRLRDQAVDSRRRVRQRIKSFLLMHGLKEPAGLEHWSAAGVAALETMEVRSPRLRFCLDVLLEELANADEMIAKVEHEMKEMAREERHAAAVEALTAHVGVGRTTALAVRMEMYEPRRFSNERQVSAMLGLAPRVRQSGERRHEGPLLKAGRGRLRSMLVEAAWVWIQHDSAARKVYQRLVHNTGSAQKAIVGMARRLGLDLWRSLVKMPAAA

SEQ ID NO: 490266 - protein, 360 aa, unidentified
MAITTIAHAQPTRVTVGVDTHGDVHVAHAKDQLGRRLDTVSIPTTPTGYRDLLAWARGLGQVQAWGVEGTGSYGAGLARYLRKAGQVVLEVNRPDRAARRRRGKSDPVDAEAAARAVQAGEVTIVPKAADGQVEMLRSLRIARTTAMRARTQAVNALRSLLVTAPAELREQLRGRSAVRLVGVAATLDPGRLTSPTAAAMLALRTLARRYQALDAEITALDSELDRLTATAAPGLLALFGVGPDVASALLIAAGDNPRRLRSEAAFSMLCGSSPIEASSGKTTRHRLNRGGDRQANAALYRIVIVRLRWHQPTKDYVARRTAEGKSKKEIIRCLKRYVAREVFAVLRDMTRPIRQQPLDG

SEQ ID NO: 490267 - protein, 350 aa, unidentified
MLIIGCDYHPGFQQIAWLDSETGELIEQRLGHREEAERFYGKLKEQDISVRVGMEASGHAGWFERLLHELKIELWIGDAAEIRTKRVRKQKTDRQDAQLLLRLLIEDRFPRIWVADAENRDLRQLLWHRHRLVQMRTRVMNQLHVVALNEGLRRKKALWRPAGRLELESLALAPWASRRRQDLLNLLDQVTPKIQELSGAIAGEVEKRPVTRRLMTHPGVGPLTALAFELVIGTPERFHCGKQIASYVGLVPSEESSGDRRRLGHITKQGSSLLRYLLVEAAQVTVRSLPEWRSKFFHLAMRRGRKIAKVAMARKLAVHLYWMWRRGWDYEQFRKLGSHAGAPGNRHGVQ

SEQ ID NO: 490268 - protein, 398 aa, unidentified
MLHDHPSVGPTAIRTQFGAIFVSLELSRSKWVLTSLSPGNGEKMSQYSLTAGDIGGLLARFADLKRKARERTGLDYPIITIHEAGLDGFWVHRVLQDEGIESHVVDAASIATSRRRRRAKTDKIDGEALLRALLAFRRGEPRVCAMVVAPSPEEEDRRRLCRERQTLLDERIVHTNRIKGLLFAQGIFDYAPLRRDRRKRLEGLRTGDGRPLPVHLKTQISRELDRLELLIDQIRSVEAEQEALLAMESNAAPEAGLEKAGSEAEPRNVVAMLLAVKGIGDHSAAILWSEGLSRQFSNRRQVAAYAGLAATPWRSGAVMHEQGLSKAGNPRLRTLMVQLAWLWLRHQPQSALARWFRARGERGRKGSVVALARKLLVALWKYVTHGVVIEGAVMKPAT

SEQ ID NO: 490269 - protein, 315 aa, unidentified
MEHSSAAPVFVGIDVAKDRLDVHLRPSGEAFAIGRDPAGLSALVERLAEVAPSLVVLEATGGFEVTVAAALTAAQLPLAVVNPRQIRDFARATGRLAKTDRLDAEAIARFAEAVRPEPRPIPDAAARALGELVARRRQIVEMIGSESQRRRQLRDPRLIRRLDAHLAWLQKELSEIEADLDHAVRASAAWRATEHLLASVPGIGKTSARTLIAELPELGALDRRRIARLVGVAPVNRDSGTFRGRRMVLGGRASVRKALYMPTLTAIRRNPPIRALYARLIARGKPAKVAITAAMRKLLVILNAILKSQTPWQHA

SEQ ID NO: 490270 - protein, 349 aa, unidentified
MKITAIGIDLAKNVFQVHGVDEHGKAVFNKPLKREQMAAFFVNLPPCLIGMEACGSAHHWARKLQGMGHTVRLMAPQFVKPYVKTNKNDAADSAAICEAVTRPSMRFVPIKNVEQQGVLALHRVRQGFVKARTAQANQIRGLLAEFGVIVPQGIGHITQRVPMLIEDAANELPGVFRLLIQRLLEHLKELDCQVQELEAQIVAWHRQSDLSRKLGQIPGIGPITACALVASLGDAKNFKDGRQVAAWLGLVPRQHSSGGKQNLLGISKRGDTYLRTLLIHGARSVIYHAQKKDQHQGQGSAQCGWLNGVLQRRNKNVAAVALANKNARIVWALLAHDRSYEPGYVRESV

SEQ ID NO: 490271 - protein, 342 aa, unidentified
MKVTTAGLDLAKNVFQIHAVDQRGKVIVRKQLKRDQVAPFFAKLEPCLVGMEACASAHHWARKLQGFGHTVRLIAPQFVKPYVKANKNDAADAEAICEAVSRPSMRFVAVKTVAQQALLAMHRVRQGFIKARTAQANQIRGLLGEYGLVIPQGIGNIAKRVPSLIEDATNELPGTFRVLIDRLLEHLKALDQQVAELEAQITAWHRESEASRRLEQIPGIGPITATALVATMGEAKNFSNGRQVAAWLGLVPRQHSTGGKATLLGMSKRGDSYLRTLLIHGARSMILALRRKTKPEGWLHNLVKRRNPNVAAVALANKNARIAWALLAHDRSYRADYVSVPA

SEQ ID NO: 490272 - protein, 430 aa, unidentified
MVPGTGETFTILAGKGVICMTLFVGIDVSAKDFKVRVLNSTGEEPAKRFKAENNLPGSQSLIAYLLPICRQHHVSRLVFGLESTSIYSWHLQMFLAEQDSLAAFAPQVYVFNPKVVANFKKAYVDLSKDDWTDAWVIADRLRFGRLPEHSQVDFRYLPLQRLTRFRCHLIQTITREKNYFLSNLFLKFCSLSQDGVFSNCLGASAEAVLLDFFSPEEIAASSLEDLIDFLMDKGKNHFSDPAKTALALKRSAGRAYRLKASLLEPVNLILATSLETIRTLELQVKKIDRAIENELSHFPSTLASMPGLGPVFVAGLIAEIGDIRRFPNEAALAKYAGLTWRTHQSGDFSAEDTPLTKTGNSYLRHYFVQGANSVRQFDPIFREFYARKVSESSKHAHRRSLVLTARKLVRVVDALLRSHQVYLPQGGRRA

SEQ ID NO: 490273 - protein, 326 aa, unidentified
MGAVVNQIPSSFASPLFVGIDVSGPFLDVAYHESSETFRLPNAPEGFAELIHRLLPLTPQLIVLEATGKLERAVLQALCQAGLPAVAVNSKWVRDFARSTGQLAKTDRLDARVIAHFGATIKPEIRPLTDEQTQQLQALILHRAQLIEMLTAEQNRRKRAHKSALPSIDEFIRFITQRIKDADRDIDAFLHANELWRKTEALLRSTPGIGKTTAAALIAFLPELGSLNARQIASLVGLAPFNSDSGAHRGERHIKGGRHIVRRALYMACVAAQRANPNIKAFCDRLRAKGKKTKVAFVAGMRKLLTQLNAMMRDRTPWNLSHHDHL

SEQ ID NO: 490274 - protein, 345 aa, unidentified
MIYIGMDVSSKSFTVHAINERKKVVFKGDIKPTRAGLRGMIEELGRETKLVVFEAGNQLKWIALTLKKIRGVQIHVVHPNEIKWINQSSGKTDKIDARKLAHLGRSDMLPRKVHIVEGKTRELRELISARSTIQSKRIALINSIRGCLKQEGYKLAKGFFKNEKWREQLKKMRIGHTQKLIVEKFMESIEGMVKAELELTARILEVEHKDIELLETIPGIGGLTSRVLVSAVDDANRFDNKKSVSKYGGLSPRIYQSGGVTHLGRINRDGRMEVRKVLLQCAHTITRMKSYEAWPLRRFFDRIRKRRGKKIAVVALARKLLTIAYGVLKTQRVYDPEMLYVQVGR

SEQ ID NO: 490275 - protein, 339 aa, unidentified
MELCCGMDLHSSNTVIGIIDDKRHHLIDRKLPNDPELIRSFLKPYKSELKGIVVESTYNWYWLADLLEEEGYRVHLSHPVANEQYKGLKHSNDKHEAFGLAELLSLGILKEGYIYPRQVRSLRDVLRKRAHLVRVRSALLVSLQHMISRNCAVKVKAGDMKRLREDVISPLLIRDEALGLAGKTSKDVIDCLTRQIDKIERWALKRLCREGVFLRLVTLPGVGDILGMTILLETGPISRFREVGNYASYCRKVSSQWTSNDKVKGRGNIRNGNRYLAWAFSEAAEHARRTDEACRRFYDRKLRQTNTKVAHNALAHKLARAAYYIIKDHVSYQEEKMFS

SEQ ID NO: 490276 - protein, 366 aa, unidentified
MIVIGADTHKATHALVAVDAGTGRIRGDREIKAEEPGHLAAVRWARELDDDRAWAIEDCRHVSRRFEQALLAAGERVVRVPPHRMGASRKGEREPGKSDEIDALAVARAVVKDGVECFPVAYLNDQAMEIRLLFDHRADLVAERTRIVNRLRWHLLELSPELERSCKRGSLSRSRPLGRVERGLRKLPAGARVRVAREQVRELRRLSREIDALHCELGALVRAHRPQLLAELGCGALTAAILIGRTAGNERFRSEASFALQSGTAPIPCSSGQRIQHRLNRGGDRHLNHALHIIAITRAQRDPATKEYLDRKEAEGKTPKGALRALKRHLARHFHRLLAEPAADQQRAAVDPNSTGVAPSPMVCIS

SEQ ID NO: 490277 - protein, 400 aa, unidentified
MLSIGIDVSKGKSTVCGMKPGGEIVYTPFEIQHTREGMSELVSLLRGSGEEVRVVLESTGSYHCPVVAALLENGIFVSVVNSLRMKRFCSQSIRRVKTDQIDAMQIALYGLAYWQELQPTRLPENTYRELQLLARQYYQMTSMLIKAKVDFNALCDQVLPGMQELMNDHAGRHKLSDFVLRYRHTTHILEMGETRFRKDYCKWAEKKGYRNRERMAALIFATAQNGIPVLPNAPSTQIVITEAIRVLHTVEASRDAILTQMQALAKTLPEYSLVREMPCIGDTLAPRLIAEIGDVRRFHSKRALIAYAGIDAPPYQSGKFSANNRHISKRGNRYLRKTGYEVMQSYVMHKPANDPIFTFIEKKRSEGKSGKLAMVAGLNKFLRVYYGKVTELYRSLPTIE

SEQ ID NO: 490278 - protein, 356 aa, unidentified
MEKLYLGVDLHKRSCWVTVLDADGHLLESRKLGTEKWELEEFFGKVRKPAALAVEATFNWYYFLNVVEPLGLELHLVHPWKTRAIASARIKHDKLDSRVLAELLRTGFLAEAWIAPRQVREERQLLRHRARSVQWATRAKNGVHGVVNRQGIRPPIESLFGPKGRAFLAELKLAAMDRWEVDDHLLRLDVLQGQIAELDREIRRRGRANAVARALEEIPGIGPFIALLLVAEVGDIRRFPTAKHLASYTGLVPSLYASGERRWGGAITKQGSTLLRWALVQAAHQAARSARFREYYQRQRERLGAAKAIVALARKLAVISFYRWQAAQLRQNAPPARKSSGVHLGWRMVGASTQTV

SEQ ID NO: 490279 - protein, 388 aa, unidentified
MYRIIKIGMDVHSTNYTLCAMEPTIGAEDRIFGEIQVAPNYKEVICFIESLKWKLGLHNDYSIECGYEAGCLGYTLYHQLTGAGIKCVILAPTTMLTQQGQRIKTDKRDARLIAHCLCYGGYHPVYIPTGEDDAVKEYLRMRDDHKLALKKLKQQINAFVLRHGHQYVGTKWTLKHISWLRKLELDPLYRETLNEYMASYEEQLTKIERYNKRIEEIAAEARYQENARKLGCFLGIRTHTALSLIVETGDFKRFSKGNIYAAFLGLAPGERSSSTDVNRLSISKAGNTHLRCLLIEAAKGICKGAVGHKSKELRSRQSGQSAEVIAYADKANTRLRSKYYKMIRHGKKHNVAVTAVARELACFVWGMMTGNISIGSGTGTSVTAVSQG

SEQ ID NO: 490280 - protein, 350 aa, unidentified
MKTTHPIIIGIDTHKATHVAVAIDTQGARLAALSIPTNPKGYLELERWSRSLGNVLAFGIEGTGSYGAGLSRSLLAQGHNVIEVTRPNRRLRYTQGKTDSLDAEGAARSVLSGQATALPKTQTGSSEMIRHLKIARDTAVKSRSQAMVTLKTLIINAPADLRDTLDQIRGKVALIRHIAAFRPGDIDTPLASAKAAMRALARRWLWLHEEIVAHDKELERLVRERAPKLLASHGIATLTVAEMLILVGDDPTRIRSEAAFAKLCGVCPIPASSGKTHRFRLNRGGNRQANAALYRVAIVRMRSHAPTLAYVKKRTKDGKSKSEIIRCLKRYIVREIYSQLCVPKTDQIAA

SEQ ID NO: 490281 - protein, 474 aa, unidentified
MIISGSKLSESQKSNPIPKEHQLKILALDLGKFNTMCCFFDTKTRKHTFLNATTERRYLEAVFKQHKIDLVVMEACGPSGWINDLAKSHHLPTLVCSTNEDAWRWSNVKRKTDKDDALKLARMAAMQELKAVHMPTEKHREFRSLVKYRKTLDGRINKMKCTIRAWFVNHGISIDAGDKAWHTGREHINSFRKPLMECQPHELWRGELDIELTQMDALAAQLDIVVKQLETIGKRDARIVRLRTIPGVGPRTAEILVACIDDPHRFANGRQVSAYFGLVPRQYQSGETDRNGRITKRGNPLARTILVECAWASLRYNPWAKSVYDRICGKQKTRKKKAAIALARKIAVLAWALLRDEKDWDPKQMLAVTESFGRTPPALKETLEKMKPKENSDQRKSRLRREAREAKTAATSSTAKRQNKPAAKSTNPIATKIPKPKISIGKPTAKPSPPQKATGPKTKPKSEPRRARKLVSAV

SEQ ID NO: 490282 - protein, 410 aa, unidentified
MDVLYPRCCGLDVHKRTVVACLILTPPSGPATKTVRTFGTMTNDLLALADWLTSAGCTHVAMESTGVFWRPIYNLLEGLFALLVVNAQHLKAVPGRKTDVRDAEWIADLLRHGLVRASCVPPTPQREVRELTRTRTTLVEERARIVNRIQKVLEDANLKLAAVATDITGLSARAMLDALLGGETDPDTLADLARGKLRSKRDQLAQALAGRLRSHHQFLLSEHLAHLDYLDEAIARFSDEIAQRLQPQGAQTALLDTIPGVSQRTAEILVAEIGTDMSRFPSARHLASWAGMCPGNNESAGKRRSGKTRKGSRWLRQVLIEAAHAAARTKDTYLSAQYHRLAARRGTKKALVALGHTILVIVYYVLSRGVPYHELGGNYFDERQRQAVEHRLVRRLEQLGYQVTLQPAVA

SEQ ID NO: 490283 - protein, 333 aa, unidentified
MKDVAAFCGIDIAKHLISVHLENEDRKVISQKNMRRDSVLTFFSNMPPCLIGIESCGGSQHWARELRKFGHDVRLMNAKYIIPYRRKGKNDLNDAEAICEAVSRPSMKFVAVKTEQQQSILMVHRLRQQCISHRTSLSNQVHAYLLEFGISLPKGAKAIHKNLSAIFENCELNPLVVEMLHELLAAIAREEEREAYFNKRIADWVKHDERAKALLKLDGIGPLSASAIVATAGDPSSFENGRQFAAWLGLVPRQYSSGGKSKLGGITKAGDRYLRTLLIHGARSVLLMASRGKGQQREWVNQLRTRRPENVVAVAMAAKQARMTWAIMAGKVV

SEQ ID NO: 490284 - protein, 340 aa, unidentified
MIHVGVDLDKRSSQIAVLSEDGEIAQHRLANDAARLEKFFADLPPQTPIALEASGTWWWLVDLLERLGHRPVLSNPKQTKAIAAARLKNDRVDAERLALLLRGDLLPTVWIPPAPLREARELVRHRIQLVWLRSVVRNRLQAMLARRNLQPMSGKSWLTQRGQRELQQLPLTEAPSRIREDCATLLPILDGQIRRLDTELVTRWGRDPRVQRLTTIPGIGPFIAIVLVLELGDIQRFASAKRVASYVGLTPRVRGSAGRVRAGHITKEGNRLLRWVLVLAATQAGRKPGPLRTWFHAVKKRRGKKVARVALARRLAEIVFHVWQQECDYFTVVRHGVVRG

SEQ ID NO: 490285 - protein, 332 aa, unidentified
MMAQNELVVVGIDVAKDKVDACIRALSHRQTFPSGAEGRRQLIAWLRKHKVGQAVMEASGGYERDWAKALREAGIAVRIVDPKRVRSFARSAGRLAKNDAIDAEMIAWFAETFDEAPGQAYDAAREKLAQIVNARQGLLELQTELQNRREHSVPEVVQKVQARLLKKIAAELATLEAAITALIKATAHFAELAEIIESVPGLGGTTSAGLIAAMPELGQVNDKIAAALLGTAPYDDDSGKRRGERHIKGGRRRIRNLFYMACLGAATRHNPVLKAFYGRLIAKGKEPKVALVACMRKLIAILNTMIARRQKWDVTRYKVSDHARPLPSACPA

SEQ ID NO: 490286 - protein, 334 aa, unidentified
MMNASELIFVGIDVSKDSLEMALDDKGKTLHVSNDEKGIAELGAAIMAACVPVAANEAPRTVSAIVLEATGGFERKAAVALCGAGFPVMVMNPRQARDFAKSLGYLAKTDAIDAKVLSHFARTLYHSDKSVQLLMHLPDAGQIALHALMTRRKQLVEMRVAEDNRFAMSEKTQRKSIDAVRKVLNKEIKKIEQDMDNHLREHFAKQLKLIDKCKGIGPATKASLMAALPELGSLSHEQIAKLVGVAPLNCDSGKHKGKRTTWGGRADVRCALYMATLSAMRYNPIIKTFHDRLIAKGKLKKVAIVACMHKLLTILNAIMKSGQPWNDEYLNSNP

SEQ ID NO: 490287 - protein, 341 aa, unidentified
MKNLFIGVDFSKEKVDVAIIFADGLTETAPRVFNEFKTTVSGYKQLVKWVEQNSCGIDSSLWLFCGENTGDYSKGLCNFLYGKGYDMWLENAKSIKDASGLRRLKSDRADASMIAEYAMRNYDKAVMYEPLSESLAQLRELFLYRQMVVRHRCSFQVRRGEKRLTMEKSPIKTMISQSGRHIVSELNKEVEKIDKRIAELIKSDEELTEVFTIVTSVPGIGTQNAVCLMVYTDNFRRFNYDSRKISCYYGIAPFGKDSGTSVHSDPHVHYMANRQIKAMLTQAALAAVNFNPVMARYYMRLVERGKKKQVALNNVKNKLVHLVTAMVRNRQTFTPEYKISA

SEQ ID NO: 490288 - protein, 349 aa, unidentified
MRFYNRQHRFYCGIDLHARLLAICVLDQAGNIVLQTQIGADKQLLLETLAPFRPDVVIAVECLFAWYWVADLCAREGIPFVLGHALYMKAIHGGKSKDDDIDAEKISRLLRGGNIPIAYVYPKGLRETRDLLRRRNYLVHKRAELIAHIQITNAQYNLPPFGKKLVYAKNRAELKVAEHFPDAHVRKNIELDLALVDHLDEQLADVELYLQRTVKVEDPHSYYLLQTIPGVGKILALVLLYEIHQIARFADVGDFLSYARLVRCVHRSAGKQVGTGGKKIGNAHLKWAFSEAVCLLIRSCPAVKAWQARHEKKHGKKKTLGILAAKLGRTVYHLLRKNVAFDVRRFLGQ

SEQ ID NO: 490289 - protein, 340 aa, unidentified
MAKYIGMDAHSSTCTFCVLDNDGVEISNTVIATNGKLLKDYIRSIQGVKKLALEECELSAWLHEILEPDVEELVVCDPVKNTVYKKNKTDKLDARNLAMLLRGGFLHPVYHQDSARYHLRSFMRGYQNIVDAGVGFKNRYSSLYRKNGQNKKGVDLYNDESLLKELPRPDQRFVAQHLYSMIQNTETERRAYVKEIKKLSRTFKEIKLLCGIHGIGEIQAAKIVAQVVEPRRFKNKYKFFAYCGLVRYAHSSAGTERRGKLAHGNKTLKCVFKMATLSAIYGDNVFSRYYESLLKKGLNEKAARNAITRKIAAISLAMLKHNAKFDESKIKMTEESITSA

SEQ ID NO: 490290 - protein, 418 aa, unidentified
MHETQSWFAGVDWASQKHDVWLADASGKRLGKRTFEHSGEGLAQMCDWLIATSGGKPEDIHVAIEVPHGAVVETLLDRGFKVYSINPRQLDRFRDRFSPAGAKDDSRDAETLSSSLRTDRRAFHQVSLAGAAIIQLREWSRMADDLRADQIRHANRLREQLQRYYPQMLQFDSDLAEEWVLKLWEAAPTPVKAARLRQAGVERLLKRHRIRRIGAAKVLAILKEQALIVAPGVTEAAVAHIRVLIESIRLFTQQLKEAHRQLDKLCKLLAEPIASENEQTGPEPEQTLGAILQSLPGAGRIVISTLLAEAFETLQRADYPILRKLCGVAPVTRRSGKSRAVTRRLACNPRLRNAIHYLADAARRCDEKSKAKYLALKARGCSHARALRTIGDRLLYVACAMLKNRTLFDPGLESQKCA

SEQ ID NO: 490291 - protein, 465 aa, unidentified
MKRHRRRPSPKPRTSPAALERLHPHAAGIDCGSAEHFVAVPPDRDTTPIRSFATFTGDLHRLADWLTVCRVTHVAMEATGVYWIPVFEILETRGFQVILVNARHVKNLPGRKSDVSDCEWLRDLHILGLLRGSFRPADHIVALRAYLRHRATLIESAGALVQRMQKALVQMNVQLPLVVSDITGVTGLRILRDIVAGQRDPQQLAHHRDYRCHASEAEIVAALTGNYRAEHLFVLQQNLELFDTHQQTLTACDGAIEAHLAQLAATTAPPATPLPAARRRQKPRENEPRFELRPLLHQLTGVDLSQLDGIGPYNALRLIAEIGTDMTRWPTDKHFTSWLTLAPQNKISGGRLLSSRTQPSANRAAAILRLAAMNLTRTQTALGAFYRRLAFRVGKAKAITATARKLAILVYHTLKGDLVYRDPGADAYDAKDRARTLRRLRQRAEHLGFTLVDLKTGELSEGTVS

SEQ ID NO: 490292 - protein, 391 aa, unidentified
MKIAGIDVHKKVLMVVVIDASRPEEKPWRRRFTTMPSELHRLLIWLREQGVEEAVMESTAQYWRSVWLELEPHMRLHLAQAFSNRAPRGRKHDFKDAERLVRRLIADELILSFVPNGEQRIWRTMTRMKVQLTRDRVRLQNQMECLLEEMRIKLSIVVSNLLGVSGLRILQALARGETDPKMLAQLGDERLQCTEEQLVDALTGRVQPMHRAMLALQLQRLQLIDQQIAQLNGLVAQAMKPHQEAVMRLAEVPGLGVDSAQQIIAEVGAQASTFPSAVELSSWVGTCPGKEESAEQNHSSRSAKGNKYLRRVLNQAAHAAVTKKGSHFQVVFRRSEKFLLCFAAAVLTFFIAGLLYLLCLEHVDKLGAYSIPSETGLLIPSDFNNHRGTRL

SEQ ID NO: 490293 - protein, 413 aa, unidentified
MADETMHWFAGVDWGSAKHQVCLLDGDGKVVGEREFAHGGAGLAALCEWVVSMAGDPGTIAVAIEVPHGPVVDVLLDRGFAVYAINPKQLDRLRDRISVAGAKDDRRDARVAAAGLRTDRPLFRRVLAGDPSVVELREWSRLAEELQQERVRLGHRIRQQLWRYYPQLLALSDDVTAEWVLALWTRAPTPAQAARLREATLARLLRQHRIRKLDAPAVLGILRQPAITVAPGVTEAAVLHLRSLVARLRLANQEFHQAARKLEELCTALSETEPSAQDSGPRDAAILSSLPGVGPVTLATLLTEAAGPISRRDYTALRTLSGVAPVTKRSGKSCIVIMRYAAQVRLRNAVFHWARVAVLNDPKCRSRYAALRARGHSYGRALRSVADRLLGVACVLLHRQVFFDPNHGAPAKP

SEQ ID NO: 490294 - protein, 351 aa, unidentified
MSEYIAFDSHKRYTWVDRQDHSTGQTRCHRLEHAPGAVREYLSGSEPGTAVAVEATGNWYWIIDEIEQAGLQPRLVHPRKAKLMMGLTNKTDKLDAQGLNRLQRNGTLPTVWIPPGPLRDLRELTRTRLVLVAQRTRLKNRLSATLAKYGTPASEYSDPYGKRGRAELEKYLQGLPEQTRWVSGQLLAQLDFVGAQVKELEQRLGHLVEITPEMQWLLTMPGVGVILAATIALEIGEIERFPSAMHLASYSGTTPRVHASGGKVRYGPLRVDVNRYLKWAFVEAANSVAVNQVRCPERHVSQLYRRLRQRKGHPKAIGAVARHLAEAAFHVLRGKQMYQDPSLGRGRTSQV

SEQ ID NO: 490295 - protein, 341 aa, unidentified
MHNVTLIGIDLGKHSFHVHGQDKAGKAVFRRKFSRKQLVEFFATFHACTVVMEACAGAHWMARKLSQFGHTVKLISPQFVRPFVKSNKNDFVDAEAICEAAARPSMRFVTPKTESQQTLAALHRVRQALVRDRVRTTNQMHGFLLEFGISLPVGHAVVKRLSVVLAEHPLPPRLVAILERLHAHFKYLTQQIGDIEKELDRQLAEDPVGQRLLTIPGVGPITASLLASELGDGKQYRCGRDFAAAVGLVPKQYSTGGRANLLGISKRGDKNIRHLLVQCARAFMLRLDRQSGRVGDWVRAMLTRRHSSVVACALASKLARIAWAIANANTVFQRLASVPAS

SEQ ID NO: 490296 - protein, 359 aa, unidentified
MTKYVGVDLHKRMFVVSFYDAKTQKHKVKGYKIGEMERFKESLSKEDMVAVEITGNTRYFVNQVKDSVKEVKIVNTLEFEQISKSQKKTDTRDAKMLAEYLSIGKLPEVKLKDELSAQISSLAKTRETLVDQRTELKNKIHGLLNSQGIVLERESLSSKKGLRNVLKHKVPRLVKLELEIIVTQIESLNESIKLLDEELEESGKDLKGYENITSIKGIGEKSGAILLSVIGDIDNFESEKKLASYFGIVPIVHQSGDKEWQGHITKRGSKLGRTTLVRCTLVAIKYSPYLGTFYAKIKAKRGSGKAIIAAAKKLLGIIYYTLKFNWIFEDFPKFVLKKNSGLNNFCFEKNSCCCLNNDY

SEQ ID NO: 490297 - protein, 391 aa, unidentified
MSMYFVGIDISKYKHDCCIISAADQQIVSKFTVKNDKDGFEHLLTTLNSLSNPEDIKIGFESTAHYALNLELFLENAHHSFMEVNPVLIKEYKKSTTLRRTKTDSVDCESIARWLMTVEYKPHSKGFYHSYSLKSLTRLRDRLIRQRSFYLVKITNVLDHTFPEFKPFFNERLSKTAIYLLENYGSAEKMAHMNSASYYKLRCASRGKFSIQQFLRLKELAANTVGVNNSIFDIELNSLLTLYNSLCKEIKTLEAEITKLIEEVHPHYMSIPGIGPISAAVIYAEYGDISNFSNPGQMLAFAGIEPGINDSGTESHGGRMVKHGSSQLRYVLLNACLPLIRFDITFATYYAKKRAEGKKHRVAITHVAKKLIRVIYALERQDVDFNVQKLR

SEQ ID NO: 490298 - protein, 392 aa, unidentified
MLNNEGTVQMIVIGADTHKRTHALAAVDAGTGRVRGARQIKAEEPGHLAAVRWARGLDDERVWAIEDCRHVSRRLEQALLAAGERVVRVPPHRMGASRRGEREPGKSDEIDALAVARAVVKDGLERFPAAHLDEQAMEIRLLSDHRKDLVAERTRVQNRLRWHLLELCPELERSLGRGSLEQPRQLDRIDRRLRRMSVSARVRVAREQVAQIRVLTRQADALERELLALVKAQRPQLLAETGCGALTAAILIGRTAGAERFASDASFARQTGTAPIPCSSGQRDRHRLDRGGDRQLNHALHIIAITRARYDPDTKAYLARKEAEGKTKKGALRCLKRHLARRFHYLLALPAQTPWPDHSTSDQIPAQSTQADQSNADTRIVGTAPTPMICLT

SEQ ID NO: 490299 - protein, 356 aa, unidentified
MNHVSKLDFTGQQVYVGMDVHKKSWSISIYTDQFEHKTFSQPPEVGVLVNYLKRNFPGAAYKSVYEAGFSGFWIHDRLQEQGVQCLVVNPADVPTKDKERAGKTDRVDCRKLARSLRNGEIDGIYVPSRPRAEDRSLLRTRYSMVRKQTRCKNQIKSILFFYGIHIPDELANSHWSKRFINWIESVRMERASGNMALKVHLSELTHIRQSIAELNRAIRALANTDDYRNNVRLLKTVPGISILTAMIFLTELYDIGRFKKLDKLCSYIGLIPNTDSSGEKDRKTGMTDRRNTHLRGVLIESAWTAVRKDPALIMAFNELCKHMTKTKAIVRIARKLLNRILYVLKNQQEYVSAIVQ

SEQ ID NO: 490300 - protein, 340 aa, unidentified
MSLYGGIDLHANNSVIVVINEHDEVIYRKRLPNTLPTILEQLAPYHTEMQGLVVESTYNWYWLVDGLMEADYRVHLANPAAIQQYSGLKYTDDHSDARWLAHLLRLAVLPEGYIYPKAERAVRDLLRKRAHVVRQHTANVLSVQNIMARNTGGRFSVKRIQELTKQELTPLLTEETQVLAVTSSLVVLDCLQQQIKTLEKTVHKRLQHTPSYEQLLTVQGIGTILAQTITLETGAISRFPTVGNYASYCRCVDSTKMSNGKRKGTGNVKNGNPYLAWAYMEAAQFALRFQPEAQRFYQRKLAKSRNNTVLARKAVAHKLARACYYMMRDLVPFEATKAFG

SEQ ID NO: 490301 - protein, 369 aa, unidentified
MDVHSTNYTLCAMEPVIGAEDRIFANIKVTPDYKNILMFIENLKQKLGLNDTYDIECGYEAGCLGYSLYNELTAAGVKCVILAPTTMLTQQGQRIKTDARDAVMIAQCLSYGGYHPVYIPTEEDDSVKEYLRMRDDMKLALKKVKQQINAFCLRHGYHYDKTKWTIAHLKWLKQLDLSALYRETLDEYMASYDEQTAKIERFDKRIEELASQERYQKKVEKLGCFLGIKTHTALSLIVETGDFERFAKGNVYAAYLGLAPGERSSSDNINRLGITKAGNRHVRQLLIEAAGGICKGAVGHKSKDLRQRQNGNTADVIAYADKANTRLRSRYYKFIRHGKKRNVAVAAIARELACFIWGMMTDHISMQAA

SEQ ID NO: 490302 - protein, 430 aa, unidentified
MNCNAQNKKIEAITEKTLIIGIDVGSESHFARAFNNRGIEYSKKPFKFGNNEAGFESLKTWITEIKEKHGKSKVIPGMEPTGHYWFNLGKFLQDNGMKPVLVNPHHVKKSKELDDNNPTKNDRKDPKVIAGLVKDGRYMIPYLPDGVYAELRIASNVRFQLQSELTRIKNRISRWFSIYFPEYKNVYGKPDAVSGIHILKKAPLPEDIVTLGVNGVNQIWREAKIKAVGIKRAQTLVKAAEHSVGSKEGATSARMEIQILMEDYESKSAHLQEVLALIEELVNKIPAAAKLMGIKGVGIRTVSGFLAEVGDISRFNSPKELQKLAGLAPVENSSGKHKGQTTISRRGRKRLRYLLFEVAMSLVSKNREFRELHRYYTTRAINPLKKMQSLMAVAAKLIRVFYAMMTKNVDYDPVKMISDIKRPTEYMQAA

SEQ ID NO: 490303 - protein, 483 aa, unidentified
MARRLVGIDLGIASSHTVRVLDETGQQVCRRRCEPTVASLTRIEDAASVGAPPGTVLEVVLEPTGPAWLPVAVFFASRGHRVFRVSSAKSADLRRFLSKHAKSNGIDAETLARLPLFSPGGLLPLELADAEHAALDRRVRACDRLTRAASEHKTRIKDLVRQLLPMTPLIEDIGVADLAVLERWADPRTLLKIGPSKLKSLIVKASHNHHGADRAEQWRHAAAAAVELYGNHPAIAWQDMAAEVVTEVRLLKAIQAQLAVHSARREEAYRWADHGQLARSLPGIAEVGGPVLAAAIGRAGRFPTGAQFKSYAGLAPRASETGNTDRKGQPMSKAGSSLLRATFFRAADTARKQDPQLAKIYYTQMVERGANHVKASCVVAAHLAERAWAVMARGMPYVICDINGEPVTAEQAKTIIAKQWTVPPEVRARRRNTKTTKAGKAPQQVRAGQVQPSHEGAGNRGDLPHQRSSNTTPERVKELALKM

SEQ ID NO: 490304 - protein, 402 aa, unidentified
MNAVGIDVSKGKSVVAVMRPFGEVVFAPFEISHTDKDLTDLAKKLKSLPGETRVVMEATGSYHVPVAWVLHSAGLYVSVVNAVLVHDYGNNSLRRVKTDKKDSLKLANYALDRWIHLPQFAPAEENRLLLKACYRQYQQCAKVHTALSNNLISLLDTVFPNVNCLLKSPARDDGSVKWVDFVDFFWHKDCVSKRSEKAFITKYQKWCKKQRYNFSEQKAAEIYAAAKSGVAAMPKADAAKCMVQQAVSALRACSKALAELSKQMLSLASSLPEYPVVMQMFGVGPILGPQLMAEIGDVRRFHSKKALVAYAGIDSPPNDSGRVIGNHKKMSKVGSSALRRTLFLVMSVYLQNAPLDEPVFQFMNRKRAEGKPYKVYMMASANKFLRIYYAAVNAYLDSLNQT

SEQ ID NO: 490305 - protein, 338 aa, unidentified
MALYCGIDLHSNNSYVAVLDEGRREVDCRRLRNELPAVLGFLEPYKEELEAIAVESTYNWYWLVDGLMRAGFDVRLMNPTKATAHRGLKYTDDRHDARWIACLVALGILPEGYIMPVEERGLRDLLRRRLFLVQKRTAHLVSLKAIFARSTGKQVSAEDIQKWDCEAIREVIADPLVVESMTVMLPVVRVLTTQIKAVERTAVRIGELRDEFGLLQTAPGIGQVLALTIMCETGDIRRFAGVGNYASYCRCVPSDRMSNFKRKGSGNRKNGNKYLSWAYSEAAHHAIRFEPLAKRYYDRKRSRSHLMVASRALANKMARACYHVLRDQVPFDPARAFC

SEQ ID NO: 490306 - protein, 362 aa, unidentified
MQSTPLIAFDQHAATTVAAVLLPGQRTPALHSLTSDSPTILRFVQRLQREVGPVRCCYEAGPCGFELQRAMTAAGVSCEVIAPALIPRRAGDRIKTDRRDAGHLAVLFRAGALTAIHIPTDQEEAVRDLLRCREDIRADLLRARHRLSKFLLRHGRRYTATKSTWSPRHHAWLRAQTWPLPALTQTHEAYLRAVDEAVARLRAVEVHLQDLLTLEPLRTRVQRLRCFRGMDDITALTIAAELGDARRFPSARGLMAYVGLIPSEHSSGTKRARGAITKTGNAHLRRVLVESAWHYRHHPFIGRALRLRQRGAPAPVIEHAWRAQHRLHRRYRRLAARGRPKQHIVTAVARELTGFLWAALTQ

SEQ ID NO: 490307 - protein, 321 aa, unidentified
MYKVIGIDVSKATLDGCFLDGSQKESFVVSNTQQGFKKIALKAKGALVVMEASGPYYLQLSNYLHTHGIEVSVVNPLVIKRFSQMNLQRAKTDKKDAETIANYGRIYDPKRWSPNSKNTNSIGQLYSAMELLDKQIRQLKGQQEAFDNSGELASLLRKELKSMVNFLVKQKQKLSLEVERLAEQEFGEKIDKITSIPGIGKKTAIMLNVITDAFTKFEHHKQLTAYIGFSPRVYQSGTSVKGKGHICKMGNAQIRKLLYLCSWTTKFCNKACREMYERLKEKGKPERVIKVAIANKLLKQAFAIGKSQMNYSENHGDNICF

SEQ ID NO: 490308 - protein, 313 aa, unidentified
MAKCFVGIDVAKAELVVAIAPQGDVFTVGNTEQGMASLVMRLRKVRPHRIVLEATGGYETLAAISLGVARLPVAVVNPRQVRDFGRSTGQLAKTDQIDARLLAAFAQAVPVEVRPLPDDAARALQAVVSRRRQVVEMLTAERNRLHLADNTVAPSIREVIRVLERQVQDLDHDLRQRLRESPVWREAQDLLKSVPGVGDGVSSTLLALLPELGQLNRKAIAKLVGVAPLNRDSGQYRGRRQVWGGRATVRAALYMAALVGSRHNPVLKGFYQRLLDAGKPKKVALTACIHKLLLMLNAILRTQRPWTLEFSHA

SEQ ID NO: 490309 - protein, 419 aa, unidentified
MFKIHRKNCCGLDVHKTWIYACIGITDESGRTEYKQARFSSFSRGLRELADWLAKYNCKDVCMESSGKYWIPVFNILEESCFVTLAHPKYTKPQRGNKTDRKDAKWICDLFMCDMVKPSFIPPPDIRHLRDLMRYRFKLTNCLTGEKNRAQNCLTVSNLKLDDVFSDVFGKSASSITNYMLEHPGEHFDVAPFVDKRCKHPIEEIQAAVDGSISTEQAVKLREILRHIEEIRTHRLNIEKQVLSLVAPYQSLLELIRTVPVFSADPMTAILVFSEIGGDMSVFPTAKNLCSWAGCSPCSDQSGGKRKSTRISHAGTYLKPLLVQLANAAVKSNKHPEFKDRYRRIKARRGHKKAIIAICRMLLTAIWNILSKLEPYSPVGYLSDHSPSQTKVISKEQGLNLLRSRGYVFNDDVPASASG

SEQ ID NO: 490310 - protein, 343 aa, unidentified
MEHYAGIDVSLERSSVCVVDATGRIVREAKVASEPEALVDFFRRLGLPLARVGLEAGPLSQWLHAGLAGAGFEAVLLETRQVKAALSAMIVKTDRKDARGIAQLLRMGWYRPVHRKSPPAQEVRALLVGRKLLQGKLLDVELSIRGLLRGFGLKLGEVSKGRFAVRVRELVAGQPTLERVIGPMLRAREALRSEYLALHRAVLAIVREDAVCRRLMSVPGVGALVALTFASAVDDPARFRRSRAVGAHFGLTPRKYQSGVTDVTGGISKVGDAMVRAALYEAANVMLTRAGRFSTLKRWALEVAKRRGARRAKVALARKLATVLHRLWVDGSEFRFGKEAAAA

SEQ ID NO: 490311 - protein, 405 aa, unidentified
MDIIIKRGCGLDVHKKTIAACIMGIDIKKEIRTYGTMTNDLLRLKGWLKENSVTHVAMESTGIYWKPVFNILEDSFDVVLVNARHVKNVPGRKTDVQDSEWLCKLLRSGLVKGSFIPPIEVRELRDLTRYKRKLIQAATSEKQRIEKILEDANIKLSSIASDTFGASGSKMIEALMKGDLNAEEMAELSKGRLRRRKEELREALVGNMRENHKFMIKASLGHIKAIEEELSALECRIQEKIERHFKVEYELLKTIPGVKENASVIIAEIGINMDIFPTEMHLSSWAGMSPGNNESAGKKKPGTITHGNKSLKSALTEFAWVAAKTEGTYLSAKYRSLAGRRGQKKALVAVGHKILIMCYHILKHKVPYKELGGNYLDERRRNRITKGYVKRLNNLGYTVTLHEAA

SEQ ID NO: 490312 - protein, 458 aa, unidentified
MQSFYMGGDVSKGYSDFVILSAQKQTVMKNFQLDDTFDGHCKLYGILDEFIKDHQEATLYAAVESTGGYEDNWYNELNKFQSTLNIQVARLNPVGVSHNNQADLKRNITDKISARGIAEYLIAHPEKVTYQQHQDPMASLRKQWKFIKMLTKQSTQLLNQLESLLYTANPEILAYCKDDTPKWVLKILLKYPTAINLARAKVTAVAKIPYVQKDRAKELVAAAKTSVASATDPTTQHLIKSTVNQILHLKKNIDEQNAYMARMCSVPEVELLKTFPGIGDDSAIGLMLEIQNIKRFSKAKNLTSFFGIHPAYKSSGDGTGSFKMSKKGRKEPRTILFMVVRSAITCNPVIRDLYNDHVQRGKSKMSAMGVCMHKTLRIVYGMLKHGKAFDPQIDMANRQRTGKPSEQVIKDKSRRYQNYDSKAPISRRQKKKRLEREKSHSERITKRGIITPVPLTTT

SEQ ID NO: 490313 - protein, 465 aa, unidentified
MTPQRGKKFRRSEEVADLAVRQRHAAGIDVHAAVHFVAVAAEDVPAGFVNPDAKLPAGVRKFGTNTADLEAIAAWLQACGVTTVAMESTGVYWIPLYELLASRGLDVILVDPRQTKHAPGRPKSDVLDCQWIRRLHSYGLLTASFRPADEIVVWRGFQRQREMLVRYAAQHVQHMQKALEEMNVKLTEVVSDIAGQTGMKIIKDIVRGERDPVKLAQHRHARCQATEADIASALYGTWRKEHLFALKQAVQMYEYYQRQLRACDQEIETCLRGLADKSGGAGLPPKPRRQKPRGNEVQFGARALLFRMAGVDLTAIEGISETTALVLLSEIGTDLSRFPSAKHFVSWLGLCPQHRGSAGKIFSRRVRRGANRAARALRMAAQGCHHAKNALGAFYRRIQARCGGAKAVVATARKIAERVYRLLRYGHEYVRQAEQAYEEAYRRRTLKAMARKAASLGYRLVPATE

SEQ ID NO: 490314 - protein, 337 aa, unidentified
MDTIPVRCGLDIAKHIFALHVVNASGKTIIRKNLKRKKVLEYFAQLPVCVVGIESCGGSHYWARELKKLGHKPQLISARYVIPYRRKGKNDANDAEAICEAIGRPSMQFVAVKSEEQQTILMMHRVRGQSIATRTSLINQIHGHLQEFGIVVSKGRHKLKRELAEILSNDALPALLHEMLHDLLAAILREEERIESLDKNIANWVSGNAIASKLIELDGIGTLTASAVVATAGNAAVFKNGRQFAAWLGLVPKQYSSGGKNKLGGITKRGDTYLRMLLIHGARTVLLMSTKGRGKHNQWIESLRKRKPDNVVAVAYAAKQARMLWAIMAGKSAPSLT

SEQ ID NO: 490315 - protein, 401 aa, unidentified
MEGPIVSIDVSNGNSHYMCFIKNNKRFGKVKKINHDIEGFKRLLEDIQKLEAETNEKVCAVFEATGVYTKPLERFLSKNSIKTYMINPLESARKRKEEIHNKKTDKLDPISISKVYYDKEEMMELKKKDETYNWLRKKNRLYEDQLNHLRKYKVTFQNQLSICFPGYLDLFKDGYSDIPMIILKKYPHPDLLKNKKAETVARYLEKNTCHNHKVSLEYALKIIEFAKKTYPGCEKDDVEVEIFKILLDKVIETQRECEKTLNEMITVASTLEEYRYISSIDGIGPNLAARIIAEIGDIEEFKSREALVAYAGLDPHIYQSGDQDGKHLKISKKGNKYLRCLLFLAVGCSIRGAKDNPVNRFYQKKKQQSNPLNSKAAKTACTAKLLKIIYGICKNKTTYER

SEQ ID NO: 490316 - protein, 338 aa, unidentified
MAIVTLGIDLAKNVFALHGVDGAGRAVLVRPNVARAKLLELVAALPPCVIGMEACSGAHHWARLFAAHGHTVRLMAPKFVVPYRLSGKRGKNDAADAAAICEAVTRPAMRFVPVKSVDQQGELMVHRARQGFVAQRTATLNRIRGLLSEFGIVLPLKAATVRRQAMLHLEDLPGWANTVIGDLLGEVTRLDERIAQYDRHIRQIAKGSEPARALMQLPGVAETTATALVATIGRGQDFKCGRQLAAWLGLVPGQYSSGGKQRLGRITKAGDPYLRMLLILGARSVLATAKDKTDPVSRWAVQLAARVGYWKAVVAIAAKNARLCWAVLARGDQFRLPA

SEQ ID NO: 490317 - protein, 374 aa, unidentified
MSDHSEAYVAFDTSKLRNAVAIADAGRSGEIRFLGEIENSSAAIAKLVRKLAAKYGRLTFCYEAGPTGYGLYRQIKGLGHACMVVAPSLIPRKPGERVKTNRRDALSLVKQLRAGDLTAVWVPDARHEAMRDLTRARETAVEDLRRKRQQVSAFLLRQGLHYPSERTWTKTHRNWLASQKLEHAEQRLAFEEMLLAMRQAQERIERLEQAIRAAVPDWSLAEVVTALMAMRGIEFISATAFLAEIGDLSRFATPRELMAYLGLVPSEASTGDTVKRGRITKTGNRRARRILVECSWSYQHPPRVGKEKQERVAAAPPAVREIAWKAQCRLTARYRALIRKGKLKTVAVTAVARELSAFIWAINREIANSRAAAK

SEQ ID NO: 490318 - protein, 342 aa, unidentified
MNILKQTVGIDVSYKTFNARFGTIDPQQNTIISQAKSFKNSPAGFKLFLRWIKTLIVSHDVPLIFVMEATGVYYEHLAHFLLEHGYQVAVVLPNKIRNYAKSLESKSKTDPIDAAVVTRFGLERQLSLWTPPSETLKTLRDLCREYHCLKANCTQIKNQLHALKSSFKPHRESFKRKTLLLKFLERQVALIKKELLALVKNEPDLAQRLKNIKTAKGLGDMTILTVLSETRCFELVTNQKQLTSYAGFDIVFNDSGMKKGKTSISKKGNTFIRKALFMPALSACRANPQMKELYKRLVSKGKNKKLAIIAVARKLLLLIYTLWKSNSVYIPDYKSASQAVAT

SEQ ID NO: 490319 - protein, 347 aa, unidentified
MRFYNRQHRFYCGIDLHARTMFVVIMDQAGSILLERNVKTDPKVFLSLLAPYREDVVVAVECIFTWYWLADLCAEEKIPFVLGHALYMKAIHGGKAKNDRIDARKIAALLRGGMIPQAYVYPAPMRSTRDLLRRRLYLVRQRAELLSHVLNTNSQCNLPDFGGRIHYKCNRVGVVERFADASVRKSIETDLKLLEHYDELITDLELYIVRTAKVHDADTFHRLRSIPGVGKILAMTILYEVHDIDRFPRVQEFCSYGRLVKCSRESAGKHQGFGGQKIGNVHLKWAFSEAAVSFLSKCAEGRAIVERLRRKHGKGKALSILAHKLGRAVYYMMAREKTFDMQRFANC

SEQ ID NO: 490320 - protein, 366 aa, unidentified
MTASTDDHTNAADVEAREEIVLGVDTHADMHVAAVITVMGVLMGTQAFPATADGYAALLSWASGHGRLRRAGVEGTSSHGTALNRYLRRHDLRVLEVNRPDRARRRRRGKTDAVDAENAARAVLSQEAAAIAKTGDGPVEMIRMLKVARDSAVKARTQAINQLRAVLMRADSALRDALAGLGSVTLIRTCADLPAAEHRTIDDAARGVLRMLARRILALTEEARAHERTLVAIITECAPKLLQQYGIGPDTAAALLITAGDNPDRLGSEAAFAALCGVNPIEASSGKTVRHRLNRGADRRSNSALYTIVVTRLGRDARTRAYAERRTTEGKSKKEIIRCLKRYVAREVFPIITAALSPARTPPAAA

SEQ ID NO: 490321 - protein, 455 aa, unidentified
MVAEGFHGNRGLVLRARASDFVFLPALPVANALVADVDVGRVAVEVVHARCAGMDISKTDAKVCVRIAGAGRRKTAETVTTWGAMTGQILTLRDHLAAEKVTCVVMEATGDYWKPFYYLLEDLPGVQVMLVNARHVKNLPGRKTDVADATWLAQLGAHGLVAGSFVPPAPIRALRDLTRTRTAITRERGREAQRLEKLLEDAGIKLSSVASDILGVSGRAMLEALIAGQRDPDVLADLARRRLRARIPQLAQALEGRFSEHHGFLARVHLDLIDQHTAAIGELTRRIEQVIEPFRGFRDLICSIPGIATVTADVIVAEIGEDMSRFPTAGHLASWAGTVPGSNESAGKVKSSRTRPGNLYLQGALGTAAMSCAQHPGTYLNAKYRRIATRRGPQKANVAIQHAILVAIWNMGTSGTFYEDPGGDYFTRLNPERARTRAIRQLESLGYAVTLAGAS

SEQ ID NO: 490322 - protein, 396 aa, unidentified
MVTVGIDIGGRTHVVARCRDGQARADRETVRVSQSRAGFASLDAWLERQPEPVTLMTMESSGHYWMPLASHLRRREIPVAVVNPLAAKYFAKSRLARTKSDPADARSLAEMAMRDSPPTRDPLAGAELRQAARFAMTLVTEQAKVCQRLIRLVDLGFPELGELFEDPTCRTAREVLRIAPTAQAATRRRTSTLADANAGPGHRRLGQTKAERLQAAAAESIAVPEFAAEVTFEVGLLLDQYDLLERQIDAADRRVASLLDGETAHRLRTIPGVGPAIAATLLAEIGDIERFTDFDQLLAYAGVHPAERSSGKKGANPETAWHMSKAGNSHLRAAAYRMAVVGVQHNPVIAAHYARKRAAGKSKMNALGHCMRKALSLVWGVWRNGADFDPDYGVEA

SEQ ID NO: 490323 - protein, 421 aa, unidentified
MSVSPNEVPTPALRPASPPVTAGVDWAKDDHAVCVVGGQGEAIDRFTVTHDVAGLRALVRRLLKTGVEQVAIERPDGPVVEALLQAGLTVFVIPPGQVKNLRSRYGSAGNKDDRFDAYVLADTVRTDRRRLRPLVRDTPSTLALRSLTRARKDLVGHRVAAANQLRAHLQVVFPAAAGLFSELDSAISLTFLERFTTQAQADWLSAKRLATWLRSVGYSGRTDPAVMHARLTGAPRGLTGDAASVHAATTLAFVAVLRTLNTQIQALADRIAEQLAVHPDGHIFTSLPRSGTVRAARLLAEIGDARGRFPTADSLACLAGVAPSTRQSGKTKAVSFRWGADKQLRDAICDFAADSRHANPWAADLYQRAISRGHDHPHAVRILARAWIDIIWRAWHDEVPYDPARHNALQRILNQDQPTAA

SEQ ID NO: 490324 - protein, 353 aa, unidentified
MMIIGCDFHPSFQQIAYLDQETGEYGERRLSHREEAVAFYRSLAGREVLIGVEATGNDRWFRDLMSELGYELLVGDASAIHASAPREQRTDKRDARHIWRLLMENRFPAVWQPSVANQEQRQLLLHRCRLVRMGTRIKNQLDSIAKNEGLTGSQRWSAKRRQQIEALPLKGWYAERRADLLGLLDELARRIEPLDEAVQAAAEQNAEARLLMTHPGVGPVVSLAYVLIVGDWRRFPRGKQVGSYLGLIPAEASSGKHQQRMGHITKQGNTLLRWLMVEAAIKAQSKDPSWHRQYVRLSKNKHHGVAKVAIAHKLAVRLYWMLRSGQNYEQIMERGSHAGQSVISGRRSLRPTN

SEQ ID NO: 490325 - protein, 338 aa, unidentified
MTWYSGIDLHSTNSVVVVSDEADRVVLQRRLANELGGILEALERYREQLVGVVVESTYNWYWLVDGLQEAGYRVHLANTAAIRQYDGLKHSGDVSDAAHLAQLLRLGILPTGYIIPKAERAARDLARKRLQLVRCRTAQVLAVENLFARNTGARPSGNVVKRFVPQDIERSGFDPDVTLAIQANVGVIRVLNQEIERLEHRLQERVALRSEFALLKSAPGIGETLATTIMLETGTVARFARVGNFSSYSRCVDSAKMSNGKKKGEGNVKNGNKYLAWAFVEAANFAVRFCPEAKRFYERKKARTNAIVALKATAHKLARACYHMLREGKRFDLQRCFG

SEQ ID NO: 490326 - protein, 412 aa, unidentified
MKPVYRRCCGIDVHKITLTASVRIHGPGRKFSQETRSFGTTGDELLSLHDWLSAQRVSHIAMEATGVYWKPVFYVLEQGFTLLLVNPADVKRMPGRKTDVGDSAWLAQLLENGLLRPSFIPPRAIRELRDLVRYRSELKHDHTRVANRLHKVLQDADLKLSSVMTDILGVSGRQILRRLAAGHSDPAALAELARGRLRAKLPELRQALAGRFSEHHAFLMSQALTELDHLEESMSTLAVRVEQHLVPFAREIEQLSTIPGVKRLAATAILAEIGADMSCFPDTAHLASWAGMAPGNHESAGKRRRTRARHGNRWLRTMLVECGQAAGHTRHTALAAIYRRMIIRAGRKHAAFVVGRHILNIAYHLLTEHTTYRELGPSYFEQRRADQLKRRCLDQLRNLGFQATLTPLPQAA

SEQ ID NO: 490327 - protein, 366 aa, unidentified
MSDGSRETPMATAGLDLGDNYTYLCLLDIQSGEVLEEGRLRTTPEAFKQRFDSEQQLRIAIEVGTHSPWISRLLEELGHEVLVANPRKIRLIYANKRKSDKLDAENLARLARLDAKLLYPLKHRGENSQAHLALIRSREALVGSRTQLINHVRGAVKSFGARLPKCSARSFHHKVAEEIPQALRAALAPILEIIASLTERIRDYDRKLEKLAGEHYPETELLRQVVGVGALTALTYVLTLEDPRRFAKSRSVGAYLGLVPAKDQSGERDPQERISKEGDEMLRRLLVGSAHYILGPFGRDSDLRRHGLKIASRGGKNAKKRAAVAVARKLSVLLHRLWITGELYQPLYNTQRDPQAGRLRVPTTIS

SEQ ID NO: 490328 - protein, 363 aa, unidentified
MKYVGIDLHKQTIVLCVVNQERKVLERKRFLCAEPERIRGYFAEVGSFQAVIEATASYEWLVALLEPLAQRIVLAHPGKLRVIAESVNKSDKLDAQVLATFLAMDLIPPAYRPSPREREHRVLVRHRVGMRRQVSRLKIKIRRVLANYNADRRDLFTAAGSVYLKEVSATLSAADRFVLKQLQSGMDYAEKQLRQAQLRLRQFAKRAPAREQEARALLRSAPGVGEVVSEVVLAELGNVSRFRSAKKMCAYSGLAPARRESAGKGIDLGISKQGSSFLRWVMVQAAWQAIRVSLKWQAIYEETRKRRGNRKAIVAVARRLLAVLYTLLRTGEPYRYGVQEHRRGLKPRQRRCDQNGPRASWTA

SEQ ID NO: 490329 - protein, 466 aa, unidentified
MTNSPPRPCHKEAAVRKDERSRHEEYCQFIRRIRGSKEHLVVGIDIAKDRHHAFFGTATGKVLLKKLVFQNNQEGITRLIEHAEALKIRHHLSQVVYGFEPTGNYHKPLGNHLVKCGQMVVLVSGSSVKKNREIMDGRWDKNDTRDAANIADLISQGRCLFYEYPSQGIRDLRDLLSLRKRFKKEECRLMLRIRNNLVTKHFPEFDRFFKVYLPESLAIAKWCLDPRKIREQDFRTFFTLVASKRRSLAQENRLRAIHFMAGNSIGCDMGEPSVFEARALVDQVEAVRAVIEDIEARMEQVCRGFPEYQFLLSIPGFGPFISAVVLATIGDPYRFKNASQVIRLSGYDLNASRSGRTSDTAVPKISRKGNSDLRYALYQAAMLSSTKNKNMMVYVGLKLQGRAREKGITTKMRVKLAVKLLVIAWTLMKKKEPFNPTYLSGVDIPLSAREPGLISLRPHVGPRLAQ

SEQ ID NO: 490330 - protein, 403 aa, unidentified
MQVIHERCAALDVHKKTVVTTIMLTQADGSVQEETRTFLTMTADLLALDDWLESHDIEVIAMESTGVFWRPVFNLLEEGREVILVNAQHMKAVPGRKTDVKDSQWLADLLRHGLLKASFIPPKPVRELRDLMRYRKTIVQERADEVNRLQKVLETANVKLAAVATDVLGKSGRSMLDALLGGQEDPEVLAELARGRLRAKLPALRKALDGRVHSHHRVLLTHILAHIDFLEESLAQLQAEMEQYLDPFEEAMELVQSIVGIAETAAASIIAEIGTDMTRFASDKHLASWAGVSPGNKQSGGKRLSGKTTKGNPYLRAILSEVAWAISHTKDNYLSAFYHRMVRRHGKPKAIMALARHPCWSLSTTSYGPRRPIATWELITLTNGIGDVSSVTISTVSNNSATP

SEQ ID NO: 490331 - protein, 434 aa, unidentified
MTLINFVAANQKYYAFNLLSVFIMVFWSVQYLLQHLLVQTQLSAQLLQPLILILQLPQPPQFRYARPGKFFLPVNGMDYLLPLRLTVRNVLTRRITMNIVFLGIDLAKNVFQLCGLNQAGKPVYTKRTGRKELLQTLANIPACLIGIEASTGAFYWQREFEKLGHKVKVISPQYVKPFVRGQKNDGNDAQAIAVALMQPTMQFVPPKSPEQQDIQALHRARRRIVNHRTATVCQIRGLLLDRGIPIGSAVSRARRAIPLILEDAENGLSSRMRRTIAELYDLFNDLGRRIHFFDKEIETVFRQSEACQRIAKVKGIGPETATAVVAAIGKGTEFKNGRHFAAWQGLVPRQHSSGDRQVLMNMTKKGDKHLRTLFIHGARAVVRVATNNNDGHMNQWVNQLKERRGFNKTTVAVANKNARIIWSMLRNETGYQVV

SEQ ID NO: 490332 - protein, 424 aa, unidentified
MAIRRRTNKVDINALVDLYERCAGIDVHKETVTVCVIRPGTDGSAQGEMATYGTTTRELRQLSQWLQECGVTHAVMESTGVYWRPVWQILETGGFRLFLANAKQVRNMPGRKTDQADAVWLATLLRKGLIKGSFIAPPQIRALRDLCRSRASLVHDRTRVVQRIEKVLEEANIKLDTVASDLMGVGSRMMLEELIQGETDTTKIAELALGRMRSKIPQLVGALEGYFRPHQTFLLKQLLSQFDDLCRRIERFEQQIEEYSRPFDKQVARLDSVPGIDRLSAAAILSETGVDMDPFPTPQQFCRWATIAPGNNKTAGKQRSGKIGRGNRWLRGSLTQCAWAATHDKNSYFAAQYHRLLHRGKRRALVGVGHSMIAAIWHMLRRDVEYRELGADYFEKQNLEGLKKTYLKKLERLGFKVSLEPVAA

SEQ ID NO: 490333 - protein, 392 aa, unidentified
MSQHFRFDASRSLTALEQDSTIIAVIEMSQTKWLVAALVPGVERQPLKKFDAQEEMLLKLLHRWRREAGQAGRNIERIVVAFEAGRDGFWLARWLRARDVEAYVIHPTSIAVSREHRRAKTDRLDTELLMRVFLGWLRGEKRHCSMVAIPTIEEEDARRPNRERQNLVTEQTRIINQIKAIFARFGLRTLRPTMRRLAEGLEDLRTAEGTPLPQNTLSELRRHLARLRFVRDQIRAVEQERLRKLAVAPAAETKSPDAMVRLIARVFGAGIETADMLVNEIFSRHWRDRKAVARYAGLTGSPDESGSRRRERGLARAGNVRVRCGMIQLAWRFVRFQKTSALAQWFAARTADGRASTRKTMIVALARKLLIALWRLVTRGEVPQGIVLRPAS

SEQ ID NO: 490334 - protein, 353 aa, unidentified
MAIVADHYDFVIGVDTHAASHTLALITAGTGAVQQQAQFPTSPAGLRRATAWIQRHTQDTTTLIVIDGAGSYGATFTEQLTAAGLTVAEAPDVPAISRRRHGKSDALDAIAMAQATRSLNINELRWPRATGARTALRVLIVAREQMSGERTRAVNALTALLRTVNLGIDARRALTTTTITTIAAWRTRDENPALAVCRAEAIRLARRIRALDAELAANHTTLHEAVTMQAPQLLDLPGVGAVVAATVLLAWSHPGRIRSEAAFAALAGASPLPASSGNTTRHRLNRGGDRRLNRALYTVALVRMGHDPRTRAYVTRRTAEGRTKREVMRNLKRYISRQLFRTLTAAHTAGTTP

SEQ ID NO: 490335 - protein, 370 aa, unidentified
MDENIKFFVGLDVHKDTIAVAVAEAGREPARLVGSIAHDVVKLRKLLARYGEPARVLVVYEAGPTGYGLQRALARRGYPCQVIAPSLIPKRAGDRIKTDARDGLRLAELSRAGELRAVWIPDPADEAIRDLARAREDVVNARTQARQQLKGFLLRHDVRYVGKTSWSKTYYRWLATLNFGWSGAQTAFTEYWQAVTAADERVARLTGALAHSIQGWRFEAVVNALQALRGVDVVSAIGLVAEIGDIRRFAHPRQLMAYLGLVPSEHSSGERVVRGSITKTGNTHARRLLVEAAWNYRFQPRIGRRAQQRAEDLPQAIRDVAWKAQLRLAGRFARLRARGLQINKVCVAVARELAGFVWAIASAQAKLTPN

SEQ ID NO: 490336 - protein, 334 aa, unidentified
MEQITTVGIDLAKNVFSLHGVDAKGGTVLRRTVRRDRLGEAVARLSPCVIGMEACSGAHEWGRRFQQHGHTVKLMAPKFVAPYRKSDKNDGNDAEAICEAVTRPNMRFVPVKSTEQQALLALHRVRQGFVVERTAVINRLRGLMTEFGVVLPLRSVIVRREAARAAEGLPELARGAIGDLLEQLRLLDERIGEYDRRLEAQARLSEPARRLMRIRGIGAITALAIVATVGNAREFKNGRQFAAWVGLVPGQYSTGGKTRLGHISKRGDAYLRNLLVQGARSVLQTAAAHQDRLSRWALELQARRGYYRTLVAIANKNARIAWALLARGQALRAR

SEQ ID NO: 490337 - protein, 343 aa, unidentified
MQAITTMGLDIAKSVFQVHGVDAEGYVVIRRQLKRRYVLAFFQKLPPCLVGIEACASSHHWSRELQALGHNVRLMPPAYVKPYVKRQKNDTTDAEAICEAVTRPTMRFVATKTPEQQSCLMLHRTRHLFIRQQTAVINAIRAHLAEFGIVAPVGRNGVEQLLGVVADSNDKRLPEVARACVAALGAQLRMQKAQILEFDRMIRAWHRSSEASRRLDEIPGVGPVLATALVGSVADPKAFRSGRDFSAWIGLVPKQHSSGGKDKLGSISKQGDRYLRSLFTAGALAVIRYAKIHGTKHRPWLTALLARRPTKVAAIALANKIARMAWAMMARGERYKEPVALAA

SEQ ID NO: 490338 - protein, 375 aa, unidentified
MREKLRFLGLDVHAETIAVAVAEPDGEVRSLGTIANREDSIRKFIKRLGPTEQLRACYEAGPTGFVLYWQLTQLSVECTVVAPTLVPKKSGDRVKTDRRDALKLARSHRSDDLTAVWVPDEGSEALRDLVRAREAAKQDQLRARHRLSKFLLRTGQRPALGVKAWTQIYMAWIRQIRFAQMAQEWTRLDYLHEVEHMGERVVRLEEAIAEAAKLASPEVQEVIKGLQALRGIAHISAVTIAAELGQISRFESARQLMGYSGTVPSEDSSGERTQRGNITKAGNAHLRRIAVEAAWSYRLPPGIGPALRKRQEGVPEEIREIAWKAQHRLHRRYCRLSATRKDQRKIITALGRELLGFIWAIGIKAETAARQRIAA

SEQ ID NO: 490339 - protein, 402 aa, unidentified
MNAVGIDVSKGKSMVAIMRPFGEIVSTPFEIKHTSSDINSLVKLIKSIEGESRIVMEHTGRYYEVLAHQLSEANLFVSAINPKLIKDFDNDSLRKVKTDKADSVKIARYALDKWQNLKQYSVMDELRNQLKTMNRQFGFYMKHKTAMKNNLIGILDQTYPGVNTYFDSPARSDGSQKWGDFASTYWHVDCVRKMSINAFIDHYENWCKRKKYNFSKSKAEEIYGKAKELVPVLPKDDITKLIIKQAVDQLNSASITVESLRTLMNETASKLPEYPVVMAMKGVGTSLGPQLMAEIGDVSRFTHKGAITAFAGVDPGVNESGSYEQKSVPTSKRGSSDLRKTLFQVMDVLIKTHPQDDPVYQFLDKKRAQKKPYYVYMTAGANKFLRIYYGRVKEYLASLPES

SEQ ID NO: 490340 - protein, 310 aa, unidentified
MEQIFIGIDVAKDRLDVHVRPSDEAFAVTRDDAGLAALLEKLAPLEPYLVVVEATGGFEQTVAAALVSAGMPLAVVNPRQIRDFARATGQLAKTDALDAKAIARFAEAVRPEPRPVPDAQARALGELVARRRQIIAMMTAERNRRRQLSSQRLIKSVDRLLAVLQKELGDLEQEVGEGIRGTPAWRERDELLRSVPGIGDAVARTLIADLPELGHLDRKQIAALVGLAPLNRDSGKWRGKRTTWGGRAKVRSALYMAALVASQHNPVLKAFYQRLLSFGKPKKLALTAVMRKLLTILNAMVRDNKRWQNA

SEQ ID NO: 490341 - protein, 385 aa, unidentified
MKKNTSTTTVTNTATSVDVNAAQPQAGQDGEAAPVTARYQAVVGLDVGDRQSHYCVLDLDGGVVAEGALKTTEASLRVLFEGKGRMRIALEAGTHSPWISRLLIALGHEVLVANPRKLRLIAESDAKHDRADAHLLARLAHVGPALLSPIHTRSAQTQIDLTVIRAREVAVQTRTKIVNAVRGMVKSTGHRLPASPTLTFARKATEACPAALQPALLPLIRLVQTLTDDIVAYDRLVVGKARAYPETQAIQTIPGVGALTAVAFVLVLNNDRSRFKRSRDVGCYLGLKPKQRDSGMRSLQLGITKAGDPLIRRLATQSAQYILGPFGRDSALRRWGLSLASRGGKNAKKRAVVAVARKLVVLMHRIWITQEAYDPMRGVRVQSAA

SEQ ID NO: 490342 - protein, 356 aa, unidentified
MSEAGPTDIIVGIDTHKHTHAAVAITRLGARLGELTIQVGSDGYRELEAWARSLGPVRTFGIEGTGSYGAGLARFLREAGHVVREVSRPDRGQRRRHGKTDHLDAEAAARAVLGGQATALPKSGTSEVEMIRHLKVARDTAVKARTQAMLALKAIIVGAPAALREQLDTIRGTMALVRHLASLRPGPLTTTTASAKASLRAIARRWLDLDAEVRSHDTHLHRLAEGCAPEMVAAHGMGTVTAAEMLVLVGDNPERIRSEAAFAKLCGACPIPASSGKTSRHRLNRGGHRQANAALHRVVVVRMRTHQPTLGYLQRRTAEEKSKREIIRCLKRFVAREIFGYLCRTPKATNPAQAPA

SEQ ID NO: 490343 - protein, 340 aa, unidentified
MSQVTLIGIDTAKQVFHMVAVDARGQYVWHKNVRRRQLLPTLAKLKVCEVVLEACAASHHWARSIRELGHGVLMIAPQHVKPYRRGQKNDYRDAEAIISAALSPGMQFVGIKRVDQQAEQALHRVRSRLLSHRNAAANSLRGLLGEYGLAFRLGIKPLREGARCFAETAQARELGLVDLIHDVLEEIQALDQRMAHYERQIEQRVKSDAISVRLRDELHGVGKLSASALRVKVADVRDFSNGRNFAAYLGMAPAHRGTGGKVKIGKLKRGHDRYLRQLMIHGARSAVRHLGGKQDAQSRWLRDMVERRGPNIAAVALAHKNARQAWAIMAQEEERRMQQH

SEQ ID NO: 490344 - protein, 371 aa, unidentified
MPYIQDIQPGEKAKGDFHFILKKMSSMKKVIKQVLGIDVAQNELVVCLGRMSEDLLTELYARKAFANTQTGFEQMTGWVKKLTDAAIAVQYVMEATGVYHERLAYFLAERHMRISIVMPNKISNYMRTLDIKTITDKTAAEAIARFGLERGLDNWQQPTPVYKALRQLTRERGQLIEERTVIKNQLHAEQAEARPNKASIERMNRRIALLNDQEKEIAAEIKVLVRSEEKVNEVVDLLCSMPGVGTLTAVTVLGETNGFDLIRNKKQLTSYAGLDVKEKQSGTSVKGKPSISKKGNKYLRKVLHLPALAAIRCDERFKDISERLVGKHGIKMKAIVAVQRKLLEMMYTLYKTGKKYDENYLTKNEAKEEAA

SEQ ID NO: 490345 - protein, 403 aa, unidentified
MNNVAGIDVSKGKSMVSVLRPFGEVVAKPFSVGHTGSELKELADYLKSLDGETRVVMEHTGRYYEPVARFLHEEGVFVSAVNPKLIKDYGNNTLRKVKTDKADSRKIARYGIDNWAELRQHTPMDTIRMQLKTLNRQQSLYTKTKTMMKNNLIALLDQTYPGVNALFDSPVREDGSQKWVDFATTFWHVDCVRNMSLTAFAERYRKWCKRHGYNFSQSKAVEVHAGAQDLIAMLPRDALTKTMVRQAIDALNAVSASLERLKAEMQALAAQLPEYTVVMAMHGVGDSLGPQLMAELGDVTRFTHRNAITAFAGVDPGADQSGTHEAKSTRVSKSGPPELRRALFLVMDCLLKTQPQDDPVYRFMDKKRAEGKPYLVYMTAGANKFLRIYYGRVKEYLASLEGN

SEQ ID NO: 490346 - protein, 314 aa, unidentified
MSIQEVAFYIGVDVASKHLDLFDPKTGKSERIKNDAVAIDSLCQKWKDRSDVMFVMEASGGYESLLVAKLEQANIPRSVINARRVRDFAKSMGADAKTDQIDAKVISQFAAVLKPVPTSAQSDEERKHAALVTRRSQLVDLITQEKNRLKQTWDDDSKASVQKVLELLGKELKSIDAKLVQMLKSDTKNKRKIEILKSANGIGDVVASVLVAHLPELGKLNREQIAKLVGVAPMNRDSGNSSGKRFIFGGRANVRAVLYMATLVSIRCNAKMKAYYAHLKAKGKESKVALVACMRKFITTLNYLIKTDQVWEAK

SEQ ID NO: 490347 - protein, 358 aa, unidentified
MAVIEGTRRIVGGVDTHKDLHVAAVVDEQDRVMETRSFATTRQGYRQMLAWMRSFGELQSIGIESTGSYGAGLLRFMQQAGITVLEVTTPDKQDRRRRGKNDDLDAQNAAHAAFAGQRTVTPRSRDGMIESLRVLMACRKTAVSARRVALQMIHNTIVCAPDGLRDQLRSLTRMQLVRTLASWRPDLTAYRDLESAYRIGLKSLARRYLELHDEIADLDAMIAAIVEELAPNLIARNSIGHVGAAQLLLTAGGNPERLRSEASFASLCGVSPVPASSGKTVRHRLNRGGDRAANSALHIIAIGRLRTDQRTKDYVARRIAEGHSKLDAIRALKRYLAREVFTLITQRRREINATQIAA

SEQ ID NO: 490348 - protein, 418 aa, unidentified
MKKHNNSRKKNEPTSKRAKPRGPVRRDTKEVLAELVEKLKEKLDPKKVAATSAGEEHERGELRPNLDRLTVGVDLGDQWSHYCILGLEGETLAEGQLRMTQEDIAEFFQALNAARVVFEVGTHSPWVQEVICGCGHEVLVANPRLMEGSKRRKRKNDRIDANKLARLGRVDPQSLHPMQHRSREVRQDLVVLRARDALVAARTELINATRGLVKSMGSRLPKCSSPSFAQKVEETVPVELRDALLPLVRMAAALSDCIQEYDEKIEKLGREKYGHTALLRQVKGVGPITALAYVLTLENPDRFVKSRDVGPYLGLVPKQEDSGESQPQLGISKAGDTMMRRLLVGSAHYILGPFGPDTDLRRYGLRLCERGGKNAKKRAAVAVARKLAVLLHCLWVSGEVYEPLRQGKSATMTPAAAA

SEQ ID NO: 490349 - protein, 401 aa, unidentified
MATMRDNATRVKRFRELKTTLRTNRARLLVGLDIAQAEHVVHVRHAHTRVVTAELVIPNSTRGFAQLWARIQQAQRATGCREVVCGLEPTGTYHEAVASFLEGQGADVVLVSSAVAYWNRRTQDGTWDKHDRKDAANCADLLEQGKVLFYSQPDGPLAELRRLVKCLRRARAELAACKARWRTTLRPALGPMGEPLPNRLRAELPAVLQAWERAAPGRPAVAKGRLPLGLATACADLGAQVTAVQARIAALEAACMPVAERLPAYTLLRTIPGVGPTVGAILLAEIGDIAWYTKFSQLRKLAGLDIVRVQSGQFAGQARISKCGRGLLRWALYHAAMGMARTTAGRARFAALKAKRHGDRFAGFKAIVELAAKVLRVVWGVWRSGTSYDPLRTGGLRRQPR

SEQ ID NO: 490350 - protein, 453 aa, unidentified
MPKRTSPGTKRKKHSRILEQINHSAAGIDAGAEWHFVAVPEERATPSVRKFATTTGGLYALADWLAAAGIDTVAVEATGVYCMPLLDVLDGRGLAVVLAKPASLKSVNDRRKTDMLDCQWIQMLHGFGLLRASLRPTQMVAAFRTYSRQRRMLIEQASTAIEHMKKALTSMNIRVELAVSDITGRTGMHIIRAIVAGERDPMVLAGMRDERCAKSEQAIAEALLGKYSDEQLFALDQALRTWDHYQLLIAECSQRLAEQSNAFEKKADRKNLPKARQPERERKNGLPLDSRAIYYEILGQDLTQIDSIGTSTTCAFIAEVGTNVDAFPSVKHFTSFLRLSPGSNISGGKNKSGKNRRTTNRLATALRLAAQTLTRSQSALGAFYRRKRAQLGAEKAITAAAHKLARMIYFTLKEQRPYLDPGPDHYLQRHRERIIRSMEKRAQQLGYQLVRAA

SEQ ID NO: 490351 - protein, 338 aa, unidentified
MSIVMGLDQHRAQITADWLESETGEVKRSRVVPADRAGVRRFLERFAGQELEVALEATTGWRFVVEECRRVGAVVHLAEPAETAERRGPKKRAKNDRADARHLRELLMIGRLPESWIAPDHILDLRARVRLRHELGEQRSEWQQRIQATLYHHGCPQRRSLMVGDGREWLAAQPLPETARERVTVALAMIDALELQMRPIEKQLRAYARRQAGCKALMAHYGIGELTAVTILAELGDCTRFSSSRQAVRYAGMDITVYQSDRHRAPGHISRQGPPALRWALYEAAQVARRPGSPDRDYYLQAAERVGGNRACLSVARKLLKRSYHTLRELGEEALAPA

SEQ ID NO: 490352 - protein, 341 aa, unidentified
MLEVNIIGLDLAKNVFQAHGADASGIALLRKKLRRDQVLRFLAEQPTCTVAMEACASSHYWAREISGLGHSVRLIAPGYVKPFVKRQKNDAADAEAICEAAQRPTMRFVAVKSEEQQAAAIVFRVRDLVVRQRTQTINAIRGHLAEFGMVAAQGLFHVAKLLAAIEDKGSAVPEVARSILRLLVEQLRSLDEKMALLDREIARRAKEDTEARRLMTIPGIGPITATALAALAPSAQTFKRGRDFAAWLGLTPLQRSTGGKQKLGETSRMGERTLRRLLIIGASAAVRWAMRKGKSADPWLMRILGRKPPMLVIVALANKTARIVWALMAKGGTYRAPAVAG

SEQ ID NO: 490353 - protein, 368 aa, unidentified
MGKIGVVEVRGQEGLPTPKRPADGTPVWMAIDISRSKAVYCLRWDGIEQRRLSTPLGIQHVGALLEHYRGCQVHVAYEACGFGYELAWWLQEHGVAVRVIAPSRVERMPGLQVKTDRVDVGKLARKLEKGDLKAIYIPSRAVHEQRQLGRTYAQSIKERKRAQVRIRSLMQEQGRLGPLPAAGWKVYSAWLDGQNLPEPVGLCVQAHQQLRAVADLQAKRMNAELHKLAHSAEYRPLVEALSAQSGVGWQSAIRLVLELGDIGRFPTTDALPHYLGLTPSQYSSGELDHRGHTLKCGPGFLRALLLQCAWSAVRQGCDTELQERFAALAPRIGRKRAIVAVARKLAIKVRQRWRSHLLASEPTPALAV

SEQ ID NO: 490354 - protein, 406 aa, unidentified
MLVYLGIDWSEQKHDLSFRNELGAEILHLRIPHSENGFLTLNQSVANLGASPAECMVGLETAHNLLIDFLWAHGYTQIYVLPPNLVKSNQGRHRQSGAKDDRCDATLIAELVRTDRSHLYPWRPGSLLLQQMRAKVSYLYFLTRDIVQHTNRLRSILLRYYPAATQVFSALDTKICLDFIQAFPTPQQAAQLDFETFSAFARSHHYPQPKRLLLNYARLQQPQPIPAAETVQAFQDEAVQLCQLVKMLVQRKEEMLQELDRLYQQHPDHVIFASLPGLGARLAPAILVKFGEDRQRFPQPELVQALAGTCPITVQSGKSKYVRFRQSCDHEFRHYVQQWAWHSLQHSSWAEAYYLRVRPNCRSDSHVLRCLGNRWLAIAWKLWVSETPYDETYHLRQHALRLRPRA

SEQ ID NO: 490355 - protein, 319 aa, unidentified
MDRATETSEIMVGIDVAKDRLDVHLRPSGEAFAVSRDGPGLASLTARLGKLAPALVVLEATGGFEITVAAALAAAQLPLAVVNPRQIRDFARAVGRLAKTDALDAEIIALFAERVRPAARPVPDDAARALDELVTRRRQIIEMIGAEANRRRQARERRLRKRLDAHLAWLQKELTATDGEIDAAVRASPAWRENEELLTSVPGIGQTTARTLLAELPELGQIGRREIAALAGLAPINRDSGAWRGRRMIGGGRGSVRSALYMAAIAASRYNPPVAALYRRLVDAGRPKKLALIACARKLLTILNAVLRDRTRWNEVEHA

SEQ ID NO: 490356 - protein, 345 aa, unidentified
MNITRVGVDIAKSVFHVHSVDRHDRPQWQGKYSRDKWLDALSKRVPVGAEIGMEACASSHHWARQLQARGYSVKLIAAQFVKPYVKSNKNDRVDAEAICEAMGRPNMRFVAVKTVDQQDVQAAHRIREELVHQRTAKVNQIRGLVGEYGIVAPVGIGKLRAVLPRWLEDAENGLTDAFRVLLAGLAEDLRHLDDRIDTVTAGIEQQVQADPVAKRLMTLQGVGPLTASALSGALGDGQAFRRGRDFAASLGLTPRQHSTGGRDRLLGISKRGDSYLRKLLVHGARAVLRHAGGKDDGLSDWVRRLSGRKHVNVAIVALANKTARIAWAITRHDMAYDPALAARAA

SEQ ID NO: 490357 - protein, 353 aa, unidentified
MSVIGIDPHKSTHTATAVDPATNTDLGSIRIDATRTGYTTLIAWAKSWPARKWAVENAEGLGHHLAQWLLVLNELVLDVPTTATARIRELSRGGRRKNDRIDAAAAACVAAAQGDARPVDPEGSTDILALLDERRTNMSNSRTRLVNQLHALLRQLFAGGAPTSLTAASASALLRGFRARSEVDRTRVGLCRDLIADIRRLDDQLASHEKQMAHTLDEHGTRLRDIDGIGPMTAARLIGRTGRASRFPTAAAYANYNGSAPVQIASADTDRHRLSRYGDRQLNSALYTVAMVQTRMPASAGRSYYDKKIDEGKSPRAATRTLKRHLSDHVWRIMLADEKRSHRQRKKEPTSAA

SEQ ID NO: 490358 - protein, 406 aa, unidentified
MEILHERCCGLDVHKKSITACIITPKGKEIRTFGTMTRNLIELVDWVKSNRCSHVAMESTGDYWKPVYNLLEQEDLQSMVVNAQHIKAVPGRKTDIKDAEWIARLLRYGLVQGSFIPNREQRELREVVRYRRSIIEERTREVNRLQKVLEGGNIKLSSVASNILGVSARNMLEAIIKGENDITILADFAQKKLKHKKEELKLALEGRLGDHQLQMIEKQLAHIDYINGLISELDEEIEKRMAPFIKDLDLIDSIPGVGKRTAEQILAEIGTDMSRFPTPGHLCSWAGMTPGHDESAGKKKSSKTRKGNKKLRSALTEAAKAASRKKNTYLSAQYHRIAARRGKNKAAVAVGHTILYLIHILLTRKQEYVDLGFNYFDERKKEIVIKNSVKRLESLGLVVTVQEQTA

SEQ ID NO: 490359 - protein, 399 aa, unidentified
MSALRRVVIGADTHLDTNHLAVLTDTGKPLADAEFPTSPAGYDDAVRWAQSLGTICIAGVEGTSSYGAGLTRVLQAAGIEVAEVSRPDRAARGRRGKSDPLDAYAAARAALAGDRLAVPKDEHTTALRALLSARRSAVKAHTAATNQLHALLVTAPAELRERYRRHHITALVAALAQCRPATQGDPTSAAVLTAAKALAQRVKFLEQQRQDLTAQLDGLVGQINPALRAAYGVGPHTAAQLLVTAGTNPHRLRSEASFAALCGAAPVPASSGTITRHRLSRGGDRAANNALYRIALVRMSSHSQTRDYVERQVTKGRTKKEILRLLKRAIAREVFRLLTRPGPVDDYRDLRAARQAKNLTRAAVAQHFGVPIITISRLERGHQRNDTLANHYRQWLTAA

SEQ ID NO: 490360 - protein, 338 aa, unidentified
MVVIGIDPHKGSHTAVAIDEDEHKLDEVRVRADRRQLERLTSWALAFPERSWAIESANGLGALLSQQLVGVGEEVFDVPPTLSARMRVLASGKSQKNDPNDAFSVAVAALRSPRLRSVVTEDHVAVLRLLWNRHKNLTSLHTQAVCRLHALLAGIVPGGTRRRLSADKAAAVLSGFRAKTAVEKARRDQAQILVGDVRRLDAQLKASNRTIAEAVAHVPTTLEELSGVGPVSTCIILAHTGDIRRFANEDNYASYNGTAPIEASSGPKKRHRLNPRGNRQLNHAIHIIAFSQPSHAGPGRDYYERKLAEGKTQKEAVRSLKRRISDVVYRQLVRDAQR

SEQ ID NO: 490361 - protein, 317 aa, unidentified
MRFIGLDVHRGFCEVAIAEAGAVRLAGRVQTEPAALELFAQSLGGDDEVALEATGNALGIARIIEPHVGRVVLANPKAVRGITRAGAKTDQIDARTLAQLLAGGFLPAVWLPDEQTRILRRRISARAQLVRQRTRAKNQVHATLVRNLKGKPPVSDLFGVRGRRWLAAQELPPDEQETVAACLRQIEFLDRELALVEKALAEQVLASTEMRRLLTLPGVNFVTAAALTAAIGDIGRFPSARQLVGYLGLDPRVTQSGSEPARHGRISKQGPGETRHVLVEAAWHATRTPGPLRAFHQRLAAAAAATSPPSRSPASWP

SEQ ID NO: 490362 - protein, 391 aa, unidentified
MIYVGIDVAKDKHDCFITNSDGEVLFKSFTISNSRDGFETLFQKIESVSDDLTKVKVGLEATGHYSYNLLGFLLDKGLTTFVINPLHTNLYRKSLSLRKTKTDKVDAHTIASMIMSDVNLKSYSDTSYHNEELKSLTRYRFDKVKERAKLKSSVSRLVCILFPELEKLVPTLHMASVYALLSEFPSAHAVASVHLTSLTNLLSESSKNRYGKDTAVRFREAARNSIGSNIPAKSLELKHTIKLIQELTSEIDEIETEIKSIMDTIHSPILTIPGISYRMGAMILAEIGDFSRFDSPDKILAYAGMSPSTYQSGQLDNCYSHMEKRGSRYLRYALYNATKYVCHWDKSFGTYLAKKRAEGKHYNVALSHATKKLVRTIYAMEKSGQAYNKAS

SEQ ID NO: 490363 - protein, 353 aa, unidentified
MNVNHYIGFDVHKKSISYCVKTADGTIVEEGTLRATHLALREWAEKRREPWHGAMEATLFSGWIYDTLKPYAAELQMGHPAMMKAIGASKKKNDKLDARKTADLVRCNLLPVCYVAPGEIRELRRMLRYRNLVVAQATRMKNRMSGLLMEVGAEYNKQRLHGKEYFHELLDTIEEVPESVKDLLRLSRGALEMFQTTQWQLLDRLQKQPLLAKRVTVLMSIRGVGEVTALTWALEVGDPQRFPSVGDAVSYCGLTSALDSSADKQKRGPISKQRNAHLQTVLVEAAKVAPRWNPQLAAVHAREVQRGHRNRATLEVARKLVAYLLAVDKSGKPFQIRTPAATVEQHVQEVAAA

SEQ ID NO: 490364 - protein, 325 aa, unidentified
MEKLYGGIDIHKENLAGCIMDKDGNIKREHTFPSSKKALEKFLCNISSSEITIAIEACGMWRGIHKILTEVGYEVKLANPKKTHDIAGSKKMDKIDAKTLADLLRTHYLPEVWIPDEKTLKFRDLTRHKSNLTRLRTQVQGKIRGYLLRKGAKYNKLSSEKILSTLAEEDSDIKNLVHVYHCLKEEEREVMKRIKRISQNMKETTLMMSMPGIAEFSSLMILAEIGDVKRFTSPKELVSYAGLCCGIYQTGNTERTVHNTAVNKWLKWIMYECSGRALMLDPRFQEYYYKIKEKKGFKTARRATARKMLTIIWHMLTNEEPYKAS

SEQ ID NO: 490365 - protein, 308 aa, unidentified
MIGIDVGARRCHWHDTTTETTEALTTEETIAKLTMLAPTTIVLELTGPYGRRIAEIAYQAGHTVLIAHDTDSAALRTLLRNRRKTDKLDARLLAQLAQLELPGPNPHLTPYEHIRPLLEARALAHQWRYLVQLRTAIRTRNKNPLTEPIPLEKPLTELIEHYKRRTIETVPPTTLQLLTSIPGVSPTLAALLYVQLGDIHRFRNRDAAVSYAGVAPRHTPLSGNTRQRPRRYRHAKLLITHLHMYALHVAREPDQFDAIGQTYVRIRNRAGARRALHAVKRHLIRIVYGVLKSGQPYSSSRAADEASA

SEQ ID NO: 490366 - protein, 335 aa, unidentified
MQIYGIDLAKEKFDVSFLRLSSKSNVVTPVHHVVRNTENGIKAFLKGLPSDSVLVAEHTGVYGERLLKMCTEMNIKIAYVGGHVIHTYKSGPDRGKTDEQDCNVLREFGERFTDKLVYTTFPEEDIYELRQLSRQRTMLVEERKRIMTADKTEDCRPYRSEAVKRSMQHIVDLLDEEIKNMERDMLTVIRKHDKVSNSYDIITSVNGVGLVTAVELIVKTRNFTTITTAKQYSAYAGTAPYEKSSGKMNQGAHVSKWGNRRSKTLLYICAECARMHNKEMKLYYERRTIIDKKAHHYVLNAIANKLLRLIFSLINKNEKYNPCYIQRDPRSLNIN

SEQ ID NO: 490367 - protein, 352 aa, unidentified
MRRAKHQVTSGEDLFVGIDLHKLRWHVTIRTFEVEVFSASIPGTWEALQRVLARYAGHQVQAVYEAGYFGFRLHDRLVAHGIPCLVTPPSLVPQEYGNRVKTDRRDSSKLAHLLAKGLLKRVWVPSEEELYHRQVIRRRRQLVRDRVRTQSRIKAELRFYGIQLEEPPGRWTQIYFETLRRLRFGNRWMQESFHRLLEQYEFLCAQIDKQTQLLRELSETTMYRERVKILQSIPGVGLISAMELLLELQDVSRFRRAEQLAAYVGLTPSQYSSADKVRMGRITGIGKNTLRSLLVEASWTLIRKDQAMREKYDRIKIRSGGKRAIVAIARTLLLRMRRMLLDKQAYTLQLAA

SEQ ID NO: 490368 - protein, 430 aa, unidentified
MKSNTQNAKIEAITEKTLVLGIDVGSETHYARAFDYRGIEYSKKPFKFSNTEAGFVTFKEWILDLKERHEKDKVVPGMEPTGHYWFNLGKFLQDNEMKPVLVNPHHVKKSKELDDNNPTKNDRKDPKVIAGLVREGRYMIPYLPDGVYADLRTASNIRFQLQAELTRIQNRISRWFNIYFPEYKTVYGKPDAKSGMLILKAAPLPEDILTLGIDGVNQIWRDAKLRAVGKARAKTLIEAAEHSVGSKEGAVSARMEIRMLLEDYESRNTRLQEVMVLIEELVRKIPMAEKLLEIKGVGIRTVSGFLAEVGDISRFNNPKELQKLAGLALVENSSGKHKGETTISRRGRKRLRYLLFEVAMSLVAKNPEFRELHNYYTTRRLNPLKKMQSLMAIAAKLIRVFYVMLTKGVNYDPKKMVNDIKRPAVYLQTA

SEQ ID NO: 490369 - protein, 344 aa, unidentified
MIYIGIDVSSKSFVIHAIDGRKKVVFKGEILPEKRPLLKLLKDLGDEPKYVVFEAGNQMKWIAQALLKVEDVTLHVVHPNELKWISQCNGKTDKVDARKMAELARGDLLPRKVHIVEGTVRELREMLSARQLLQSKRIALVNSIRAMMLQEGIKLPEKFFSRTDWHDRLEKVSISETTKLIIAAFMKAVEGLSSSEDELETKVVAIGDERIKRLESIPGIGKLSSRTLLGALDEANRFDNKKAAAKYGALTPTIYQSGNVTHMGHICRNGRHEIRRVLLQCAHTVARMKNFESKQLREFFERIHKRRGKKIAVVALARKLLTIAYGVLKAETYFDPKMLSPNRA

SEQ ID NO: 490370 - protein, 416 aa, unidentified
MNAAGIDVSSRKSTVAVLRPFGEVVRLPFDVAHNTEGLASLAEQLKALDGETRVVLEHTGRYYEPVAKALHEAGLYVSAVNPLLIKEYGANSLRRVKTDKADAVKIARYALDNWADLRDYTPMDTIRYDLKTLNRQFQLASKQRTASANNLIALLEQSFPGIRKCFDSPVRSDGTQKWVDFIHTFWHVECVRKQSLNAFSERYRKWCKRHGYIFKQGNAVEVYSLAKNAVVLVPKSEVTKVLVQEAANQLTSISHSVETYRAEMERLASTLPEYPVVMAMYGVGKSFGPQLMAEIGDVRRFERKQSLVAFAGIDPMPNQSGDKNVRSNKSSKRGSPYLRKTLFNIMGIYLKCSPQDEPVYKFLDHKRSEGKPFYVYMTAASNKFLRRYYAQVRDYLSTLDNLPPVDMDSTGLKPSD

SEQ ID NO: 490371 - protein, 462 aa, unidentified
MNFYLGIDVSKGYADFTMLNEKFEIVEENFQLDDNFEGHSKLYNFLTAFILNNDVDMIIAGVESTGSLENNWHENIVNFQDFIPIKITRINPIGINNASKATMNRNITDAISSRNIAEFMIRFPERLYFTQSNKMSEMKRVWSLIRLFKKQKTQLLNHLQIVLYSSNPEILKYWYSPAPQWLITLLKMYPTAKKLARAKIKKVASIPYVSLEKAEKLIADAKESIASYTDHTSEEMIIMTLNHIEALDKTINNAIQKMRQEFDIPELHLIESIPGLGENTAVGLLIEIGQVERFINPKKLASFFGVHPIFKISGDGKGSFRMSKKGRKEPRRILFLAAFTAIQHNEYFKAYYNAQLENGMAKMAAIGKVMHKLLRIVYGVLKNKQPFNAEIDRKNINKKPSKKCPITKKENKARRFQKLGTNAPISNRQSRKRKEQQMAQDGNLPSGAGSSAAQKDCIKKME

SEQ ID NO: 490372 - protein, 466 aa, unidentified
MSKSVSGSGPAVSPEAQAPPASEPEPTALGYLGLDVGQCAVTACLLLADGREAVRRWSVPNTRPGAEALVGRVVELADQHGLGRLRIGLEATGLYWWPLACLLNDTPLLQGLQPEVYALNPNLVHGLKKVYADTGKTDPRDAFLIAERLRIGRLPAPFQLDMVYAPLQRLTRYRTHLSQTLAREKGYFLNFLFVQFSGFSQEKPFSDTFGPTSQALLEQFSTEEIAQASLEDLAAFIQEHGRGGFTDPEVVAANLRRAARESYQLNSALQPPLGLVLGMTRATIRILQAQLVTVDQTIARELRALPAHARTIDSVPGLGPVWTAGLVAEIGNIQRFTDDAAVAKYAGLVWPPHESGDFQAQDSRLSKAGNSYLRYYLVEAANSVRQHCPEYRHYYLTKFAQTPKHSHQRALVLTARKLVRLVDALLRTGSVYRSPTCDQNQEEVRTTPHAARPRPQRRARLVTSAS

SEQ ID NO: 490373 - protein, 318 aa, unidentified
MNEVVTFEQIVKRGCGLDVHKQTVVATIDGEGLKEETREFGTTTRSLTELKEWLVREGITHVAMESTGVYWKPVYNVLEPSGMTVWIVNARHIKYVPGHKTDKRDSKWICKLLLAGLLKPSYIPAREQRELRDLTRYRRKMIEQIASEKNRIIRLLEDCNIKLSSVLSDTQGVVGTKLIDKLCEKGRISMEDIEEVYHGKLQASKEEILEACEGVVTEHHVFLLKAIKEDIHSCESIIAKVTLRIKEMLSPYDNVLELLKEVPGLSTKSVEDLVAEIGLDMSAFPTEKHLASWAGVSPGNNESAGKKKVDAQLTEINR

SEQ ID NO: 490374 - protein, 342 aa, unidentified
MKDIMIGVDLAKNVFQVHGALRTGEVQFRKKLTRKQFPVFMARQEPCLVIFEACGSAHYWAREMEALGHEAKLIAPQYARPFVKRQKNDAADAEAIVIAARQPEMRFVEPKTVEQQSRAAVFRSRERLVHQRTADVNALRALLYEHGHVFPIGTRYLNRMTALLEDETSDLPELIREECEDLLAQIAEKTARIAERTAKLKTLASQSDKARRLQTMPGVGPLTAVAVEAFGPDMAQFKTGRDFAAWLGLVPRQHSSGGKERLGRMTKAGQADIRRLLIIGAMSRLNWLGQRTIAEGSWLSRMLARKPKMLVAIALANKMARQIWAMLTKNEDYKDPALAVAA

SEQ ID NO: 490375 - protein, 334 aa, unidentified
MWHVGIDLHRATVVLAAVNDAGEAMNAVTIRCEDTTAIVETVKKLGMFRAVIEASGTYRWLYDLLRPYGTILLAHPLRLRAMIQRRSKTDKLDAQLLANLLRINQIPLAYIPPEPYQQLRELTRCRARLARDQAEVKIRLRGLLARHNRQAPYRVPFGVRGVAWFRKQDFGPIENLVRDELLARLEHFGRQLAILDQQVTALQKAFPQTEVLTTIHGIGLYSALLIVAELGEVERFRTAKQVGAYAGLTSRVHQSGGHCYRGSITRQGSPWLRWILVEAAMKAIRDDAALKNFYTRIRKRSSAKIARVATARKLAEICWKRLRRWHSEHATEAA

SEQ ID NO: 490376 - protein, 416 aa, unidentified
MNAVGIDVSSRKSTVAVLRPLGEVVCLPFDVTHDIAGLASLVEKLKALDGETRVVMEHTGRYYEAVEKALHEAGLFVCAVNPLLIKEYGANSLRRVKTDKADAVKIARYALDNWADLRDFTPMDAIRYDLKTLNRQFQLASKQRTASANNLIALLEQSFPGIRKCFDSPVRSDGTQKWVDFAHSFWHVDCVRKQSFAAFCERYRKWCKRHAYLFKLSNAEEVYALAKRAVVLTPKSKVVKVLVQEAANQLISISRSVEVYRAEMDRLAAMLPEYPVVMAMYGVGKSYGPQLMAEIGDVRRFERKQALVAFAGIDPMPNQSGDKNVRSNKSSKRGSPYLRKTLFNVIRTYLQCAPQDEPVFQFLNRKRAEGKPFYVYMLAAANKFLRRYYAKLRDYFASLDTLQSVDPIPATLKASL

SEQ ID NO: 490377 - protein, 341 aa, unidentified
MQVTTIGLDLAKHVFQVHGIDAAEKVVVRRQLRRSQVMAFFEALAPCLIGMEACATSHYWARELTKLGHEVRLMPAKDVKAYVKRNKNDAADAEAICEAVRRPTMRFVRVKSAEQQGQLMQHRTRDLLMRQRTQVINALRAHMTELGIVAAQGREGTKALLAIIADAGDERLPVDARVSLIVLAAQLQALQTLVGSIEKRMIAQHRASESSKRLASIPGIGVLGASAITATATDPNAFRSGRDFAAWVGLVPRQDSTGGKQKLGPISKQGDRYLRRLLVVGAHSALRRAKQSPQNHPWLVQLLARRPFKVVAVALANKMARIAWVLLAKGGSYRVPRLAAA

SEQ ID NO: 490378 - protein, 373 aa, unidentified
MAYQHYWAGLDAGHLETAVCLIDAEGGILFEAICETKSGPIRDILRRFGVEAAQCLTIEAGNGTQMVRELRSYGFPVQVVDVRKSSKFLAIRRQKTDVHDARGLAELGRLARSMGSQVFVKPMEHQNIRTLINVRRTMLKNRARTDALIQSIFRLYGGNMKLLNGRGALAAEVNNQVRKMRQHGLEIGVNLQPLVEISEALREQISALDRQMRDIASNNPTCRNFQTIPGVGAVIALSFYSAIGDPHRFERSRDVGAYLGLTPTLYQSGVTSRRGRISRHGNKLTRMHLITAATVLLCRIEIESRLRTWGLELAQRVGFLKARVAVARKLAVIMLGMWKSGSPFRPDGTPSLFLQQEEAGLDPVLISGTQISL

SEQ ID NO: 490379 - protein, 340 aa, unidentified
MGQVSTIGLDIAKSGFQVHGVDAEGGVVIRQKLTRARLLKFFEKLSPCLVGIEACGTAHHWARELIGLGHEVRLMPPSYVKPYVKRQKNDMADAEAICEAVTRPTMRFVPVKSPAQQSVMVLHRTRSILIRQRTQISNAIRSHMAEFGMAAAIGRQGLQSLIEVVEDPADERVPLEARGCLAMLAAQLRLVNEQVLETDRLIRTNARSTEVGRRLMEIPGVGPLLASALVGTIADPRAFKTGRNLAAWIGLVPKQNSSGGKERLGGITKQGDRYLRQMLVVGALAVVRYAVRNGTRRPWLVQLLARRTPKVAAVALANKTARMVWAIMTSGERYREPLAA

SEQ ID NO: 490380 - protein, 394 aa, unidentified
MKLVGIDIGKNSHHFCVMDKETGELNVTPSSFSNNKEGFDFLINSLKPYSKKSTLLGMEDTGHYHVALLKFLLSNGYTVALINPKTTDLTRKMEGGITKNDKLDTITICDVLDTPERKKQYRITKVDRFDLYEQRQLTRHHHNLKEELNIYSNRLQKSIDLVFPEFNTLFGSKYGIVYMNLLKTFGSAEAIASTDIRTIRKCFEIKGRGCRISLTPEKLKECAKNSIGISSEVETIQIKHLVSQITLIKEQIAEIDKKIEEFSITNNSPILSIPGISHFSGTSILAELGDIGNYSKPSQIIKFAGVAPYHYESSQYNAQHTGITKKGSKYLRKTLYQIILPVIKYNPVFKKYYLLKISQGKGHRCAQGHCIRKLLRIIYHLLETGQSFDPALLR

SEQ ID NO: 490381 - protein, 405 aa, unidentified
MNAVGIDVSKGKSMVAIMRPFGEVVATPYEVAHTSGDLLDLAASLKKLKGETKVVMECTGSYYQPIAYALNEAGLPVSTVHAKLIHDYGNNSIRKVKTDKADAIKIANYGLSNWMELPRYVPEEDIRIMLKTFSRQYSKYIDIKTMLKNNFISLTDRTFPGVNELFASLPRKSDGHEKWIDFSLKFWHCECVSGLTPKAFASRYQKWCVREGYRFSQKKADDIYASACGHCSVMPRNDASKLLVTQAISQITAVSENIAVIASEMKRLAESLLEYPVVSQMFGVGDILGPQLMAEVGDVFRYRNKGSLVAFAGLEAPPYQSGKFESSSRSISKKGSPHLRKTLFQIAQIYLQRAPADEPVYQFIDRKRAEGKHYYSYMTAASAKFLRIYYARVKEFLLALDQSST

SEQ ID NO: 490382 - protein, 466 aa, unidentified
MKNNTTTLHDCTLEGIRFGGCGNSEAMVWKLGLDIELRAVAVAIQCGRGVIGPAVKWSREQLLQWVKEKRARGEAVHTVYESCGFGYTLHEQLSAAGANSLVTTPMRLNLERKRKNDRMDARELCVRLSRYLDGQSYELRPIRIPSRCEQQRRELGRQREFWKREVRRLENHGRALRIEHEHETLEAGWAGPRKWKRLAPQCSQFVREQLTPVVAQIRSAKAQLDRLSEQIESLVKKEQIPVGLGALTVSLIEGEVCQWERFAHRKAVGSYTGCCPSEHSSGPIQRFGAIDRHGNKHLRVLLVEAVWRLLRWQPHWHARQKYLLKLRHGSKKKIAVALARQLAIDLWRWRTGRASAIELGWNLPTLPLPEQPKPALVFTKPQVPRQSVPQGGTLLDAAADPKGSSLRMGAFHPQALPQVQARHHGRRSPLATARIGAGDREKPPHVNGKPPIAEQTDPWEKPQKQK

SEQ ID NO: 490383 - protein, 421 aa, unidentified
MSTPACAKFAAQIGLDWADTKHDFCLQPGRGGPREFGRFSHQPDEIDAWVQGLKARFGGPIAIALELARGPIVYALQKYDFIVLFPIDPSLLAKYRVAFKPSRAKDDPTDAELALELMLRYPERFHPLHSQSVAMRTLGYLVQQRRMLVDDRKRIVNRLCNALKQYFPQALDWFDHRDTPLFCDFLSRWPTLQQIKRSRVATLERFFHDHNVRRPALVTQRVDGVQRAIPLTEDAAVIQSFQLLATTLVDQLRILLQAIARFDAAIAAVAPTLPDYKLFSVLPGSGPHLAPRLLTAFGEQRERFQNAGQLQRYSGVAPVTQRSGKKSWVHWRWQCPTFVRQTFIEWAAQTINKSFWAGAFYQQQRAKGCPHQVAVRALAFKWIRILYRCWVTRTPYDESRYLKALQLRGSPLLAGLRPKTT

SEQ ID NO: 490384 - protein, 347 aa, unidentified
MNFYKVPHKYYCGVDLHSRTLYLCVVGQDGAVLLHRSLPCDPNRFLLAIAPFREDLVVAVECVYSWYWLADLCAREGISFVLGHALYMKAIHGAKAKSDRIDSEKIAVLVRGGLMPVAYAYPADMRATRDLMRRRLLFVRQRGSLLGHIQITHHQYNLEAPGKRITYRSNREGLGEGFADPSVRHTIAADLALADHYEVIIGELELAVLRQARVHDPNALVLLTSVPGIGKVLALTILYEIHDISRFPSVRDFASYSRLVKCEHRSAGKSLGTGGNKIGNAYLKWAFSEAAVLFVAKSEQGRTVLKRLERKYGKPKALSVLAHKLGRAVYYMLARKQAFDPQRFTAA

SEQ ID NO: 490385 - protein, 412 aa, unidentified
MQVVHPVCCGIDVHAKMLVACLILANGEKKKRTFSTMTAELLQLRDWLVAVQCTHVAIESTGVYWKPVFNILEDALTVILINPEHAHALRGRKTDVKDAEWLADLLRHGLLQPSFIPPPVIRELRELTRYRESVIREQSSVANRIQKLLESGNLKLGQVASDALGVSGRMILKALAKGESDPRKLAALARGKLKEKSLSLEQALQGRLTVNQRFVLGELLSRWEQLEAADARVTSEIDKYVQANPKLARARELLDSIPGIGPRVAEVIMAEIGIEMASVFADAAHLASWAGMCPGNKATGGKRLSGRTRKGNTYLRSALVQAAWGASLKKHCYLSSQFHRLVKRLGRKKALVAVGHSLLVIIFHVLQNDQTYTELGGDYFDRRHVEQQRDYYVRRLQLLGLKVTLEKLPQAA

SEQ ID NO: 490386 - protein, 485 aa, unidentified
MAKRKMSTFERLQKGEKLRRWERKELERKFQAEEPGWEVVHKDVAGIDVGNESHFVAVDPKCCPQPVREFGSWTAGLQEMAEWLKSCGVKRVVMQTTGVYWIPVENVLQAAGFHVAVVDARGTKNLPGRKSDVQECEWIRKLDTYGLLRKSFQAPESIRGIRTVWRLRDRLVKDAGRAVQQMQKALTTMNVQLANAISDVSGKTGMAIIRQIVAGERDPWQLAKLRDKRIQAREEERAHSLEGNWREDVRFELERVLESYDFLQEQIAKCDRQVEEYMGQQPTREVVKEGAAEATVGVAAGKRRRKKTAVKPPKNHPVFDLGAELTRLLGVDLTLIDGIKLMTAQVIYSELGPDLSAFADEGHFTSWLGLAPRRDISGGKVIKQHSGHVCNRVANALRMSAQALSDSDSYLGARYRYLKARLNCGLKAAKAMARYLACLVYRMLTKGQAYVDRGAAYFEQKRQDRDLKQLQRKAAALGMQLVPTA

SEQ ID NO: 490387 - protein, 472 aa, unidentified
MEFKFLVDWTKPAFYCGLDVHKYELAVAVYCKDDSESELLKTNVFSVDSTGLNQFWIFVSKFHPKGFAMEATGIYHHVIYRFLVKKRAHCEWGFNILVVNPADASGIPNRQKTDKIDAENLARYLAMGLLKSGKPVIEVIEDLKVIFRMALRIEKDRTALKNRIKKTLDRAGIRPKGMDLNLEWVRELLHYFLEGEANLGQVFNQIQEDLELLKSHRHKIFKNVSKFIPYFDFSLSPAQRSMIRQDLVELGFKTARKRLLAVEVDQLIFERPALRQHAFNLSTIPGISPFSAVWILAEIGNIHQFHSVKSFLSYCGCSPRIVSSAGKIYSAHLSRHSNSYLRTIFYNAAVVLCNLEKKESVLKEYARQVINRKRSVSMTLVYCIVAAKIARIVHALLRTSAPFNPRHGCDVDKRYLKDKGTEFSLTSKNLIRKARNSLKRVKDVQELGLLGDHVSILAEQLDLLLQRKKICE

SEQ ID NO: 490388 - protein, 467 aa, unidentified
MFAPGRRPGRPAKTRPPFVVLDPHAAGIDVGATVHWVAVPPGTDAEPVRSFGTCTADLEELADWLQACGVTSVALESTGIYWIPLFEMLESRGLVVRLVDARQTRGLPGRPKDDVRDCQWIQRLHSCGLLRGAFRPDDQVVVLRSYLRQRQMLITCASDHIRHLQKALEQLNVKLPEVVADITGVTGMSIIKAILAGERDPARLAKLRDQRCKQDEQAIARALYGNWRAEHLFCLRQALELYEFYQQQLAACDRQIDAQLQTFADQSAGAPMPPRPAGKRKMRRRYKGNVPGFDARARLYRMSGVDLTQIEGVEEGTALVLLCEIGLDMNRWPTEKHFCSWLGLCPQHKISGGRVLSRKVRPGVNRAAQALRLAARSLEHSLSALGAYFRRLKARLGAPKAITAAAHKLARLVYSLLKHGQAYLAKSLEEYEREHHERQLRNLRRKAHELGYKLVQPGQVASAPMPA

SEQ ID NO: 490389 - protein, 415 aa, unidentified
MAVDIVHERAAALDVSKKDAKVCLRLPGKRKGTFTSEVTTWGATTNQVLALREHLQAAQVTVVVMEATGDYWKPFYYLLEDGLNVMLVNARHAKNLPGRKTDVSDAAWLAQLGAHGLLRGSLVPPPPVRQLRDLTRTRTRFTWERSREVQRLEKLLEDAGIKLSSVASDICGVSGRLMLQALIDGRDDPTALAELAKRRLRSKIPQLVEALNGRFTDHHGFLARLHLEHIDRLTASIDALTQRIEAVIEPFRPQLELLVTIPGVARHTAEVIVAEAGGVIECFPDAGRLASWAGVAPGSHESAGKTKSARTRPGNSYLKGALGTAAFAATQANGTYLQARYRRLTARRGPMRALVAIEHSILTAVWHMLTTASPYYELGGDYFARLDPERAKNRIVRQANALGLTVRFEPIETPA

SEQ ID NO: 490390 - protein, 369 aa, unidentified
MADHKEAFVGIDVAKLRNAIAIADPGREGEVRFFGEVDASDTSMRRVIQRIAAKFDRVDFCYEAGPTGYGLYRLIRLLGHECTVVAPSLIPRKPGDRVKTNRRDAVSLARLLRAGELTAVWVPDEGHEAMRDLVRARAAAVETQRAHRQQVSSFMLKHSRVFPRPKAWTMRYLRWLQEQKFDHPAHQIALQEMIEAVRTSKERVLRLEAAIEEFVPQWSLAPVVQALQALRGVDLIVAVTFATEIGDLSRFENPRQLMAYLGLVPSERSTGETVRRGSITKAGNGRVRHMLVESAWTYRHPPKVGKAKLYKLEQTSPRVREIAWKAQTRLTARYRALSAKGKKTTIVCTAIARELVGFMWSVGQEVQPA

SEQ ID NO: 490391 - protein, 395 aa, unidentified
MVGCVRVPRAPRGDRQAETRTFATTLRGLEELRTWLTAHEITHVAMESTGVYWRPVYAGLEGAVQVLLVNARHVQMVPGGKTDVRDCEWLAQLLECGLLRGSFVPPPAVRDLRDLTRLRKALIRERGHHVNRIEKTLELANIKLGTVVTDIMGKTGRAILEALSAGRDAPEPLVALAQGSIRTKKQAALREAVVGRLTPHYAFLLRQHLSLIEALDLHIVTLDARIEAAMAPFAEAAALVQTMPGVATRAAQAILAETGVDMGVFPTAGHFASWARLCPGTHESAGKRRPTTTGQGAVWLRATLQEAAWAAARTKRSYYRALYHRLKGRRGAKKAIVAVQHAMLVALWHMLKRRVPHHDLGADYFDRRNTARLRHHHVRRLQQLGYQVVLVEEAA

SEQ ID NO: 490392 - protein, 410 aa, unidentified
MQALVERGCGLDVHQATVVACLLIVRKDGKVQKQMRTFGTTTQELLSLREWLLSEGCTHMAMESTGVYWKPVYTILEGALEIVVANAQHVKKVPGRKTDVKDAEWIADLLCHGLLRSSFVPPKPIRELRDLTRYRRKLVESQAAERNRLLKLLETANIKLASVATDVFGMSGRLMLRALVEGKATPQEMAELAKGKLRKKIPELAPALEGKVEEHHRFLLRLQLDRLEAAEKDLAVLEQRIQEKLKPYEAQLTLLDEIPGVDWTLAAGIIAEMGVDMSVFGSVSQLASWAGVCPGNNESAGKRKSSRIPKGNVYLKTALVEAANSAAKAKGTYLRDKFYRLKARRGYKRAAVAVAHKILVAIYYMLSHRVCYNELGDAYLDKRNKHQLTRNLIHRLERLGYSVTLEQKAA

SEQ ID NO: 490393 - protein, 409 aa, unidentified
MLFAGIDWSEKFLDFHLRTAGGKVLVEGQVRPSVEGMADLFAELESHASASEIGIAIETAHGAWVQALLDRGYQVYPLNPKTVERFREALSANGVKTDKIDRKVLAMFLVTFHQENKPLRPDDPEIIQLRILCQDRLRLVEEHTAKVNELQAVLKCYYPAFMGLFGGLDSNIALGFLQQFPTQKQMQKLSERRLRNWLSRHHYSFPKRLDGMVATLEQPVLPVAEHLQEAKKTLICYLARSIKMLNAEIAERDKQINDHLDGLPESDWVRSLPGAGKVLAPSLLACLGRDPQRFCSVGEARALMGTAPVTKASGNFRVVHFRRGCWKFARRTLQLFADQSRHQCPWAQTFYEKQRNSGRKHHAALRALAHRWLKILLAMKQSGNLYNEDIFVSSQRRYLLKMSMLKTAN

SEQ ID NO: 490394 - protein, 406 aa, unidentified
MNYLGIDVSKANSRYVFLDNDGEKLVKPFTLDNGHNDFNKLLDRLKELALLPDNLLIGIEATGIWWENLYSLLTEHKFKVIVLNPHQTNKFREALRIKAKTDDIDAYVIAGLLRSQEYASSYIPEESIQCLREITKLRFELVKDRQNYERQTNALLGLLFPELAQTAIKNPFAVSSMAILKAYPTAKHLAEAKPKNIEKIVRSIKGNNFNIKEIQSLIECAQKSIYSGRAKHDRGLNLIILLTQVESLQNAIAQLDERTNNILSPSDSNDANSFPGANLLSIPGVGPKTLAAILSAVGSDGQAFPDGKHLIGHIGFFPKIYESGETRHDNIMSNRGPKYLRAALYMSAVACLKHNPEFKALYDRKVSQGKTAKQSLVYVAKKLAHLCLSMLKSGEDYNPSRVFMPA

SEQ ID NO: 490395 - protein, 368 aa, unidentified
MAYTGEPECCPWEAAYGLPTLNERSPVMNETLFCGVDLHSDNAVYVITDEQDRQLFSKRLPNDLAVVLGALEPYRDRLKAVAVESTYNWYWLVDGLRDYDYPVCLANPAKMEQYDGIKEANDLTDAAFVTHLLRLGVLPTGYIYPREDRPVRDLLRRRTLLVRYRTSLKQSLQNMVVRQTGRSLGWRKVRDLDNEARAELLGDDDCLPFVADQQVELIELLDERIKRFEQKVLEHAHLRSAYECLLTLPGVGVILGLTIMLETGQIGRFKRVGDYTSYCRCVRATRSSNGKKKGSNNSRNGNAYLSWAFVEAVHHAIRCCPAAKKFYDRKMAKRNGALATKALAAKWTKAAYYMMTRQESFDLARVFG

SEQ ID NO: 490396 - protein, 361 aa, unidentified
MRMASPSIAHDPAVGVTVGVDTHGEIHVAAAFTSDLGRPLGHLEVPTTPTGYGRLLSWAQAFGDGTPRFGVEGTGAYGAGLARHLRRAGCTVIEVNRPNRQTRHARGKSDPVDAEAAARAVLSGEAASIPKSDGDRVGMIRTLRVARRSAVHSTTQIINQIHALLVTAPADLREQLRSLTGRTLIETLAAFRPGPITTPTAATKMALRALARRHQYLGEELATLNVELERLTQEVAPELCALKGVGPDVAGALLVAAGDNPERLRSEASFAHLCGVAPLPASSGKTTGRHRLNRGGNRQANNALWRIVIGRLRWHEPTKAYVARRTSEGLSKKEIIRCLKRYVAREVFRALVAKTELARAA

SEQ ID NO: 490397 - protein, 319 aa, unidentified
MTRIICGVDIASSSLAARIGRDGTASTFANTQPGIAELAAFCESHSVELVAMEATGGYEQRAFAQLSEHGLPVAVVNPRAVRQFAQSMGALEKTDAIDSGMIAWYAETKKSQPLCLAPKTQLELRARVTRLRQLTEMRTAQLNQQRLVIDPAIQKGFRKMLQFLGQQIEELELAVAGLIQSDPLWRELDQAFRTIKGVADRTVARIMAEMPEIGTLSNKTISKLAGLAPLANDSGKHQGRRAVRGGRSAVRDILFIVGSVVARYEPDFIVFQQRLRAAGKPPKVVRIAVAHKLLVRLNAKAREVRRLAVAHAPSALTCA

SEQ ID NO: 490398 - protein, 408 aa, unidentified
MKTLHKRCAGLDVHKAEVVACLRLISKRKVEREVRRFPTTTQGLLVLTEWLESAGCTHVAMEATGVYWKPVWHILEGHFVLILANAAHVKNVPGRKSDVNDANWLADLLAHGLIQSSFVPPPAIQELRDLTRTRKQLTREIVQHVQRIQAVLEEANIKLCSVITDIMGVSGRRMLKALIAGETDAEKLAALGHERLGCTRAELVQVLTGCVREHHRFLLEQHLRTIEQLEDSVAAFDARIETALSPFHDIVERLKEVPGLGATAIETVIAEIGIDMSQFPSAGHLLSWAGFVPRLDESAGKRRSTRIRKGAPWLKPVLVQAAWGAARKKNSYFQAQFLRLKARHGAKKAAIAVAASILTTVYHMLRDGTYYQDLGPEYFTRRNPAQAAARLANRIRNLGYHVEIRAAA

SEQ ID NO: 490399 - protein, 343 aa, unidentified
MQVVTTVGLDIAKSVFQVHGVDGAGQVVIRRQLKRRYVLAFFEKLPACLVGIEACASSHHWSRELKALGHTVRLMPPAYVKPYVKRQKNDATDAEAICEAVTRTNMRFVATKTPEQQSGLTLHRTRHLFIRQQTAVINVIRAHLAEFGIVAPVGRKGVEALLDVVANPTDKRVPVIARACLAALGAQLRRLKEQILEFDRMIMTWHRSHEASRRLDAIPGVGPVLATALVASIADPKAFRSGRNFSAWIGLVPKQHSSGGRDRLGSISKQGDRYLRSLFMAGALAVIRYARIHGTKHRPWLTALLARRPTKIAAIALANKIARTVWAMMARGERYKEPVALAA

SEQ ID NO: 490400 - protein, 340 aa, unidentified
MKNLFIGIDFSKEKIDATVISAIGLVEQSARVSSEFKTTACGYRQFLKWVEEHSNGIDMSSWLFCGENTGDYSKPLCNYLYGKGYDMWLENAKCIKDASGLRRLKTDRADSAMIAEYAMRNHDRALYYRPLSDSLSQLRELFLYRHMIVRHKCSFQVRKEEKRMTMEKSPSRTLISNTGKHLITEFDKAIAKLDKKIKEIIESDKELKHTYAIVTSVPGIGTQNAVCLMVYTNNFHKFDFDARKIACYYGVAPFGKESGTSVRSMPRTHYMANRLIKSTLTQSALIAIRFCPHLKQYFTRLISKGKKMQVALNNVKNKLLHMVTAMVKNDMLYSPDYSNA

SEQ ID NO: 490401 - protein, 340 aa, unidentified
MILIGCDFHPSFQQIAMLDMETGAITEKKLVHKGTEARSFYESLPKGTRVGLEASGQSQWFERLLEECGHEVWLGDAAVIRSRETRKQKTDRRDALLLMDLLAKDEFPRIWAPSAEQRDLRQLVLHRYKMVRMRVRIKNQLQALALNQGLQKKRRLWSAAGRMELAELSLLPWTKQRREDLLAMLDEFDRRIDVLDRAVCQQAAGSAAAKRLMTHPGVGPVTALAFVLTLGPISRFPRGKAVASYFGLIPSEDSSGGKQRLGHISKQGNAFLRGLLVEAAQSAVRLDPEMGRQYKRLAQRKCRSIAKVAMARKLAVRLYWMLRRGIDFAQLIQGSPCGTA

SEQ ID NO: 490402 - protein, 350 aa, unidentified
MVHAGLDLSRRRLDVCLLSERGEVVRELAVSPDGDGLAGLVARTRSVGPVRGVIESMTGARFVHDTLEQLGWDVRIADAHRVKGLAPLACKTDKTDARVLAILSHRELIPEIWLPDPRIRAEREQARFRLHLVKHKSMLKNRIHATLMSFGHPCPVSDLFGHAGRELLDSFEIPQPWRATIDASLYMIDYLESEIAALERTLRAGETDHPYLPVLLTLPGVGHVLAFTIAAEIGDITRFSSAKKLVGYTGLCPIVRQSGDSDRRGPTSKQGPKYLRWALLKATLHAVRHDAYRDRYQATKNRLGRQRGAKVAQIDIARKLAEATWHTLTYQQPFNPTSQAAGGATSVLAA

SEQ ID NO: 490403 - protein, 437 aa, unidentified
MSEKKSVELRVSVDVGYRRHSVAIGLPSGEVLEEFEIAHRPEGFAEFFSRIERHQKVRDYEVAVAMEGFNGCARPLDAMVRRRGYRLYNINNLKLARFKEIFPGAAKSDRIDARKGLELFQLSDHLPLAKEVLQEVKGTPRENEVLKRLTRRRRRLVDERVRVISNLQTDLQAVCPGLLEITKNACNQWFLNFLISAPTLPQLARLRPATLRKVPAVGRKYASLIEDWQKRAHFSEEVEWVSEMIQEDAQRCLDLDEKIKALRAKIKEVAKDSKIAKTLLSIPGFGTICTAELAGEIGTVERFSKEGSLALYIGMSTLDNSSGKYQGSKQPKHVNTRAKAAMMVALDRHRKYVPESQRYYEKKRSEGKKHNQAIRALGRHLCRIIYKMLTEEREYEMRPEKGNTKSKVSPRSLIKPQIRKPKISAKGKNNKIYQQRA

SEQ ID NO: 490404 - protein, 357 aa, unidentified
MERYIGLDAHGASCTFGVIGPSGRKLRQDVVETSGAALVEYLRRIPGRKHLCLEEGTQSAWLYEILSPHVVEIVVAGITDSRGQKSDVLDAFRRAEELRTGTVKQPVFKAPRQFSRLRELSRVHSMLVRDVVRVQGRLKAMYRCRGISTPGQRVYSPSGRESYLRKLPASCRWATATLHETYDRLLDLKQAAERELLAEAGKHRIAKILATAPGIGPIRVAQLLPIVVTPHRFRSRSQFWAYCGLAIVMRTSSDWVQTRTGGWVRARVQQTRGLNRNHNSRLKDIFKGAATTVITRLPSDPLHQHYLRLTSAGTKPNLAKLTIARRVAAIVLRMWKDEKEYDPSRLEQQERLASAVS

SEQ ID NO: 490405 - protein, 349 aa, unidentified
MVVLGIDAHKRNHTVVAVDENGRKLGERTLGTTTADHLALLAWAEQFGTDLLWAVEDCRHLSRRLERDLLGAGQRIVRVPPKLMAHVRDSARSYGKSDPIDALAVARAALREPDLPTARLDGPAREVRLLVSHREDLVAERTRVINRLRWHLHELDPSWQPPVRSLWRPKHLAATATRLDGVSGLVARLARALLERCSAVSDEIRELDRELEPLVRQLAPTLIELCGCATLTAAKIVGETADVERFRSRHAYARHNGTAPVPVWSGNRERHRLSRIGNRQLNAALHRVAITQAHYHPSAREFLQRRRAAGDTKTESIRALKRRLSDVVYRALVADATRIGRPSPSTVAA

SEQ ID NO: 490406 - protein, 430 aa, unidentified
MEIVYPRSCGVDVHKSFIVAVICISESVKPKYIKKRFSTFNNQLIQFRDWLVENNCQNVCMESTGKYYIPVYNALEGHISNVVVANPKWVKAIKGEKDDNKDAKWIADLFKFGIVRSSYIPEKDIRVLREFTRYQYKLVNMRSSEKNRFQNALTTGNCKLDIVFSDIFGKSASAIVDTILSNDPYTSEDILSKVHAGCKASHEDILSAVEGIQLNQFQKARIKIVQKHMEYLDSLLDEIQHHINLMVANYEEYIQILCTIPGINRKSAITIISEIGTDMSQWSSHRKLAAWAGLAPGCNESAGKKKSVKVSKAGVYLKPCLVQVAHAAVKDKECEYYADKFNKISKRRGKKRAIIAIARKILIAVYHLLKTGEVFNPTDMTDVETTKKQRIEYVKNNLRNAFNQLSRTGLSEAEILQLIRKGSKNSPQIE

SEQ ID NO: 490407 - protein, 313 aa, unidentified
MSQNNTSILYVGLDVAKLSLQLHLAGRFHSLANDPKGHAQLLKLLRGHPGAHVICEATGGYEQPVVRALQAADIPVTIVEAGRVRYFARAQGQRAKSDPIDSAVLTEYGLTFKPAPTPAASARQRRLADLSQRRRQLIQARTAEHNRAEHYTDPLCLRQDRQFQKLLEKQIDECDQAILTLIAEDAGLAQKAKRLQAIPGVGPVVAATVLAEMPELGKLSPQTAAALAGVAPYDRDSGKLRGIRHISGGRRSVRCALYMAVLSAVRHDRILKEFYTRLRAAGKKPLVALTAAMRKLVALMNHLLKNHEFQLAN

SEQ ID NO: 490408 - protein, 346 aa, unidentified
MDQIIRIGMDTSKHFFQLHGVDASERPVLRRKLRRHEVLVFFAKHSPTIVGMEACGGGHYWARELCKLGHEVKLIAPQHVRAYIKRNKNDGRDAEGLCEAMSRPTMQFVPVKTEEQQAALMLAGVRQQLITRRTQLGNAIRGYAAEFGLITAKGLIKVEPLLAQIAQDESLPALAREMFTLQGRDYARLQVELKAVEARLMAWHRANPDSWRLAKIPGIGPIGATTLVMKAPDPRLFRSGRHFAAWIGLTPKDHSTAGKTRLGKITRAGDEMLRSVLVAGATSVIQQAKKGRGRPSPWLVALLGRKPPKLAAVALANKTARIAWKLLMTGESYDGASMPVASALAA

SEQ ID NO: 490409 - protein, 305 aa, unidentified
MFTFIQSKQTVVGTIDGVGLKKETRTFGATTRSLTELKEWLEKAGITHVAMESTGVYWKPVYNILEPSGMTIWVVNARHVKYVPGHKTDKRDSKWLCKLLLAGLLKPSFIPSREQRELRDLTRYRRKLIEQIASEKNRVIRLLEDCNIKLSSVLSDTHGAVGTKLIDKLCKTGKVSMEDIEEVYHGKLKASKDEIYAACEGVVTKHHVFLLQRIKENILSCESSIFKINSQIKIILSPYQNVLELLKAVPGLDTKSSEDLIAEIGLDMSVFPTEKHLASWCGVAPGNDESGGKKKAHASPTATSK

SEQ ID NO: 490410 - protein, 337 aa, unidentified
MRYIGVDLHSNNLMVCVLSENEEPTFKKYELAKLVEFKEFLEAEDRIAVEATSTTRFFYSQVAPSVTECVVVNPSQFEIIKKSYKKTDKNDALNLARFLSNGQLPSSRMKNELQAEVNSLATTRDKFVKLRTILLNKIHAHLKGNGYPSRKEAYDHPANLNKVLDLNWSAAVRIELEVLINEILNLTGGITKLEKEISERGAELEGSENLNSIKGIGKYSAAVLLSVIGDINDFADEDKLASYFGIVPRVSNSNQAQHHGSITKCGSKLARTVLVQCTLTAKRFSPYLKQYYERIKARRGSGKAIIATARKFLGIIYRTLKYKWVFSDFPNFVLADQ

SEQ ID NO: 490411 - protein, 401 aa, unidentified
MKRLSGGIDVGSEFHHIIILDEEDNFLYNQKVAHKLNEFTESIKLFRKIEKQEGGKISFALEGKNGYSAPLDRILLDQGFTLYNVDNFKLKRFREAFAGEWRDDERDSLMLSKMLKLKDYINSEKEKVFIKIEKPSPLTESLKLLSRHQQTLIDEGVRLTNRLRKKLLEVCPQILELGKLKNKKIIAILAKYPDFSKYKRITLCSLLKIKGIGKKGVPFLLKRLNNIEYIPGLTDIYKTIILSYAQRILELRKEIKDIDKSLDEIGEKSKEINHLKTIPGVATKLASRFIGEIGDINRFPSEKQLAIYCGIACVDNNSGKVIKAKAVYKANKICKQTLITMAGCSIRSIYQCKAYYLKKRTEGKNHNHALRCLARQLIKVIYRILTEDREYIVRKELRKAA

SEQ ID NO: 490412 - protein, 469 aa, unidentified
MTPRIQKNLRQRPSPEPLRVTHRHAAGIDVHAAAHWVAVPPEDAPPPPANHPTNLPPNVRRFGTCTADLIALADWLRQCGVTTIAMESTGIYWIALFELLESRGFEVYLVEPRQSRHAPGRPKTDVLDCQWLQRLHSYGLLSASFRPAEQVVVLRSYLRQRQMLIRYAGQHVQHMQKALEQMNVKLTEVVNDVTGVTGMAIIQAILRGQRDPLELAKLRNDKCKRTQAEIARALYGNWRAEHLFALKQAVALHTFYRQQLRECDLQLQAYLGTFVDQSKGQPCPRRPRRRTKSVNEPAFDLESALYRMAGVNLTVLEGIDPNTALVLLSEVGPDVSRFPTVKHFTSWLGLSPQHQGSAGKIRSRRVQRGASRAGRALRLAVQGCYHAKHALGAFYRRIQARAGAPKAVVATARKLAERVYRLLKYGAEYVCQKIEAYEAAYKARLVKGLSRRAAELGYRLEPTTATTST

SEQ ID NO: 490413 - protein, 392 aa, unidentified
MKTNAIKEGTVEVAVQGHKTHQLIKLGVDVHWHEYVVVRQIDGSSPQSAQRFSPEGFVAWAARQTQQAEQVWCCYEAGPFGFVLHKQLERLGVRNVVVRPRNWDEYGAKVKTDRRDALALCSSLDRYLAGNTQALAVVRVPTDEQEHSRSQTRQREQLVSERKRLGAQGLCAARYYGYDLPDQWWRPRRFAALQSQTPDFLLELLARWQRLLLAIDEELDSLGGLIESAQQQMLPTGLGALTAQILDREIGEWNRFKNRRQIASYTGLVPSEHSSGQTQVRGSITKHGNPRVRHILIEAGWRLRQFQPEYRAVKQRQAAFDSAKQKGNSPARKRLGVALSRQFIVDWWRIKTGRTTPAQLGLQMSWPTCPHLPSKPKPASDASVQPNTQPID

SEQ ID NO: 490414 - protein, 417 aa, unidentified
MEYPPDTLPAVPPGGVTCGIDWANDDHAVCVVDLAGKIVQRFIAEHTGKGLAGLVRQLRRAGVGEVAIERPDGTVVDTLLEAGLTVVVISPNQLKNLRGRYGSAGNKDDRFDSFVLADTLRTDRARLRPLLPDSPATVTLRQACRARKDLVGHRVAVCNQLRAHLKLASPGAVGLFRDLDSPISLAFLARFDCQDRAGWLTPRRLAAWLKSQGYPGRKDPAALHARLAAAPRGAVGDDGAAKAHITRALLAVLASLVQQIKALDAQIAEQLALHADAPIFTSLPRAGTIRAARLLAEIGDCRARFPTPEALICLAGVAPSTRKSGKTTYVDFRWAADKQLRDAVCDFAGDSRHASPWAARLYDDAIARGKDHPHATRILARAWLYVIWHCWQNRTAYDPARHKALQRILTGQKPAAA

SEQ ID NO: 490415 - protein, 340 aa, unidentified
MPLYGGIDLHANNSVIVLLNEQDEVIYRKRLPNDLPTILEQLAPYHPAMEGLVVESTYNWYWLVDGLMEADYRVHLANPAAMQQYSGLKYTDDHSDARWLAHLLRLDVLPEGYIYPKAARAVRDLLRKRAHVVRQHTANVLSVQNIMARNTGARFSVKRMQELTKQELTTLLAEETQVLAVTSSLVVLDCLRQQITMLEQTVQKRLHHTLSYEQLLTVQGIGTILAQTIMLETGAISRFPTVGNYASYCRCVDSTKMSNGKRKGTGNVKNGNPYLAWAYMEAAQFAMRFQPEAQRFYQRKLAQSRNNTVLARKAVAHKLSRACYDIMRDLVPFEATKAFG

SEQ ID NO: 490416 - protein, 435 aa, unidentified
MPSVRRTMGKGKAVHARDNSSGQDEAGSNRKVAVKDLHGTKPWQTADWRVERQSRIRKEPAMEGITFVGLDAHRDWISVAMLRSAHDVPIEWRIANQAPAIRKMLRRIEGEAPGEVRFCYEAGPCGYALQRQITAWSDSSCMVIAPSLIPGKPGERVKTDRRDAKKLVFLFRAGLLTEVQPPSEADEAARDLCRAREDAREDLVRSRHRLTKFLLRRGLVFTAGKRAWTQAHRQWLRSLRFDQVWDQVAFSDYLFAVEHLEGRLDALAERVEELSHEARYAGAVGVLRCFRGFDTVTATSIVVELHTFHRFASPRKLMAFLGLVPSEHTSGQRRRLGAITKTGNSHVRRLLIEASWSYRHPPRLGTLAKRRKGQPARAIALADRAMQRLHRRYLRLTMRGVPPQKAVTAVARELAGFVWAALAQVATTTRLAEAI

SEQ ID NO: 490417 - protein, 412 aa, unidentified
MQTLIERGCGLDVHQATVVACLLMVRRDGKVQKQMRTFGTTTRELVGLREWLLSEGCTHVAMESTGVYWKPIYAILEGALEIVVANAQHIKKVPGRKTDVKDAEWIADLLCHGLLRSSFVPPKSIRELRDLMRYRRKLVESQAAERNRLLKVLETANIKLANVATDVFGMSGRLMLRALIAGKATPQEMAELAKGLLRKKIPELELALEGKLEQHHRFLLELQLQRLEAAEKDLAVLEQRIRQMLEPYAAQLALLDEIPGVDWTLAAVIIAELGVDMTVFGNVSQLAAWAGVCPGNNESAGKRKSSRIPSGNVYLKSGLVEAANAAARAKGTYLRDKFFRLKARRGYKRAVVAIAHKILVAIYHMLSQQVSYNDLGDLYLDKLNQNHLTRNLVHRLERLGYAVTLTLQQKAA

SEQ ID NO: 490418 - protein, 461 aa, unidentified
MANPDREQTTGGDEAVDGFPVLRPNVAGIDVGSTQHWVCAPTRTGNGREVAVFPATTPGVEHLVAWLHERGVVSVALESTGVYWIVPHEMLEGAGLEVVLVDTRALGRVPGRPKSDRRDCEWLQRLHSCGLLRSAFRPAEPVCQLRTLVREKGTLVAERSDWLRRLQKSLDQMNVRVHRAVSDLDGVTGMAIMRAIVAGERDPHRLAALRHGRCQKSEAEIAEQLTGHWRADHLFSLQQGLKMYDTITERLADYEREIERQLAAMAPPDRRDAAAPPSLPPTKAQAIKKRGQDPLRHALYRVSGVDLTTIDAIGVETVSVVLSEYGADLRRFPTEKQFVSHVRLAPDHPTSGGKPVQHRKKPSSASARVGAALRMAALSLRHTQTALGAYYRRIAQRAGADVAVFATARKLAQSIYRLLRWGQPYVDEGAAAYEKRYHTARVKRLATTAKDLGYLLVSVEA

SEQ ID NO: 490419 - protein, 352 aa, unidentified
MTEYVGIDWAYRRAAWCAKSVGGAVSAEGFTPADEDGLAKLVLQLGSDVKACVEMMSGAVWVRDRLRAAGWQVEIADARRVKGIAPLACKTDRVDARVLAELCRRDLVPALWIPSLEERELRERLRRRMHLVRLRTSAMNRVFGLGTQWGLRLSSERLRRKGGLELLARSGMPAVWQRSIEEALAVIDLLDQRIAPLEHELKPIARADRDVALLVTIPGVGDLLALTLAAEIADVSRFPSPRKLVGYAGMAPAVRQSGDRSTSGLPLSKAGSRTLRWAAVEAAQHAWRESNPWHGLYTDVAKRSGGNAAKSAVARKVLTAAWHMLSLDEPFKPSRPRGTRTVPASSISVLAA

SEQ ID NO: 490420 - protein, 472 aa, unidentified
MKSKSSRKRNPVDPVAEEIPDAEHELAIERVAAIDVAKASGKVCVRLPGKTGRRFSRVWDVPARTGAVSELAEQLIESGVEKVTVESTSDYWRIWYYLLEAAGLDVQLVNARDVKNVPGRPKTDKLDAVWLAKLTEKGLLRPSFVPPAEIRQLRDYTRLRVDLTRERTRYWQRLEKLLEDALIKISAVASTLDTLSTRDMIEALIAGERDPGRLADLARGKMKAKRSELIAALDGRFDDHHRELARMLLDQIDTLTAQIATLTSRIEQLLAAMPDTRSRGDGGTGGDPDRPSTGHGVEPETAARFTDATLLTPVERLDEITGIGELNAQVVLAEVGLDMTRFPTPAHLVSWAKLCPRTIQSGPVTRGGKTGRGNPYLKGALGEAAAAAARTDTFLGERYRRIVKRRGKLKALVAVARAILVVIWHLLANPEARFRDLGPDYHTQRIHTERKLRNHIAQLTAMGYRVTLEPAA

SEQ ID NO: 490421 - protein, 412 aa, unidentified
MELLHRRCCGLDVHKETVVACLRLVSDGKVTTEVRTFQTTTADLLRLSEWLAANECTHVAMEATGVYWKPVWHILDDGEFKLVLANAAHVKNVPGRKTDVNDAMWLAELLAHGLIRASFVPDAQTQEMRNLLRTRKQLVREQSSHVLRVQKTLEDANIKLDSLLSDLMGKSGRAMIEALIAGETNPVKLASLADRRVKASPEELREALRGRVTKHHRFLLRLHLNQIDTLDAAMATVDAQVEANIRPFRTAVDLITSIPGIKNLGAHVIVSEIGIDMSRFPSAAHLISWACICPGNDESAGKRRSNRMRKGAPWLKATLLQCAWAAAKKKDSYLQAQFYRIKARRGPKKAIMAVAASILTAIYHMLKDGTMYQDLGCNHFNRRSTDQQKRRLVKRLADLGYAVEIKPLAAMA

SEQ ID NO: 490422 - protein, 326 aa, unidentified
MTAPKLGIDISKKTFDVALIRDPETMKVKQRQFSNTPDGFQALQTWLAKQGVRQVHAVMEATGAYGDALAECLHGAGHLVSIVNPAQIKAFGQSELQRNKTDRADAALIARFGWRHNPAPWTPPEPEHRELQSLVRHLDDLIEQRTQVSNRLSEGRLTKAVRESWEEILQALNERIAEVKRQINQHFDDHPTLKRQRELLDSIPGIGPETAGRLLAEMPQLGEFDSARAAAAHTGLTPKRHQSGTSINAPARISKIGNSRVRYALYLPAMAALRSSKEFKELAARLTERGKKKMQIIAAAMHKLVRIAHGVLKNQRPYDPNYAAAD

SEQ ID NO: 490423 - protein, 344 aa, unidentified
MARMYCGLDAGSSVCHIAVQAEDGTLVERREFQTSEANLIEVFERIRGELHVHVEASELAGWVHGILRPRVARLVTSHPPENKWISGDSQKSDPRDALKLADLIRRNAPVKEVYYSDSAPRRAFKMIVQHYDDLTDQESRIKFKIKAVYRQQGIRVTGDTVYAPAGRSAYLARVPMEAVRTVLQHLYQVLDQTLRTRDQAKAQMGEAAKLFPEIERLDKVPGVGFVGACQFSAYIQNPNRFSTKRKLWRYCRLAVSHRSSDGHSLGHPRIDRSGVGRLKAMSRSAFLGAMRRKDDNLFKRCFRQSWEKSQNQDHARLTTQRKIVSVLRALWRDGTDYNDDIEKG

SEQ ID NO: 490424 - protein, 348 aa, unidentified
MIVLGADMHKRSHTIAAVGSSTGELLGERTVQVGVRGFGALLVWARALGSERVWALEDCRHVSGSFERFLIERGERVLRVPTRLMAAARRSGRERGKSDSIDAIAVARAALREGLTKLPAAQLEGPELDLRLLVDHRERLVRQRVALNNTLQWHLHDLWPELTLPGSALFSTKWSTRIGRRLARAEQSTRVRIARDELRRLRELTQTIKSLEAEIAALVASIAPQLLSEPGFGPLTAAKLVGEIAGASRFASDAKLARSAGIAPIPVSSGKTNRHRLDRGGNRQINAAIHRIAITRARCHPETQTYLTRKTAEGKTNREAIRCLKRHLARRVWHLLQPATPTPSPPTP

SEQ ID NO: 490425 - protein, 423 aa, unidentified
MEVIHSRCAGLDVHKETVVACVRLAAGDKITREVKSFETTTSGLLGLLAWLSEQGCTHAAMEATGVYWKPVWNILSDGDFELVLANAAHIKNVPGRKTDVSDAAWIADLLAHGLIRSSFVPEQQVQELRELLRTRKQLIRQQTSHILRLQKTLEAANIKLDSVITDIVGKSGRAIIGALIAGETNPVKLAALADRRIKASHQELREALRGRVTRHHRFLLHLHLQHIDFADAAIRDIDQSVQALITHMDEEVKVGQAPFRTLIALLVTSPGIAPLAAQAILAEIGADMTRFPTAGHLLSWAGLCPGNNESAGKRRSTRLRKGNLWLKTMLVQCAWAAKRKKDSYFRAQFYRLSGRRGPKKAICAVAASMLTTIYHMIKDGTEFQDLGADHFDRRSKHVKAERLVTQLARLGFDAKLTPVAQAT

SEQ ID NO: 490426 - protein, 340 aa, unidentified
MTMSAPWTRVNLVVPNQPKRLGRKEPNKIIIGCDYHPGFQQIAYVDTETGELQERALQHREEAEKFYRELAAQGMKVRVGMEASGHARWFERLLAELNVDLWIGDAAEIRTKRVRKQKTDREDARLLVRLMLEDRFPRIWVPSWENRDLRQLLWHRHRMVQARTRLMNQLQVAALNEGLRRKKALWRGTGRQQLEGFRLAPWASRLDRLNPTIEELTKAVEEEVEKCPAAQRLKTHPGVGPLTALAFVLIIGKADRFRCGKQIASYLGLVPSEESSGDRRRLGHITKQGNSLLRFLLVEAAQVTVRGDQQWRAQFFHLAMRRGRKIAKVAMARRLAVRLY

SEQ ID NO: 490427 - protein, 339 aa, unidentified
MERRYVGIDLHRRRSVIVTMDEAGEVLSSVRIPNDPVAMSIAVAEAGEGAEVAFEATYGWYWLSDLLQADGHHLHMAHPLAMRGMTSHRRVKTDWKDATLLADVLRMGSLPEGWIAPPELRELRELVRYRAKLVALRSGLKAQVHAVMAKNGILPARAEMFGPGGQAQLDAIGRDVAMNFTIRLESLRDLVEIYDREVAMLEREIHRQLKDHAGYQAIQELVGVGKVIGAIFVAEIGDISRFSSPEKLTSWAGLTPKHRESDLTKHQFDITKQGNKLVRWAAIEAVTGMRGGPKLKADYERIAERRGKYRARVAVARKLLVLVYYGLRDGKIRCLEGAA

SEQ ID NO: 490428 - protein, 344 aa, unidentified
MGEVSTIGLDIAKAVFQVHGVDEAGTVLIRKRISRTKMLEFFAELPRCLVGIEACPSAHHWGRELQALGHTVKLMPPSYVKAYLKRGKNDANDAAAICEAVTRPSMRFVPIKTTEQQTALMLHRTRQLLVRQRTMLSNALRGHLAELGIVSAKGRNGTGELLRIIADSADKRVPPAVRGILDVLARQYSAIGTEIASIDKSILALHRSCEASRRLAEIPGIGPIVATALVAEIGDWKTFSSGRSLAAWIGLVPKQHTTGGKDRLGSITKQGNRYLRWLLVVGAMAVIHSARKHGTQKRPWLGRLMERRPTKVAAVALANKIARMAWAIMVHGDRYKEPKLLLAA

SEQ ID NO: 490429 - protein, 506 aa, unidentified
MKVQASKPTFTIDYNPIGQYGSNICRQDIGRKRPYRSLLRQRYWAWSFISKLITMAKVAKRKQTSKGLRLEVVNPNAAGIDISPKEMQVCVPSDRDGECNRTFGVYTEDLHYIAEWLKACCIDTVAMESTGIYWLPVFRILKESGFDVILVNASDVKNFSGRKTDASDAEWLMMLHSYGLLKPCFQPENIARTMRNLVRHRDNLIRSASREVLHLQKAMEQMNLKLDNVFSNILGKSGQSVIKAILNGERDPKVLSDLADPRCRTSKEEIEKSLQATWDEEHLFEMRQSDSLYQFYQQLIAECDAKINEIAMQYSATVDAPKTELLRSGKYNAKKNRIGFDVEKVAFELWGVNVMRIPGMSRGALLRLVGELGAGFTTKFVDVKHFVSWANLVPNNKISGGALLSSKVPKKKNPVGIIFRQAANTLKAAKNPLGNYFRHMRAKGGHLQAMVATGKKLASIFYCMVQRKVEYNEKVYCNHRKQELQNKVAYLHKRLQRMESELANCG

SEQ ID NO: 490430 - protein, 349 aa, unidentified
MSQSNQYVGLDVSLKETSICVIDDADKIVWRSNHVDSTPEAIGSAVQQHAPRAVRIGLESGQLSNWLFHGLKEAGLPVICVDARHAKAALSLKVNKTDANDALGLAQIMRVGWYREVMVKGLDCQTVRALLVARAQIVSQITVLKNCMRGILKTFGRVLPKGLRSQFPARVRMAIDGNPVLRAIVEPTLQVLEATRAQLLVYDRAVIQRARSDDTARRLMSAPGVGTVVALAYMTGVEDPARFRRSSSVAAYFGMTPRRYQSGEVDHAGRISKCGDGMVRGLLFEAAKVLLSRSARPSALKTWGEALAKRIGPKKATMAVARKLAVILHRMWTTATTFQWNAEAASPAA

SEQ ID NO: 490431 - protein, 324 aa, unidentified
MYLGLDVSKNTLDCCLNKDGFFYACKISNNGKGFQKLRAWLDGHGCDETLHCCCEATGNYYEAAAEYLAAHYKMSVENPRKIKAYAVSELKRSKNDKQDAKTIAEFCEEKSRKLKVWKPKNQTEKELQSITRYIARLKQQKASETVKRQTASDNIKDLIDETIDYLGRKIKEAEGRLKTYINQNPELKQKANNLTTIPGIGIQTAAIIMAALSGNNDFKTAKQFTAYLGLDPAEYKSGTSVKGKDRISKVGDCMTRAALFSPALVAYRIGTFPRLVANMRQNGKHIMQILTAIMRKLAVVAYTLHKTNTTFEKQRHTKIQQKAA

SEQ ID NO: 490432 - protein, 377 aa, unidentified
MHSENIAAYIGLDVHKETLAVAIAAPERLGEVRYYGTINNEAQAVRGLFQKLQGLYGNILSCYEAGPCGFGLYHQLTAMNIKCQVIAPSRIPKSPTDRIKNDHRDAISLARLLRAGELTPVWIPDLTHEAMRDLIRARAAAKRDSRVARQRILSMLLRTDKRYAGKHWTGKHRTWLANQSFSQPSQQIAFQHYCQSLEQIEDRILQLDQEISRLLPEWSLCNLVCQLQALKGVGQLIAITLVAELGDFSRFSNPKQLMAFLGLVPGEYSSGNSIRPRGITKVGNSELRRLLYEAAWSYRTPAKVGAWLIYYRPDSVTQYSKDIAWKAQQRLCSRYRTLTAKGKKSQVAITAVARELTGFMWDIALAAQSSFSQQKQN

SEQ ID NO: 490433 - protein, 406 aa, unidentified
MNYLGIEVSKANSRYVFLDNDGEKLVKPFTLDNGHNDFNKLLDRLKELTLLPDNLLIGIEATGIWWENLYSLLTEHKFKVIVLNPHQTNKFREALRIKAKTDDIDAYVIAGLLRSGEYASSYIPEESIQCLREITKLRFELVKDRQNYERQTNALLGLLFPELTQTAIKNPFAVSSMAILKAYPTAKHLAEAKPKNIEKIVRSIKGNNFNIKEIQLLIETAQKSIYSGRAKHDRGLNLIILLTQVESLQNAIAQLDERTNNILSPSDSNDANSFPGANLLSIPGVGPKTLAAILSAVGSDGQAFPDGKHLIGHIGFFPKIYESGETRHDNTMSNRGPKYLRAALYMSAVACLKHNPEFKALYDRKVSQGKTAKQSLVYVAKKLAHLCLSMLKSGESYNPSRVFMPA

SEQ ID NO: 490434 - protein, 411 aa, unidentified
MPLAVGIDVAKELHWACVVDRDTGRQLQSRKVPNTPEAIDDLIAELGRLSAELGPATVGIDVLGGIAGLLTAMLLDPEHGVDLQLVHVPGLLVNRSRRATRGGERKSDPADAKVIADQIRLRAGTDELRPVALLSEPDAVLRLLVNRRRDLVTDQTRRLTRLRDLLTSIHPGLEHQLDVTTKTGLWLLTRYVTPAEIRQAGPAAVAEHMAAAGGLRRARIDALVQGVTRAARAQRVAVPGEALAARLVRELAVEALAARDRLAALDIEITEALDAHPDGALIRSLPGMGAVLTAEFLAEAGGITRFPTPDALASAAGLAPVLQQSGKMHYLRRPTTGNRALKRVFYQSAFCAIQRDPASKTFYQRKRAEGKRHHQALIALARRRVNVIHAMLRNRTEYRPDHRGDQQPTAA

SEQ ID NO: 490435 - protein, 424 aa, unidentified
MTEETEDIEWFVGFDWASETHVVCLLDRDGRTIGERKVAHGGEELGESCDWLLAKSGAPPARIGVAIETPRGPIVETLLERGFAVFAINPKQLDRFRDRFTAAGAKDDRRDAHVLGDSLRTDRRAFRLLAVDDPTIIELREWSRIADDLTQERARLANRIRQQLWRYYPQMLQVADDLTAENFLALWECAPTPAQAGRIDEESLAKILKAHRVRRIGAAETLRILRQTPLQVAAGATEAAVAHIKLAAERARLINRQLKDANQKLEAFCARLEQPDAGERESEPGQRLEQRDVAILRSLPGVGRTGLATLLVEATEPLRRRDYQVLRVLSGVAPVTRRSGKARLVTRRMACNQRLREAVYHWARVAMQVDPESKKRYAALRQRGKSHGRALRTLGDRLLAMACAMLKSQTLFDPNHKCAPPAPA

SEQ ID NO: 490436 - protein, 363 aa, unidentified
MIVIGADTHKQTHTVAAVFAGSAQRAGEPTVSAREPGFRELLTWGRGLDKERIWAIEDCRHVSGSLERFLVASGERVVRVPPKLMGQSRRSERAAGKADPIDALAIARAALREGPETLPAAHLDENAMQVKLLLDHREDLVKARSEDQCRLRWHLHDLWPELEIPAGALDRMVWLERIARKLSRAERGTRVQIARELVTEIRRRTRRAAELERELGALVKAQVADLLALEGCGVLTAAKLIAETAGAERLTSDAKFARLADVAPIPASSGKRTRHRLDRGGNRQLNCALHRIAVTQGRVYPPAREFLARKQAEGKSRMEALRCLKRHLARRVWKLLVNPERERSMTTVDTQRGKLTPQIAVAA

SEQ ID NO: 490437 - protein, 355 aa, unidentified
MTSTKYIGMDVHTESISIAVRNSAGKVVMESVIETKASMILQFIEGLRGDLHVTFEEGTAAAWLYDLLKPHVARLVVCNPRRNALLKVGNKSDRIDARKLSELLRGNQLHPVYHGEHGLRALKELVRSYLTISKDLARVMTRVKALYRSWGIPCSGTQVYSRLHRATWLSKITEPGVRLRAAFYFQQLDALRTLRQEVRQELLAESHKHSAWKRLCGIPSIGPIRAAVALGVLQTPHRFRTKRQLWSISGFAIETRSSADHRHVNGQLQKVKKRVSIRGLNQNHNHDLKNLFKGAAVIASTKPGPFQEFYTALLAKGMRPEMARLTLARKIATIVWIVWKRGVSFDAQYLKPQTV

SEQ ID NO: 490438 - protein, 347 aa, unidentified
MVTLGTDSHKQSHTVVAVDENGRQLAALRVSATPTGHLEALAWARQWRERRWAMENCRQLSRGLERDLVRAGEQVLQVSPKLMGSSRRSGRQPGKSDPIDALAVARVALREPKLPMAHLEGKSRELKLLVDHREDLVGERTRIQNRLLWHLHELEPGFAVASGALTRRVVQVEVSRRLNLHHGVVADIARDLVLRLVDLTGSVNQLQRRIETLAAELAPSLMRLPGCAGLTAAKLMAETADVRRFHSSAAFALHNGTAPIPVWSGNQERHRLNRGGNRQLNAALHRIAITQLRLGGEARAYVARRMSLGNTKTEAIRALRRQLSDEVYRILRLDGLEQSDLARAAAA

SEQ ID NO: 490439 - protein, 387 aa, unidentified
MIYVGIDIAKQKHFAAAMTADGEVLIQPFGFTNDSEGFSLLVSKLKILDQENFLIGLESTSHYGENLICYLYNMGYHIAVINPIQTATLRKSNIRKTKTDKVDTILIIKSMILNNHRIFTQDDIDSIRLKSLCRFREKTKKSKARLKIQLVSYVDIIFPELQYFFKSGLHINTCYELLKKHSNPNDIAALHLTYLGNLLKKASHSRFDKEEAIALKGLAKSSVGTGDAHLSIQITQTISQIELLEKQINELDESIKSIMLEMDSVILTVPGIGFLNGAMILGEIGNISRFSNPSKLLAYAGLDPTVNQSGQFNAKTTRMSKRGSKLLRYALINAAWNVSLNNKTFNDYFMLKKSQGNSHYAALGHVAHKLVRVIFKILKDNVAFNLE

SEQ ID NO: 490440 - protein, 450 aa, unidentified
MSKKSDSRQAGLPVLNDRAAGIDIGSRFHVVAVTPGLTDQPVQTFQAFTADLQRMADWLVSIGIETVAMESTGVYWVPAFEILESRGIEVILANAREARAVPGRKSDVNDAQWLQQLHACGLLRASFRPGRDIAALRVYLRQRERLLDYCAAHIQHMQKALTLMNLQLHHVVSDITGATGMKIIRAIVGGQRDPQVLAMMRDVRCKASIETVRAALVGNYQPEHVFALTQALALYDFYQARIGECDEQIENALAMLNADKSYPDTPLPKPRHRTKQPNEIRFDVRSALYQLTGTDLTQIHAIGPYVALRLIAECGTDLSRWPTAKHFTSWLTLSPGCKISGGKVLSAHTRKATNRVTAHLRLAAVTVGRTNTALGAFYRRLAARIGKAKAVTATARKIAVLFYNAMRFGMDYQDPGAEHYERKYRERVIKNLHRRAAEFGYTLQQADGVS

SEQ ID NO: 490441 - protein, 408 aa, unidentified
MKRYYMGVDWGDRLHQVYVGDQEGKKVREMKVQESPQGLAEIGRWLDEKRAEGFELWAAIEKPQGRIVDFLLDHGVEVYPVNPKAVDRVRDRYRMSGSKSDAFDAYVLAEFLRTDQAHLRALRPSSEKAQELKMLSRDQRRVVRHKTRFLNQLTTTLKEYYARPLEVFEDLETEIALDFLQRYPTPAHLSALTRKQFNRFATKQHHLSKQRCEELWEKLNKPQLAVPEHVVRAKAQLVEVLIEQLRASIKAVKIYNHRVESFFASSPAAQFAKTLPGGKSGTLVAAVWAELGDAQGRWESSRHLQAEAGAVPVTKASGKSRVVHFRFACNKHLRYTMYWFSFVSLNHSEWAKLYYRGQRDNGHSHHQALRALGAKWLKIIFVMWRDHKPYDENYHLANIARQMMRQAA

SEQ ID NO: 490442 - protein, 344 aa, unidentified
MIYIGLDVHQRFSRMGCFDPATGEVHDLGSVSNEPKALEEALEELPSPKTVVLEAGRSSYHMAGLLEAMAEEVWIVDPGEVRRLQHTISKTDRRDAAALAWWAAKGVLKPQWRPDAETMNLRELTRGKTALTRMSTQVRTMIRMLLARHGYECPHRDLMGERGQLWLEEVELEGHAGQMLADLREILVVVQAKADDFEHMVEQTSRKHPLARRLRTIPGIGPFLSLALAVEIGDINRFPGPTQLRGYSGLVPAVYQSGEKDARGPLTKAGNRWLRYAAVLAAQRIGQMKEPDPRLKRIFLSVAFRHGRNPAKIAVARRLLDLIYYMLKKGQDYRVSTPRVATTA

SEQ ID NO: 490443 - protein, 435 aa, unidentified
MNGSRLQTGIDFGASWVDLCLLTPEGEPLVAHERCANSMPGYDQAKQLLLATLEAQQYTGIDISGEATGMYWLPFFLQLAEDPELAAYDPQLYLLNPRWVAWFKKCFAQDDKSDQKDPYYIAERTRTRRPDVTWTPDTANLALRFYTRYRFHLVRLLAQEKCYFSAYLFLKANTYRRLKPFADVFGVTSRVILGEYTTLDTLATIPVAELATQLEQLSHNHLPDSQRNAQRLHAVATDSFLLPEQLTTPIHRILTATLAHITALEQQIAQAEAWIAAEVTAHPAITQLHSIPGIGPVFTAGIGAEIGDTQRFLTGTKWDRRKHRYRPKNLRDAEDAIAKLAGLWWPRANSGGFEAEDRRMAKSGNAYLRYYLIQAADHLRKKIPEYRRFYDRKYDEATKHKHKRALVLTARKSVGLFVGLLHRNEPFRSEEERRT

SEQ ID NO: 490444 - protein, 338 aa, unidentified
MALYCGIDLHSRDCWLAILDEKRKVVHESKVGNDLGALLEILEPYREDLEGVAVESTYNWYWLVDGLEEAGYQMHLVNTWAVKQWEGLKYTDDRHDARWLAHLLSLGILPVGWICPKEERSVRDLLRRRAFLVRKRTSFLLAMRGAFECRTGIRTTSSEVKQWTAEEVESYLDDEIEALGITCLLEPMQSLNGQIRIIEKEALARARLREEFGPLLTVWGIGKVLSLTMMYEVGDISRFKKVGNFASYCRLVKSTRLSAGKRKGSGNARNGNPYLSWAFSESAHFAVRYHPEAKKYFQRKRSKTNGIIAIRAVAHKLARAAYYVMKDQVTFEPEKTFG

SEQ ID NO: 490445 - protein, 358 aa, unidentified
MATTTAVDIAKSGDVVVGIDTHKYVHVGAVFDTTAGLLSTISVPADSDGFFQLLSWAESFGQPIAFGIEGTGSYGGALTSFVRRRGYRVIEVARPDRRIRRLVGKSDTIDAQNAAKAVRAGFATAEPKTADGTVEMIRQLKVAHDTAVKARATTMVTLKAMLVHAPEALRSETAGKTQIMLARHCAALIVEYLNSPEDSIRVTLASLARRWLTLDHEAAELHEHIEGLVKTTAPQLVQTYGIGADTAAEILIVFGDNPERIKSEAALAKLAGISPIPASSGTTTGKYRINHGGHRQLNAAIYRTVIVRMRFHEPTKIYVARRTAEGKAKRDIIRCLKRYVIREVYHLVNNPVTSVDAS

SEQ ID NO: 490446 - protein, 353 aa, unidentified
MEYIAFDAHKHYTLASVARPDGQLVREQRIAHERGALQQFLERCERGSPVAVETVGNWYWIVDEIEAAGCVPRLVHARKAKLMMGEINKTDKLDVRGLNQLQRTGTLPTVWIPPGELRDQRDLPRTRMVLVRQRTQLKNRIHATLAKYALHDLEVSDLFGTRGRALLRQRLELLPPCTAYTTQHLLEQVERLDHQVREFEQRLRAMFKPTPAIQRLLTLPGVGLTLAVVIALEVGDVARFPTAEKLAAYAGTTPRVHASGGKTRFGPSRPDVNRYLKWAFVEAANAICLNRGRAPHRHVTHLYERVARRKGHQKAIGAVARHLAEATYWVLTKQESYREPKAAAVSSTGDKRG

SEQ ID NO: 490447 - protein, 328 aa, unidentified
MDKSILGIDISKRKFDVVLLHQGRSMHEVFANTRQGFGKLRHWLKKQAVRELHACMEATGTYGDDLAEYLHGQGYAVTVVNPSRIKKYAESQMQRNKTDKSDAMVIADFCRTQPVDLWSPPDPALRELRELVRRLEDLHQMRTQEQNRLKADPDNRAVTRILRKHITFLDQQIQEVEELIRGHMDQHPDLRHQKDLLTSIPGIGDISASALLAEMGDVRSFEAARQLAAFAGVTPRQRQSGSSIHGRSPLAKIGNPHLRRILFFPALSARRCNPIIKPFCDNLALHHKPKMVVIGAAMRKLLHIAFGVLKSDTPFDPHFISQKACLTP

SEQ ID NO: 490448 - protein, 331 aa, unidentified
MKIKETIGIDVSKLTIDVTVHSNKAYAKFENTEKDFKKMIKWTFKESLFEKENILFVFEHTGLYSHKLSLFLSKENIPFSMVPGLEIKRSLGIVRGKDDRVDSRAIARYGYRLRDEIKLCKLQSKELKSLKTLLSLRETKVKHRAGDKALLKEYKRTYKRIEHEVVFKVLEKSIKSLTKYITEIELEIDKIIKSDEELKHQYELVTSIKGIGPQIALYTIVYTDGFTKFKTHRQFASYCGVAPFPNVSGTSIRGKTKVSNLANKKLKSLLDLGAKGSIQYNLEMKTFYERRLEMGKSKMSTINIIRNKLISRMFAVIKRNSPYVDFMKYAS

SEQ ID NO: 490449 - protein, 338 aa, unidentified
MSIYAGLDVSDKTTHICVVDVDGKVLRRDVVASDPDVLAKWLNRHCQNLVRVVLETGTLSTFLYHGLVERGVAIECICARHAKGVLSARVNKSDVHDAEGLAQLARTGWYKRVHMKASATHIDRAALRIRAQLITARTSMANQLRGLLKLFGLRMGTARTPGRRAERLAALYAQRPDLKALFAPLIASMEGIEEQLRASNRLLDDRAKRDEVCVRLMSVPGVGPITALTFTSTIEDPHRFARSDDVGAYAGLVPRRSQSGERDTSGHISKAGDPMLRKALYEAANVALSQVKRPFALQQWGRKMAEAKGAKRARTAVARKLAALLHSLWLNETEFRWA

SEQ ID NO: 490450 - protein, 345 aa, unidentified
MKITVYAVDLAKNKFQVHGFDAHGERRAAKTLTRAGMLKFFDGREAACVEVVMEACASAHYWGRRLLGLGYRVRLIPAQHVRAYVLGNKTDANDADAIYAVSRRKDIRAVPVKTVAQQDALLVHSTRERLVAARTALINQIRGVLAERGVVFGTKPAVLRHGLIAWLETPAAVEITETLRQWVRARRDEWAALDEQIAHCDREMRQWYQATPACAQISAVEGIGIITATAVVASVGDARQFDSGRQMASWLGLTPKERSSGATRHLGGITKRGDGYLRKLLVHGARAAVLAAKGKQDERSRWINALVARRGHNKAVVAVANKNARILWAILTTGECYRRPEPLAA

SEQ ID NO: 490451 - protein, 371 aa, unidentified
MSELPAETRPARLKVEASPRPPGARKPETELGAVSTTAVPHPDSRSGPSPHLQGRVMDEQRTVFVGIDVSKDRLDVHLRPSGEAFCVPREGKGMDDLVIRLQGLSVALVVLEATGGFEATVAAALAGVGLPLCVVNPRQIRDFARAMGRLAKTDTLDAEVIALFAERVRPQARPLREPERVHLAELVGRRRQIIEMIGMETNRGRQAIDKPLARRLARHVAYLQKELDAIDHDIGDAIKHSPAWREAEALLKSVPCIGDVTARTLLAELPELGTVSRHQVAALVGVAPINRDSGLMRGRRAIAGGRTSVRAVLYMAALTAIRRRSPFRAFYDHLAARGRPKKVALVAVMRKLLTILNAILRDHTPWRPLNA

SEQ ID NO: 490452 - protein, 411 aa, unidentified
MYYVGIDIAKSFHVVSVIDDNETKVINKPFRINNDNKGFKKLLTILDSVTLDKDGFLIGIEATGIYGENLLEFLKSKGYSVKLLNPFQTSRYREQITMKKVKNDNIDSLVIALFLKDGKYSSGYVTDDEYQSLRTLYRNRASIQSDMKEVKKRILTQITVTFPEFESFTNPFTISGLALLDKYPTAHHYKHSSVDRIMKIFAHIQGNNFNQDKALKLLELSRESIYSGKAKDARAIAIRSTIRLLKMYLSEIDIIEAEILLLLDKKGINTATLDELPTKDSLIDNLKTIPGVSDKTIAAVISECGDLTRFPSIPKFIGYLGLFPTENSSGNSKSIGHLSKRGSSLVKHALYLSAVSCLIHNKQMKQLYDTKRSQGKSKKEGLVAVSRKLATIIYSIFKYNTAYNPNRVFTN

SEQ ID NO: 490453 - protein, 424 aa, unidentified
MSYKIAGIDVHKKMLAVVVSDVEVAEEFHFTRRRFATNPQALRDLASWFCEQQVAEVVMESTAQYWRPVWEALERYWKPQCPSRVGASGASTCGALHLAQAQSNRGPRGRKRDFPDAERLVKRLLAEELTLSFVPDPEQRLWRTVMRRKYQLTRNRVQLHNRLECLLEEAHIKLSSLISDLLGVSARRILQSLAEGERDPARLAALAHERLRATPEQLCDALGACSDLQPVYRRLLRMVLEEWRFLEEHINQLDQEMAALLRQQQDAVQRLAEVPGLGVDSAQQIISEVGASAATFPSPKQLSSWVGACPGNQESAGVSYSHRSPKGNRNMRRLLNQAANAAVKAKGSIFQLTYRRLVPRLGHLQAIGAIAHRLCRLIWKILHQGVRYEERGPAVSLKSKQRRTARMIRELRSLGYTVALTSPA

SEQ ID NO: 490454 - protein, 403 aa, unidentified
MVFVGIDWAEAHDDICVVDEQGHVLAKRRVPDGLEGVGKLHALVAEHAEDPAQVVVGIETDRGLLVGSLVAAGYQVYAINPLASSRDRDRHATSGAKSDSGDARVLADLVRTDRHKHRPLAGDSNLAEAVQILARAHQGLVWTRQRQANQLRNALREFYPGALAAFDDLDAADAVAILERAPTPSQGRALSQAKIISALRQGGRERNLESKAAEIQAQLRLPQLEVPALLAQAYGHSVAATVAVIKQLNLQIAALEQELAASFEMHPDAEIYLSLPGLGVVLGARAMAEFGDDRTRFLNPKARKSYAGTAPITKASGTRKVVLARVARNRRLADACYQWAFSALTRSEGARHRYDVLRARGQTHHQALRALGNRLVGILHGCLTNRQIYSEHLAWSPHLEVAA

SEQ ID NO: 490455 - protein, 340 aa, unidentified
MISTTKFFIGIDVSKPYFDVSLMAVVDHVKQPVETAHFDNNPAGIKGFDKWLRALGVSYNEQSLVVIENTGIYHRLIWSFCSKNQLPIHIGNAAHIKWSFGIARGKNDRIDSVRLCSYAYRESDTLAATTPLNPALLHLKDFISARTKLLKQLTSLRVSIKELGNVNEKTHQRLVERSLRSAIEGIAKSIRDIECEIKKIIDGDKEFKGNYRLLTSIPGIGHVTAVYLIGCTANFAGSPSGKQLACYAGVAPFEHSSGISIKGKTRVHRMANKELKRLLHLCALSAIQYNPEIKNYYNRKKDEGKHSMAVLNAVRNKIVLRVAAVVKNQTPFKNNYKMAA

SEQ ID NO: 490456 - protein, 297 aa, unidentified
MRDSRTRYVGLDVHQESIAVAYAREARDAEVVCWGRLGTRQRDSDKRIRTLTSKAQQLVCVYEAGPCGYGLSRDLSRKHLRCGVVAPSLVPTKAGDRGKTDRRDATQLARLLRSGDLTAVDVPTGADAAIRDLARARAEAIRDRQAAKNRLTAFLLRQDLRYEGRATWGPAHRRWLAAVVCPTPAQPIVFQEDGRAVAAHDARRQRLETARREPVQGWRLAPVVQARQARRGGQCTVAVTRVAERGDRTRFEHPRPLMSDLGLTPREYSRGDRRRPGTMTTAGHTCARRALIAGAWA

SEQ ID NO: 490457 - protein, 366 aa, unidentified
MKKYKLKQDAIAINKKVWMGIDAHKETLHITIVDYEEVLFQTTVPHGRSHVEALIKRLPHCEIVAVYESGPTGYRLLHWLKELGCRAFITPVSKVPESKGGKRIKTDRRDSQELAEFARADLLDEVFDLGEEHYFQRELTRTRQQLVDKRSKTCNQIKSKLLYHGVEVPKDLKQNWSNKYLDWLASGPSGDAHLDLALELLVEIHRELTAKIKRLTNEIEELAKTEKFSDDVEIITSTPQIGVLTAMIFLLELGDISRFERAEEFSSFLGLIPGEWSSGERTRKGSRVRWGNKRVRSALVEAAWRVKGKDPKLNKIYERIKYRRGSGRAIVAVARRLALALRAMLREREKYAYPGTKPEHENAQKR

SEQ ID NO: 490458 - protein, 378 aa, unidentified
MRWIGLDIHRTSVEAAELRDGETTVRRFRFRNTPEAWQRFAASLDRDAAVCLEATGNAFWIYDLLAGRAREVVVAHPLKTRAIAEARIKTDKIDAEILARLLKADFVARVWVPPKPVRELRSLLGHWCCLVKQKTVLKNQVHGVLMRQGLRCPFTDLFGRGGRAYLQRIRGQLPEAEQIIVDSALQVLDRVEAQLEALRRELYRRAQSVPGVRKLLAIPGVDVFTALMVIAELGDASRFPSPKHVTSYAGLVPSVHQSGSVRYTGSITKAGRRHLRWVLVQAAQKAVRSPGRLQRFDLRLRAKKGHHVAIVAAARKLLAFMWLVLVRDTEYLDGREDLRRIKERRLAREGLAYVCKDFWGSDRLDPGVEEVVAALRGA

SEQ ID NO: 490459 - protein, 384 aa, unidentified
MQASSMSTPTAVDCGTIYVAIELSQKSWLITVHSPDRDRFSRHKLEGGDGTGLLALIEKARARTAEKLGSSPRVVSCHEAGYDGFWLHRRLLAAGIENLVFDPASIAVEQRTRRAKTDRIDGELLLRTLMAHLRGEPRVVRIVRVPSVEEEDARRASRERDRLIMEQTAHTNRIKALLRLLGVAVGNPRRGDWLGWLARQRDWQGQPVPAHLRAEVTREHARLMLVREQLGALEQSQPAEAAVVPAATTERRDQLQRLKALGPAFAATLVDELFYKNFRNRREVASYCGLTPSPWRSGGIAREQGISKAGNRRARQKAIELAWLWLRHQGDSALSQWFRTRTANAGKRARRVAIVALARKLIVALWRYLTTGLVPEEAVMKTKT

SEQ ID NO: 490460 - protein, 414 aa, unidentified
MALVRWVGRAIGLDVHREFCVVAICEDGKVRSAGRVPSTPEGLAALAESLLPTDRVALEVTGSCWEVARILEPHVNRVIVVSPDDTGISSARAKTDKLDSRTLASLLWKGELDAVWMPDERCRILRRRLARREQLMRTRTRAKNEIQAVLQRRLQERPPFADLFGVKGRQWLAGLELPVEERESVDAGLRQIAFMDTEIAAVDRSIAQQALSWPEIRRLMTVSGVNLICAASFMAAIGEPSRFLTSRKLVAYLGLDPKVRQSGEAPARSGRISKRGSASARWALVEAAWSVVKQPGPLRAFYERLRARRGHGKAIVATARKLTVLFWCMLTRGEDYAHQRPALTKKKQRQLELTAGAKPRTKAAAGIWSTNRAISDAERALAEQAEVSYQRTITDQKAGRPSRKVGASATPERA

SEQ ID NO: 490461 - protein, 317 aa, unidentified
MADHSNGYIGIDVAKEKLDLASSENKQGKSFEYNKKGLKKLTTYLKQCSPKLICLEATGGWERKLVATIHELEIPVAVVNPRQIRDFARAANQLAKTDEIDARIIAEFAKLMQPRITPKLSESQQKLRDQTARKRQLNKLLTQEKNRLATTHDKDMQKLVRKTITFLERQMKTVKTALTKIIEQDKQTQKTAQIISSVPGLGPATAATLISEPPELGKLNRQQIARLIGVAPTNRDSGTLRGKRTTGGGRVDVRNALYMPTIVAKKYNPKIKSFYERLLANGKSKMAAIIAAMRKLITILNVMIREQKTWKQTTVST

SEQ ID NO: 490462 - protein, 344 aa, unidentified
MIYIGIDVSSKSFVIHAIDGRKKVVFKGEILPEKRSLLKLLKDLGDESKYVVFEAGNQMKWIAQTLLKIEDVTLHVVHPNELKWISQCNGKTDKVDARKMAELARGDLLPRKVHIVEGTVRELRELLSARQVLQSKRVALINGIRAMMLQEGIKLPEKFFSRTDWHDRLEKTSISDATKLIIAAYMKAIEGLSSAEDALEAKVVAIGDERIKRLESIPGIGKLSSRTLLGALDEASRFDNKKAAAKYGALTPTVYQSGNVTHMGHICRNGRHEIRRVLLQCAHTVARMKNFESKPLREFFERIHKRRGKKIAIVALARKLLTIAYGVLKAETYFDPKMLSPNRA

SEQ ID NO: 490463 - protein, 448 aa, unidentified
MTIRTLGVDLGIRAAHVATLCDEQGKRVWSKRRFGNRHDELEALVGQIGECDELTVVMEPTRNAWVPVAAHFMAAGARVVLVPAERSADLRRYYAKHTKNDRLDSHVLARLPLLHPEGLHPIGGLGPAEPLRRAVRRRVKLVEWRLACRQRIDAMLDLLGPGYAEVLGGARYGKTALEILERYGDPRKLRRLGVNRAATLIRRVSGGHWGTDQATELIDAAGEALKLWEHDQLDFDELAWDLASEVRLVRRFDDEISRLETRIDQLYGKADPAGIVISAPGVGTVLAGGILGRLGDANRFANLAGVRSFSGMVPKVNQTGHTETRPGITKQGDAGLRRDIWFAADVARQTDPQLAAKYHRLIVERRLHHYSAICHLATTLLTRIAACWRRNERYVIRDIDGRRITAAEGRAIVRARYRIPPQIRNRARTTHTSSGSAQKGVDQWPLRR

SEQ ID NO: 490464 - protein, 400 aa, unidentified
MDKDRIVAGLDVHKDTIYLCVMDNTEAVIFAKVYGTLTPDLELMCSEMVSHGVTEAAMESTSTYWVPVWNALCESMSLKLVNPYFIKQLPGRKSDVKDAQWIAECLLKNLIRGSFVPDKRVQDMRKYNRRIFDLNEDLTYNSNKQDAALQRCGFRLSNYVSRVNGKSYQKCVRAIITGITDPEELVKLIHGKTLRKYGRNIIKDAVTGDFHQADICLLKQYAELIEVIERQIEECRNALIAMCQEHFPKQFKRLQSIPGVKERAASAIIAETGADMKPFEKATNLVGWCGLKPRNDISNNKVKSNRTTHGNRFLRQILIEISWVASRTRNCFFSNFSYVQCTQRHKNKMKIQVAIARKLLVAVWHMLTKDEDFIDVYLKRLEKQAEWQNDIQALEPLLVG

SEQ ID NO: 490465 - protein, 451 aa, unidentified
MIGQRVSKVKLSTQHFGDGPTMTKRSSTPADAVLVAIDMSKHRQEVLIERPEGGRRRRMTVMATKADYDRLAADLADIGRSVIVGFEATGNYHRTLAHRLLAAGFELRLISSVALARTREALHNGWDKNDSKDAQVILHMLRIGATQRYVDPLAAGINDLQEMSKTHEAISKVKTQTWHRILTHYLPLYFPEIERFAGNSRSDWFLALLERFPTPASMTALGQEAFSNEAWSLVGRKVSKARLINDIYETACASVALPVDEDSVAITMFRMVIAQARSLIRQRDEIERTAHALLSGNRDYQLLRMIPGIGPINALTILAEAGDLRRFAHHRQFLKFCGLDLATCQSGTFRGRTKLSKYGNARLRRTFWMATQVAIRQRDNSFRDKLGRYVAGHGNDPDRRRKAMTALTAKMARVAHAVIKTGTEYRPFVERADTRWKDPSLWSREGAAATL

SEQ ID NO: 490466 - protein, 410 aa, unidentified
MQALVERGCGLDVHQATVVACLLIVRKDGKVQKQMRTFGTTTQELLSLREWLLSEGCTHMAMESTGVYWKPVYTILEGALEIVVANAQHVKKVPGRKTDVKDAEWIADLLCHGLLRSSFVPPKPIRELRDLTRYRRKLVESQAAERNRLLKLLETANIKLASVATDVFGMSGRLMLRALVEGKATPQEMAELAKGKLRKKIPELEPALEGKVEEHHRFLLRLQLDRLEAAEKDLAVLEQRIQEKLKPYEAQLTLLDEIPGVDWTLAAGFIAEMGVDMSVFGSVSQLASWAGVCPGNNESAGKRKNSRIPKGNVYLKTALVEAANSAAKAKGTYLRDKFYRLKARRGYKRAAVAVAHKILVAIYYMLSHRVCYNELGDAYLDKRNKHQLTRNLIHRLERLGYSVTLEQKAA

SEQ ID NO: 490467 - protein, 424 aa, unidentified
MASHEFAAFVGIDWGDQKHAVCLRTEGVEVEHELSQKADEIDAWATELRTRFGGRPVAVCLEQSRGPLIYALLKYEFLVLFPLNPLQATRYREALYPSGSKDDPLDARLLCLFVETHHGQLRAWKPDDEATRLLRLLAEDRRRFVDQRTAHKNQLRQRLKEFFPLALELLRSGDLEDEWFLQLLIKFPSHAELRRAPPRTLERMLPKHHRLPDDESLDPRVAQIRAAVPLVTDGAVVKAARLQVMELARLLLRLNTTIAEYDHELSAELARHPEAELFRSFPGAGAALLPRLAAAFGTDRERYADAQDLQQLSGIAPVQIRSGKSCSVRRRRACPKFLRQTFHEYADHSRKRSLWAKAYYRMLRGRGLRHNAAVRALAFKWMRILFRCWQTHTPYDEHRHLAQLRLKQSPLLQFLDLPIPAEQT

SEQ ID NO: 490468 - protein, 366 aa, unidentified
MLHKLNSAATLIQRTTTEAPRDHMYYIGLDVHKKTISYCVKDVAGHVHREGKIRSTRRELDAWIKTLPQPRLIAMEATIFTGWIYDHLLPYAEKVKVAHPLMLRAIAAAKKKNDRIDAGKIADCLRCDFLPECHMASTEIRDRRRVLRYRNLVVKQMVQMKNRFSGLLMETGVSYNKQRLHKVGYFGELMSTNEDISQAVRPLLNLSRGMIRRSGKLEYDLISSLERDPLLRERLRRLRTVPGVGSITALTWALEIGDYTRFSSNKQAISYCGLCGDERSSADKVMRMPLSKQRNKHIQRVLIEAAKLVPRESPKLALIRDRELQRGNPNRATLAVARKMVCYMMAVERRQQDFLPAEEFKCTAAA

SEQ ID NO: 490469 - protein, 408 aa, unidentified
MNPLFVGIDVSSRNNVAYLMKPDGSEYSSFSVQNNLGGAKLLSEKIVSALRSMQLERVVIGLEATSIYGDSLVYALREDGRLGRFQRKIHVLNPKQVRKFKEAYSDLPKNDWVDAFVIADHLRFGRINREVYMDDYRYKALQTLTRARFDVIQNLTREKQRFANYLFLKCSGMAQDKDIQNTSATTIALMEHFETVDDLANADLEELTAFITETGRGKFADPDATAKAVRAAAKGSYRLPKTVNDTVNQAMAVSIASMRALKGQVKVLDKAIEQQFEIIPNTLTSIPGIGKVYSAGIIAEIGDIHRFDSQASVAKFAGLVWTQHQSGEFEAEHSRMIKSGNRYLRYYLLEAANSVRRCDSEFRRYYDLKFKEVNKYQHKRALALTARKLVRLVFRLLKDNRLYIPPEG

SEQ ID NO: 490470 - protein, 314 aa, unidentified
MIKQKVFMGVDVSKDKLDIALDGKCYEIANTEKAISTFIKKKRLNGDCPSLVVFESTGGYEKCLRKQLHHFGIETHTGHPNRVKAYGTVQGHYAKTDRLDALLIEAYAKHISPDARIDIPMTKAQEELSELRSLERSLADDLHAMKCRSDHMKSAISQEHSQTYIAAIVNHLTHVREAIKEIISSDKTMMEHKRIMMSMTGVGEVTANVLLCDLPELGKLTKPEIASLTGLAPKTCMSGKKTWSAHIRGGRFYIRKALYMAAMSAHRFNPRLVVVYNRLREAGKPFKVAIVAIMRKIIVMLNAMIRKKQLCVDF

SEQ ID NO: 490471 - protein, 346 aa, unidentified
MDHVAIDLGGTESQICVRSSDGTIIEELRCGTARLGSYLKRRPPSRVILETSAEAFGIADTARELGHDVRVVAASLVPALGVGARGLKTDRRDAQVLSEVSSRVELGSVHIPSMVSRTWKSTCTAREALVTSRTQLINSVRGWMRTCLLRTRPGGTPPTFALRVRRAALASPHGLPEFIEHMLSVIEVLNERIAMADKELKMIALADPVCQRLMSIPCIGPVTSIRFVAALDRVDRFPNAHSVQSYLGLVPGEDSSASRKRRTGITKAGPARVRWALAQATWSFRRYQKLDPLALWATEVEKRRGKKIAMVALARRLAGIMYAIWRDGTRYEPTRLRPRLPQPAQP

SEQ ID NO: 490472 - protein, 394 aa, unidentified
MKLVGIDIGKNKHFFCIMDKDSGEVLLQPSSFSNTKDGFDSLIQKLSSYSKDSILIGMEDTGHYHFALLKYLLEKNFTVALINPKTTDYTRKMQNGITKNDKLDTLTICDVLDTPVRKKQYRITKVNSFDLYEQKQLTRHHHNLKEELNVYTNRLQKCIDIVFPEFNSLFSSKYGIIYMNVLKTFGSAENIASTDIRTIRKCFEIKGRGNRISLTAQQLKDSAKSSIGISSAAEVIKIKHLISQIELINEQLAETDKKIEEFSIQNNSPILSIPGISHFSGTSILAELGEISNYSKPSKIIKAAGVAPYHYESSQYNAQHTAITKKGSPYLRKTLYQIILPVINNNPVFKQYYDLKISQGKGHRCACGHCVRKLLRIIYHLSSTNQQFDDALLR

SEQ ID NO: 490473 - protein, 375 aa, unidentified
MAQGTRWVGLDAARVSALVAGQTQNDGLVKGEAAGRLPIVMGLDQHRAQITAEWIDLSSGEISRGRVVPADRASVRKFLKRFAGRDLEVALEATTGWRFVAEELERVGAGVHLAEPAETSGLRGPKKRPKTDWADARHLRELLLIGRLPESWIPPDHILDLRARVRCRHTLSHQRTEWQQRIQSVLYHHGCPQRRALMTVEGREWLDAQPLPAAAREQITVAVAMINALDVQVAPLTARLYDYAKRQTGCKALIAAYYGIGGLTAVTILAELGDTRRFENSRDVVRYGGLDITVKQSDQHRAPGHLSRQGPPALRWALYEAAQQARHPRSPDREYYLQAAERIGGNRACLALARKLLKRCYHTLRDLGDHALTPA

SEQ ID NO: 490474 - protein, 320 aa, unidentified
MNSHSKIEKIQTETNHVGIDVSKQHLDISIVGSKKLRIANTPTGLRTLHQKLGRLAHPRVTCEATGGYEKLLVASMLDAGIEVCVAAPGRVRYLAHAEGLLAKTDSIDAELIRRFAEKIPLPIQIKQDPAAQRLRQMSDFRRMLSDDIVKAGNRLELAESYLREQLQSQLTHLEDLKKKVEADINAHIRSSEELAQKAARLQELKGVGPVLAATLLAHVPELGKVGDKTLACLVGVAPHPKQSGNFKGKASIRGGRANVRHVLYMAAVSAARSNPILAAFYQRLRTQSGKTAKVALVAVMRKMLSVLNKMIAQPNFSLAH

SEQ ID NO: 490475 - protein, 427 aa, unidentified
MTTRNGDKQEPQFAAFLAIDWADQKHVWSLQSADSELREQGEVEQTPEAIAAWVAQMRQRFGHRPIAVAVEQTRGALVFLLSKYEQLHIFPVPPAMTANLRKAFYSSGAKDDPKDSDLLLDIVFLHREKLRRLSPDTEATRLIQNLVEERRKLVDEKTAQSNRLMAHLKIYFPQIPRLFEDVGSPLVCALLERWPSLEQLQKVRPAVLRNFFRQHRCRQELIESRLKAIGSALPALGDQAVVKAKMQVVKVTLQLIQILHQGIKALDRQIQEAAEAHPDFFIFDSLPGAGAVMAPRLLAAFGSQRERYESAEEMQTWSGIAPVLASSGKQQWVHFRYACPKFLRQTFHEWADYSIAQSEWARAYYELQCRRGKKHHAAVRALAFKWIRILYRCWKDRVAYDENIYLAALMKRKSPLAPAVMAAPVGL

SEQ ID NO: 490476 - protein, 406 aa, unidentified
MLNAVGIDVSKGKSTVAILQPAGVVARKPFNVSHSVKGLSDLISCVKNLDGETRVVMETTGHYHEPVLKAFLDAGIFVSAVNPSLIKRHDSDKNPLRKVKSDPADARKIAKYTLDKWEHLRQHSAMDTSRAQLKTLNTQFHFFMQQKVSLKNNLISLLDLTYPGANDLFDSPVRSDGSEKWVDYVHSFWHVDCVRKIGLKAFTSRYQNFCRHHGYNFQPGKPEELFNASKDLVAVVPKDPIYKQLILSNIEQLNTVSKRIELFRRTMNELASTLPEYVTVMSMYGVGPTYGPQLMAEIGDISRFDHRSAITAFAGVDPGVDQSGTVNHESNRASKHGAPRLRKTLFQIMTTLLQLAPADDPVYLFMMKKKSEGKPYQVYMTAGANKFLRIYYGKVKECLAAQSISE

SEQ ID NO: 490477 - protein, 414 aa, unidentified
MEKQWNIVCGADIHKKFLIATILSRDGKKITNRFGMTLNDLLNFKNWVIQNGCEQVAVESTGTYWVPIHTVLEGSIGLIVGNAYKIKHTPGNKNDLADADWIAELCLNGMIEPSRIFPKADRDLRRLTRIREGYVNDMTREKNRIHHALDSCGIKLSSALSDIFGKAGQTILNGLLEGRTIDDILKDINLKRLKATDEEIKEAIKGSLDFTQILLIRGSLEQMAAIQKRIDEIRKEIKGRIAYRKDDLKIAMSIPGVGFTSASTLLAEIGDITDFKKPEQLAAWAGLVPSVYQSAGKLITGSITKHGSRHIRWILVQVARVIARGRNSKLKRFFLRVKSKKGSNVAVVALARKVLCILHHLLTNREMYQEEGINKKVKIDVGKEFPPQEMGLEEMITYLVRAGYEVRKGLTGGG

SEQ ID NO: 490478 - protein, 450 aa, unidentified
MSKGSGVSRGDKRRNARLAELRLLVPRENAIAGIDLAEDNQAVVVTDHDSKVLARRSPRCKAWQLGEVLDWAVAKAQARGFASVTVACEPTGSRWMHVQQACAERGLNFVCVQTLVTHNARVAEDFTRDKSDQKDAVLIARLTAELRCYRPEVIEEDWAMLRYLGQRRDALVTEATRCRQQITDRLALAWPAVLGAAAAPLESVTFLACLQVAAERCDGDPGKLRRYGLAEFTQIVRGVLPRWGGQRICHRIVAAFHAALGDSRGAVPARRRGALKLAGHALADLRRARTLQAAVEAEMVAQLHVLGIADVLASIDGLSLQVAACILAETGDPARFGSSRALVKHAGLAPCENSSGNSAGQARISRRGRPVLRKAAWRATWAMIHGANPVLAAKYDHLTSRGTGQLAKGQAHIACVAALLRWIYSVITSRTAWDRRIAAGTISHAAAMAA

SEQ ID NO: 490479 - protein, 368 aa, unidentified
MGDINSNMATKSSRETTKLTCGLDLGDKSSHLCICTAEGEVLEQSIVATTTPALARRFQNCAALRIALETGTHSPWVSRLLSLWGHEVLVANPRKVRLIGNSRRKNDRLDAKTLADLASVRPRLLYPIEHVSAQAQTDRAVLRARDALVRARASLISHVRGLVKALGGRLPSCSAESFATKAQAAVPEDLAPALLPLLGQLAEMSTTIRAYDKQVLELLRTRYRQADELRRQIRGVGPITALAFVLALGDPRRFAKSRQVGAYFGLVPAQRDSSESTPQLGISKEGNPYVRRLLVQCAQYILGPFGQDSDLRRFGQRIAGSGSKSAKKRAIIAVARKLSVVLHHLLVTQQAYQPLRSGEPKGELLAVA

SEQ ID NO: 490480 - protein, 419 aa, unidentified
MKNGNTKKVKRINEETLLVTIDMGKVKHTGYYRFPDGAEGEIFEFSNSRNGFEEMWQRVCRAKRSRNLTDIVVGFESTGPYAEPLLHFLRKRNVRLVQVNPFHTKRLKELQGNSPSKTDQKDPKVIADIIELGHALTVIIPEGTAAELRRLTQARERGIQRRSMLMSQVQDLVFLIFPEFMPVMKDITIKSTQYLLKRYPRPQDVVETGVKLLTQSLKKVSRGKLGEERAEALYQAAEASVGLREGQESIVIEIKEIISVIENIERFVKELEKHMSKHLKDIPYSRFILSIKGIGEITTAGLIGEIGDFREYSTISEVIKHAGLDLFEISSGKHKGTRRISKRGRPLLRKLLFFASINVVRKGGILHKQYLQHLDKGMPKIKALIAISRKLLSIIFALVRDHSVYIAQYSEIQQLKEAA

SEQ ID NO: 490481 - protein, 409 aa, unidentified
MMKQNIIFGIDVSSKSSTVCVVIDRIKQGETFKITNDSFGYQDLLDRLNQYLITPLVVFEATGVYSLSLQAFLEDYHIKYLKLNPLKAKKLMDNNLRHNKTDKVDAYRLALIQFNAPQKLRAPQPKEYHELQNASRYYEELTQALIINKNQLHRNLQSTFPQIESILSTSSGRVYWTIVSLFPPAQYVLNHNENQVFQSLLAISGIGRQRAHYLTTRLYALARQAYPYDNESSITIRAIQRNIANLLSLSAERDNVINYMEKLAMQANARSLNIYESIPGIAKTTAVRLVAELGDLRRFDTSAQIDAFVGIDPGRYQSGEKDSHLGITKHGNHLARKILYRTITQMETVKATQPCHITDYYDKKKRSSNSRGYKKIAIASVHKLIRTMFALIKHDQLYDYNVATHNQRL

SEQ ID NO: 490482 - protein, 367 aa, unidentified
MGYPHHRYSEGTGSMAGPVRTVIGGVDTHKDTHVVAALSEPGTLLGTASFSTNVTGYTQLLDWLRDFGAVTSVGIEGTGSYGAGLCRFLQAAGIMVREVSRPKRPWRRRYGKSDPRDAEAAARAMLAGEALGIPQQRNGTVEAIRMLRTARRSALKARTQTINQLRAVLDTAPDELREPLRELSPQALVALARRWRPGAPTGPVAAARVTLKLLAERWAALSTELTQLDAHLRPLLATAAPRLLATHGVGPDTAAALLVAAGDNPERLATEASFAALCGVSPVDASSGRQHRHRLNRGGNREANRALWVIVLVRMATDPRTRQYVTRRTSQGLSKKEIIRCLKRHVAREMYRLLRLEATPLASPLTA

SEQ ID NO: 490483 - protein, 349 aa, unidentified
MGEVSTIGVDIAKSVFQVHGVDADGTVVIRRRVGRAKVLEFFSKLRPCLVGMEACATAHHWARELKKFGHDARLMPPTYVKAYLKRGKNDAADAAAICEAVTRPSMRFVPIKSVEQQSTLMLHRTRDLLIRQRTQLINALRAHLAELGLVAAKGREGLCQLVTVVTECGDERLPSNARFACQAIVGQLHAVQTQISGLDKRITQTHRANPDSKRLDAIPGFGVILSTAVVATMTDPKAFKTGREFAAWIGLVPRQNSTGGKDRLSSISKQGDRYLRRLLVVGAISIVRTARMWPDKYPWLIELLGRRPAKVVAVALANKMARVAWAVLAKGETYRAPTRLSNAAITVAA

SEQ ID NO: 490484 - protein, 316 aa, unidentified
MAVLDESDELVAEQRLKNEHFDELAEAYEGSKATLEATGNYFVIYDTRDQHLDVAVDDPRQTKAIGTAEVKNDRLDAKLLAQLCRADMVAESYVPAKDVREIRTLAHGRKRLVEKRTDFKNEVHAVLDNQGISYDWDPFTPSDREKSHEVDLTPIGRTLLESFLAVIDTLNERITELERLIEETGVAEEETQRLMTIPGVSFFSSVLIFGEIDRFDRSEELVSYAGLDPVTRGSGEKRHEGGMSKQGHSALRWILVQCANVAVNQVKDPYLTRYYARLKRKKNHQVAIVATARKMLVSIYYMLTRKEVYDSPGVPG

SEQ ID NO: 490485 - protein, 427 aa, unidentified
MEVIHPRCAGIDVSKKDAKVCVRVQGRGRRGTSTTVSTWGSTTAEILALGEHLLGEQVSCVVLESTSDYWKPFYYLLEEQLPVMLVNAKAARNVPGRKTDVSDAAWLADLGAHGLLRASFVPPEPIRVLRDLTRARTSIVRARTKEIQRLEKLLEDAGIKLSAVASNIVGVSGRAMLEALIAGQRDPAVLADLAKQRLRHKIPELTEALRGHFSEHHAFMARLYLDRIDAHAADIARLDGRIEEAIAPFRFARELLMSIPGWSQVVADVFIAETGADMSVFPTAEHLASWTGVVPGCNESAGRVKSGATRPGNRHLKAALGVAALSAARTKDTYYSVRYRRIAGRRRPMRSRRNNPASSIAGQIALVAIEHKMLTDAWHMLVNGAFYRDPGPDYYTRHHPGHTKTKAIKQLQSLGYKVTLEPLTEVA

SEQ ID NO: 490486 - protein, 359 aa, unidentified
MVPIGVDVHKRRCKVVEFSDSKVKVRKPMENTREEWLELLAELPPDAEIALEVSTAGYFAMSVLEEAGWGERAHWVHTAGIDSPRKQKYDRLDAERLARKLAVHHLDLLPEAWFPPAEIRELRLRSRQRCWLARLRTQAKNRLQSLLEMHGLQPPGSDPFGRRGRDWLDQQKLPAALSESVPQMLRLVEVLGKELETSEGYLEGVESQFPELSLLRTIPGIGPLLAPVIWSEIGCLKRFTSASALVNHTGLVPSLYESAEVSVQGHITRQGPRWLRWALITAANVAIQHRNPLARRYYRLRRNKKKPNVAKTAIACSLARCIYGVLKHRSPFREERWGRKVGALEQEACGSAGSTKTVL

SEQ ID NO: 490487 - protein, 355 aa, unidentified
MNVKKYIGMDAHQETISIAVMTADGKLVMESIVETKASTILQFVQGLRGDLHVTFEEGTWAAWLYDLLKPHVTELVVCDPRKNALLKEGNKSDKIDARKLADLLRGGYLRSVYHGENGLRTLKELARSYLTISQDLTRVMNRVKALYRGWGIACGGQQVYAPRHRSEWLNKIGEAGVRRRAEFFYQQLDAVRTLRQAVRRDLLAESRKHGATKLLRQIPYIGPIRAALLIALIQTPHRFRTKRQLWTYSGLAIETRDSAQYRYVAGQLQRSKKPQQLRGLNENHNHDMKAIFKSAAAMASRREGPFQDFYLELLTKGMRPAMARLTLARKIAAITLILWKKGAHFDAEQLKPQAA

SEQ ID NO: 490488 - protein, 421 aa, unidentified
MKGLRTKRIRTVREGALMATVDIGMASNTGYCITADGRDTKPFKFSNTREGLDKFWDMITISKKRFCCNEVIVGYESTGPYAEPLLHYMMSKPVKIVQVNPMHTKRMKEVNDNSPLKTDDKDPRVIADIIRLGHALTVVVPEGDAAYLRRLNNARERHIGERTALFNQLQQLVFLIFPELKTVMKNIKVKTAIHVLKKYTTPDTIDKLSIEALGEEMRKKSYGKYGIKDAEALINHAKNTVGIKEGVAGLVLDIRHILMQLEMIDGFIAEIEAEMVAILLRIPYSARLLSIKGLGTVSVAGIIGEVGDFMKFSTQSEIMKLAGLDLYEISSGKRRGERRISKRGRSLLRKILYYASIQTIRKNGIMCEYYAHLISRGMKRMMALVAIARKLLRIIYAVVRDGSEYIADYGLLTRKVIKKAA

SEQ ID NO: 490489 - protein, 421 aa, unidentified
MNRDRPIVGIDVAKESSYYCILTSTGEVFLKPFEAKNDLQGLNYVLERLQKTEETFGIKPAIVLESTGHYSSRLVHTFTSHMYEVFLVNPIQSHCIKTAAIRKVKTDKVDCEDLARLYMLKDLTPVHIPSSDLADLKVLCRTLHELIKQKARTVSKLAASLEPIWPGFHLTFSNLSSKGALAILSNYPSPTSFLKADQEALIQSIAIVSRRNRCFAEKKYQILRKTAEEALLIGVPVRAYAVTVETWVVCLKQIIDLIDDLNTSIRSLSSNISDVALLQTIPGIGESLAPIIAGEIGGINRFHHAKQLVAYAGVDPSVRQSGKFVGTKNKLTKRGSPYLRWAIFIAATVSVRKDSRGFLNPVIGEYYENKIKIKARKQALGAIMNKLLRIIFSVLKSRKPFQLRTSLNLVVKDQNRQLTVA

SEQ ID NO: 490490 - protein, 415 aa, unidentified
MALKIVYKVCCGIDVHKTFVVACIASTNKQGVTTYKGHRFSTYTKGLKELLQWLLESNCKDVCMESTGKYWFPVYNVLEKDCSIVLAHPKYVKAIRGKKTDKKDAKWIADLFKHDLVAGSFMPPADIRQLRDLMRYRYKLTCFKSSEKNRLQNCLTVSNIQLGNVVSDTLGKSSKKILDKILENPLDTSFDIKPLIHGSMKDKIPELELAIDGYITPQQAGKLKIIKKHFEDLESRKAELEELILALASPYQQELDLILTAPSFKNIFSAITVISEIGVNMEAFPSAKHLCSWAGLTPTNNESAGKKKSVRVSKAGCYIKPLLVQCANSVVKSEKHPEIRNRYLRLRKRRGHKKAIIAIARMLLTALYNMLDKKEPYNAELYRKSDVLPAEREITVEQAILMAKFQGYRIKSATE

SEQ ID NO: 490491 - protein, 356 aa, unidentified
MQNKIIKNLDFSGHKVFIGLDVHSTSWDVNILVDEIEHRKFTQPPSPDILCNYLKTHFPGADYFSAYECGFSGYHHHRRLLELGINNIVINPADLPVTDKEKVNKKDPVDSRRISRSLQNKQLKGIHVFDPEHEQFRSLNRMRWIAAKEHRRVKNRIRAFLQYYGITPPAELNPEYWTLVFVNWLNRLKLSDQAGTLSLEYLMNAYQDSKNLLLKTSRHLRQQVKEKYSDIYRRLMTIPGIGLINAICLIAEIGDMSRFKSCKHLASFVGLVPRSHQSGPKDPNCSLTYRSNKYLRATLIEAAWMAMRFDPSLLKYYKGRIPKYKAQVAIIKVAHKVLNRIRYVWLNEKDYQKGVI

SEQ ID NO: 490492 - protein, 326 aa, unidentified
MQGKELSEQTTAAKSNVGIDACKSWLDTHVLPSAQTLRVPNTGEGIRKLKRWLDRFEVSLVVVEATGKWHRQVHRSLIAGGIAVAVTDPFRVRAFAKAKGILAKTDRIDARVLALFAALMSPDIRPPASQALEELAELVTARNSAVAEQTALKNQLAAACGTFLKRQLERRCTRIARDIEVIEREIARHIAADEGLARRYVILTSIPSFGPTVAATLIACLAELGACSRKQIALLAGVAPIADQSGKREGVRVVWGGRPALRRALHLAALSAAAHNPGMKVFYQRLIAKGKAAKQALIAVARKLIVLANTLIAEDRTWQPSPPKLA

SEQ ID NO: 490493 - protein, 364 aa, unidentified
MNKCHSNTELSSLEGTRCQFNGGRCAIKLGIDVHQDFYVVVMQEGGANPKPPQRFRKEAFLHWAAKLKREGGEVHAVYEACGFGFALQRQLSALSIQCHVVCPQKLDEQNRRVKTDGLDAKALCLKLDRFVQGNRDALAIVRVPSEEEEQARAIHRQREQLVKARKQLEAQGRSLMVNHGIEPVQNWWKPRTFAALPMPRWMKELLQNSQSILLGLQEKIAALTIQLQSAASPNQPRGLGKMTSVIIDREIGDWNRFSNRRQIASYTGLCPGEYSSGNTRLQSCVTKHGNPRLRAALVELAWRLVRFQPDYKPVRKWRQILAKGALATGAARKKAIVAVARQLAVDLWRIKTGRLRAEELGIIN

SEQ ID NO: 490494 - protein, 328 aa, unidentified
MWASSPNSKAEIAYLMEYKEINVGIDTSSNQLDFYVRPTGQFFSVNNDRDGIKQAVDKILALKPTRVLIESTGRLEMDFVCAADKRGLPIVVCNPSQIRNFAKSSGRIAKTDKLDAMDIAHFGEAMKPALTVIKPEKLREISDLLAVRSQCLEMSTMQKNRLKRMPKSVHDPIRKILTAIKSELLKIDKQLDKLISSVTEWKEKRDLLLSAKGVGNVLAYTLMSELPELGKLNRKEIAALVGIAPMNRDSGRFQGKRFIRGGRHRVRTVLFVSMMSAIQCHPKLKPMYERMVAAGKPKKVAIVACMRKQLTILNTMVKNNTHWDEKMA

SEQ ID NO: 490495 - protein, 445 aa, unidentified
MSQGSGLSRGDKRRNAKLARLRELVAVGNAIVGIDLADKKQAVVVCGHDSQVLARKTVKARAWELGPVLDWARGVAERCGFVGVTVGCEPTGHRWMVVNQIAVQRGITLVCVNPMLVGRAREAEDYTRDKSDDKDAMLIARLVAQLHCYVPECAEETWARLRQLGARRERLVTEATACVQQLRDLLECAWPAVLEAASKPFDAANWCAGLAVVLERCEGHPQRLARWGLARFEAAVIRELPRWGAQRRRRRIIEAMFVALIDPVGVMTQRRGALERARGVLADWRWTKTRLAQVQTCMVEVLDELGLTDYLTSIPGLSAVGAAAILAETGDPARFDSPRALVKHAGLCPRENASGTFQGRSRISRRGRPRLRLAAWRAAWGAIQHNPVMAARYRYLTTRPHNRLTDGQARAAIAAALLRWIHVIATGCVHWDATIAGATDLPTAA

SEQ ID NO: 490496 - protein, 428 aa, unidentified
MTNFISVGIDVGADFSFMSIALPNQTFIGKPFKIVHNNLNSLERAVLVIREAEELHSMKARIVMESTGVYHYPLFCYLRDKGFCVAVINPIITKNSTNMNIRKVENDKFASRNLALIGLKPDLKISVIPADAVLDLRTLVREYYNLVDCRSAYVNKLKGVLRVAFPQYVGIFSKITVKTSLALLEKYPSPDDFLSARKSSIVNTISKTARFGKTYAEKKYKAIVDAAKSAGVFGYFLPSNSTQIRQFVTFIKKYNEEIAGVLALMHKLVDDYAGETFVKQIRLVETIPGAGFLSAVTVICEIGDFSVFTSPKQLFAYFGIDPAVKQSGNFTGTKVKMSKRGSSIARRAIYTIALVGVGLTCKGIANNPVLREYYLRKCQSKRKMVALGAAMHKVCNIIFAVLRDNKAFTLLTPEQHIQNYAHKLSSAA

SEQ ID NO: 490497 - protein, 352 aa, unidentified
MTSQRVPTIIIGVDTHKDTHVAVALDSQGTTLGHRSITADMDGYLELEQWAVTLGQIKAFGVEGTGSYGAGLSRLLLTRGHRVIEVSRPNRLIRAQHGKNDHFDAEGAARSVLNGQATALPKPHNGTVEMIRQLKIVRDTAVKSRSQAMVTLKSLIINAPTALREKLGKCRGKMALIRTIAAFRISQERTLLSLTKTAMRSLARRWLALHDEIAALDCDLDPLVESKAAGLHAAHGIATMTIADMLILIGDNPARIQSEAALARLCGVCPIPASSGRTNRFRLNRGGNRQANAALYRVAIVRMRTHPPTLAYVAKRTANGKTRSEIIRCLKRYIVREIFTALCRPKEPELPA

SEQ ID NO: 490498 - protein, 373 aa, unidentified
MTSMTVTPPEPVASRQIIIGVDTHKYAHVAVAIDHLGARLAAQHVAANREGYAQLEAWAAALAGNGRVIAYGVEGTGRYGVGLASFLRRTGRRVIEVNRGDRRSRRSNGKSDTLDAEAAARAVLGGQATAVPKSADGTAEMIRQIKIARDTARKAKTSAIITLKALIVTAPADLREHLAGTSDKVLIDRCASLRPGAVNSPTASAKHALRTLAKRYQALEAEIREHDTILDDLTRSHAPTLREGLGIGADTAAEMLIVFGDNPDRVHSEAVFAKLCGTSPVPASSGMTNRHRLSRAGHREANAALYRAVIVRMRFHEPTIKYVARRTAEGLSKRDIIRCLKRYLAREVYQAVMTDHRARQAVPTSASQGTLDL

SEQ ID NO: 490499 - protein, 379 aa, unidentified
MAILFVGIDLAKSVFAVHGVDELGKPALVRPSVPRAKLHELIATLPACTVAMEACSGAHHWARLFAAHGHTVRLIAAKFVSPYRLSGKRGKNDAADAAAICEAVQRPSMRFVPVKSEDEQARLCVHRVRQGLVEQRTSIINRIRGLLAEFGVVLPQTASVIRREAAARLEDLPGWANIAVGDSLSELHRLDERLAEYDRHVSRMAAEDSRSKRLMALPGIGCTTASALVSTIGSGRDFKNGRQLAAWLGLVPGQHSSGGKPRLGSITKAGDSYLRTLLVMGAKAVLQAAKGKTDRMSRWAIALEARRGYWKAVIAIAAKNARMTWAVLAKRRTLQAARCLSLHIERNRSPRDGKALMSRGWTRAGSARLYRRGTSSGLD

SEQ ID NO: 490500 - protein, 477 aa, unidentified
MPLLGRNHNHTNMKSKTPKSKKKKQKISVDQGWEAINPRAAGIDIGAREHFACVPAGVTPKNVRSFGTFTADLGALADWFKECGVTSVAMEATGVYWIPVFQILEERGFAVILVNARQTKNVAGRKSDVQDCQWIQRLHTYGLLQGSFRPEDPYCVLRTYLRYRDELVSARSTQCQHMQKALQQMNVQLTQVLSDVTGVSGMAIIQAILAGERDPVKLAALVDRRVRATPVQIQKALEGDYRAEHLFVLRQAFSLYGTYEERINACDEQIVRETATLSDKVDPQQKPLPPRKEGRPASKDKMQGQDMREVLYRKFGADLTAIEGIGVATALVVLTEVGPNVAGFKTEKHFCSWLGLCPDNRISGGRILSSRTRRVINRASDALRMAAVTLERSQSALGGFYRRMKGRLGAAEAITATAHKLARIIYRLIKHGESYVRQGMEAYERKFQERKLYALRRTAISMGFNLVARQEVTSPVS

SEQ ID NO: 490501 - protein, 388 aa, unidentified
MQTVADRPEAPTAIRTDLGAIFVSLELSRSTWLITSLWPGGGEKMSKQVVRGGDVAELLERFARLREKARARTGKVFPFVVIQEAGLDGFWIDRALQNQGIESHVVDPASIATSRRRRRAKTDGIDGEALVRALLAYKRGEPRVCAMVKAPTPEEEDRRRLCRERKVLIGERVQHVNRVKGLLFSQGISGYEPLRRDRRERLDTLQTGDGRLLPDHLKAQVCRELDRLELLLEQIKAVEAERDVLLAAQQVAAPAPAAMLLDIKGIGPEFAAILWSEGLFRHFDNRRQVASYAGLAPTPWQSGSVDREQGVSKTGNPRLRTTLIQLAWLWLRHQPQSALTLWFEERVRRNGGRLKKTTIVALARKLLVALWKYVTAGIVIEGAVMKRT

SEQ ID NO: 490502 - protein, 427 aa, unidentified
MEIIVACCAGIDVHKKRVSVCVRRVGPTGRVTNKLREFGTMTGDILALGDWLAKYDVSQVAMESMGVYWKPLWNLLEDRFTLLLCNPREVKQVPGRKTDTRDCQWLAQLLQYGLLRSSFIPPRPQRELRDLTRHRAQVVGEKTRAANRIQKVLEDANIKLASVASDVMGKSGRMMLEAIISGEEDPKRLADLAQRKMRAKIPELRRALRGGVTEHHRYMLRTLYDHVQYLEKTIAGLNEHIALVLGCDELNEERSQGEAAVPFAEAQALLETVPGIDTCAARTILAETGTDMSRFPTPGHFASWAGLCPGNNESAGKRKSGKTTHGNRWLKRVLTQSAWAASHTKDTYLSAQYRRLAARRGKKRALVALAHSIQVSIYAMLEQRVTYTDLGPEHFQTIAPHKRAKHLKRQIEKLGYAVTIEELEHVA

SEQ ID NO: 490503 - protein, 348 aa, unidentified
MHTVVVIGIDPHKGSHTAAALGSGGEVLAQLRVPANRAMLNRLLKWAAAWSERTWAVEGASGLGLLLAQQLVNAGEAVVDVPATLAARARLLHTGHGRKTDALDAVSVATVAMHSPSLRRVAREDHGAILRLLADRRDELTQERRRAVNRLHRLLRELCPGGAPTDLAAGDAAALLTAIRPVTAVEHERKSMARELVADVRRLDRDLTINRKRCAEAVAASGSTLPEILGISDVLTAKILGHTGDITRFATAGHYASYTGTAPIEASSGDIRRHRLCRSGNRSLNNALHLAARVQAMHPGLGQEHYQRKLAEHKTSREALRSLKRQLAKVVYRALRADHDRLVVQRLT

SEQ ID NO: 490504 - protein, 347 aa, unidentified
MAHFVGLDVSVKETAVCVVDEVGEVVLEQKVPTEPDDIVTLLTSIGEAYGRVGIEAGPLSQWLVNALAAAGLPVVCVETRHMQALLKGQQINKSDRNDARGIAQMMRVGLFKPVHVKTLVAQEQRMLLTSRKLLQRKLLDVECDLRGTLRNFGLKVGTVSTRGYEARIRELVEGFPKLAAIVEPLLIVRRVMRQQFAVLHKMLLDTVRHDPICRRLMTAPGVGVVVALTYRATIDQPQRFVHSRAVGAHVGLTPKRYQSGEIDYDGRVSKCGDTMLRTMLYEAAQSLLTHSRKWSWLKAWGMRVAQRRGMRRAIVAVARRLAVILHRMWVDGTEFRWSNGPAVAKTA

SEQ ID NO: 490505 - protein, 341 aa, unidentified
MNTLYAGIDLHSNNNVLVIIDGSNMVVYEKRLKNELAAVLAALAPYGPNLAGVVVESTFNWYWLVDGLEAAGYTVHLANTGAIQQYSGLKHGDDASDARWLALMLRLGILPEAYIYPADLRPVRDLLRKRTFLVRQRTANILSIQNLVTRNTARSISADDVERLTPEKVAELGLPEYVVLALKASLVMTTCGTEQIKALEKAACARVRLTENFQNLTTVDGIGTILGLTIMLETGNIERFPSVGHYASYARCVDGARISNGKKKGKVNTKNGNPYLSWAFSEAANHCIRFNPDAARFYQRKMAKCHMMVARRALAHKLARACYYILRDGVAFDSDKTFGGK

SEQ ID NO: 490506 - protein, 410 aa, unidentified
MKSAVITAVGVDVSKSKSTVAVRRPGGEIVMHPFDVRHTNSDLKKLVSTLKKLGGDIRVVMEHTSMYWRPIALTLKKAGFFVSAVNAMLIHDFSDNSIRKLKTDRADALKIANYALTFWDTLPLLNDEEETRLLLKMQSRANERITATATVLRNGLIALADQTFAGVNLAFDPNTKNTDGHEKWVDFFLRYWHRDCVCQYFMEVFTESYRGWCKRKNYKFRTATAHKIYIMAQECVATLPKCESTKTLIGQACKSLNAVCEARHNTQLEMQRLAALLPEYEIVMQMKGAGPVTGPALMAEIGDVRRFKNKKALVAFAGIDAPPFQSGAFESKSRHVSKRGSPHLRRTIFLVSNIILTLSNPENAVFCFMGKMLRGKTLLCLYCCRKRKVLAHLLCSRERVPSLSSSSGCL

SEQ ID NO: 490507 - protein, 615 aa, unidentified
MSIATPLDRIGVGIDTARYGHRVSFLRPDRQPAAKPLTVLESRAGYRALHERLEQLHQQHPQARFHVRIDAAGQYAANLEHFLRGLPLPLTLSIGEPKRNKDYQKAHFPKRTTDDTESQAMARFAVVELPTATAPVGPALLLLREVAGRLQAKVKQSTQAINRLHNLLARVFPELANLTDDLSASWVLRLLDKYPTAQRLGQARLATLQKIPYLAADLAEQLHLVAQQSVACLSGDVAETLMRDLVSQVRHTQQAEGQMRRLLSDAYAALPAAAHRQVVTVPGIGVATAAVLIAQTVDINRFATPEHFVGYFGIFPEENTSGVDKYGNPVPPGTMRMSPKGNDLVRSYLWNAARAAIVHNPAIAALYRRLKAKGTRGDVALGQCMRKLLHLVYAVWKTNRPFDANHFAGQTARAAAQTGAGADPPAAGHDQTPPRVVPGDSAAPGNEGAQRPARPSALAPGGNETAVGHKRDVPAKEVVTTATPTVAPPPSAVKPVPPAHRAARPKVDFAFLRQQVSMEQVLQHLGWWHRLRGRGLQRRGPCPIHAPANDTQPTFSAHLGKHIFQCFHADCRAQGNVLDLWAAIHQLPPYQAALHLAETFHLPRNREEEPVGGTR

SEQ ID NO: 490508 - protein, 352 aa, unidentified
MLYVGMDLHKNTSTFSVKTQQGKLVDSCKIPTEPSAVKGYLKKFNQSLSLALEPVSQWHFYGDLIQKLGIELHLANPLRVKAIASARIKTDKIDANVLCDLLRTNLLPEAYFASPEIRFWKEMVRFRTSLIHLRTEVKNKIHSILFKNALHHPFTNLFGKAGTKWLGSLELQEHYQSNLKHYLGLINVLTILIKEAEEKIEKTVSNHPQAKLLTTIPGISYVSGLTIMAEIGDVDRFPSAKKLQGYAGLVPSTYASGDRVAHGRITKQGSRWLRWTMTEIAQRQLICKRIPGFGWYYQRIKQRKGSGAAAVATARKLLAVVWRILKDNRSFEIIPPKLEVQDAHRKTIVYSR

SEQ ID NO: 490509 - protein, 461 aa, unidentified
MNRKQRRELARKIQADDVNLEVVHPDAAGIDIGNECHYVAVPSKRDSEQPVRRFGCVTAELKAMAEWLKQCGIRTVAMQSTGVYWIPVYDILEAAGLEVYLVNARETKNLPGKKTDVQESQWLMKLHTYGLLRNSFRPTAEIRRMRNYWRQRNDLIQSAARHIQRMQKVLTQMNVQLANVISDVSGVTGQAIVKAILDGERDPYQLAELRDPRVRATKEQIARSLEGNWQEDLLFILRQEHEAHGFCEKQIAACDQELKEYLNEREDRSQGAHLEEEKRRNRRMKKKGHKPQQFDMREALFRMTGVDLTRIDGIDVMTASTVISEAGWDMSKWRTEDHFVSWLRLCPDNKVSGEKVIGKGRLPTNNRLTTALKIAATSLKQSETYLGAQFRRLRTRLGSPVAIKAMAAKLARLVYRMLRYGMRYVDRGAQIYEEQHRQRQIIFLKRKAAELGLKFVETAAA

SEQ ID NO: 490510 - protein, 388 aa, unidentified
MTQTLTAASKPVALDYDNTLVVAIELSNVRWVLAAQVPGLPRLKAKRSVEPTAEALMAAINGYRNRAREAGRMVERVIAVYEASWSGFWLARWLERGGIEIHTIQPSSVPVDRRARRAKSDGIDAELLLRTLLAWLRGEPRVCSMVPIPDEADEDARRFIRERAELVAERVSLVNRIAAVLATLGVRDYNPLLRNRRGRLDELRTALGTALPPQARAKIVRMIDRLELVQAQVAELDQERDAVLEDRAPDKAAKMIQQLATLRGVGVQSATVLVREAFVREFPNGKALGSYAGLTATPYSSGGAEREQGISKAGNRRLRTVMVELAWLWHRYQPGSVQVSWFRERANAAGRRARKVMIVAMARKLLIALWRFATQGVIPEGAVLKPAA

SEQ ID NO: 490511 - protein, 402 aa, unidentified
MGIDLHKETHTAVMLDCWNTKLGEITIENKPAEFHKLTRKVSRYVSENKTAVYGLENAYGYGRSLAVWLLEKGCIVKDVNTALSYAQRKSVPMYQKSDSYDAEAVALVLINMLDRLPDAVPDDKYWTLGQLVNRRDNINTHQQRLKNQLHEQLCMAYPSYKKFFQDIGRPTALYFFGEYPSPVHLTGKTAEELAEELRPVSHNNCSIKRAERILELVKADGETRRDCQESRDAITRSIVRDLQHYQKQRDEIEKSIETLLPEFHCTLMTMPGIDMVTAANMLAEIGNIERFPNAKKLVRFAGIAPVNFSSAGKGKDVCPKQGNRRLQAIFYFLAIQMVQVSPGGVPRNPAFREYFLKKLKEGKSKPQALICIARRLVNIVYGMLKSHTEYREPERETGKETV

SEQ ID NO: 490512 - protein, 410 aa, unidentified
MEVLHAHCAGLDLHKDSVVGCIRHMVEGKVRTEVKTFRTTTQELMALSDWLSAEGVTHIAMEATGVYWKPVWHILSDSEFELVLANAAHVKNVPGRKTDVNDATWLADLMAHGLIRASFVPDEPTQQMRDLLRTRKQLVRERNGHTQRIQKTLEDANIKLDSVISNIVGVSGRRMVEALIDGQTDPEALAALADGRLKATPAELEASLRGRVTDHHRFLLRLHLDQLDALDAAIARIDQEVDSNVEPFRVAIELLSTIPGVSSLSAEVIVSEIGIDMSRFHTDGQLISWAGLCSKNDESAGKRRSRRMKKGAPWLKTTLIQCAWAATRTKGTYLQAQYLRLRSRRGPKIAIGGVAASILTAAYHMLKNGTVYQDLGADHFDNRAKGKQVLRLLNRLRNLGFAVQITPVAA

SEQ ID NO: 490513 - protein, 370 aa, unidentified
MKEPTTSYIGLDIHKESIAIAIADADRAAPRFVGTINPVPAELCKAMRRVCTKETTLIVYEAGPCGYGWVRYLRKQGWACDVIAPSRITRKPAEKRLKTDRRDALLLARESRSANLTRIVIPDERDEAIRDLTRAREDAVGARLRVRLQMQAMMLRHGRHYEGKRSWSQAHDRHLSTIRFEHPAQELAFNEYRLASKEACERVERITGALRVQCEEWRMNPVVKALMCLKGIDFVAAVTFVAEMGDLTRFAHPRALMAYLGLVPSEFSSGKSRRLGEITKSGNKHARRILVEAAWNNRFKAQVSRCLEVRQEGQPKIIRDISWKAQLRLSKRWRSLSMGRKLAQNKICVAIARELSGFIWDVARHVKLSP

SEQ ID NO: 490514 - protein, 392 aa, unidentified
MGFTSDCVVIGMDPHKRSATIEVMSGGEVILGGGRFGTDRDGYAAMAGYGRQWPNRVWAIEGCAGIGKHIANRLLADGEQVVDVPPKLSARARVFATGQGRKTDATDAHSVALVGTRMTGLRPVVNNEQLAVLRILADRRRSLGEDHTRMVSQLHQLLLELIPGGAKKDLSARQAKVLLAKVRPRDAAGKTRRRVAAELIADLERVYARKKDANKELTELVAATGTGLLDLNGIGPSGAARLLVEVGDITRFPNKAHFASWNGTAPIDASSGDQVRHRLSRAGNRQINRVLHIMARVQIRNPSEGRDYYERKKADGKAPMEAMRCVKRRLSDIIYQQMLNDTLAPTRTGPGGHRGTTTDSSATGSHPHAGSSEKSLPGPAVDQPTTPLRTAS

SEQ ID NO: 490515 - protein, 343 aa, unidentified
MDQYVALDVSLQKTAVCVLNVSGRVLIEADVPSEPAALIAFIQTHAPGAARVGLESGPTSPWLWHSLKAAGLPVVCMDARHAHAALSVRPSKSDRNDAHGLAEMVRMGWYREVQVKSLAAHERMALLGVRRRLVDMRVEIDGQIRGILKTFGLVVGSGNKGAFAQRARMLAQDHPVLSALIDKLIEVREVAVAKVAALDKEIRRFVRDDLTLRRFMTVPGVGPVTALAFRSTIDEPNRFKRARDVGPYLGLTPRRYQSGETDRQGGISKCGDRFTRTCLYEAASVLLTKVQRWSPLKAWGTRLARRIGSKKARVAIARKIAVILRCIWTDGTEFWWTKETATA

SEQ ID NO: 490516 - protein, 353 aa, unidentified
MAHLSLGVIPNREDSVRKLVRKLCAVEELRFCYEAGPTGYVLYWQLTSMGAKCEVMAATLVPVKSGDRVKTDRRDALKLARNYRAGELTAVWVPDAAHEALRDVVRAREAAKKDQLRARHRLSKFLLRHGRRPPMGAKPWTMKYLEWVKREVHFEQLAQEATLLDYLHEVEHAAARIARLDGAIEEAVKVAPPKMRAVIEALQALRGVAHVAAVTVVAELGELSRFSRATQLMGYGGIVASENSSGERTRRGNITKAGNAHLRRVVVEAAWAYRHRPDVGATLRKRQERVSEEVKEIAWQAQQRLHGRYRKLLAKGQNKGVVVTAVGRELLGFIWAIGTKVEAARKESLQRAA

SEQ ID NO: 490517 - protein, 440 aa, unidentified
MAVRKRDDEVFPNAAGIDIGASSHWVAVPRHLADDPVREFGAMTGELNAMADWLIACGVDTVALESTGVYWIPVYEVLEQRGLKVWLVDARQMKYVPGRKSDVQDCQWLQKLMSLGFLRAAWRPDGEVCTVRAVARQREVLLAEQASWVQRMQKALVQMNIQLTEVLTDVMGLTGQAIIRSIAAGERDPKALARHRDGRVKASAEKIAKALTGNWRDEHVFVLRQSLAMYDDIARHLGECDTKLQALLTELGQAKVDLGKAPRGGSKLRREFDARQILANWAGVDLTRINGMGLGAVTKILCELGPDLGRFETVKHFCSWLGLCPGTKISGGKVLSSTTKRSANRVRQALKMAAMSLSHSDSALGAFYRRLCSRMDKPSANTAVAHKLARMVYFMLTRGRGLRRPGQQRYEEQQRQRSVAALKRRAAALGFDINPISVPA

SEQ ID NO: 490518 - protein, 338 aa, unidentified
MDIIKQVVGIDVSKDTLAVCYGTVDANQNQQISKSVTFDNNLKGFKELMSFVRKNRGQLQAPLHFVMEATGVYYENLAYFLNEKHQKVIVVLPNKTKNFSKTLDIKSKTDKLDAQMITQFGLERQMRLWSVPSTLIKAIKALTREYHSKKDMAAQVKNQLHAKEYSHIPLKESLKRSQSILSVFEKQLREIEKEIKELVKQDDDLNDRINKIDKIEGVGFMTIVSIIAETNGFALIENAKQLASYAGLDVVYNESGLKKHKTTISKKGNKHLRKAVYMPALSAVKHNPKLKQLYTRLVIKKGIKKVALIAVARKLLILIYTIFRKNVDYVPNYNLAKG

SEQ ID NO: 490519 - protein, 319 aa, unidentified
MTDPATFVGIDVSKDTLDVHVRPQGHAFAVPNGPQGLADLVARLAGARPALVVLEATGGLGHACAAALAAAGHPVAVVNPRQARDFAKATGRLAKTDAIDAEGLALFAERVRPEPRPLPGEQAREFEALLQRRRQLLEMRAAERNRLGAAAAAPVRASLQAHIDWLSKQLEKVDKELGAAVEASPVWRAKDELLRGIPGIGPAVSRTLLAALPELGALTRQQIAALAGLAPVSRDSGRRKGQRSIGGGRAEVRSLLYMAALSAARYNPALRGFSERLRRAGKAAKVRLVAVARKLLTIANAVLRDGRRWDAALCGTERG

SEQ ID NO: 490520 - protein, 350 aa, unidentified
MKIRHPIIIGIDTHKATHVAVAIDTQGTRLAALSIPANSKGYLELERWSCGLGHVQAFGIEGTGSYGAGLSRCLLAQGHHVVEVTRPNRQLRYTQGKTYSLDAEGAARSVLSGQANSHPKTQTGSSEMIRHLKIARDTAVKSRSQAMVTLKTLIINAPADLREVLDQIKGKIGLIRHIAAFRPGDILNTLASAKAAMRALARRWLLLHEEILGHDKELERLVIKRAQDLMQSHGIATMTVAEMLILVGDDPTRIRSEAAFAKLCGVCPIPASSGKTHRFRLNRGGNRQANAALYRVAIVRMRSHEPTLAYVKKRTKDGKSKSEIIRCLKRYIVRENYSQLCVPQTIKIAA

SEQ ID NO: 490521 - protein, 447 aa, unidentified
MIGAILERCAGIDVGKKFCVVCVMTGAADEEPQTETRQYGTTPGQLEHLRQWLLEKGCTQVVMESTGSYWKPIFNVLEGSLEVVLANARQVKNMPGRKTDRSDAYWLAHLLRHGLIAASFIPPQQIRDLRDLTRRRRKLMAAGAQERNRVQKELESANVKLGSVLSDLFGVSGQQMLEALLEDRLGAQEIAQFAQRRLKKKIPEIIAALEGHRMREHHRFMIRQSLEHMAFLEEQVQALDQQILEKVEPYAKEMELLQTAPGVKTVAAASILAETGADMRQFRDGHHLASWAGVCPGNNESAGKHKSSHIRRGNRFLLATLAEAAWAASRTKGSAFQARFNRLAPRRGKKRALVGVAHSLLLVVHAMLRNGVPYQELDSPYLSQKRRKAQVHYHMRCLRRLGVPIWMMEGSGGEDLAVLEDPAETPPTPFMPPPAAQVGEGDSAPHI

SEQ ID NO: 490522 - protein, 497 aa, unidentified
METQTEFVPGERRCIGLDVHREFAQVAVWQGGLVWQAGRFATTPEGVRGFAEQLGPADEVALEATGNTWAIATVLASRAGRVVVSNPAKTRAIAEAKVKTDKVDAEILAQLLAADYLPAVWRPDPATAALRRQALRRAHIVRQRTRLKNQVHAILHRNLIPRCPAADLFGHKGRRWLAEQSLPPDERGAAIALLRQLDFHAQELREIDTDLGKVALDRPEVLRLMTVPGIDATVALSIVAAVGDFTRFRTPEKLVAYFGLHPRVRQSGGQPASHGRITKAGSAHARGMLVEAAWSASKAAGPLRAFYQRVQARRGMQIAVVATARKLAVLCWHLIISGEDYAYAQPSLVAHKRRKLELRAGLPSARGQKGKSSGYSLQAVRAAERDLAAQAEVAYRVTVAAWQPTRPTGKTAAGTPATRTSTPDLPAPVLRVAGGRGRHHWGATFEALSGQRGAAGLTAPHPALRDGVGPRPPPPNATPVLATVKVVRPRCAAGAPP

SEQ ID NO: 490523 - protein, 342 aa, unidentified
MTAIGIDTHKATLAACAVDELGRAIGEATFANDPAGHVAFIAWARSIASEATIGIEGSSSFGAPLAWAVHHAGLSVREVPPHLSRTERQRTRRPGKSDPGDALAIARVTARETNLPPIRLPDRTSELKLLLEAREDLVAETTRVRNRLHAHLLALVPGYGGTVANLVAARHRITVGRLLRGNTAVQAELARALLARLARLERETGALTRRIGALVDGHPLLGLPGAGPITVARLIAEVGDVRRFRTADAFAALAGVAPIPASSGQIQRMRLNRGANRQLNRALYVIAVSQSRFHPPAKAYVTRRIEVDGKTWREAIRALKRLLVRPVFRLLVRGSIVPAEAA

SEQ ID NO: 490524 - protein, 370 aa, unidentified
MLDTTTFVGLDVHARSIKAVSLDVMTGEVRCATFGYDAGAVAEWVRSVDPKAKCVYESGVTGFDLQKRLSGLGVDCVVGAVSKMIKPSADRRRKNDRNDAEFLARMLSVGNVVEVWVPDDECEAARDLTRALEDARDDLSRSKQRLSKFLLRHGLVFDERTPTGRRKGNWTRAHWSWIESIRFAEGADNDVLAYYVDAVRRAAEEKARLEGLVEAEARKPRWRRRVDSPRCLKGVDTATAADLVFEAGEFSRFRNARSFAAWVGLTPSEHSSGESDRRGAITKAGNKHLRKALVEAAWHYLTCSGRPKDLAKGQAPDRVARRHAAKGVRRLVERREALLARGVHNNKANVATARELACWVWAVGLMAEEA

SEQ ID NO: 490525 - protein, 400 aa, unidentified
MLSIGIDVSKGKSTVCGMKPGGEIVYTPFEIQHTREGMSDLVSLLRSSGEEVRAVLESTGSYHCPVVAALLENGIFVSVVNSLRMKRFCSQSIRKVKTDRIDAMQIALYGLAYWQELQPTRLPEDTYRELQLLARQYYQMTSMLIKAKVDFNALCDQVLPGMQELMNDHAGRHKLSDFVLRYRHTTHILEMGETRFRKDYCKWAEKKGYRNHERMAALIFATAQNGIPVLPNAPSTQIVITEAIRVLHTVEASRDAILTQMQALAKTLPEYSLVREMPCIGDTLAPRLIAEIGDVRRFHSKRALIAYAGIDAPPYQSGKFCANNRHISKRGNRYLRKTGYEVMQSYVMHKPANDPIFTFIEKKRGEGKSGKLAMVAGLNKFLRVYYGKVTELYRSLPAIE

SEQ ID NO: 490526 - protein, 343 aa, unidentified
MQVSTIGVDLAKNVFQVHGVDSVGKVVISRQLRRKQVIDFFSKIPPCLVGMEACGTAHHWAREVSKLGHTVRLMPPSYVKGYVKRSKNDAADAAAICEAVTRPSMRFVPIKSADQQALLMLHRTRDLLIRQRTQLINALRAHLAEFGRVAETGREGLAQLAGIITDESNREALPSAMKQALQAIVDQLAALELQIATLDRAIHAHHRANDMSCRLETVPGIGVIGATAIASTVTDPSAFKSGRDFAAWIGLVPRQHSTGGKERLGSISKQGDRYLRRLLVIGATAVVRHARQHPQKHPWVMRLLAKKPAKLVAVAVANKMARIAWAIMAKGGYYRAPELAAAA

SEQ ID NO: 490527 - protein, 326 aa, unidentified
MQGKVSPERSALKRVYVGIDVCKAWLDVYLHPIGQSLRVQNTAKGFKGLLRTLAKHQVALVVIEATGKYHRGVHRALHEAGIAVAVVNPLRSRLFAEAVGALAKTDRIDAKVLAMMAESLQPKAVAPLPAELENLQELRRARQAAVDDRTALSNQLGETKGAFLQRGLKRRLEQVSEFIARLEAEIQRLIDSDPELARRYAIVKSIRGIGPVAAVALIVGLAELGTCSAKQAAMLAGLAPIASDSGESKGARHIRGGREDVRRGIFMAAISAARCNPTLKPFYHRLIASGKLHKVAITAVMRKLVVLANTLLTENRHWQPEAPKTA

SEQ ID NO: 490528 - protein, 344 aa, unidentified
MEHYAGTDVSLDSSSVCVVDASGRIVREAKVASEPAALIAWFREIGLGMAQIGLEAGPLSQWLYAAMREAGLAVELLETRHVRDAFKAMPVKTDRKDARGIAQLMRLGWFRSVHCKSLPAQETRALLTARKLVQSKHHDTEMSLRGILRGFGLKVGKTSQRTFASRVCELVADHPTLLLVAEALLAARAVLGEQLNKLEKRVRSLARHDRRVRRLMSAPGVGAVVALTFVAAIDDPARFRSSKAVGAHFGLTPKKYQSGETDMTGRISKIGDAGVRTMLYEAANVIMTKPVKGSLLKSWAMRLALRAGMRKAKVALARKLAVVLHRMLADDTEFVADKAATAAV

SEQ ID NO: 490529 - protein, 407 aa, unidentified
MEVIHTRCAGLDVHKNSVVACVRVVEGSSVRHEVRTFGTTTRALYELADWLSSERVTHAAMESTGVYWKPVWHILEECCELVLANAQHIRNVPGRKTDVNDATWISDLLAHGLIQGSFVPERGVQELRELTRTRKQFVRERSRYVQRIQKVLEDANIKLASVISNVVGKSGRAILTAVMAGETDPRKLARLAQGVKASEDRLAEALRGHVTEHHRFMLKLYLEQLDALDEAIAAIERHAEVAMRPFREAAELLVTMPGVSATVATAVVAELGFDMTRFPTRSHLISWAGLCPRSNESAGKRRSSRLREGAPWLKTTLVQAAWAAARTNGSYERALFLRLKSRRGPKKAIVAVAASMLGAAYHILRNRTPYRSLGPNHFDQHDRATLQRRLVHRLEALGYRVDLSQAA

SEQ ID NO: 490530 - protein, 343 aa, unidentified
MDHFAGLDISVKETSVCIVDDTGKIVREVKVASEPEALLAVLKDCAYRFKRIGLEAGPLSQWLYSGLAEAELPVVCVETRHMQAVLKAQINKTDRNDARGIAQMMRAGLYRPVHVKTLRSQKLRMLLTHRQLLLSKAIAIENELRGTLRNFGLKVGMVGTVKFETRIRELVENLPDLAVLVEPLLVVRRVLRQQIGLLHRYLLTIARDDDVCRRLMTVPGVGPVVALTYRATVDVPARFKNSKAVAASFGLTPCKYQSGEIDRDGRISRCGDEMMRVMLYEAAQVMLTRTNKWSWLKAWAMQIARHRGMKKAIVALARRLAVILHRIWVDGTVFRWTREVVTA

SEQ ID NO: 490531 - protein, 373 aa, unidentified
MQEPSTIVGLDVHRNTISFCVLKPYEREPWNGQISNQPAQVRKLAQRIKAQAQGPVHYCYEAGPCGYGLQRDLIAQDCECTVIAPSLTPLRPGDRIKTDRRDARKLAELFRAGLLTEVHPPSVDEEAVRDLCRCRDDARVDLTRARHRLTHFLLRHGLVFGTGQPHSWSQAHRAWLTSLDFERPSERIVFEDYLLAVEQREAQRAALDTELLAISQSEPWRERVGWLRCFRGIDTVNAMIFLSELYDVRRFPSAPSLMAFLGLVPSEASSGDHHRRGGITRAGNQHVRRTLIEASWNYRHKPRVSQELAKRRLGQPAAMIALADRAQKRLCRRFRRMEDRGKHRNKIVIAIARELAGFLWAALARPEVASTQG

SEQ ID NO: 490532 - protein, 333 aa, unidentified
MSSIAPTRQVTVTRIICGVDIASSSLAARVGQDGAEATFQNSTEGIAGLAAFCHNHDVELVAMEATGGYEQRAFAQLSESDLAVTIVNPRAVRQFAQSMGRLEKTDSIDAGMIAWYAETKKSQPLCLAPQTQLELRARVTRLRQLTELRTTQLNQQRLVTNRAVQAGFRKMLAFVAKQIQELEKSIAALIDADPLWRELDQAFRTIKGVADRTVARIMAEMPEIGTLSNKTISKLAGVAPLAQDSGKHQGKRAVRGGRAAVREILFIVASVVGRHEPDFVAFQKRLRDAGKPPKVIRIALAHKLLVRLNAKAREVRQRLAILDPTASPLLAAY

SEQ ID NO: 490533 - protein, 336 aa, unidentified
MKFSFILGIDIAKATLDFTLLCNGEKTLYQSIKNKHLEIKKFIIKIHQDNKISIGDMLVVMEFTGTYNDHLVDVFEEFNIPLWQCSSLHISKSGGLQRGKNDEIDSFRIALFALRNIDQYRPHIPVRQEVKQLKRLFAIRRNLVKTRKQIEGLTKDYDFLSPKVINAEKQPILSSIKALDKQICVIEDQMKTIVFNDPLLLKYYTQMTSVRGISFVTTLKILISTNEFKKIDNAKSLACQAGIAPFSHSSGTSIKKKDRISPIADKELKSLLHMAAIAAISHPGELRNYYVRKVDEGKHKMTVINNVRNKLVNRIFACINNNRIYQKNFNKCLVET

SEQ ID NO: 490534 - protein, 346 aa, unidentified
MMLIGCDFHPSWQQVSWLDVETGETGEQKLVHAGGEAKQFYEQLAAPVLIGMEATGNSQWFIELVEDLGHEIWIGDAAQIRASYVRKQKTDKRDAAHILKLLVEGRFPRLGTPDREQRDLRQLVLHRHKLVLIRSRVKNELQHLSLNKGMQRKRRLWSQAGQQLLRELPLKKWAACRREDLLGLLTMLDEQIGKLDGAVQHAAEENPQSKLLMTQPGVGPNTALAFVLTLGDVGRFPRGKQVASYLGLIPREESSGGRQKLGVITKQGNRMLRMLLVEAAQVAVQHDPGLRKQYRHRCHQKPKAVAKVAVARKLAVRLYWMLRTNVAYPEIVRIESSSGLPLVGAS

SEQ ID NO: 490535 - protein, 465 aa, unidentified
MKVQASKPTFTIGYYPIGQYGSNICRQDIGRKRPYRSLLRQRYWAWSFTSKLITMAKVAKRKQTSKGLRLEVVNPNAAGIDISPKEMQVCVLSDRDGECNRTFGVYTEDLHYIAEWLKVCCIDTIAMESTGIYWLPVFRILKESGFEVILVNASDVKNFSGRKTDASDAEWLMMLHSYGLLKPCFQPENIARTMRNLVRHRDNLIRSASREVLHLQKAMEQMNLKLDNVFSDILGKSGQSVIKAILNGERDPKVLADLADPRCRTSKEEIEKSLQATWDEEHLFEMRQSDSLYQFYQQLIAECDAKINEIAMQYSATVDAPKTELLRSEKYNAKKNRIGFDVEKVAFELWGVNVMRIPGMSRGALLRLVGELGADFTTKFVDVKHFVSWANLVPNNKISGGALLSSKVPKKKNPVGMIFRQAANTLKVAKNPLGDYFRHMRAKGGHLQAMVATGKKLASIFYCMV

SEQ ID NO: 490536 - protein, 346 aa, unidentified
MIAIGSDVHKGRCVFAMIGEEGKVKMLEPIECTREAWLKRLGELPPEAEIALEVSTSGYFVMSVLEEAGWLKRAHWVHTAGIDSLRKQKTDRLDARRLARKLAANTADPMPEAWFPPAPIRQLRMLARQRCRIARLRVLTKNRVNSLLQMHGLRPEKSPISAAGRDWIRQQALPAPVEQCFEQLFRLYDFLHSERETSEQNLAAHAALFPEVKLLRTIPGIGHILAAIIWGEVGTLERFPCAAALVNTTGMVSSLYESGEVSIQGHITRQGSAWLRWALITAANCVTRSKSPLGQRYWSLRRAHKKPNVAKTAVACSVARCVYGVLKHGEPFQAERWGRRSGKLEP

SEQ ID NO: 490537 - protein, 350 aa, unidentified
MRTVAEEYDRVVGVDTHAATHTMTLLIGATGAVVEHRTFPTSAAGLRRALTWIRDHTQDQACLVVVEGTGSYGAGLAEHFTQGGIVVAEAPTIPAARPRGKDDAMDSARIARAVLGLRLDQLCWPRAGGTRTAIRVLVSARDQMGTERTKIINALTALVRSVDLGVDARKALTSAQITTIAGWRARDEDPAVAACRREAIRLASRIHALGRDLAANMAELRQFTAAQVPELLDVPGVGPVVAGTILLAWSHPGRVRSEAAFAALAGTSPIPASSGNTIRYRLNRGGDRQLNRVLTTIVLVRMRHDQTTRNYLARRRAEGRTTKEIMRILKRYIARQVFRLLAAAHPTPTA

SEQ ID NO: 490538 - protein, 305 aa, unidentified
MQSTTIAVDLAKSVFEVAVSERPGRVAERHRLSRGQFSRFLADRAPATIVMEACGTAHFWGREAGARGHHVVLLPPHAVRPYVLRNKTDGADAKGLLEAVRNEGIRPVPVKSVDQHVLTSLHRMRSAWMATRTARLNTLRGLLRELGELETRIRQVERSLEAMARERDVVGRLRTIPGVGLLTATALVAFVGDVQRFRSGRHLASYLGLTPRESSSGLRRRLGAISKRGDPYLRMLLLHGARSVRLHAKKATGERDRLRSWALDRERARGHNQAAVALANKLTRIVWAVWRREQAFGVPGANRSA

SEQ ID NO: 490539 - protein, 372 aa, unidentified
MNYNTVYVGMDVHKESFTFCAYTIDAEKGSHFQRTEADYKNVLKYLEFLRTVYGNDANFICGYEAGCLGYTLYHQLIEHHVNCVILAPTTMLEQCSRRRIKTDRRDAEIIAKCLAQHNYSPVHIPTATDEETKEFLRMRDDHKLALKKVKQQILAFCFRHNYRYDGNSHWTAAHIKWLKSLKPEALYKEILDEYLLTYTTLSDKLERLDKRIEELASKDEYRESVKKLCCFIGIKTHTALSVLVEVGDFQRFASAQKFASYLGLVPGEDSSGDEQTRLGITKAGNRHVRMLLTEASQCYARGQIGFKSKELKSRQAGNSPQVIAYADKANERLRRRYYKMVLGKSKKHNVAKTAIARELTCFMWGMMTDHIT

SEQ ID NO: 490540 - protein, 324 aa, unidentified
MKTYIGIDVSKDTLAVAFPTTSDTWKVSSFANSPDGIRRLTSALPAEAHVVIEATGSYSVLLTYLLCQAKICLSVINPKQSHHFGQMQLSVTKTDESDSILLARYGQMIQPPLYEMDSNVMLCLRQKRTLLRHYKKQQRSLANLHHSFSPLPIKDDQVQVSLQQMLAHFQSVINVLNDEIQALTKQHFPDQLRRLTSIVGISTTIATALIDVTGGFRQFHSAKALAKYIGVVPVIYQSGKSNQTRGICKTGDPQLRAMLYVASWSAIQHNKPCREFYQRLKAAGKSSKLALIAVVNKLLRQAFAVVKFDEDFNPNYQPILRSIP

SEQ ID NO: 490541 - protein, 343 aa, unidentified
MDYFAGLDVSVKDTSVCIVDDAGTIKREVRVASEPEALLTVLRNPAYRFKRIGLEAGPLSQWLFSALAEADLPVICVETRHMRAVLKAQINKTDRNDARGIAQMMRVGLYRPVHVKTLRSQKLRMLLTHRKLLQAKAIAVENDLRATLRNFGLKVGIVGAVKFEARVKELVDNFPDLLALVEPLLVVRRVLREQMSVLHRRVLVAVRNDEVCRRLMTVPGVGPLVALSYRATVDVPARFRKSKSVGAVFGLTPARDQSGESDRPGAISRCGDEMMRTTLYEAAQVMLLRSAKWSWLKAWAMKIARHRGMKKAIVALARRLAVIMHRIWIDGTEFKWTREAVAA

SEQ ID NO: 490542 - protein, 355 aa, unidentified
MNQEKYIGMDVHQATISVAVMDSSGKLIMECILETKAATILEFIAGLRGTLSVTFEEGTSAAWLHDLLKPHVSHLVVCDPRRNALLKDGSKSDRIDARKLAELLHANKLHAVYHGEHGVRTLKELGRSYLTITKDLTRVMSRIKALYRSWAIPCSGATVYAPRHRAEWLAKIPHPGVRLRAERLYQQLDVLQPVRQEARRELLVESQKHDAVKLLRQIPSIGPIRSALLVALLQTPHRFRTKRQLWAYSGFAVEIHDSGEYRFVRGKLQRNRERITARGLNHNHNHDLKNLFKGAAQSASARPGPLCDFYLALVEKGMRPTMARLTLARKIAAITLILWKKGVNFDAKQLNRQAA

SEQ ID NO: 490543 - protein, 339 aa, unidentified
MMGKIVKQVAGIDVAQKELVVTLGHLLDDFSIELFAYKVFKNSDSGFKSLAEWTNKLTDNEVDVLYVMEATGVYHQKFAYFLTDNNYKLSIVLPNKISNYMRTLELKTVTDKSCSQAIAQFGLERKLDKWSKPKVTYKELQQLTRERDQIVQERSIIKNQIHAEITEAEPNQRSLERMQARIRFLNSQEKEIKEDIDCIVKENPDLRQIIDRITTIPGVGELTAVIVLAETNGFELIRNKSQLSSYAGLDVKEKQSGTSVKGKPRISKKGNRALRKSMHLPALTAVKWDDNFKETYARLVSKHGIKMKALVAIQRKILQLIYILFKNETIYDKDYTIKK

SEQ ID NO: 490544 - protein, 412 aa, unidentified
MKDLLEISCGLDVHKEKIVACILTGPLGKPTRSEIREFSTLIPDMIALRHWIVSKNCHHVAMESTGIYWMPIYEILEDAFSGDITLLVVNARHMKNVPGKKTDMRDSEWISTLLRAGLLNGSFIPEKRIREFRDLNRYRKSVIRDITSQKNRIEKFLQSSGFRLSFFISDIFGASGRNIILHLIEHGQIDKTALDSCLKTKTRNRIDEILMSVNGTLSEHQKAFLRILMTHYDSLKKHLAEIETSLEEDMDPFALQVEQLNSIYGISTTASCAIIAEIGIDMKPFKTAEHICSWAGLCPGNNESAGKRKSTSVTKGNPYIKSMLCEIAWVIAGKRNTYLSAWYWRIKQKKGAKKAIVALARKLLVIIYTMLKQGTLFDESCFETRRKHCEQKQLSRYIRELEKHGYHVEAQS

SEQ ID NO: 490545 - protein, 450 aa, unidentified
MANGSGVSRGDRNRNARLSRLRELVPTSNAIVGIDLADSKQMVVVTDHDSRVLARRTFRCRAWEMGAALDWAAAQAARQGFGHVTVACEPTGHRWRVLGQLAADRGMPLVCVQPLVSSWARRGEDLTFDKTDDKDAVLIARLTAQLRCYVPEPVDETWDRLRHLGARRERLVADMVGHLQQMRDLLECVWPAVLETAKQPFRSRTWAAALTVLLDRDGGDFTRTRRLGLLRFGAQVRKEVLRWGASKPCLRIARAVFAALSDPAGVLAHRRGALERVAFVLSDWHEAKRRCADTERRMTAVLDELQLTDLVTSIPGLSPVGAAAILAETGNLHRFTSARALVKHAGLAPREKASGGFVGRTKVTGQGRPGLRLAAWRAGWAAIKGNEVYAARLAHLTAREGNKLTPTQAQAAVAAALLRQLHAVVTTGRRWDSEIATHGTRRPADLAVAA

SEQ ID NO: 490546 - protein, 345 aa, unidentified
MQPMYYIGLDVHKRKISYCVKDGGGRIHAEGSISATRLELDHWMRSLPQPWSAAMEATMFTGWIYDHLKPHAATLKVAHPLMLRAIAAAKKKNDRIDASKICDCLRCDFLPESHMASTAIRERRRTLRYRNLLVRQMVQMKIKISALLMEAGVSYNKQRLHKAGYFRELLTTNPDIDEGLCSLLRLCRETVVRLGKSESALVRSLERDSLLVERIERLMTIPAVGPITALTWALEVGDVQRFSSIKKAISYCGLCGAEKSSGNTVQRTPLSKQRNKHLQTTLIEAAKMAPRNSPELAMLYDKEKQKGSANRATLAVARKLVAYLMAVDRGQRNFQRAETSSSIAA

SEQ ID NO: 490547 - protein, 443 aa, unidentified
MPNGNVLTRGDRRRNEKLSRLRSIVRRDFAVLGVDLASAKQAAVLTDHDSVVIGRRMFTGDAWVIDDILDWAAPIAAAAGFAGVVLGCEPTGHRWKPLLDRARARGIELVCVNPLLVHRGREEEDFTRDRSDFKDATIIAKKVAELRCYVPYQLDGHWCRLRHLGARRNDQLVAAGAARQCLGDLLECAWPAVLSTAADPLDALTFRAAMAVTIHPEQIVAMGWDTFAAAVRDELGRWGGQRRNLRILRAIFAAAQAPGGVDVERDAACERAADVLRDWHRGLEEIADAETRMLGVLDALQLTELVTTITGLSAVGAAAILAEAGDPARFDCARTWVKHAGLCPRANESGTFAGTTKVSGRGRPGLRTAAWRAVWGALSHNPVYTARFTHLTTRTDNPLHHGQARAAIAAALLRQLFIVVTRRVAWDPAIAAGATREVAPAAA

SEQ ID NO: 490548 - protein, 317 aa, unidentified
MNNTEIQTPVNVGVDVGKANLDIALHPSGQLYTIPNTEAHIRRFVRILKNYEVERIVVEASGRHEHALVQACDQAGLPIIIVNPISVRRYAQAIGVLAKTDRIDAQVIAQYAATLKPEFKPIPDKTSQKIKDLLVRRSQLLEMSTMEKNRLQILPKALHRSIKSLLRMLQNQIETVTRQIEQEVAKVDQWRTKMAIMTSVPGVGKVLAYTFLSELPELGSLNRKEIAALVGVAPINRDSGKLNGKRRIRGGRHRVRTVMFMAMLSSIQCNPVFKRFYERLKAQGKIPKVALIACMRKMIVVLNTMVKNQESWRAEMA

SEQ ID NO: 490549 - protein, 314 aa, unidentified
MDETKHFVGIDVSKAALDVHVLPVGKSQRFPNDGDGHAALEGWLSSHPVERVVLEATGGYERKAVQALQQQGYHVCVVNPTRPRDFAKAGSRLAKTDRLDAAVLAHYAQVFDPPPAPRPGDVEAKLARYASARDSFVAEKTRLRNQLGLNDDADLERMHRDILETIEAKLAELDRMIQSCIREKAELSQRYDQLRAVPGIGPVAAVSLLAFLPELGQVSRRAIAALVGVAPFARDSGMMRGQRRIAGGRAKVRRMLFMASLSAARHNPIIKTFYERLIKGGTGKKQAIIACSRKLLTILNAMVRDNREWQPMST

SEQ ID NO: 490550 - protein, 424 aa, unidentified
MNFKMQDKQNQLIERISDTHLIVGVDIAQQLHVARAVNFRGIVVGDPITFENNEEGFVKLSKWIHDLKKLKNLDSTIVGMEPTGHYWINLSKWLYSQNIEVVTVNPHLVKRNKENRDNTQSKSDKKDALVIADMVKNGYYSFIRPSSESFEKLRVLMSNRDVIAKRLVMSINQINRWVDIVFPELRQVFKDVSCKGAIATLRLFPTPDQISSMEPLDVIRGWKSLMKRQPGPKKAQLLINLAKSSIGTEQALDAYTFHLEQLLEEYDLAVKQLERVEQQVKEVLNKIPFAKKLLMIKGISEISLAGILGESGDLSGFSHGNSLLRHAGLHLAEASSGKWKGQIVISKRGRSRLRRFLYLATMSLVMNNPEFKAIHSHNVKVKKIKKMKSIMKLIGKLTRIFVGIARRNESYCPNKVQVIIPLAA

SEQ ID NO: 490551 - protein, 391 aa, unidentified
MIYIGIDVAKDKHDCFITNSDSEVLFKAFTIANNLDGFNDLYQKIESVMDDVTKVKVGLEATGHYSYNLLGYLIDKGLPTYVINPLHTNLYRKSLSLRQTKTDKVDARTIASMLMSDVNLKSYSDTSYHNEELKSLTRYRFDKVKERAKLKTSVSRLVCILFPELEKLVPTLHMASVYALLSEFPSAKHVATAHLTRLTNLLSESSKGRYGKDTAITFRDAARASIGSNMPAKSLELKHTIKLIQELDSEIDEIENEIKIIMDEINSPILSIPGINYRMGAMIIAEIGDFNRFDSPDKILAYAGFSPSTYQSGQLDGAYAHMEKRGSRYLRYALYNATKYVCHWDPTFAAYLAKKRAEGKHYNVAISHAVKKLVRVIYHLEKTKQQYIKAA

SEQ ID NO: 490552 - protein, 308 aa, unidentified
MERFAGIDVAKDTLEIFIRPDAIRKTFPNNEEGRMDLARLLITMKPSLVVLEASGGYEIPVVEVLALRTLNVVVVNPRQIRDFAKATGKLAKTDAVDAEAIARFGEAIRPEIRPLKDAEAQRLQALIARRRQLVQMLAEEKNRLHIAPSWTKADIEAHIEWLAGCINKVGKDISTTIKKTPLWREKENLLRTFKGIGPINACTLLARLPELGHLDRKKIAALAGLAPFNRDSGIYRGRRTIFGGRADVRAALYMATLSAVSHNPVIRAFYEHLIHAGKVPKVALTACMHKILVILNAMVRTNTPWCAR

SEQ ID NO: 490553 - protein, 339 aa, unidentified
MSKPIQSQKSMVYCGIDVSAATLAVAVQQQDQRFEERVFDNTAGGHKTLIRWLHKRKARVRVSLEATGIYSLDLALALDKAEGIEVAVLNPKLIHRFAQTLRRSKTDSADAQVLAEYSARMPFTPWSAPGLSGLQLRSISRHIQSLVVEYARQNNRLHAAEKSALTPRCVVQDLKRSMASLQLRLARLRSAAIELVRRDKAMQESFELLIGMPGIAAISALQLLGELAPLSPEMSARQWVAHSGLDPSHRESGTSVHKPSRISRAGNRHLRRALHMPALVAVRHDPHLKAFYESLLGRHKAKMQALIAVERKLLHAIYGIFKSRMPYDGNKLFPQMQIA

SEQ ID NO: 490554 - protein, 337 aa, unidentified
MLIIGCDFHAGFQQVAIFDKGTGEYEEKRLLHRREAEQFYRMRKGQEVLVGMEACGHFPWFERLLGECGHELWLGDAGKIRACAVRQQKTDRRDAALLLELLRQERFPRIWVPSLEERDVRQLLVHRHKQVQGRTRVKNQLQALALGQGMQKKQKLWTQVGRGELEKLELLPYAAVRRERLLATLDQLEAEIGVLNRQVEEEVKRRGAARKRMTHPGVGPVTALAMVLTLGPAERFGSARQVASYFGLIPSEHSSGGGQRLGRISKQGSSFLRFLLVEAGQSAARGDAELGRFYRRLAMRKHRALAKVAVARKLAMRLYVMLREDWTYAQLCRAVCR

SEQ ID NO: 490555 - protein, 342 aa, unidentified
MTSFKESSSSSSSSSSSSSSLSSSLYVGIDVAKATLDLARSDELKDVQHFDNDAAGIAEIVEHLRQARPVMIVIESTGGLERPLLAALLDAELPASLVHPGRVRDLARALGILAKTDRIDARVLVLFGQKAEPRLTERASRARTELAELVNCRRQLSMTLVQQTNRRGSTVSVSARRSLDAIIAALEKQIERLDRQIRQLLDADDDFRDLDRILRSVPGVGPTLAATLVAELPELGKADRQPISAVVGVAPFADESGTTIGQRRIRGGRSHVRNVLYMATLAAIRFNPIIKAFAARLAAKGKRKKVVIVAAMRKLLSLLNVMARDRLTWQQLNVVKKLAVAD

SEQ ID NO: 490556 - protein, 364 aa, unidentified
MKIIGCDFHPSFQQIAMVDTETGEVRELKLSHSNGEAQGFYESLRGEVLVGVESTGNMRWFQRLLAHLGQRLLIGDATAIQASHTRKQQTDKRDAGHILKLLLEERFPAIWVPSMAEMDLRQLLKHRHTLVQMRTRVKNQLQHIAMNEGFQKKRQLWTEAGLEFLQNLELPLWTKRRRDDLLKMLEQLNEHIGELSQAVETEADQQRLVRLLMTHPGVGPILGLATVLTLGDSRRFRNGQHVSSYVGLIPREASSGSRRWLGAISKQGNSFMRFLLVQAGMAAARKDPELGRFYKRLAHKKHHGVAKVAVARKLLVRLYWMLRTNTSYSELVVRMQGSSSHSVVQQTKAERLSERPASRSKKQP

SEQ ID NO: 490557 - protein, 411 aa, unidentified
MDIVVERCCGLDVHKDTVVACVRSPGKGGKRDQVTRTFGTMTTDLLALRDWLVANEVTLIGMESTGIYWKCVFYVLEDAAECWVLNARHLRNVPGRKTDVADAEWICQLVEHGLVRPSFVPPKEIRELRDLTRYRKAQIDERGREAQRLDKVLQDAGVKLSSVATDILGKSGRDMLEALVAGTRDPEVLAELARGRLRAKLPRLRLALEGRFSTHHALIVGQILAKLDFLDEAIGTLSGEIDRVIAPFEAEVALLDTIPGVDRRIAECLVAEIGVDMGRFETSGRLASWAGMCPGNHESGGKRKSGRTRKGSKWLAANLAQAAEAAGRSKDTYLGAQFTRLRGRIGHPKARKAVEHSILVAAFHILAGGVPYNDLGADWFQRRRPDAHARRLAHQIEALGYRVTIEPAEAA

SEQ ID NO: 490558 - protein, 321 aa, unidentified
MNAILGIDVAKSKFDVALYRNGKYKHKVFENNPSGFDALASWLQQHNASEVHACLEATGAYGDGVARFLFAAGHTVSVINPARIKAYGQSELLRTKNDKTDAKLIARFCQAHKPPAWRPDPPEIEHLRLLGRRREALVSMRTQELNRLGGPDAAVNESVQKVIAFLNQEIEQISAAIREHIDKHDGLRKKRDLLKSIPGVGEITIEAILSEVNGFEDFDTVEKVVAFMGLSPKDHESGSSVKGKPKLCKIGSTRLRKVLYMPTLSAIQHNPFIASLYNRLKAKSKNGMIIACACMKKLVHIIYGIIKTGKPFDPAYNLKIA

SEQ ID NO: 490559 - protein, 353 aa, unidentified
MNYVGIDYHKKYSVVTAIDEKGHMIRTTRLDNSAEPFQAFFSSLDGPSQAVLEATRTWGVLYDLLEETDGVESVTLAHSLKVRAIAEAKIKTDTIDSHTLAQLLRVDLIPAAYIPGKETRSFKEMIRQRVFLVRMRTRLKNRIHVLLDRRHVPSPPVTDVFGKQGTAYLKKLNLSGIDGEILRENLELLAVFDSLIAEAEREIKRLMGNDPQVTLLRSIPGLGPILAVVVALEIDNIARFGAAPKLAAYAGLVPSTYASGGKVFHGHLLHMSNKWLRWALVEAAWVAMRTSPYCRAYFESRKRHKGPHVAIIALARRLSEIVWHILNEKRAYEERPFKIYKKTPSKETSPLLS

SEQ ID NO: 490560 - protein, 355 aa, unidentified
MSQIPNTAIAVIGIDIGKNSFHVVGHDARGAIVLRQKWSRGQVGARLANIPPCLIGMEACVGAHHLSRKLASLGHDARLMPAKYVRPYSKGQKNDFNDAEAIAEAVQRPTMKFVATKTAEQLDLQALHRVRERLVSQRTGIINQIRAFMLERGIAVRQGIGFLRTELPTILATRTDALSPRMLHVIEELAGDWRRRLDQRIDGLSGEIEALARQDQACSRLMTVPGIGPIISSAMVAAIGTGDVFSKGRDFGAWLGLVPKQISTGDRTILGKISRRGNRYLRVLFVQAAWVVLVRIKDWERYGLKSWIEAAKRRLHHNVLAIALANKLARIAWAVLAKGRAFELTRTDDASVRSA

SEQ ID NO: 490561 - protein, 348 aa, unidentified
MSEYAGKQFVGVDLHRRRSVLVRMTEAGEVLETVRILNDVDRLKWVLDRAGDDPQVVLEATYGWYWAVDALRAVGANVHLAHPLGVKAFEYRRVKNDVRDATDLADLLRMGRLPEGWIAPPATRELRELVQHRAKLVGLRAHCKAEVHAVLAKCGIQVLMSDLFGVEGTALLDRLQLPAPYAARIASLRRLMDDVDFEIDLFETLARGRLRADPGYTAVQQIPGIGPILGAIFVAEVGDVHRFHNAAQLACWAGLTPKHHESDTHVRRGRITKQGSRLIRWAAVESVKRVGPHTRTGDLRDRVAARRGANIGAVAAARQQVEYVFYALRDGHVRALEHPATHQHRESA

SEQ ID NO: 490562 - protein, 421 aa, unidentified
MFKIFRKNCCGLDVHKTWIYACIGITDENGRTEYKQARFSSFTRGLHELSEWLAKCDCVEVCMESSGKYWIPVFNILELTCQVTLSHPKYTKPQKGNKTDRKDAKWICDLFMCDMIKPSFIPPPDIRHLRDLMRYRFKLTNMITGEKNRAQNCLTVSNLKLDDVFSDVFGASSMSITKHILDHPGERFDVAPFVDRRCKHPIEDIQAAVDGSISLEQATKLREILHHIEELDIHKLNIESEILRLAAPYIHQLDLIHSVPGFFANPMTAIALISEIGVDMSVFPTAKNLSSWAGCCPRNDQSGGKRKSTRISRAGAYLKPLLVQVANAIVKSDKYPEFRDRYRRIKSRRGHKKAIIAICRMLLTAIWNILSKGEPYDPAGYLVNRFIPKGDFMITRAQALNYMRARGYTIYDDSEPVVALT

SEQ ID NO: 490563 - protein, 404 aa, unidentified
MGRVFVGHDWAESHHDVFIEDGDGRRLGGGRLPEGVEGVARFHAVVAEHVEDPADVIIATETDRGLFIGAMVAAGYTVLAVNPLSTSRYRERLSTSGAKSDPGDARVLAELARLDGHNHRPVAGDSDLAEAVKVLARAHKSLIWTRQRQLNQLRSTLREFYPAALEAFDELAHTDALAVLAVAPTPSLGRQLSRSKIAAALRRGGRQRRVEERAAEIQAALRTEQLAAPDLVSGAMGSTVAALVAVAAELSTQIGRLEAELADHFERHPAAKVIRSLPGLGMILGARVLGEFGDDPNRYADAKSRKNYAGTSPITKASGRSRVVLARYARNKRLSDACQMWAFAAITASPGARAFYDQHRHAGNTHQRALRALANRLVGILHGCLRHATPYNEHTAWAHRTPAA

SEQ ID NO: 490564 - protein, 347 aa, unidentified
MRFYTTQHSFYCGIDLHARTMYLCILDQRGEVLVHRNMQTDPDAFLKTIAPYREGLVVAVECMFTWYWLADLCADEGLPFVLGHALYMKAIHGGKAKNDRIDSQKIAALLRGGMLPQAYVYPAQMRATRDLLRRRMHLTHKRAELLAHVQNTHSQYNLPAIGKKIAYKANREGVAERFADPAVQKSIEVDLALITSYDELLRDVELTIVKTARHHDANTLYLLQTVPSIGKILSLVLLYEIHDINRFPRVQDFISYCRLVKCAKASAGKRLGTSGAKIGNAHLKWAFSEAAVLFLRDHAAAQKYLARLEKKHGKGKALTILAQKLARAVYYMLKRQVAFDREKFFHP

SEQ ID NO: 490565 - protein, 430 aa, unidentified
MTKFEHTADARVLVGIDISKHRHEVLIAAPGKTRRRRLSITNTLDDFQRLIAILRDYARPVQIGFEATGNYHRALVYQLGMAGFDVTLVSSVALARTREALHNSWDKNDPKDAQVILHMLQIGATQVFMDPLRAGIADIQELSMTHEVVSRAKTELWHRILGHYLPLYFPEAARFQRSTRSEWFLAFLEMFPSAHMITAMDKDDFTAAAWDVVGKKVAKAALISDIYETARCSVGLPVAAESDALRMFRMVLAEGRSLMRQRSQIEARAVALLGDHPDYRLLTSVPGIGPINALTILAEAGDLRRFRHHRQFLKFCGMDLATVQSGLFRGRSKISKYGNARLRRTLWMAGQTAVLHRANSFRDKFERYIAQDRHNPDLRRKAYTAIAAKMARTIHAVIKSGEPYRPFFGRGEPERKDLSLASRGGSFLTS

SEQ ID NO: 490566 - protein, 340 aa, unidentified
MEKRFIGIDLHRNRFTCCMRLENDRTYVTEWALEDLGRFVKKLRPTDEVAVEITSNTRLFFDAVAPQVKRVVVVDTNQFRVISQSVKKTDPHDARLLSLYLSKNLLPEVRMKDKDLAQLASLTQTRDTLVKQRSALKNKVNNILSARGLNLAKEALSSEKKLTEVLGLPFDEVVRVELRVIVEQIRSLNKSITELEKTIGAEGSKLEGHKGLSSIKGIGKITGAILLSVIGDVNDFADEGRLASYFGIVPRVSNSNETERSGRIHKRGTKLGRTALVQSALIAANYSAYLKSFYERVKARRGAGKAIIALARKFLGIIYRTLKNKWVFEDFPNFVLAEES

SEQ ID NO: 490567 - protein, 342 aa, unidentified
MEKIATVGLDIAKSVFQVHGIDVVGEVVVRKRLSRARVIPFFAKLPRCLVGIEACSTSHHWARELIALGHDVRLMPAQYVKPYVKRGKNDAADAEAICEAVTRPTMRFVAVKTPEQQSVMMLHRVRLMLNRQRTQLSNATRAHMSEFGIVAPVGRIGLDRLLAIVADKDDERIPPDARICLEMLGAQLTVVKEQILENDRRIRASARDTEVGRRLMEIPGVGPLLASAFVASVADPQVFKTGRDLAAWIGLVPRQNSSGGKERLGGISRAGNQYLRQMLVVGAMAVIRHAERHGTKRAWLIELMKRRAKKVAAVALANKTARMVWALMTSGEHYREPQVAHA

SEQ ID NO: 490568 - protein, 431 aa, unidentified
MSNRLQVGIDFSQKGADFCLMFPDGQPLEPHQAFDNSSSGYTAAKRLLLTALDDHQFDGLDISGEATGYYWLPFFLQLAADPDLARHEARLFVLNPRWVSWFKKCFAQDDKCDEKDPYYIAERTRTSRPRVAWSPQMDILALRFYTRCRFHLIQNLAREKCYFSAYLFLKASAYRCVKPFSDIFGHTSRLVLTQEPSLDDLAALPVHDLAEHLHELSGHHLRDRLDNAHKLQRAAEESFTLDPILAVPVQRILDLTLAHIRFLEDQVQQVEDWIAAEVSPQPAILQLTTIPGIGPVLSSGLGAEIGDTQRFLQGTKWDKRRKKHRPRNLRDAEDSVAKLAGLWWPRVASGGFEAEDRRLAKTGNRYLRYYLIQAADKMRQHIPDYADFYAGKYRQASKYKHKRALVLTARKSVGLVVGLLHRNESYRSKEN

SEQ ID NO: 490569 - protein, 429 aa, unidentified
MNVYETVNCVGIDVSKGKSTIAIMRPLGEIVQSPHEVKHTLSDLKALETTLRQLEGETRIVMEYTGKYYQPIARFLNNAGFFVCAVHAKLIHDFANNSIRQIKTDKADAVKIANYGLTNWNLLRQYTNEDETRLLLKTYNRQYNMFMKQYVASRNNFISLLDQTFPGINNLFSGHRRPDGHEKWVDVAARFWHAECVSGQSLNAFTKIYKGWCSRNGYRGRDDKAEAIYRLAKESIPSLPKNDFTKAIIQQAARELSNTCLTLAELQQQMNFIASTLPEYPVVLDMGGVGTTLGPQIMAEIGDVRRFPRREKLVAFAGVDVPPYQSGQFEAKDRHITKRGSSDLRKNLYQVIGCLMQHSMEKDPVYRFVAHKKAEGKHFYSYMVAGCNKFLRIYYARVKAYLNLLEQQELIPFIDGSGGSEVVLQPLDC

SEQ ID NO: 490570 - protein, 321 aa, unidentified
MKYTPVGVDIAKHVIQVHFINENTGEVVDKQIRRQDFLTFFSNREPCLIGMDVCGGSQHWARELKKLGHKVRLLQARFVKAFVMGNKNDVMDARAIWMAVQQPGKEIAVKTEEQQSVLVLHRTRRQQVKFRTMQINSLHGTFLEFGETIHKGRAAMEREFPEALERMKEILPPYLITVLENQYNRLNELDSLIEDVEKQLTSVARQNETCKRLLDIPGVGPLIATAAVATMGEASAFKSGREFAAYVGLVPKQTGSGGKIRLLGISKRGDTYLRTLFIHGARAAALLAKEASSWITELKNVVQPAWRSSPWQTSWRERCGQ

SEQ ID NO: 490571 - protein, 359 aa, unidentified
MSILADTVDGVIGVDTHRDTLAAAALSPVGGILAQTATRADATGYQQLLEFADTQTPSGPARRCWAVEGTGSYGAGLTAFLHTHGERVVEVARPKRPARRTGAKTDAIDAVRAARETLGHQHQTLPRRRGDREALRVLLTTRRHATSGRVAAINQLKALIVGAPEELRAELRGVATKGQIDRCVGLRDRPARPLEHRMTVCALRTTAGRIRALQAEIDDLTAALDPLVASIAPWLVELPGVGPITAAQILVSWSHAGRLRSEAAFAALAGTNPIPASSGQVTRHRLNRSGDRQLNAALHTIALTRLRYDPETRAYAARRTTQAKTRRDVKRCLKRSIARQLFKLLERYDQPGVEIIRAA

SEQ ID NO: 490572 - protein, 408 aa, unidentified
MNPLFVGIDVSSKNNVAYLMKPDGSKHSSFSVQNNLGGAKLLSERIVSALSSMRLSDVVIGLEATSIYGDNLVYALREDGGLGRFRRKIHVLNPKQVKKFKEAYPDLPKNDWVDAFVIADHLRFGRIAKEVYMDDYRYQALRTLTRARFDVIQNLTREKQRFANYLFLKCSGMAQDKGIQNTSATTIALMERFETVDNLAKADLDDLTAFVAETGRGRFADPESTAKAVQAAARGSYRLPKTVNDTVNQAMAVSIASMRALKEQVKVLDKAIEQQFEIIPNTLTSIPGVGKVYSAGIIAEIGDIHRFASQASVAKFAGLVWTQHQSGEFEAEHSRMIKSGNRYLRYYLLEAANSVRRCDSEFRRYYDLKFKEVNKYQHKRALALTARKLVRLVFRLLKDNRLYIPPEG

SEQ ID NO: 490573 - protein, 444 aa, unidentified
MTRRCFGLDVHRDFAQVAIWQDGLVRQAGQIALTPEALRVFADSLAPSDEVALEATGNTHAIVRALQGRVARVVVSNPQKTRAIAEAKVKTDKVDAEILAQLLAADYLPAVWVADEDTQARRRQVARRAHIVRQRTRLKNQVQSILHRNLIPRCPAADLFGIKGRGWLAEQELPADERQAVCALLRQLDFHGQELRLIDAELARVALRCPDTKRLMTIPGVDVAVAMSITAAVGDFSRFRSPNKLVRYLGLNPRVKQSGDQPAAHGRIAKQGRAHARGMLVEAAWVAVKTPGPLRAFYERVRARRGMQIAVVATARKLAVLCWHMITRGEDYAFARPSLTAKKLRALELKAGMPSRRGQKGTASGYSLKDVRAREKALAEQAERAYAQMVADWQAKAPATKTVGVAAANGARLSRPSDGATAARQDSAPEPALRSGVDHARTRG

SEQ ID NO: 490574 - protein, 365 aa, unidentified
MKKINTAAAKQIRNFSEQKLTIGLDLGDRSSWYCVLDEAGEVLLEQKLGTTPTALREVLGGMPRSRIALETGMHSPWVSRLLSELGHEVIVAHARNVRLIGESRKKDDRLDARTLARLARIDPQLLCPVRHRSARAQADLTVIRARAGLVRARTALITARGLTKSYGERLRGCNPRNMNPEKAPGLSPELQAAMEPLLAAVESLSQRIREYNERIEQLAQQSYPQVALLKQVKGVGTLIALTYLLTLEDPHRFRKSRDVGCYVGLQPGRRNSGQSEPQLHISKEGDPYLRTLLVQGAHHILGPFGVDSDLRRWGLKLAERGGKNGKKRAVIATARKLAVLLHRLWVSGEVYEPLRNSSEPMPAAA

SEQ ID NO: 490575 - protein, 312 aa, unidentified
MLTPPVYLGADVSKLTLELGCPRLILPASIPNTPAGYRTLIKTLVRRPAPVHVVCEATGPYHRGFVAALHEAKIPVSVVNPRLPRDFARSRGQLAKTDKIDALLLADYGRTMQPAPTPKPDAQMTLLDDLVTRRSQLVEDRAREKTRLQQTSNVEALASLKLHLRHLDGQIEKLLERIAEVVKSTPGLRAKVARLVEVQGVGALTASALLAALPELGTLSKNEVTALAGLAPFNRDSGAFRGTRSIRGGRGEVRRALYMAALSASRCNPILQAVYQRLRAAGKAHKVALVAVMRKLLVHLNSILKSLPSSPA

SEQ ID NO: 490576 - protein, 387 aa, unidentified
MMTTTCRHESTAPSTTTITLLLAFELGERRWKLGFTTGLGQRPRIRSVPAGAVDQVLEEIARAKRRLKVSEETAVMSCYEAGRDGFWLHRYLVAHGVTNHVVDSSSIEVNRRARRAKTDKLDLAGLLNLLARYLIGDRRVWRVVRVPSVAEEDARQLHRTRESVQQDRSRLLCRLQGLLVTQGVRLRIGEDFLQRLDGARLWDGRAVPEGLKHRVQRAWAQLVLVNTQLEELEAARTTLVPDHETATGRYVEVLPTLRGIGPIGAWVLATEIFGWREIRNRRELGALVGLVPAPYQSGDTDHDQGITRAGNKHVRRLMVQLAWSWVHYQQASALTRWYQGRFGSGSKRVRRIGIVALARKLLIALWRYVEQGEIPEGAIVKTPAPAV

SEQ ID NO: 490577 - protein, 367 aa, unidentified
MKNKTAPTEVSTSSAALVSGFTLGLDLGDCSHHVCVLDATGQIVREAALANTRPALAQLLVDFPRATVALEAGTHSPWISRYLTEHGATVLVANPRKLHAISRSERKCDRRDAQMLARLARVDPALLHPIQHGTAQAQHDLLGLKLRDALVRTRVNLINAVRFTLKSLGHSVRNPSSESFHKTVLADVSADCLPVVQPLLTVLAHVTEQIKTIERDLVQRGKKDYPATQRLQQIAGVGPLTALCFVLKIGDPQRFSRGRDVGAYLGLCPRRDQSGGTDKQLRISKCGDGLLRRLLVSAAHYVLGPFGPACALREHGQRLTGTGSAREKKRAVVAVARKLAVLLLSLWKHGTDYEPRVTTSALVLTHA

SEQ ID NO: 490578 - protein, 343 aa, unidentified
MEHFAGIDVSLELSSVCVVDGVGKIVHEAKVASDPEALVGFFRGLETRVTRIGLEAGPLSQWLYAGLVAAGFEVVLLETRHVKAALSAMVVKTDRKDARGIAQLLRMGWFRPVHAKSPAAQEVRALLVARKLLQTKLLDVEFSIRGILRGFGLKMGEVSKGRFVARVRELAAGHAMLERITEPMLRAREALRTEYARLHGEMLAIARPDPVCRRLMTVPGVGALVAITFKSAVDDPGRFARSRVLGAHFGLTPRKYQSGETDVTGAISRVGDAMVRMALYEAANVMLSRVTRFSSLKRWALDVAKRRGLKRAKVALARKLATVLHRMWVDGANFHWGKQAAAV

SEQ ID NO: 490579 - protein, 342 aa, unidentified
MKQYVGLDVSQKETSVCVVNEAGQILFEGKAKSDPGALTALLRERAPHAERIGFETGAMASWLWHELRRVDLPVVCIDARHAHAALSVRMNKSDQNDARGLAELVRVGWYREVKVKSEDSQKIRAILVARSRLVAIRRDIENQVRSLIKEYGLLFPRAIGKQFRNQVSEVLGEDHQLLGVIAPLLSIHERICEQQSKFDDEVRRLAKSDETTRRLMTVPGVGVVTALTFRHTIDDPSRFRSASTVGAYLGLTPRRNQSGETDTSGKISRWGDRLLRSYLFEAATVLLYRTKKWSSLKAWGLKLAKRIGVKKAKVAIARKIAVILHCIWVDGTSFDWGQAKPA

SEQ ID NO: 490580 - protein, 340 aa, unidentified
MDITTLGIDIAKSVFQLHGIDADGAVVVQKKLRRGAVLNFLGNVGPCLIGMEACATSHYWAREIAALGHEVRLIPPVYVKPYVKRQKNDAADAEAICEAVTRPNMRFVPIKTEEQQSVLVLHRARDLLMRQRTMILNAIRGHLAEFGIIAAQGPRQVMGMIARLRDDGDASLPEIARSALLALGAHLEALAGEIRALERQLMVWHRADPTSQRLETIPGVGLITATALAASVSDPSVFKSGREFAAFLGLVPRQNSSGGKDRLGRISKMGDRYLRKLLVVGATSVIRRAGSNSTKTGAWVRSLMERKPTRVVTVAMANKTARIAWAVMTRGEAYRASPIA

SEQ ID NO: 490581 - protein, 368 aa, unidentified
MLAFELGEVSWLLGFSAGFGEPVLRRKIASRDTVGLLREIEKTKEKLDLPADASVKSCYEAGRDGFWLHRFLKSQGIENFVIDSASIEVNRRSKRAKTDRLDVNGLVDLLARHLAGSRKPVFSVLTIPSEQAEDLRQLGRELKLVKRDRTRVSNRIKGLLANQGLLIDRSKDMARQLASLRLWNGSKLPHHLRARLERYASDYGYYTARIKELEQERKAVLHANEGEATEKVWRLLWLRGVGIETAWCYGMEFFGWREFQNRKQVGSLAGLTPTPHGSGTQEREKGIGKDGSRWVRGVAIEQAWAWLRFQPESELSQWYQERFGKGSKRLRKIGIVALARKLLIALWRYVETGLLPEGAVIASSVRLP

SEQ ID NO: 490582 - protein, 411 aa, unidentified
MRRVIGMDIHRTFAEVVFWEDGKLRPAGRVSMTRAGLEGFGRSLGKEDEVVIEATGNAMAVVRVLSPYVARVIVANPLQVKAIAHAHVKTDKIDAGVLASLRAADFLPEIWLPDAETERLRRLVARRNQVVRHRTQIKNEVHAILHAHLIPPCPHADLFGRLGRTWLARQIMPDDERGAIERHLRELDRLGEDLGVLDRDIAQGAIDDPAVKRLLTITGVNLIVAAGLVAAIGDVRRFPDPQKLVSYVGLNPRVRQSGLGLAQHGRISKRGRSHARAMLVEAAWAASKAPGPLRAFFLRIRARRGHQIAAVAVARKLAVLCWHLLVKGTDYQWARPALGANKLRAMELKAGHPARKGSKPGSAYAYNIKELRDREIELARHAEQAYERFVSQWQRHGKTKQRTGAANEERH

SEQ ID NO: 490583 - protein, 423 aa, unidentified
MMRLVYPICAGLDVHKKVIVATIVTTDNAGISTYKQRSFTTINSDLNNLHDWLLTNDCKHVCMESTGKYWIPVYNYLEADICVCLTHPKYVKAIKGQKTDKKDSKWIADLYKFDLVRCSFIPPKDFRQLREIARYRFKLVCMKSSEKNRIQNCMTVSNIAIANILSDPFGKTATEIISYLLEHTSESLDEKAVRKMIKKSAKAKSDDIIAAIKGYNLESDQAKKLNLARDHMDYLENMITQTEVELYVRIKPYFEFVEYISTMPGMTQLSSTIVLAEIGVDMDVFEDAQHLCSWCGLTPRNNESASKKHSTKIMNAGTYLKPLIVQCALAAIACKKQPYFTIKYRRIKYRRGHKKALIAIARMMMVCIYHMIKDKKPFTPCDYKELMDPNDHPHKVVLNDANVFEYLQSQGYDISSLVKCNDN

SEQ ID NO: 490584 - protein, 417 aa, unidentified
MVADKEIVCGADIHRDFLVATMISRNGFKLQENFKMNRDGLLAFKSWLLDNKCQRLAVESTGSYWYPIFCILEGHLEFILANAQQIRNIEGKKTDRLDSERIATYCLNNLIKPSRIYPKDYRELRSLTRSREALVNARSKIKNQIHQLLAACSIKLSSVITDSFGKSGRYIIDMLLEGKTIEEIISGIPSKRVRKKADELKEAIRNSIDSNEVFLIKTNLEAIDCLDEKIKLLDAEICVKVKTFEEDLKILMSLPGIGMTSAATILAEMGDYRDFPHADKMAMYFGIVPTVYQSAGKLRTGRITKRGSKHMRRILVEVAKAISKTKKDSKLKRFFLRVLKKSGKKNIAAVALARKVLCIIHHLLMNREEYQEPEVKRTMPKMPNYDSQISKMSLDEMIKIVSRAGYVVQKDSVEGCG

SEQ ID NO: 490585 - protein, 361 aa, unidentified
MTEELPTAGRRSIVGGVDTHKDLHFAAVVDEHDRILGSESFPTTRHGYKQMLLWMRSFGELVRVGVECTGSYGAGLLRYLQQAHVTVLEVTAPDRSDRRRRGKDDTLDAYNAAHAAFAGVRTVTPKTRDGMIESLRVLKVCRKTAISARRVALQLIHSTIISAPDELRESLRAMTRMQLIRTLAAWRPDLSDYRNLTSACRIALKSLGRRYLELHDEIADLDVMIATLVDELAPDLVSRNSIGYESASQLLLTAGDNSDRLQSEASFAALCGVSPVPASSGKVTRHRLNRGGDRAANSALHIIAIGRLRTDARTKAYVAKRVSEGHSKLEAIRCLKRYIAREVYYVIQQRNRQITQTQIAP

SEQ ID NO: 490586 - protein, 411 aa, unidentified
MELLVTRCAGLDVAKDEVVACVRTPDGRGGRAQEVRSFPTFTSGLEALADWLAAEGVTQVVMEATGQYWKPVWQVLEERGFQLLLVNARQVKILPGRKTDVADAAWLAELLEHGLLRGSFVPPAAIRELRDLTRYRKRLIQAHTAEVQRIQKTLEDAGIKLDSVAADVVGASGRAMLTALINGERDPGVLAELAKGRLRSRLPQLRQALRGRFGDHHALLVRLALGHLEHLEASIAELDTQVDRVLVPFAPARNRLDTITGVGKRAAETIIAEIGVDMSVFPTAGHLASWAGRCPGNNRTGGKRRSGKPTKGNRWLGEVLTECAWAAARSRDTYLSAQFWRLARRIGKKKAAMAVGHSILVIAWHLLTDDCDYADLGGDYFVRRDADRARQRAVAQLQALGYQVTLQPLAA

SEQ ID NO: 490587 - protein, 325 aa, unidentified
MSSHEIVGIDVAARTLVAIGDEVVLQPAYANTPEGRRALVTALGRSKRPVRVVLEATGIYFLDLACELAAAGMEVMVLNPKAAHHFAEAILQRRKDDPVDAAMLREYGRRMAFVRWTPPRPELFAVRALAREAQAQTKAVTAAKNRLHALTAATLTPARLIRALERQIRASEALIDQLITAARELIAGDGELQRLFERTDSVPGFAAKGAVMVMAELVILPPMGARQWVAQAGLDVREERSGTSLARKPRISRRGNKRLRQALFFPALTAARCCPEAGAFVDRLVARGKTKLQAIIALMRKLLHALHALWRNNEDFNAAKLFAKA

SEQ ID NO: 490588 - protein, 346 aa, unidentified
MGMDISVLGVDLGKNVCSVVGLDASGAIVMRRKVRRETLIALAEKLAPCVVGMEACCGAHHLGRVFAAHGHDVRLMSPEYVHPYIKAQKNDDRDAEGIAEAATRPTMRFVELKSQDQLDMQTLHRSRDRLVGERTALINQLRAILLERGMVAPQGKRKLEQFLSVLMDEQGGAGLSQRMIVLVADARAQWAELDRRIAAFDAEFVRWVKDNEEACRLTTIPGIGAIVASALIAAVGQAESFDRGRDLAAWLGLVPRQFTTGGRPKLLGISKRGNKYLRRQLIHGARAALPYVVKRDTPLGRWAKDLLSRAHRNVAIVAFANKLARIAWAVLRRQERFAATGMPMAA

SEQ ID NO: 490589 - protein, 458 aa, unidentified
MRKPSNRKQGGRQNTKDWDTLPALNRNAAGIDVGNAEHHVAVPAGRDEQPVQKFGSFTADLHRMAAWLATCEIDTVVMQATGVYWVALYQILEEHGLQVNVVNAQYTKTLPGRKTDVLECQWLQKLHTFGLLNNSFLPPDKIRVLRTYMRQREKLVTAASTAVQHMQKALTEMNVQLANVISDISGLTGMAILRAIVKGERNPDKLADLKHTRIRASSQEIAQSLEGNWREEQLFVLEQSLALYDLYYQKISECDQRIASHLRTMDSKAGQPTVEPEIPPRRSKKSSGFDLRAQLCRIAGVDLTRLDGVDVGTAQTVISEVGVDMNRWKTEKQFASWLGLCPDHRISGGKVLKRGTRHVVNRAATALRMSAWSLIRSQSALGANFRRLRRRLGAPKAITAMAHKLARLVYRMLKFGKEYVDKGTTYYEDKFRQHQLRWLTKQAASLNLQLTPIMDIRS

SEQ ID NO: 490590 - protein, 331 aa, unidentified
MPCYIGLDVSKAVIDAVVRPTGDVQQFANDGTGCAALVAWAQPLAPALLVLEATGGYERAAAVALATAGLPVVVVNPRQVRDFARSTGQLAKTDRLDAAVLALFAERVQPVARPLSDAATVELAEGITRRQQLQDMLTQEKNRLALTRSRVRRDVQAHIRWLEKRLRETDDDLRQLIEASPVWRVKDDLLQSVPGIGPVVSRTLLALLPELGQLRHKQIAALVGVAPLARDSGQWRGRRVIWGGRAAVRKALFMAALVASRRNPVLQAFYARLRAAGEPAAAQRAVRAYAAVLAELGVEALPDIVNVPGTPPPRSRPAPAGSHRMPRGSSP

SEQ ID NO: 490591 - protein, 455 aa, unidentified
MPKQKRTRNARTLPVARVLEPNAAGIDIAATEVYVAVPTGRDPQPVRRFSTFTDDLHRLADWLQACRVQSVAMESTGVFWIPLFQILEDHGFRVCLVNARHVKNVPGRKTDVSDCQWLQYLHSVGLLRASHRPTQTICAVRSIWRHRESLVQMAAVHIQHMQKALDQMNLQLHHVISDITGTTGLAIISAVLDGERNPENLATLRDPRIVASRETIARALVGDYRVEHLFTLRQSLQAYRQYQQWIAACDSEIERQLQVLPSNLPDDPKPLSKPRDHHKPRRNEPRFDLRSQLYRVFGVDLTAVPGVSSLTAHTLLTEVGPDLRRFPNAAAFASWLGLCPDNRISGGRVLSVVTRKVKNRLTIALRMAAQSLHRSQSYLRQYFRRMRIRLGTPPAITAAAHKLARVLYHLITTRQPYEESTFAAMEERARQRQLLRLTKQAARFGFQLVPGRSVP

SEQ ID NO: 490592 - protein, 404 aa, unidentified
MKGPIVSIDVSKGKSDYQAFKDLNVKYTGSRSIKHTKEGFDEIVSLVREMEKKLETEVCVVYEATGVYHRVLKKVLEDNNIKQFIINPLLSAKTRKNDSLRSPKTDKLDPKSIAKTYYSHSLHNSHKPETIYHELRELSRYYEDILVHIRKDKVAFRAQLDIVFPGYDTLYDDLYGPVALAVIEKYPHPEMLQKKKINTVSKVIQSKTCHRQAMSDTMADKAIEYSKTIYSGCDKDDIEVLILQRFIKKLKEDMAEAERTIGEMIKLAQELPDFSIIKSIPGIGDNLAARIIAELGDMTRFKKKNELVAFAGLDPRISESGQNDGDHMHITKKGNKRLRCLLYLAVTCSIRLKRDDNSIKDFYIKKKQQSNPMCSKAAKTACASKLVRIIYSMCKTGELYQYNK

SEQ ID NO: 490593 - protein, 349 aa, unidentified
MSQNLNSAVAVIGIDIGKNSFHVVGLDNRGAIVLRQKWSRGQIEARLANLPPCLIGMEACVGAHHLSRKLQALGHDARLMPAKYVRPYSKGQKNDFRDAEAIAEAVQRPTMKYVATKTVEQLDLQALHRVRERLVSQRTGIINQIRAFLLERGVAVRQGLRFLRAELPRILATPPEVLSHRIVRVISDLAEDWRRLDDRIDQLSSEIAVLARQDAGCERLMSVPGIGPIISSAMVAAIGTGDAFSKGRDFAAWLGLVPKQMSTGDRTILGKISKRGNRYLRVLFVQAAWVVLIKPMSWDRHGLKRWIEAAKKRLHRNVLAIALANKLARIAWGVLAGGRTFEANKLQAA

SEQ ID NO: 490594 - protein, 409 aa, unidentified
MEILYKRCAGLDVHKETVAACVLTSGEAEQPDKEIRQFGTTTAELRQLAAWLREHGVTHAAMESTGVYWKPVFNILEASCELILVNARHVRQVPGRKTDKADCAWLASLLRHGLLEASFVPPLEVRELRDLCRMRTTLVRECVQVGNRLRKVLEDANVKLDSVASNTLGVSGRLMMEALMSGEQDAAVLAELARGRMRGKLAELTAALEGQVRPHHRFLLRQWMDLLNTLEQHIVEVEKEIETRMPPFDGAAELLAGMPGIGRTAACALIAEIGVDMGRFPSARHLASWAGLCPGNNTSAGKSRSGKSHRGNRWIKGLMTEIAWAASRTKNSYPSALYRRLAAHRGKKRALVAVANALLQVVWHLLLHRQTYQDLGADYFDRLNRDRLSLSLVRRLERLGHKVTLLPAA

SEQ ID NO: 490595 - protein, 355 aa, unidentified
MDNRKYIGMDVHKEAIAVAVLNAAGKLVMESIIETKANTILEFLKGLRGELHLTFEEGTWASWLYDLLKPHVKRIVVCNPRRNALLKEGNKSDRVDARKLAELLCTKMLRPVYHRDNGMRALKELARSYVTISKDQARVMTRVKALYRSWGIACSGKQIYTVRHRSSWLEKIEEPGVRRRAEFYYQQLDGLRSVRRGVRRELLGESGKHKASKLLRQIPSIGPIRAALLLALVQTPHRFRTKRQLWTYSGFGIETHDSAEYRYVAGQLQRSKKPQQVRGLNRNYNHDLKNLFKSAATNAVAKSGPLQEFYLALVKRGIRPEMARLTLARKIAAITLAVWKKGVCFDAEHLKQQTA

SEQ ID NO: 490596 - protein, 489 aa, unidentified
MSTAPKQEREKEGSDAQRSAPKRKARGSHCQKGGGNQRRSKLTITNPDAAGIDIGAQVHYVAVPEDRAEVSVRSFGAYTAQLDELVQWLKDCGIKTVAMESTGVYWIPLFQKLEEAGLEVLLVDARQAKHVPGRKSDVQDCQWLQQLHSYGLLRAAFRPEDSICRLRTLQRHRKNMVESAAMWIQHMQKALNEMNLHLHHVLSDISGLSGLAILDAILAGERDPRKLATLAHYRVQKSQAQIEAALRGDYRPELLFVLSQTLQNYRQMQQQIAQCDLTIEKQLAKMADCTNPNQASEPTQQSPDSAGCKPPKRKPKDALELSLAGHLKRILGVDLTTIPGLNILAVLNLLSEIGTNMGKWRNEKAFVSWLGLSPNNKISGQRVLSSRTRKVVNRAATTLRLAAMLLGKSNTPLGSFYRRKRAQLGAPKAITATARKLGCLIYRLIKNGQGYKEPDLHTYELKYKDQILNSLRKRANSFGFDLVEVPNAA

SEQ ID NO: 490597 - protein, 443 aa, unidentified
MSKKRFSHMRGERGQAFADLIRGIPSEQIMCVSLEISKYFHTVMIHNGLGEIVKPTFEIDFYESGFDQLCKAIDQAKDRTQAQVVLVGMEPTSHYFENLARHLLQRSQPVTLINSFAVKQNRDQQMMHREKTDPIDCAAIGDLLRRGEGTPYKPAAGLYLQLQQLDRVRLGKVKIETMLKNQIIGHLDRIFPGLVILGKPAQERYSPVFKADFWRCKTLQYLIRICPDPHQLVNLTPEQLVQAFKAVHYQLGCKTAAKIIARAQQVLLPEPELVAIRCELLQHDLNLLDSVQNHIHELEQRLTALVAQTPFQVWTKLKGLSVVQVASLAAAIGAPTNYLHAGQIFRRAGLVSGRNDSGNRQRKGKGDHVLKVGDVYLRRALMNAVTTLILHQPVLNRYYRQLCRSKPTAVARVATARKATGILWATLRDQYPVTLISCKGANM

SEQ ID NO: 490598 - protein, 347 aa, unidentified
MAAVMIGIDPRKGSHTAVAIGAGEEPLGELRVRASAAQAERLLAWAAAWPERSWAIEGAAGLGHLLAQQLLSAGERVLDVQPKLGARVRLLAAGAVNKNDPNDARSVAVAALRSPSRREVAADDHAAVLKVRAKRHRDLGRARTQVACRLHAVLCELIPGGVSKRISAALAGQLLEGITHSGAVEAARCELAAAFLDDLRRTGAQMRDAKNKLTAAVQASGTTVTEVFGAGPIVAATVIGEVRDVSRFASRDHFAAYNGTAPIEVSSGRRKIYRLSRRGNRRPSHAIHMAAVTQVSHRHSPGRAYYDRKLAEGQTPKEALRSLKRRLSDVIFARLQADAHRAAAGPR

SEQ ID NO: 490599 - protein, 329 aa, unidentified
MHYLGIDVAKAKLDCCLLLELSSCKRKTKSFSNHDSGFTELVHWLDKQRISASDTHAVMEGTGVYHERAAIALHDAGMQVSIINPAQARDFAKGLAIRSKTDGLDSLVLARYGALVQPTIWIPPTPQARALQALLSRVDAVHQDLLREKNRQEKADATDTPELIRQSLADSIMFLQTQLKKLRQDIDDHINRHPELRDDAALLITIPGVGIKTSQHLLSVIHLHHFHTAERLAAYLGVVPIQRQSGSSVLGRPKLSKTGPSHIRAVLYMAAVVASRHNPHVKALYERLIASGKSKMSALGAAMRKLVHLCFGVIKNRQPYNKNYSQESC

SEQ ID NO: 490600 - protein, 428 aa, unidentified
MALMVEARVASAVFLFSEIIAEKAMELKPLYRCVVGMDVHQAKVTVCVLHEDGDGVLQVELREFGGFKRDRREMAEWIATFDPEEVVMESTGIYWKSPYAALERCGICASVVNARHVKQVPGRKTDIGDAQWLAILARSGLLRGGFVPPANFRELRLTSRQMQKLTGILAAEKNRLHKVLTDAGIRLPVVVSDIHGQSARAMVKGLIAGESPEQVLTYASKRLKASEEELLDALAGELTDEHRFVLGELMDHIEDLQRRIARFSEHLLQGLAPQQGLLQALQTIPGLDERGAAMLLVEIGDDMDAFGSGEKLASWAGVCPGNHESAGKRKSGKKRKGNPYVRRILCEAANAAARTRSALAKLFKSLLIRRGRKRAIFALAHKILKIVFVLISRGDYYRDATVDYEAMSVERNAPRWIRMLRKYGYIAA

SEQ ID NO: 490601 - protein, 340 aa, unidentified
MEKRFIGIDLHRNRFTCCIRLENERTYVTEWELEDLGKFVRKLRPSDEIAVEITGNTRLFFDAVAPHVARVVVVNTSQFKVIRQSVKKTDPHDARALALYLSKDLLPEVRMKDKEHGQLASLTQTRDTLVKLRTALKNKINNILSARGLNLAKEALGSEKALNEVLELPFDEIVRIELRVIVEQIRSLNKSIAELEKTIGEEGSKLEGHKGLTSIKGIGKITGAILLSVIGDVNDFADEGRLASYFGIVPRVSNSNETEHSGRIHKRGTKLGRTALVQSALIAANYSPYLKRFYEQVKARRGAGKAIIALARKFLGIIYRTLKNKWVFQDFPNFVLAEAS

SEQ ID NO: 490602 - protein, 482 aa, unidentified
MKKRNIYPNRSQELLHLFEEAGSSKKVMCVPMDFAKKDHIVMFCNGYGDIIHKPFSVANTPEGIEHLSERVSRFCRYRRINPKHVFFGGEDANSFAENFVTTLRCKGWLVANVNAHDAKKQRSNLQASTDRLDLMGIATLLLNRRANCYPAQSGVYLNLRTLVRHRRKLVVMSTEVRNRMHAIVDRLFPGFLDESKSGIVSFTRSSLYLMENRFSAKQMRRRKRKKLIEILKRFGTSKAEETATKLQQYAAQVLHTPGEYVNTLQLSLAQHVKHIRCLQECVDQLERDIAMDLAQTPGAFLTSIRGIGIVLAAGVTAEIGDPTEQQPVKNLVSYAGIIPRVKQTGGLDGRTYTTSVARRCNRILKDYVVKSALHLGLYGPEDLLADYKRRESSGQHADFGIGRRFLRMSMHLMKTSQVYIPDGLRKADATKQARVGYYLNIWPKLREKWLKYGALEMAFAKDRPLGLWRQIVQELYDIKLKL

SEQ ID NO: 490603 - protein, 327 aa, unidentified
MDGTGRRCIGLDVHRDFAQVAIWQAGLVRQAGTFATTPEGVREFAAGLGPADEVALEATGNTWAIATLLASRAGRVVVSNPAKTRAIAEAKVKTDKVDAAILAQLLAADFLPPVWMPDAATSALRRQVLRRAHIVRQRTRLKNQVHAILARNLVPRCPAADLFGIKGRKWLGAQALPADEQAAAAALLRQLDFHAQELALIDKDLGQAALARPEVLRLMTIPGVDATVALSIVAAVGDFTRFRTPDKLVSYFGLNPKVRQSGGQPASHGRITKPAGRTPAACWSRPPGPPPRHPARCAPSTSVCGPAAACRWLRSLPPASSPCCAGT

SEQ ID NO: 490604 - protein, 369 aa, unidentified
MAQSTSLFVGLDVHKDSIAVAHAAGGAEPPVFVGAIGPRQADLDRLIHRLQSKASVLTFAYEAGPCGYVLYRYLTGKGLPCQVVAPSLIPKKPGDKVKTDRRDAVELARLLRSGDLTAVYVPSVEDEALRDLCRARDAARVTGKDAKLRLKAFLLRLGLHYVGRATWNDAHRRYLAKAVCPTPTQQIVFQESVRAVDEQVDRRQRLDAELLERAPAWRLYPVVDALQALRGVQFLVAITVVAELGDLTRFDNPRQLAAFVGLIPSEYSSGGSRRQGGITKAGNGRARRALIEAAWAYRHPAKVSLHIQQRIDHLPKPLQDLGWKAQVRLCKRFRRLVARGKHPNIAVTAVARELVAFMWAIAKAVPVPA

SEQ ID NO: 490605 - protein, 348 aa, unidentified
MAVAIVESTRPVTGGVDTHLDTHVAAALDASGGVLGVESFPATRAGYASLSSWLAGFGPVERVGVEGTGAYGVGLGRHLRSLGVEVIEVDRPNRQLRRAQGKSDTLDAIEAARAVLSGRATGVAKTADGNVEAMRALLIAKRSGREARITCLNQIRHLGFTAPDELRERFQSAQRTALAAQAAALRPRRDRDAVLYATKLAMRSLGRRVLTIDDEIAGLDAALAELVTATAPGLVGLYGVGVDTAAILCVAAGDNPQRVRSEAAWAHLCGVAPLEATSGKVTHRHRLNRGGNRQANHALWRIVFTRLGSDTRTRSYVARRLDEGLSRPEIIRSLKRYVARETYRHLPC

SEQ ID NO: 490606 - protein, 368 aa, unidentified
MSSVASPEGLIHLGMDTSKNTIVVATLLPGEDSPVTDRIFNEEEAVRRLIGRFADRSVLRAWYEAGPGGYDLYRLLASMGVACQVVAPSLIPRGGSDRVKTDKRDSRRLARLGRAGELTPVRVPSPAEEAVRDLARARAVVLDDRKRARQRLTAVLMRHGRIWRGASYWTAAHRSWIAAQRFAEPALATAVGHYRAALEVRETELAAIEAELAPWAAREPLAGPVARLGCYRGIAELSGLTLAAEVVDWRRFPAARAFMSYTGLVPAEYSSGERTRRGHITKAGSEPVRTALTEAAWAYRHAPAIGAGLRRRQHGAAPETLARSWQAQRRLHARYVHLVHAGGKAAPEAVVAVARELAGFVWAEMTAA

SEQ ID NO: 490607 - protein, 343 aa, unidentified
MTKDAMIGVDLAKNVFQIHGASMDGTVKFRKKLSRPQFLQFMSEQAPSVVAMEACGSANFWARELTRLGHDVKLISPRYVKPFVKRQKNDAADAEAIVEAAQRPEMRFVDPKTEDQQARAMLYRIREKLVCQRTELVNALRSYLYEFGHTFPQGIAHLKRIEALVDDPDSKLPELVFKECRDLLIQISEISERIDIKTRRIKDLAAETDTARRLQTMPGVGPITALAVEAFAPCMNSFKRGRDFAAWLGLVPCQHSSGGKERLGRVSKAGQADIRKLLIMGAMSRLNWLGRKSIPDGVWLAKLMERKPKMLVAIALANKMARAIWAMLTRNEDYREPAGAVAA

SEQ ID NO: 490608 - protein, 356 aa, unidentified
MSRDIKYIGMDVHKEATVIAVLNGSGKLVMESIVETKASSILQFIHGLRGELHVTWEEGTWAAWLYDLLQPQATQVLVCDPRRNAFLKEGNKSDKIDARKLADLLRTGMLRPVYHGEHGLRTLRELGRSYQTISQDLNRVMNRIKALYRGWSIPCAGTQVYAPRYREEWLHKIEHAGVHRRAELLYQQLDGLQALRRTLRPELLAESRKHKASKLLRQIPCIGPIRAARLLALMQTPHRFRSKRQLWTYSGLGIETRDSAQYRFVRGQLQRAKKPQQIRGLNRNHNHEMKEIFKGAATRASCGVSPLRDFYVALLDKGMKAEMARLTLARKIAAIALTLWKKEERFDAEQLKLQAA

SEQ ID NO: 490609 - protein, 377 aa, unidentified
MKGRPNGSNLELIYDLKYRPKESPMKTYYVGMDVHSATIRIVVLNGAGKVVMESVVETGAERVRGFLKQLRGKVYVTFEEGTQANWLHEVVRSLVTEVVVCDPRHNKLLQSGNKNDRVDAQKLAELLRLGSLKAVYHGDNGVGTLKELVRTYDCLVSDTTRVMNRLKAIYRGRAIACGGHEIYRQDQRGPWLAKLREPGAKQRAGFLYEQLAALKPLRRKAKLAMVKEARQQTAYRWLMSVPKLGSVSVAQLIAVVGTPHRFRSKQQFWTYVGLAVVTRSTADHEVVEGVLRRSKRPVSTRGLNRNHNHLLKRVFKNAATSACHSAPFKAGYEVRVARGMAPSLARLTIARQLAATTLALWKRGEQFDPERKKQQAA

SEQ ID NO: 490610 - protein, 339 aa, unidentified
MKYTPVGVDIAKHVIQVHFIDEHTGEVIDKQLRRQDFLMFFCNREPCLIGMEACGGSQHWARELTKLGHKVRLLQARFVKAFVMGNKNDVMDARAIWMAVQQPCKEIAVKTEEQQSFLVLHHTRMQLVKFRTAQINSLHGMLLEFGETIHKGRAAMDREFPEALVRLKERLPPYVISVLENQFNRLNELDLQIDDIDKQLTSVARQNETCRRLLDIPGVGPLIATAAVAIMGEASAFKSGREFAAYVGLVPRQTGSGGKIRLLGISKRGDKYLRTLFIHGARAAALLTKEPGPWITGLKKRRPASVAIVAMANKLARTVWAIAAHGRKYDKNHVSIRPY

SEQ ID NO: 490611 - protein, 336 aa, unidentified
MQKLVIGLDVSKEKLDLCLKSGDNVLKELVLPNVFDKIKSSFKCLLKEHGCKASDVLVCAEYTGQYTYPLGCACEELGIDLWLENPSQIKFSSGIQRGKNDKLDARKIAAYAIRFQDKARLFSLPEKNIASLKQLISERDLYISDKGKYQGQLNDQKQFMSKIDYEKKSKRLKKLIKDLETCITSIESEIERLIGSDETLSKQHKLLCSIDGIGDKTAVKMIVETNAFKDFDNARKFCCHAGVAPFEYSSGSSIRSRNRVSNKADKSIKALLHMAALVVATRKKDGELREYYIKKVAEGKNKMSVLNAIRAKLVLRMFAIVRNEKYYQKNYKFSFA

SEQ ID NO: 490612 - protein, 385 aa, unidentified
MRHIDPETTRTGTAVFVAMELSKSTWVLAAQASPSGKTSSHRLDGGDIGGLLALLRRLAAREQGAAGEKVEVVLGYEAGYDGFWLHRRITAEGITCWVMDPGSLQVDRRARRAKTDRLDAVMLLRALMAWCRGDRAACHMVQVPSVEREDARRTHRERQRLITERVQHVNRIKGLLATQGVHDYLPLRRDRRERLAELRTGDGRALPPCLRREIEREFLRLELVLEQIVAVEAERDTAVAAPAANDADAAKVALLAKLGGIGTELATVLVREALYRPFANRKEVAAYAGLTPSPFASGDRHREQGISKAGNPLLRKSMVELAWLWLRYQPDTALARWFTRRVGEIRGRIRKITAVALARKLLVALWRYVTTGLVPEGARLKPSAT

SEQ ID NO: 490613 - protein, 406 aa, unidentified
MKIEAQFAGTPTGGENGTLYASVEMGSTGWLITSRPGGQDKVQRRRVATNDWRATVSTLRRQQRVFGAQRVVCCYEAGREGFWPYRAMQAAGIEACVLDPASIAVNQRGRRTKTDRIDGVQEVDAIEALELGLRTAARAVVVPSEEQEEARQLSRTRSRLVKERTALIAYIKSGLARVGVDLPPATQPGWLEQLAKARQWDGERPLPRQLMRDIELSHERLMLVCRQIGELEEEQRVAVISRDSSGKRRLIKTRQAAQAWDAQASPAQRRLAEQAERLSRLVSIAPVTGYVLAGEVYWRDFRNRRQVGGYVGLGGAQHSSGKQQRELGISKAGNRRARHVLVEVAWTWVEHQPDSPITQWFRRRAPKGASPRLRRIAIVAVARKLAVALWYYLNDGVVPQGARMKD

SEQ ID NO: 490614 - protein, 346 aa, unidentified
MSHYVGLDVSVKEVSICVVNIEGDVIARGSVATDPDQISNFIAEHAAAAERVVHESGILAIWLTRELDKRGVPIICIDARLAHKALSGRINKTDRGDAEGLAHLARTGWFTPVHIRSEASERVRVLIGTRERLIRMRKDLEAHVRGVLKTFGIRMTAIQRSNQRGGFRDQLAQAGQTDLAIELMADAFNPIHRALCAAADAMEDELREIARGSDLAQRLMTVPGVGPVVALSYIATLDNEARFKRATDVGAFLGLTPRRFQSGDTDWSGRISKCGDRDLRRLLYAAGFTLISQVRRASPLRAWAVRLSERKGIKHAAVAAARKLAVIMLRIWRDGTTFHATREVRA

SEQ ID NO: 490615 - protein, 466 aa, unidentified
MAKSPRSSRSRGKRVPRKIDPTPRVVHPDAAGIDIGATQLYAALPPARSDAPVRVFAMFTADLYALAAWLKAHHITSVAMESTGVYWVPVFQVLETCGIEVCLANAQHVQNVPGRKTDVIDCQWLQYLHEVGLLRGSFRPPDEICAVRTLLRHRGTLVAQAATHIQHMQKALTQMNVQLQHVISDLSGTSGLAIIDAILEGERDTARLAALRDPRVQASAATIEKALVGDWREEHLFTLRQARASYRHCQTQTGECDGEIERHLAGLRSRVDPDATPPPEPKRGQVRPRRGDIHMEAGDLRTELYRVLGTDATQIPGLGTGHVASLVAELGCDLSEFGTAGQFCMWLGVCPNPQISGGKVLKRGTRDVKNRTATVFRMAAQSLHHDSSPLGRFYRRMRSKLGAPKAITATAHKLARIYYHLVTTKEAYDASVFAKNEEREVQRRIERVKKEARTLGIALAPEAVAA

SEQ ID NO: 490616 - protein, 313 aa, unidentified
MAQILPTVGIDVSKDWLDVAVHPTKEQFRVANDAAGWHELCRRLKQIAPRAIGVEASGGYERQLTHALLAADLPVRMVNAWKLRQFAKAAGLLAKNDRVDAHAIAWFTATLPSREVRHDPAREHLAELVRARRQLVDAKQAFANQLEHMRDALLRRQMARRIRQLAADEARLDQRIVQTIAAEPDFAARHELVCSMRGVGPVFGSTLVALLPELGHVTNRQIAALVGVVPYDFDSGKMRGLRCIFGGRADVRRVLFMAAQAAAIWNPDLKAFKQRLRAAGKKPKVAIVAVMRKLIVTLNAMLRSGTKWQPKTV

SEQ ID NO: 490617 - protein, 350 aa, unidentified
MIIGVDYHPSFQQIAFLIEETGEYEEQRLNHEGGEAERFYRDLKRKGIHVRVGMEATGYSRWFERLLAELGFELWIGDPAEIKAKRVKKRKTDREDARLLLRLMREDRFPQIWVPSPENRDLRQLLWHRHRLVQMRTRIMNQLQALAMNEGKRWKSKLFSQQGRVEFEKLALGPWASRRRRELLELLDRLSPSIDELTKAVEQEVNKRPEALRLMTHPGVGPITALAFVLIIGTPERFARGKQIGTYVGMIPIEDSSGDKQRLGHISKQGSSLLRYLLVEAAQAATRLNPHWRRRYIHLAMRRHRSIAKVAMGRRMAIRLYWMWRNGCDYSPSFEFGSYVGQLGNRHGGN

SEQ ID NO: 490618 - protein, 327 aa, unidentified
MNAMPVGIDIAKNVFQVHYVDQETGEIVNKPIKRGQFLEHFVNRARCRIGMEACSGAHHWARQLMQMGHEVKLMPAQFVKAFNIRNKSDAADAKAIWLAVQQPSKVVAVKTEMQQAVLMMHRQREQLVKFRTMQINGLRGMLAEFGEAMGKGRAAMAMEISVVLASVEERLPKVLIDSLREQWERIEKMDGEIAAIERRLREWKKEDKAVKMIGEIPGVGLLTATAAVAMIGDPKAFRSGREFAAWVGLVPRQTGSGGKVNLHGISKRGDQYLRKMLIHGAWVDQMKTRRPSNVVVVALANKMVRTIWAILAYERPYEKGYMNVKPA

SEQ ID NO: 490619 - protein, 321 aa, unidentified
MNKSTIFIGIDISKDVFDVYLPDQGHSQFPNNVKGFNSFKKELSINHWCVMEATGCYHQQLALYLFDKGIRITVMNPLVIKRFIQMKLNRVKTDKSDAKMICHYGQEHKMQLWQPSPEYVEECKQLQTITQLYFKQSTAIKNKLHTLQTRGYKRSKMISSLKRQLKSLQKEIKLLETEMELLIKTNQQELYTKLKTITGIGNKTAILLIVTTNGFKDFESSRQISSYLGLAPNERSSGSSIRGKTRISKTGNPLVRNHLFLCSFTASIYNPQCKALYERIVAKGKSKKLALIAVCNKLIKQAYGVSKSGLPYDKNYVSKLA

SEQ ID NO: 490620 - protein, 404 aa, unidentified
MSESSTTYVGLDTSKRTIQVAMLRPGCQEPVEWETLNEPRAIHRLVKRLKRDQVGTLQVCYEAGPCGYALQRQFGEAGVKCMVIAPSLVPVKPGERIKTNRRDARKLAQMLRAGALTEVHPPTPEEEAVRDLCRCLEDAKEDLHRARNRVSKMGLRRGLSYEGGAWTQGHRQWLRSLTFEHEADRVVFEDYLYAIEQLEERCRGLEGKLVELSQQDPYLQPVGWLRCFRGIDTVTAMTLMAELHDFRRFESPRDLMGYLGMVPSERSTGDSHRRGGITKTGNSHARRVLIEAAWHCRHRPGVSARLRKRRAGQPGWVIAIADRAQARLHRRYWHLVLRGKPSNKAVTAVARELVGFIWAALYLRENTTAEAPREQVGTTEKEGTQGQGGKGQRTGRCKGRRRAA

SEQ ID NO: 490621 - protein, 327 aa, unidentified
MQNQTIVGIDVSSATLDICVSNTSCQRSFIIKNDVKSISNFFRTYEQERLLIGMENTGRYNWALYEVLKDLLQHRVFVVSPLHLKKSLGLIRGKNDKIDAVRIAAFTLKNHPELPQWKPSSPAVQKLKILLTERNSRIKAKSNLLKQQKDHAKMKHLGLDKYLQGLSKQQLTVLNRQILQIENDIEILIKAEEQIHQQAKLIRSIPGVGKVLCWTMIAKTENFTLITEPRKMACYSGVVPFSNRSGTSIRGKDRVSAYADKAVKTILHMAAMRAVRLKNDLQDFYLRKVAQGKNKMSVLNAVRNKIIHRIFAVIRNQKPYEIHLLLS

SEQ ID NO: 490622 - protein, 339 aa, unidentified
MTIQSKKIIQELKSLFAGIDVGAEELILTIRKNGTPYKAQKFANTHADRARLVKKMVSMPGIIVCLEATGVYHFDLSIALHDAGVALMVVNPKSSRNFAKVLMKNSKTDAIDAETLAQYAERMNFVAWTRPSDEKIALRSFARRIDALTRQKAVAKNNCHALSVSQETPEAVLRDVKLAISQLEKRIERLAKDALDLIGKHPELERVFLLLTGIKGIAQTSAIALMGELLLLPQGLSHREWVKFAGLDPRAFDSGKSVHKQARLSKAGNRHIRSALYMPALSAKQHDPYVKAYFQHLVDNGKKPLQAICAVMRKLLHAIHGMLKHDKPFDNTRFYAIPA

SEQ ID NO: 490623 - protein, 355 aa, unidentified
MNSVRYVGLDVHRDTISAAVLNESGRMIQQSILATRAAAILDFIGGMRGTLHVTFEEGTHSAWLYDLLQRRVARLVVCNPRMNSLLKSGNKSDAIDARKLAELLRADMLSPVYHGEKSAMEVQHLARSYALLTEDTTRVMARIKAIFRGQAISCAGQKLYGHKHRHEYLEQLGACALRRRAELLYEELEAVRQLRRQAKREMIVECRKYPETKLLCSVPFLGPVRAAVLIGRVQTPHRFRTKRQFWAYCGLALEMRDSGEYRVVDGQVERRKKPAQIRGLNWNHNHELKNLFKAAATTASFSNGVFREFYLGLLKKNMQPEMARLTLARKIAAITLKIWKKGEAFDAELMKLQAA

SEQ ID NO: 490624 - protein, 418 aa, unidentified
MNAEIDTRTLRRYMALDIHKHYCVVAGVDREGRVVLQPVRVEHADLEGWLQKHLQASDHVVIESTTNAWHVYDLLVAVVERVLVANPIQVKQIARARVKTDIRDTLILARLLAANLVPEVWVPPVHVRQLRQLLSQRRQFVETHTQIVNRMHSVAHRHHLHHPAGKRFNEKNTAWQKDARLSQIEQFQLGLEMENRVYIEKQIGRIGKEVAKMSHQKPWAESMTYLMQLPGFGVITGMTVLAAIGEIQRFENARHLASYSGLTPGLEQSGTKYREKGITKEGRKELRWAMVEVAQRAVKSDPVWKTRFQELQQRMHRNQAMVAVARRLLELVWYVLTRRQPYRHFSQERIAYKYLTWAWQMDDEARDGLTRQQFTRYYLMRLGIGHDLTRIALDPKHPRKIAPEAELLALRPELSYIE

SEQ ID NO: 490625 - protein, 452 aa, unidentified
MRSRKPRPGSLPPQFEQVQFNAAGIDIGSESHFVAVPPDRDERPVRQFSAFTADLLALADWLKQCGVDSVVMESTGVYWIPLFELLEQRGFQVLLVDPRRVKNVPGRKTDVVDCQWLQQLHTFGLLSGAFRPTEEVAVLRSYLRQRAMLVEYAAHHIQHIQKALQQMNIKLEKVLSDVTGTTGMAILNAILAGQRDPVKLAGLRDPRCKNDEETIAKALQGNWREEHLFALRQALTLYRAYHQQMAACDEQIERQLGAMTDKSNGTKLPRQPGTHKAHHNAPALDMRNGVHRVTGVDLTRIDGIDGHTALKLISEIGTDMSRWKTVKQFTSWLGLCPGKKRTGGKDISSRTKPCANRAAAALRLAANGLHRSRSALGGYLRRMKARLGAPKAITAAAHKLARMVYFALRNGWDYVDKGIQWYEQQFRDRQIKSLRTKALQLGYHVVPVNPST

SEQ ID NO: 490626 - protein, 405 aa, unidentified
MEQRFAGVDWASECHAVCVIDERGEVRERLVVPHTRLGLAELASWLGRHAEPAELPVGIERPDGPVVDALVAAGFAVVIIPPHVVKAARPRFSAARAKSDPGDARLIADLVRTDAGRFRRLRPVDPETGRLRRLVRARDELRDTRTMLGNQLRALLEEAWPGAAEVFARVDSPIALAFLERYPSPRSAQGLGEARLAGFLTRHRYSGRRTADELLARLRAAPVVREPVIVDEATADAVRSLVACLRTLLVRLADLEGAVRAALAAHPDGELFRSFPRAGEINAAQLLAAIGADRERFPTPEALAAQAGAAPVTRASGKTSVVAFRWACDKRLRVALTTLADNSRRASPWAASVYQAATDRGADHPHAIRILAKAWCRVIWRCWQDRQAYDVARHGALQRLTQPAA

SEQ ID NO: 490627 - protein, 437 aa, unidentified
MSGKKSLELRVSVDVGYRRHSVAIGLPSGEVLEEFEIAHRPEGFAEFFSRIEKHHKARRCGVAVGMEGFNGCARPLDAMVRRRGYRLYNINNLKLARFKEIFPGAAKSDRIDARKGLELFQLSDHLPLAKEVLQEVKGTPQENEVLKRLTRRRRRLVDERVRVISNLQTDLQAVCPGLLEITKNAGNQWFLNFLVSAATLPQLARLRPSTLLKVPAVGRKYARLIEDWQKRAHFSEEVEWVSEMIQEDAKRCLELDEKIKALKAKIKGVAKDSKIAKTLLSIPGFGTICTAELAGEIGTIERFSKEGSLALYLGMSTLDNSSGKYQGSKQPKHVNRRAKAAMMVALDRHRKYVPESQRYYEKKRREGKKHNQAIRALGRHLCRIIYKMLNDEREYEIRPEKGNTKTKVKSRSCVKTQIRKPKISAKGKNNNIYQQST

SEQ ID NO: 490628 - protein, 351 aa, unidentified
MKKTNNKTIVLDKLKPIYMGMDVHKKSWKITILHQDVVIDRVTMRPDKLELKKYLSRYAGHCIESVYEAGFCGFYLHDDLTSLGVKNIVVAPNKIPGEQGNRVKTDKRDSYKLAFYHSKGLLRGIYTPSKEEVSSRHFLRLRSQFVKRRAATINQIKSLLHLYGIYLECVGLPVSVAKDLLERNDLPLEAKESLRALLGLLNYLRAEVKSIEKRAISVIKDHRNYRIMISIPGVGPLLAAKLQQEISDWSRFDNEKQLSSYLGLTPSEYSSGEKVSRGRITGQGNRFLRAGLIEASWILIRKDPVMKAVYERIKAQTGNGNKAIVAIARKLICRMRAMIHKQEAYIPGLAA

SEQ ID NO: 490629 - protein, 326 aa, unidentified
MKKVLIGIDFSKEKFDVAIIVKSTSTQEHALFDNKVSGYRKMIKWINSVVEDIPCSSWLFCGETTGGYSRMMSDWLYAQGYDVWIENALVIKRTFPLKRLKNDTVDAFMIAEYALRFEDRVQLYEPMSQALTELREIFLYRHHLVRHRCSFEVRRIEKRFTQQKSANKNVISQSARHIITEINKEIAKCDEKIKEYIESDDQLSSIFAIVTSMPGIGTINAVSLMVYTNNFTKFAYNPRKIACYYGIAPFGRDSGTSVHTDPRVGFIANKMLKSLLTQAALASVRTCPQIAKYYQRLIERGKKPMVALNNVKNKMIAIITAMVRTG

SEQ ID NO: 490630 - protein, 418 aa, unidentified
MDILSPFPYKATVGIDWADQKHDVFVRFAKGDSYRRKIDSRPGAIQEWLLELRSVCAEGKIAIALEQRRGALFYQLCTHLNWIDLYPINPHSLASFRLTFFSSRAKDDPIDSQLLEELVRTHSDRLRAYQPESTTERKLDQYCRHRRSLLDLATKTELKLISTLKQYFPLVVNLFAAVGMKSDIALNFLSRWPTLDELQRAKTHTVRSFFYAHNSRSQTLIEKRLQQIADAHNVTDDFALISPLVVTNKCLVGQLRQFNQVIKEFDHKIKELFKSHPDHFLFESLPGAGAQLAPRLLSLFGSDRSRWADAADIQKYSGIAPVIERSGQSVWVHRRLSRPIFICQTFHEFAQQSVQRSAWADQYYRRQREKGKSHHSAIRALAFKWIRIIFACWKANKPYDESFYVHAIEKRNSSPSTT

SEQ ID NO: 490631 - protein, 345 aa, unidentified
MKKGITIGMDLGDKKHQVCILDKTGKIIAEEVVTGTRGAMSIFFKQYRGAVIAMETGTHSRWVSQMAAATGLEVLVGNARKLRMIWESRQKSDTRDAVMLARIARFDPELLCPIQHRGPQAQMDLEIIRARDLLVRERTRMVNHVRSVVKSTGERLAAFSAESFGSKAKIPEALNEALQPMLEMILELTKKIRGYDLLIKEAATKKYPETERLRQVGGVGPLTALAYVLTLEEPERFAKSRMAGAYLGLTPRLDQSGQIDKQLRITKHGDSYLRRLLVGSAQYILGPFGPDCDLRTFGLKLMQRGGKNAKKRAVVAVARKLAVLLHALWRSGQQYEPKRRQQAAA

SEQ ID NO: 490632 - protein, 414 aa, unidentified
METVYRSVAGIDVHKKMLAVVIRRQPGEQAEYQKRKFGATCAEIQHLEVWLRAQGVSEVVMESTAQYWRPVWYGLEPHFRLHLTHPLKTRAPRGRKSDFRDAQRLADRWSAGDLEESFIPGSEQRAWRWLTRTRVQLKKKLGVIHSHVEGLLEQGGIKLSAVVSDLFGVSGWAMLEQIAQGVTDVEVLAGEARGALRKKERELKQALAGQLEPVYRLLLRQHMDQVRLLRRQVEEINQSLAEAMQEHLAALHRLSKIPGVDLYAAQELISEIGPKACAFASAEQFASWVGVCPGSQESAGVNYSARSAKGNRYLRRLLCQIAWAAIHTKDTFFAGLFARLKPRVEGKGAAWAVAHRIAKIVWLVLHQEVEYQEKGSAPPNERTLVRKFKRLLKEFGSLGLDVRALLDQQLPAPA

SEQ ID NO: 490633 - protein, 422 aa, unidentified
MKPTGDELAAVVGIDWADAKHDVCLMDMSSCNTESYCIKQTAEALTEWSGELEKRFGGGRIAVCLEQSKGALIHFLMMRGCFAIYCVNPKSLRNYRTALYPSGAKDDPVDAKLLLEFFIKHREHMRPWVPDSAETRLLASLVQDRRRAVDEKTRLGNKLKAVLKGYFPQALEVAGSDVSTAMACQFLLNWPDLASLKKVRAQTLRRFYRSRGCSRGDVIEERLTIIKEAQPLTEDEAVLEASMMKVRMLAQQLLAVLESIKAYDKRIAKLYKEHPGAKVFSSFPAAGQQFAPRLLTACGDDRGRFEKASDIQAFAGIAPVTERSGKQCVVRWRRACSKFVRQTFHEFAACSRRKSLWAQAYYEQQRAAGASHHAAIRALAFKWIRIIFRCWKDGKPYDELEYLKALRRRNSPLMAKIAGAAA

SEQ ID NO: 490634 - protein, 396 aa, unidentified
MDAALLWSEEGEMPAKRKVVDPLEPERHRCARVEMSSNHSRDRGSAMNITTYALDLAKQVFQVHWVEPDTGEIRRKALLRAEVNAFFAQRPPGVVAMEACGSAHHWGRVLRGLGHEVRLVAAQFVRPFVKTNKTDAADAEAIWEASQRPGMRYVALKSEEQPAVLSLHRMRQQCIKVRTMQAHQVRGLLYEFGAVVPKGGRALLAQAVPLLADETRCAVPELVRRQLLTQLEGLRALTRRVTELERQIGSWQRGERECQRIAAVPGVGKLTATAVIATVGDARAYRSGREFAAWLGIVPRQSGTGGRIKLLGISKRGDPYLRTLLIHGARTVLNHQSRADRQLDPWLKGLISRRPKNVVIVALANKMARTIWALLAHGREFDRCWSRAWMPAPALS

SEQ ID NO: 490635 - protein, 353 aa, unidentified
MNNSRNKAEVILGVDTHLDTHVGVLLNAQGHLLGCLMVTTNISGYERLVTWANSFGCLKRAGVEGTGTYGAGLACVLRKHGVEVFEVNRPDRSKRRLQGKSDPTDAENAARSVLSGSATAIAKTQSGAAEMMRVVSVARRSAVKAKTQAMNQLRALLVSAPQDVRERLWKSKPADCAKGCARVRSLGSTEFLHTLTTTLCLLAKRWLLLADEVEKLDAMLDALTHQHARRLREQFGVGPQTAAVLLSTAGNNPERLRNEASLAALCGVNPLPASSGKTVRHRLNRGGNRAANNALWTITMVRMRGGPQTQSYVARRSAQGLSSKEILRCLKRYIVRELYPLILADLADSARAC

SEQ ID NO: 490636 - protein, 411 aa, unidentified
MDRIYDNCCGIDVHKKLIVACFRKGNKQEIREFGATTRELLEMADWLKDGGCEMAAMESTASYWKPLYNILESSGLNAMVVNARHMKAVPGRKTDVRDAEWIADLLQHGLLQPSYIPDKEQRELRELVRYRKSLVGERTRELNRLQKMLEGANIKLSGTVSDINGKSARNILEYLLTGASVDGPKYDEMYEQKIIAHNLKATKEQIIDDLNGVMSPLQRRMMKELLAHLDELNIHIKNLNDEIDSFMKPEEKQASHAIQDVTGIGNTSAQAIISVIGTDMGRFPTDRHISSWAGLCPGDNESARKRKSGKTRKGNSLLRTTLITCAHSAVKNKKSYFHAQFMRISSHRGKKRAYVAVAHSMLIAIYHILKDGVVFKDLGADYYNQFNKERKINAYLKKLKALGWEATVVAA

SEQ ID NO: 490637 - protein, 369 aa, unidentified
MNTTTFVGLDVHARSIKAVALDVMTGETKSATFAYDAAAVAEWVGSLDPAAKCVYESGVTGFDLQKKLTALGVDCVVGAVSKMIKPSADRKRKNDRNDAGFLARMLSVGNVVEVWVPDDECEAARDLVRALDDARDDLKRCKQRLSKFLLRHGLVFSETTPSGQRRGNWTAAHWAWINAISFKEGADNEVLAYYIDAVRQKLEDKKRLEALVKDEASKARWRKRVDSIRCLKGIDTMSAADLVFEADEFSRFKNARSFGAWLGLTPSEHSSGESVRQGGITKAGNKHLRRVLVESAWHYLNATARSKDLVKGQIPDPAARRHAAKGVRRLVKRREGMLERGVHKNKANVATARELAAWVWAVGCIVEGA

SEQ ID NO: 490638 - protein, 384 aa, unidentified
MPQMEQAHPAQDQTIIFVALELSKSAWLLASQSSPNGKNSSHRLEGGDIGGLLALLRRLQARERSGAPNEVQIVVGYEAGYDRFWLHRRLTAEGITCQVMDPGSLQVNRRARRAKTDRLDAAMLLRALMAWWRGDRAACHLVQMPSIEREDARRTHRERQRLIAERVQHVNHVQGLLASQGIYDFQPLRQNRWQSLSELRTGDGHELPSRLRRELEREFKRLELVLEQIAVVEAERDAAVTEPVPEDADAEKVACLARLGGLGTETAMILVREALFRPFATRKEVAAYAGLTASPFDSGQRQREQGISKAGNPLLRKTMIELAWLWLRYQPESALARWFHERVGPARGRIRKINAVALARKLLVALWRYLTTGVVPEGARLKAV

SEQ ID NO: 490639 - protein, 443 aa, unidentified
MSRKRRTHLRGKRGQAFADQIRGIPLDRILCVSIDVHKYFHVVMIHNALGEIVTPTFEIDIFQTGFDQLCQAIDEASVRIKAQVVLTGLEPTSHYFENLARHLRQRPQPVTLINSYAVKKNRDQQMMHREKDDEIDTASIGDLLRRGEGTPFKPASGVYLQLQHLDRVRLSKVKIRTMLQNQVLGHLDRIFPGLVIIAKEAKARYTPLFTTDFWSCQTMQHLIRVCPDPRQLAAMSPQDLIDAFHLHHYAMGPVTAAKTIAYAQKVLPPDAELIAIRGELLAHDLALLEEVEDHIAQLEDRLRTLLAETPYQIWIKLKGLSDIQVASLAAAIGDPANYSYAAQVFRRSGLVSGRNDSGIRQRKGKGKRVVKVGDVYLRRALMNALATLILHQPVLQQYFNKLRKSKPAGVARVATARRATGILWATLRDQQAKTLILKKGATM

SEQ ID NO: 490640 - protein, 366 aa, unidentified
MKKTSTVRANGNMIFKGHKLTIGLDLGDRWSYYCVLDEAGEVLLEQKLATTPEAMKQAFERIPRSLMALETGTHSPWLSRLLKELGHEVLVAHAQKVELISKSNRKDDRHDARTLARLARIDPALLGPVRHRSAKAQIHLTVIRARAELVSARTALVNAVRGLVKSYGQRLPKCGTEQVSRELAAELSAELREVLEPLLKEIESLNERIKEYDVRMEKIARESYPHVELLKQVKGVGTQIALTYVLTLDDPHRFAKSREVGCFLGLKPGRRDSGESQPQMHISKEGDRYLRTMLVQGAHYILGPFGEDSDLRRWGLRLAERGGKSAKKRAVVAVARKLAVLLHKLWVSGEVYEPLRNSQKTIRAAA

SEQ ID NO: 490641 - protein, 333 aa, unidentified
MENIALIGIDLGKNSFHIHCQDHRGKAVYRKKFTRPKLIEFLATCPATTIAMEACGGSHFMARKLEELGHFPKLISPQFVRPFVKSNKNDFVDAEAICEAASRPSMRFVQPRTESQQAMRALHRVRESLVQDKVKTTNQMHAFLLEFGISVPRGAAVISRLSTLLEDSSLPLYLSQLLLKLQQHYHYLVEQIKDLESQLKRKLDEDEVGQRLLSIPCVGTLTASTISTEIGDGKQYASSRDFAAATGLVPRQYSTGGRTTLLGISKRGNKRSELCWFSVRVFIQKLEHQSGKLADWVRELLCRKSNFVVTCALANKLARIAQALTARQQTYEA

SEQ ID NO: 490642 - protein, 430 aa, unidentified
MEEVTDEPLYRDRVCGIDIGKAGMAVTIRVPSDRNPARRASETRMFPTTRRGVLELADWLRCWQVPAVVMEATSDYWKPVFFRLEAEGFECVLADARQVKNLPGRPKRDTTDSQWLACCFERGSVFPCFVATPEFRIIRLHTRRRRDLTGERTREKQRAEKLLEDAAIKVSSVLTDLHGVTGRDIMECLIAGERDPKALAECARTRARRKIPQLREALEGAEFFTAHHARLLKSILNRIDAITAEIGELSAVIEELLAPFEEQLQQAESMPGWGRRAAQDVIAETGTDMSRFPTGGHLASWCGRSPLDKQSGARQGQRRHKRGNKYITAVLGETAVAAGKTQTREGARHRKISRKRGKAKACVATGNTQMKVFHALLSRPGARYHDLGPDYYQRQRDHNRRLSRLVGELGELGYEVTLCRKPRPEDASAA

SEQ ID NO: 490643 - protein, 342 aa, unidentified
MDYFAGLDVSVKDTSVCIVDDTGKITREVRVASEPDALLAVLTNRNYRFKRIGLEAGPLSQWLFSALAEAGLSVICVETRHMRAVLKAQINKTDRNDARGIAQMMRVGLYRPVHVKTLRSQKLRMLLTHRKLLQSKAIAVENDLRATLRNFGLKVGMVGTARFEARIKELVENVADLVVLVEPLLVVRRTLREQIGVLHRRLLAIVRDDAACRRLMTVPGVGPVVALTYRATVDVPARFRKSKSVGAVFGLTCSRDQSGERDRPGAISRCGDEMMRAMLYEAAQAMLLRSTKWSWLKAWAMQIAKRRGMKRAIVALARRLAVIMHRIWVDGTEFRWTRQVTA

SEQ ID NO: 490644 - protein, 333 aa, unidentified
MKEYIAFDCHKRYTLMEREQIKTGQRKQVRVEHCPGAIRQCLRGREPGTPVAVEATGNWYWIADEIEQAGLEPKLVHPRKAKLMMGMINKTDKLDVHGLNRLQRNGTLPTVWIPPRELRDQREITRARMVMTAHRTRLKNRILATLSKYGWAGTEASDAFGKKARKQLNEAVKQLPAETARVTEALLQQLDFVQDQIEDFEQRMRELVRDTPEMNQLKTLPGIGRILSAVIGLEIGVIGRFASAERYASYSGTTPRVHASGDKIRYGRLRPDVNHYLKWAYVEAAHSVCMHRRTYPERHVSQLYERICKKKGHPKAIGAVARHLAEASFYVLT

SEQ ID NO: 490645 - protein, 362 aa, unidentified
MRIIGCDLHARQQTLAMLDTTTGEVVAVTLKHEGDNVREFYSSLPRPVRVGIEATGSMQWFLNLMEELGIECQVGHPAQIRASAPRKQKNDRRDAELILKMLVEGRFPAIWLPSKELQDLRSLLRHRHQWVRMRTRIQNALQSMALANGLRRGTALWSHDGQSRIASLPLAPHTAYRRSELQAMYEKFEAEIEKLNQRVEEQACQRPGARLLMTHPGVGPITALATEVFLGDPARFADSKALASYVGMIPREYSSGGRQRLGGLSKQGNPLLRFLWGEAGAHAARKDPELQRFYRRKLVQKGLGKASVAVARKLGIRLWIMLRDQIEYNEFCRRGQKQQKSSDACVGMPETRYGAKSHRPID

SEQ ID NO: 490646 - protein, 412 aa, unidentified
MQTLIERGCGLDVHQATVVACLLMVRRDGKVQKQMRTFGTTTRELVGLREWLLSEGCTHVAMESTGVYWKPIYAILEGALEIVVANAQHIKKVPGRKTDVKDAEWIADLLCHGLLRSSFVPPKSIRELRDLMRYRRKLVESQAAERNRLLKVLETANIKLANVATDVFGMSGRLMLRALIAGKATPQEMAELAKGLLRKKIPELELALEGKLEQHHRFLLELQLQRLEAAEKDLAALEQRIRQKLEPYAAQLALLDEIPGVDWTLAAVIIAELGVDMTVFGNVSQLASWAGVCPGNNESAGKRKSSRIPSGNVYLKSGLVEAANAAARAKGTYLRDKFFRLKARRGYKRAVVAIAHKILVAIYHMLSQQVSYNDLGDLYLDKLNQNHLTRNLVHRLERLGYAVTLTLQQKAA

SEQ ID NO: 490647 - protein, 458 aa, unidentified
MAKRKKRKQGKMDRTLPTLKPNAAGIDMGATEAVAAVPADRDSESVRTFPTFTQDLHALADWLQRCGIDSVVMESTGVYWIPLFQILEARGIEVCLVNAQHVRHVPGRKSDVLDCQWLQYLHSVGLLKGSFRPEQDVCAIGSLLRHREGLVQMASVHVQHMQKALDQMNLQIHHVISDITGVTGLAITDAIISGQRDAQELAKLRDRRIKAPFETVAKSLVGDYRAEHIFTLKQSQTAYRYYQQLIADCDREIQDRIETFQNTHADPPAPAESSNPSSGSTDSTFNLRSHLERIYGTDLTAIPGFECLRIRTIFSEIGMDLSSQFPSSENFCSWLNLSPKDGTSAGRRIRAPRIQNNNRAANAFRLAAQSLHNSRSYLGDFYRSQRARFGAPIAIKNTAHKLARIFYHLVTTRTSYDESVFAKLDAKNQKRRLRKLQSFAQGMGYSLVPAHVPSPQVP

SEQ ID NO: 490648 - protein, 410 aa, unidentified
MEPILISCAGMDVHEKKVDVCIAHGPFDKPPKFEIRTFSTMTSDLEELMTWLNKYEVTTIGMESTGVYWKPIFNVMEGQFEIVLANAQRLKAIPRKKTDIMDCKRIANLLRYGLLPNSFIPPKEIRELRDLNRTRRKLVGMMTSEKNRLVKVLESANIKLSSVVTKIYGVSSLALIRSLLEKDKLSREEISKMAKGKLKKKVDLLEKAVNGKLTDHHRFLLEMHLQNIDHLAKQIKKLDEEIEKKMVPFQKESNLIQTIPGISEVNASAILAEIGVDMSQFPDEAHLSSWAGVCPGNNESAGKKKSGKTQKGNSFLKAALTEAAWAASKTKNTSYNAFYHNLVRRKGKKKTLVALAHRMLIDIYFVLKTGEPYQDMGAEAVHERTSKRKERSMIRSLEKAGYSVTRTATA

SEQ ID NO: 490649 - protein, 570 aa, unidentified
MVVVGTDAHKYSHTFVATDEVGRQLGEKTVKATTAGHATAIMWAREQFGLELIWGIEDCRNMSARLERDLLAAGQQVVRVPTKLMAQTRKSARSRGKSDPIDALAVARAVMRETDLPLATHDETSRELKLLTDRRDVLVAQRTSAINRLRWLVHELDPERAPAARSLDAAKHQQALRTWLDTQPGLVAELARAELTDIIRLTGEINTLAQRISARVHQVAPALLEIPGCAELTAAKIVGEAAGVPRFKSEAAFACHAAVAPIPVWSGNTAGQMRLSRSGNRQLNAALHRIALTQIRMTDSRGQAYYQRLQDAGKTKRAALRCLKRRLARTVFQALRTVHQPSSEHTQPAAACHRSYCSSHLGEPPRLTDMTQKTRIQPLPPKRAGLLIRALYRIAKRRFGEVPEPFTVTAHHRRLLIANVVHEALLQRASRKLPPSVRELAVFWTARSIGCSWCVDFGAMLQRLDGLDVDRLTDIDNYATSSKFSDDERAAIAYAEAMTADPHSVTDEQVADLRARFGEAGVIELTYQIGVENMRARMNSALGITEQGFNSGDACRVPWAAPDVPSAESR

SEQ ID NO: 490650 - protein, 347 aa, unidentified
MRFFTDRHQNYCGIDLHARSMYLCVQNLEGNVVLHRNMQAGPEQFLKAIEPFREDVVVGVECIFTWYWLADLCAEHNIPFILGHALYMKAIHGGKAKNDRIDSRKIAALMRGGTFPMAYVYPAKMRATRDLLRRRNHLTRKRAELLSHIQNTNSQYNMEPFEANISYKKNRTGVAEQFTDPDVRMGIQADFELIALLDELKNRLELHIMRRAKNHDPQALFLLRTVPGIGPIISLGILYEIGDISRFPRVQDFASYARLVKCTRESAGKRYGTGGGKIGNAHLKWAFSEAAVLFLRGNPEGMKFKKRLEKKHGKAKSLSILAHKLGRAVYYILKRDQAFDMQKFLKT

SEQ ID NO: 490651 - protein, 347 aa, unidentified
MKITRIGLDLAKNVFQVFGVDAQDKRVLSRQLKRKEMQAFFQALPACLIGMEACASAHYWAWVLTEMGHTVKLIAPQFVKPYVKGNKNDANDAEAICEAVSRPGMRFVPVKTIEQLHLQARHRVRSELIKQRTAKANQIRGLLAEYGIVIGLGVRCLRHRLPEILEETENRLQEDFRTLLAGLRDDLVYLDERIKTEDKAIETLANAHPSARRLQQLRGVGPVVATALIAALGDGRQFRNGRQASAWAGLVPGQHSSGGKQTLLGISKRGDTYLRTLLIHGARAALRAAHTKTDPLSLWLQGLCARRNPNVAAVALANKTMRLAWVLLRREEDYDPLHGHARPPQPT

SEQ ID NO: 490652 - protein, 424 aa, unidentified
MKVTYQTCCGVDVHKSFLVATIVKTTGGIEPSYQKKRFSTFNNSILEFKQWLLDNDCHDVCMESTGKYWIPVFNLLEDEIHVVIANPKWVKAVKGNKDDTKDSKWIGDLFRLGLVKGSYIPCKKVRILREYTRYRYKLVSCRSSEKNRYQNALTVCNVALDSVVSDIFGKSSTSIIDYLLEQSGTSINHEEIASKLLRSLKSKEDAVIESVEGYQMTDAQKYRMRLVRAHMDYITAEINDVDKMIENMISSNPDFENAVQFLCTIPGVKRDSAVTIISEIGTDMSQFGGAKRLCCWAGLTPGSNESAGKKKSVRITRAGVYLKPALVQCAHAAVKSDKSPYYKKKYDSLVKRRGKKRAIIAIARMILTAIYQMLSTGEQWNPSDLYKIDMPAPLLEKQKAKAIKQAKKLLQREGLLPPDEPLAS

SEQ ID NO: 490653 - protein, 322 aa, unidentified
MAMLSFGGIDVSKDRLDIMVLPDEQCSWVSNDAAGWAELVEQLRGSSITAIGVEASGGYERGVVRALLAAGMSVRQINPFKLRQFAKASGTLAKNDRLDARMIASFVAIMPTRPAQRQAPMIEQLAAMLTVRRQLSDHKVATENASRLLEGAMLQRLSRRRVAGLTADIDLLDQRLVEIVTADPALAHRFRLLTSMPGVGAVLACTLIALLPELGQMSRKQVAALVGLAPYDFDSGKLKGRRCIWGGRARVRHVLYMAALSASNWNPGLKAFHDRLEATGKKPKVVIVAVMRKMITTLNAMLRDGTTWVDRYSGRRSASTAR

SEQ ID NO: 490654 - protein, 365 aa, unidentified
MQKISTMRTSGKNIFQGQLTIGVDLGDRSSAYCVLNEAGEIVLEHKLATTTEAMKQVFGSMPRCRIAMETGTHSPWVSRLLTELGHEVIVGHAQKVRLITKSRRKDDRLDARTLARLARIDPELLSPVKHRSAQAQLHLAEIRARAGLVSARTALVNAARGLVKSYGERLHKCGTQQFGRETTSGLSAGLREALEPLLREVESLNEGIQEYDRRIAKMAKEKYLETALLKQVKGVGDLIATTYVLTVEDPQRFRKSRDAGCFVGLQPGRRNSGESEPQMRISKEGDEYLRTLLVQGAHYILGPFGEDSDLRRWGQKLSARGGKNAKKRAVVAVARKLAVLLHRLWVSGEVYEPLRNSQKAMSAAA

SEQ ID NO: 490655 - protein, 357 aa, unidentified
MNYTQNQKIEQVTESTLALGVDIGSSEHYVRAFDYQGRELTRKVFRFSTDINGFNSFYDWVTQICIKHGKNEAMIGCEPTGHYWYTFYQFVKDHGMKLAFVNPASVKKAKELDDNSPKKTDLKDPKTIAKLVIDRRYSFPYVPEGIYAETREVTSSRDLIMKELNAASNRIQRWLKIYFPEYLTVYKKFDTTTGMMILEEVPLPTMVTALGVDNIIKIWREHKVRGKGASFNRAKTLVDAAHDSVGKSGGQGAVMEIQMLLEDYKVKKQQLEMVTSVMEELIMQIPNAEKMLSVDGVGLVTVAGFISEVGDISRFKNPKQIQKYVGFELVENSSGKHKGRTTISKRGRKKLRKSYIR

SEQ ID NO: 490656 - protein, 410 aa, unidentified
MQTLVERGCGLDVHQATVVACLLIILKSGKVHKQVRTFGTTTRELVSLREWLLSEGCTHVAMESTGVYWKPIYAILEGAFEIIVANAQHVKKVPGRKTDVKDAEWIADLVCHGLLRASFVPPKPIRELRDLTRYRRKLVESRSAERNRLLKVLETANIKLASVVSDVFGASGRLMLLALAEGKDTAQEMAQLAKKQLRKKIPELQLALEGKVEEHHRFLLCVQLHRLGAVEKDLAIVEQRIQEKLKPYAAEVTLLDEIPGVDTALAGAIIAELGVDMSVFENVSQLASWAGVCPGNNESAGKRKSSRIPKGNVYLKTALVEAANAAAKAKGTYLRDKFYRLKARRGYKRAAVAIAHKILVAIYHMLSHRVCYNELGDLYLHKLNRHHLTRNLVHRLERLGYTVTLEQKAA

SEQ ID NO: 490657 - protein, 358 aa, unidentified
MNRNTGMNAGQIIGTMNGQQVIGLDIAKHVFQLHTVNMATGEIINVQIKRAKVAEHFASLAPCLIAIEACGGAHHWARSLSKLGHTVRLLNAKIVRAFVSGNKTDATDARGIWLAVQQPGVKFVGTKTTMQQATLTLHRQRELLMKMRIMQTNALRSLLYEFGATFAKGKRALFKEIEATLEGLADTLPQMVRDSLHEQVARIKSIEVDMQAIETRLQLQLKQDPQMQRIAQIPGVGLLTATAAIATMGEASAFKSGREFCAWLGLVPKQTGSGGKVKLLGISKRGDGYLRCLLIHGARSVIAHAKEPGPWLQGIKARRPSNVVFVAQAAKMARTIWAITAKAQDYDKGFKSIRPQAA

SEQ ID NO: 490658 - protein, 384 aa, unidentified
MKVLSNVTQTGLDNHRKFGNLTARDAQKNVVARMKLDYTNREAMARQLAQLPPGTPVIVESSFGWGWLCDELAGLSLSPQLASAAKVSGYRKLTTNAKTNKIDANALSELPLHENWWRVWLAPQQVRDERELLQYRMGLVKCQTQTKLRIHALLHRHGIIQPHSDLFGVTGRKLLDALVESDTLRETARVTLRGHLQLLDQVRRQIAVATRLFRKHLIRNAVGERLRTCPGIGLVLAYTILAEVGDFARFANGRKLCAYACLAPLADESGEPDGAPPQGRHVGHAGRRTLKWAFIEAAHGAVVKDEYFRAIFHRRTDGGKRDRNRGYIAVARQLCYIMYICQKEGRAYRPAAPVAAEVNNEATQQADKTARESTPARGRKSGRK

SEQ ID NO: 490659 - protein, 311 aa, unidentified
MATSSETYVGIDVSKDRLDVAVLGEKQEKQVSNTKDGITQLVKQMVNLQPELIVVEATGGYQRNVVDVLFHAGLSVAVVNPARVRQFARACGLLAKTDKLDAQVLAVFGQRVQPKRYEGKSEAEKELSGLLVRRKQLEEMLKAEQNRLRTISPALRGSVERIISLLKEEKKRLEEQIQEFLKEQKAWQEQREILSSAPGVGMVTTATLLAELPELGKMDRKKIAALVGVAPMNYDSGRKRGYRKTKGGRTDVRSVLYMSTLVATRYNPLIRTQYQHLLKRGKEKKVALTACMRKFLTILNAMVRDQQPFRM

SEQ ID NO: 490660 - protein, 460 aa, unidentified
MSKSKKPRSTMDFPVINYDAAGVDIGAECIYIAVPPDRSEREVRSFRTFTPDLREAASWMLQCGVKTVAMESTGVYWIPFFQILEDNGITVFLVNARQVKNVPAAFKTDRRDSKWLRNLHAVGLLSTSFRPEQAVCTIRSITRHRDALVKSGSRHVLHMQKALSQMNVLVHEVLTDITGVSGLAVLDAILAGERDSEHLLRLFSKRVKASEEEIKKALIGDWREEHLFTLKQSLASWRHFQQQIAECDDQILHLLSEYEPAPLPPQDPPVSSGPGEPKQPRTARQAMHDRDRNKVNRLKLIFGVDLTAIPAIAVGLAERIFTEVGPDLSRFPTANHFASWLGLAPNNSESGGKVLSRKTRRLANRLAMQLRLAATSLSRGVSYLAAYLRKMKARLGAPKAITATAHKLARIIYTIITTKQPYDESVFAKQQIRYQEQRLNHLKREAAAFGYEVVQKGFVS

SEQ ID NO: 490661 - protein, 342 aa, unidentified
MEEITRISIDTSKHVFTLHGSDREGRAVLRRNVRRHEVVRYFEKMKPLEVAMEACGGSHHWGRTLQALGHRVRLIPPQYVKPFVKRSKNDRNDAQAISEAANRPEMRDVPVKSVGVQAEAMLLSVRELLMRQRTQLINALRGHATEFGLTAAKGDKGLAALRAEIAAVPDTVLPAVAAEALQLLGGEIDRIATRLAQTDKLMMRRHRASEASRRLGHIPGVGPVVALSFATRVDASQFCSGRHFAAWLGLVPKQNTTGGKTRLGPISRAGDERLRQLLVLGATAVIRHARPGSPTASPWLLKLLERKPRKLAAVALANKMARIIWAMLARGDDYRRPDKVAA

SEQ ID NO: 490662 - protein, 354 aa, unidentified
MPRHSKDTVAILGIDIGKNTFHLVGLNKRGAIVLRQKLSRRQLEVRLANLPPCLIGMEACVGAHHLSRRLKAFGHDARLMPAKYARAFLKGNKNDYRDAEAIAEAVQRPTMRFVPTKTAEQLDLQALHRVRSRLVSERTAIANEIRAFLLDRGIAVAQGLHRLRVALPDILATRTDLLAPRLLHLLEDLIGDWRRLDQRIHSVSLEIQLLAQEDPACDRLMTVPGIGPIISSATVAAIGTGDAFAKGRDFGAWLGLVPKQISTGDRTILGRISKRGNKYLRTLFVQAARVVLLRPATWQRHGLQPWIAAAAQRLHHNVLAIALANKLARIAWSVLHHGRNFEVRKMTEPTSQRA

SEQ ID NO: 490663 - protein, 397 aa, unidentified
MIAVGIDVSKSKSTVAILNGDGSIRAKPFDVHHVADELQALVDYIKRTSEPPTILMEPTSHYHYPLLKAFTEAELPVCLINPYQMKKYGDTELRKAKTDKRDSLRIAQYALEKSYSLIPYTPQDQKYEDLRFLSRQYSQRISTLTVAKVQLLSLLDETMPGITTILPLKSRDPDNCVLLRFIKRFKSFDVIRKMGKTRFLDSYQVLVKKTKDRFAGSKGLAIYELVLNSVTTRGENPLSAMTQDQCVDLVSTSQKAADEINLQMRIIAETMSEYKVLRSMAGVGDRLGPIILGEIGDIRRFHSGKALNAYAGNDAPPYQSGQFESRNRHISKRGNPALRKACFEVMQALKLTKPQDDPVYLFLLKKEQEGKPYTVAKMAAVNKFLRIYYARAMELYK

SEQ ID NO: 490664 - protein, 349 aa, unidentified
MAVTIVEEARPITGGVDTHADTHVAAALDSVGGLLGVREFPATAAGYSGLLGWLGGFGTVCLAGIEGTGSYGAGLARHVTAAGIRVVEAARSDRQDRRRQGKSDPLDAVSAARAAQSGRARGAPKGRDGAVEAIRALMVARRSAAGERTRTIGQARALILTGPDDLRARFTRHTPAALAAALASLRPRPGDVPGYAVRVALRELGRRAQFPDGQPGRLDELIVPLVTARAPGLLALYGIGPRTAALLLIAAGDHPGRLRSEAAWAHLCGAAPIPASSGKVTRHRLNPGGDRQANHALWRIVFTRLGSDPATRAYAERRTAEGKSKAEIIRCLKRYVAREVYPRLRPAGG

SEQ ID NO: 490665 - protein, 384 aa, unidentified
MGHQTFIPRDYDVFAGLDVDKRSISVTFTDHQGLLKSLRMPYNVEHLVNHVRKHFPNQKVAFAYEAGPTGYGLYDGLVAQDFRCLIASPSMIPKAPGQRVKTNRLDSVGLSENLRGGQLKGIHVPSPLYRELRHLTQLRDTFVSEMVGMKQRIKSLLLMEGMEFPPAPAGSQWSFMVKNKLRKLPCSGTVRFKLDQWLDSLEFNEKQVLKTTREIRRFCHNDPELSQCIEYTMSVSGIGWIVASQLLARIGDWRELRNIRQLAGFLGLVPTEHSTGERTDRGSITHTGDERLRSKMIQASWSAIRKDEELREFFRSVCRKHPRRQGPRVAIVAVARKLSVRISVVLMKQRPYVVREKVHSAPLTQEETSSQGTTRRQAEPGDNS

SEQ ID NO: 490666 - protein, 406 aa, unidentified
MTAVMIGIDPHKGSHTAVAISATEEPLGDLRVRAGAAQAGALVAWAAGWPERTWAVEGAGGLGHLLAQQLVAAGERVLDVPPKLAARVRLLQAGDTNKNDPNDALSVAVAALRSKARRQVAAEDHAAVLKVWSKRHRDLARSRNQVACRLHAVLCDLLPGGVSKEITAAHAARILEQITPSGAVAAARRELAGQFLEDLRRIDAQLRDTRKTLAAAVRASGTTLTEVFGFGPVNTGTVIGDVTDVTRFPTRDHFASYNGTAPVEVSSGNRKIYRLSLRGSRRINHALHMAAITQIRHRHSDGRAYYDRKIAEGKTHKEALRCLKRRISDAVFARLQADARHATATAAPKSPGGQPGSDSDSSAAGSHPAHQLFGQATPEPSTTLRPATPARRTSPKPASRNTRRSP

SEQ ID NO: 490667 - protein, 339 aa, unidentified
MYPFYLGIDLHLKRTFMVLINAKGEVIDKERISNKEIKDFLEEKVPQETYAVLEATRNWPFMYDLLNEHVQQVDLVHAKGVRAIANAAVKTDQIDASTLAHLARMNYIPKAYAATQDIRDLRQLLRHREWMVNQRSKAKNRIHAVLAAYNLISPVTDLFGTAGREYLHEVMENELRPSAQQVIEDHLAMIDHLTERIQAIVKNISLSEKQNHIVNLLKSMPGVGKLIALILLAEIGDISRFRSSKALCSWAGLTPKVHSSDAVVQHGHITKEGSRYLRSAMVQAATTACRVSPKWYRVHENMAFRCGRRAARVAVARRLLTVIYFMWKKDQPYQEDYGQ

SEQ ID NO: 490668 - protein, 431 aa, unidentified
MQMTIGVRRRIAKQTQRRAELTPETLIVALDLGKHQHAVWVTDSTRIPLDTWVMPTSPEGFATLFDRTARLQERFGRPQLLFAMEPTSHFWKLAAQQITDRGARYRLVQPLSVRRAREEQRYTWAKGDRIDAELIATLIANGTWLEKQLETGPWGTWEQLARTRLHLVQQRADILRELLALVELWFPNYPYLPHGVTQPGSVAVLRSCPTPAEIQRLSAEAFLTRVRAHYTGARFLPRRILRVYHAAKHTWGLRTDRLTAGLRIRMAVRRYALLTEQIATTERHLARFYRASGARALLETIPGLGAAVASTLVALMGPVNRYDRSRCVVRLAGAEPTENASGTFQGHTPASHRGRGALRLVAYQAVLGLIRCNPEFRARYDWLTTRPKRPLHQIAARVALANKLLRTIYTILVTHCPYDASVARGEGRNSQ

SEQ ID NO: 490669 - protein, 317 aa, unidentified
MSTAPRFVGIDVAKAHLDVAERPETTPLRLPNDEAGITALVERLTAAPPTLIVLEATGGLEGPVVAALTAAGLAVAVVNPRQIRDFAKAVGHLAKTDALDAQVLAHFAEAIRPTPRPLPEAERQALAALLTRRRQIVAMLVAEQQRLGTAALALRPRIEAHIAWLRQERDDLDRALRHQVRQSLAWRADDDLLQSVPGVGPVLATTLIADLPELGRLDRKQIAALVGVAPFTCESGILRGRRIIWGGRAQVRAALWMGTLVAVQHNPVIRAFYARLLAAGKAKKVALTACMHKLLTILNALLRQRTAWHPGPLAFSA

SEQ ID NO: 490670 - protein, 438 aa, unidentified
MTDQQRAVIGGVDTHKDIHVAAVVDDVGRILTTAEFPATAAGYRRLVSWMRNLGQLQRVGVEGTGAYGAGLARHLAAEDIEVVEINRPNRQARRRRGKSDTADAEAAARAALNGEAAGAPKSQAGIVESIRALRVAFTSMRDTRTRISNQIRDLVVTAPEQLRRILGPLDTDDRVERCAGFRPGELVDPLEATKAALRALARQHQGLTIELDALRAQLDILTATANPALRAATGVGVDVASILLIAAGDNPERLSGDAAFAALCGASPVEASSGKTVRHRLNQGGNRQANHALWRIAMVRMTCDPRTRAYAERRRAEGKTIREIVRCLKRYIAREVFVLLTNPKPVIAGADLRTARNAAGISLATVADQLGTWATRISQLERGLRSGTTPTSRRATRYGSMPDKPLDSDRSIIRQLWGRQAVVTRSGLRAPCRRRRPR

SEQ ID NO: 490671 - protein, 390 aa, unidentified
MKQSFSEPLNRTIFMMGWTPRTASMCQSGVFEQHLREASVSGVITVGLDIAKHVFHAHGVDDQGRALFSKRISRGKLLDFFAAQPSCTVALEACGGAHHWARQLTQLGHEVRLIPPAYVKPFVKRQKNDAIDAEAICEAAQRPNMRFVAMKSEQQQAAGLVFRTRDLLVRQRTQLINAVRGHLTEYGWIAPKGPSHVAELAHLIEEKRMAGSLPEAARAMFRLMLDQLASLNGRIAVLDKEIARRAREDEVARRLMTIPGIGPISATAIAALAPPVETFAKGRDFAAWLGLTPVQRSTGGKQKLGATSKMGERTLRRLLIIGSSAVVQQASKRGAAKGTDVGSQTAHVGGGCARQQDGADCLGASCKARGLPSSGRSQRMILADLRSSEM

SEQ ID NO: 490672 - protein, 331 aa, unidentified
MSNIIGIDVSKLSLDCAYLRDVDQHKAKRKHVTNNPEGFASLLSWAQTVSGLCVNEIRFIIEPSSIYHELLVQFLDQHHATICLVNPGRVRKFAQGMGILSKNDLIDADMLTRYGLLNRKLMAYQAEAQEIGDLRSLLNRLDSLERDLRRELNRQEKIGRSSVLHRFEKQSMQRCVKRLKAEVVLFKKHIRKTIHSSTLLKKDYDLLLSIPGVGAKTAWVMIVVLGSRQFDSAVQVASFLGLNPIEKQSGTTRYRRPRLSKAGSGRFRQALFFPAMVATRKNPDIKAQYERLLEAGKTKMCALGAAMRKLVHICFGVLKHQRPYENRAQQS

SEQ ID NO: 490673 - protein, 350 aa, unidentified
MNVNHYIGFDVHKKSINYCVKMADGQIVEEGRLRATHDALRRWAGRRQEPWRGAMEATLFSGWIYDTLKPLAAELQMGHPAMMKAIGASKKKNDKIDSRKIADLVRCNLLPACYVAPAEMRELRRLLRYRNVVVAQGVRMKNKMSGLLMEVGAEYNKQQLHGKKYFTELLGKLEEVPESVKDLLRLSRGALEMFEATQRQLLDRLRKEPRLVERVAVLESIRGVGEVTALTWALEICDPQRFRSIADAESYCGLTSALDCSADKQHRRPISKQRNGHLQTVLIEAAKLAPRWNPQLAQVHERELQRGNRNRATLAVARKLVAYLLAVDKSGQPFRIRNQPAPTTEVATAA

SEQ ID NO: 490674 - protein, 392 aa, unidentified
MYIVGIDIGKNHHEASIVSPEGKQIGRSLRFATTHKGADSLMSFIFKNIGNSPCVFGMEATGHYWYPIYSFLKAKGYTICVINPIQSDSLRKMYIRQTKNDSIDSFLIAEVIRFGQFGTTSMADENILAMRQLCRYRDSVISSRTEIKLRIGTIMEQIFPEYEKQFSSLWVSTSMGILEKYLTPENIENAPIDELFEIIKDKSHNRLTKAKAISIKEAAADTFGIKIAQDAFSFQLKQLIDRMNFHDKQIEALDCQILEYYEKFDCYLHTIPGIGMIAAAAILAEIGDINRFKSSSALVAFAGIDPTVRQSGEFSSTHNHMSKRGSPYLRHAIFLAATTCSFHNSPLNAYYKKKREQGKHHLTATGAVARKLTTVIYAVLRDGKPYEPKKFC

SEQ ID NO: 490675 - protein, 414 aa, unidentified
MTNLFIGIDISMKDFKAQFMDNQGETTAKRQRFLNDQPGLSSLIDIILTICQENAMDRIVIGLESTSVYSWHLQMGLASNQRLAPYECQVYVFNAKVVANFKKAYVDLPKDDWTDAWVIADRLRFGRLPESCQVDFRYLPLQRLTRFRYHLMQTITREKNYFLTNLFLKFNTLQQNEVFSNLFGATSEAVLTEFLSPDEIAARPLDELIDFLMEKGKKHFTNPKATAEALKNAAKNAHRLKGNLLEPLNLILATGIETIKCLEKQVKTIDKAITKELSHFKHTLDSVPGLGPVFCAGLIAEIGDIRRFPNDSALAKFAGLTWRRNQSGEFDADETPITKTGNSYLRYYLVQAANSVRQYEPEYRQFYSRKYRESKTHHHRRALVLTARKLVRMVDALLRSNQLYKPQGQRSDSA

SEQ ID NO: 490676 - protein, 358 aa, unidentified
MKQSKELDFKGQNIYAGIDVHLKSWSVTVLSESSVLKKFRQDPQPEALHKFLVTNYPGATYHSVYEAGFSGLWTHNRLSELGINNIVVNPADVPTMSREKLRKTDAVDCGKLARGLRARDLRGIYIPRAEILEIRSLIRLRNSIVKDTTREKNRIKSLLRFHGIEIPEEFTRHSMGNWSKRFLQWLGEVDMSTEYGRKTLDLHIEHFVRLREMMLQETKAIRELSHKEPFAEPLRLLMTVPGIGITTGITLLMEIDDVSRFKNADQLASYIGLVPMFHSSGEKDGVGDITIRKHAMLRCYLIEAAWKAVSKDPAMTMAYEKYRKRMNGNKAIVKIARRLVNRVFFVLKRKQEYVACVV

SEQ ID NO: 490677 - protein, 365 aa, unidentified
MIVIGTDTHKKTHTCAAVDALTAAAHGELTAPARKGSFGKLLVWARALDCERVWAIEDCRHVSGAFERFLVARGERVVRVAPKHMAGARRSERERGKSDSIDAFSVARAALKEGIENLPGAHLDGMALDIRLLVDHREDLVTARTAEQQRLRWHLHDLWPEFEIPAGALDTGKWLGKASRRLARAEQSTRVRVARELVRQIGARTTRIRELEAELMKLVGSYAPQLLAERGCGPLTAAKLIGEIAGADRFATDAKLARTSGSAPIPASSGNTNRHRLDRGGNRQLNCALHRLAVNKAHWDPETVAYLERRQAEGKSRKEALRCLKRHLARRVWKLLQGPSDRQDAQPQKPIAIYCNLPNSGFTLT

SEQ ID NO: 490678 - protein, 342 aa, unidentified
MEQYVGLDVSLKEISVCIIDSKGEVVFEGKTAAEPATLVELIRSKAPQVKRVGLETGATSPWLFHALTAAGLPVICMDARHAHAALSMRPTKSDRSDARGLADMLRMGWYREVHAKSITSHEHRTILGARHQLVTMRSELDAQIRGILKTFGLILGTGNKDTLIQRAEELAAGHPVLSGLVAKLAEVRRHVTSQITAIDRDIRHLVHTEPTLKRLISVPGVGPITALAFLSAVDDPSRFKHARDVGPYLGLTPTRYQSGETDRQGRISKCGDTFTRTCLYEAAHVLLTRVQRFSPLKAWGMRLAKRIGGRKARIAVARKIAVILHCIWTDGTEFWWTRDKAA

SEQ ID NO: 490679 - protein, 351 aa, unidentified
MTTMTDSRPKVTGGVDTHRDLNVVCALDERGAELGVEAFATTPTGYRQTLRWLRRFGEVEKVGVEGTGSYGAGLTRYLQDQDIDVVEINCPNRQRRRSHGKSDPVDAIAAAKAVLSGDATIEPKTRDGNVEAIRALRTADRSARHARIKALNQMRALLLTGPEELREQFRDTTPWRMVRTAARLRPGDPTSAVGATKFTLRLLARRVLGLEAELKELKGILKPLVTATAPELVARHGVGTETAGALLVAAGDNPERLRDERAFAHYCGTSPIDASSGTVVRKRLNRGGNRQANAALWRIVMVRMVSDPATKDYLERRVKEGKSKREAIRCLKRYVARELYPLLVQTSSCNR

SEQ ID NO: 490680 - protein, 366 aa, unidentified
MSTQDTVVGLDVHADSITAAILPPASDTPEVVKLSGDLMQVRRLFRRLSAEGPVRSCYEASGAGFVLQRLLTYDGFACEVIAPSLIPRKPGEHRKTDRLDAIMLARLYRSGHLTAVHVPDEDHEALRRLLRLRETYHAYCTATMHRISGILRNHGHVFKEGKSTWTKKHRRWLAELRQSLAGPLQMALSAELQHLEYLETEQSALDAELERYAALSQYRKAVEALCCLRGVKTLTALTLLVEIGDVRRFRSPRSLMAYFGLVPSEYSSGNREYRGSITKAGNVHVRRLLVEAAWNNRHNAGAALVLKRRRQGQPPEIVAIAQKAQLRLVNKFLRLDRRKHRHVAITAVARELCGFVWAILMAVPQQ

SEQ ID NO: 490681 - protein, 341 aa, unidentified
MALWSGIDLHSNNSHVTVIDPERRCVYKRKLRNDLGTITHELEPFRNELVGIVVESTYNWYWLVDGLMEAGYRVHLANPSALRPYSGLKHSDDDDDAAWLAELLQLGILREGYIYPQAQRPVRDLLRKRGQLVEQRTRNLLSIQTQIQRSTAKRMSANDIKKLDNDYLSTLIQNSDTTLAIGSNLRVLQCLSEQIEVLERTVVERVQLREEFRLLQTIPGVGRILALTTMLEVGEIRRFPTVGDFASYCRCVDSARWSNGKKKGAGNVKNGNPYLCWAWVEAANFAVRYCAPIDRFFQRKLAQGAQGGRTLAIKATAHKLCRAGYYIMRDQVPFDLAKAFS

SEQ ID NO: 490682 - protein, 343 aa, unidentified
MQTITTIGLDIAKSVFQVHGVDAGGQVIIRRQLKRRQVVAFFQKLPPCLIGIEACASSHHWSRELQALGHTVRLMPPAYVKPYVKRQKNDMADAEAICEAVTRANMRFVPTKTPEQQSGLMLHRTRHMFIRQQTAVINSIRAHLAEFGIVAPLGRKGVTELLRIVADPNDKRMPEVARACLAALGTQLLALKEQILEFDRMILAWHRSNQTSKRLHYIPGVGPMLATALVASVADPRTFRSGRNFSAWIGLVPKQHSSGGKERLGGISKQGDRYLRSLFVAGALAVIRYAKIHGTGHRPWLTALLGRRPTKVAAIALANKIARMAWAIMAKGERYKQPAALAR

SEQ ID NO: 490683 - protein, 359 aa, unidentified
MQTQRNELNFEGQNIFVGIDVHLKSWTVSIFTEKLHHKTFTQPPKAELLSEYHKLNFPKGSYFSTYEAGFCGFWAHFKLKELGIQNIVVNPVDVPTTQKEQMRKSDAIDSNKLGRSLRSNELKGIYIPQAETLEDRTLIRVRFAIVRDMVRLKQRIKALLNLYGIEYPNELKNTNTHWSKRFINWLKTIQLQYSTGTDALNILIIAAEQHRLILLDATKKIRTLSKSEHYSKNIELITSVPGVGIITGMMLLAEIEDINRFNNSDKLAGLIGVVPNCHSSGENEKKGEMTSRGQYFMRKGLIESSWVAACKDPALSLSYNTYCKRMEPNKAITKIARKLVNRIYSVLKNQKRYEMGIVK

SEQ ID NO: 490684 - protein, 364 aa, unidentified
MPSMPEPVSDDQDDNSAAEEIVLGVDTHKDIHVAAVITSLGVLRESTPFPATAAGYQALLAWAGTFGVLRRAGVECTGSYGAALARHLRAAGVEVIEVNQPDKATRRRQGKTDSLDAASAARAVLSGRASGSAKAGDGPVEMLRMFKLAKSSAIKARTQTINQLKAVLVAADPQLRETLAGLSNLRLIRRCAQLNIDTPQDATSAAAYTLRLLARRILTLTDEIRELEHQITTAITSHTPHLLTRRGIGPDNAAALLIAAGDNPDRLRSEASFAALCGVSPLEASSGKTSRRRLNRGGDRQANSALYRIALSRLRWDARTRDYLTRRITEGKTRREAIRCLKRYIAREIYQIITSPPETQPSAA

SEQ ID NO: 490685 - protein, 412 aa, unidentified
MEVIYPRCCGLDIHKKTVVACVILSDPGQPPRKETQTFRTMTADLLALADWLSELECTHVAMESTGVYWRPIYNLLEGLFELLLVNAQHIKTVPGRKTDVKDAAWIAELLRHGLLRGSFVPSRPQRQLRELTRYRTTLVQERARTINRLQNVLEDANIKLASVVTDIRGVSARAMLEALIAGERDVQVLSELARGRMRSKRAELEEALRGCFAPHHSFLLTEHLSHIDYLDEAIERVSATVEQSLAADQDAVALLDTIPGVGQHTAEILIAEIGTEMSRFPSAKHLASWAGMCPGNRESGGKRLSGKTRKGSRWLRQALVEVAHVASKTKGTYLAAQYQRLASRRGKKRALVALGHTVLVIAYHILKQRQPDRDLGAMYFDKLEQHRVEKRLVHRLECLGYQVILQPSAVTG

SEQ ID NO: 490686 - protein, 355 aa, unidentified
MEQIKNNKIDFSNQRFFIGLDVHKKQWNVSIRNNRLHLKTFSMNPHPEELQKYLIRNYPGGEYHSVYEAGYCGFWIHEELEKLGIKNKVVNPADVPTRGKEKLTKTDIVDSRKLARELENETISGIYIPTKYHQELRSLCRLRYSLSIHQARLKNRIKGHLSFYGKAIPAQSELYHWSNRFIQYLKTIEFDYEMGKDYLGYCIEELESTRKRIAEITKKIRQILPKELIQLFVSSIPGIGIITAATIYSEIIDMKRFKRIEELASYVGLIPSTFSSGQTEKSYGITIRRSKYLRKMLIESAWVAVREDPALLQHFNELTKRMSKTRAIISIAKQLLRRIRHVWLEMEEYVYGLTG

SEQ ID NO: 490687 - protein, 319 aa, unidentified
MSPTRIYVGIDVGQTRLDVAHGTEGWWVANDDRGIADLVARLEALQPALVVLEATGGIEMPLVGALAAAEVPVVVVNPRQTRQFAKATGRLAKTDAIDAQVLARFAEGVQPALRPLPDAATQKLSSLVTRRRQVVEMLTAEKNRLRTAAPAVGGHIKEHILWLERSLSDLDSELAQAIHSSDIWRAQDDLLQSAPGVGPVLSTTLLAELPELGRLNRKQIAALVGVAPLNRDSGTLRGRRAIWGGRSQVRATLYMAALVAARHNAVIRAFYDRLIAAGKPKKVALTACMRKLLTILNAMIQHHSPWQTMDLTLDLKDSC

SEQ ID NO: 490688 - protein, 370 aa, unidentified
MPETARYIGLDVHKASISVSVAEEGRDGEVRFIGAIANTSLDVAKLARRLAKEGHRLEFCYEAGPCGYGLYRQLTELGHGCTVVAPSLIPTRPGDRIKTDRRDSQRLAILHRSGELTAVWVPDAVHEAMRDLVRARIDAAMQLTRARHQLLSFMLRHSRIYATGKHWTQRHRSWLAGQTFEQPAHQIVFQDYVEAVFTARDRCDQLVERLIIMLPGWSMAPLVEALRGLRGIDFISAVTFVATVGDLGRFANPRQLMAYLGLVPSEQSSGERVVRGGITKTGNREARRMLVEAAWSYRYPARVATKKAEIIARLPKAVRDIAWKAQVRLCARYRRLSASAKKPTVVVAAIARELAGFVWAIGQAVTPAAA

SEQ ID NO: 490689 - protein, 357 aa, unidentified
MTTYYIGADVHSNSTELAIEKRNKIVARYSVPTTIPAISNVLDSLQGKKHMALEEGPMAGWLYRNLCRKVDKLIVADPRRNKLITSDGDKDDKIDAAKLAALLRGKYLRSVYHSDSDGRSELKHWVSLYHDRGKDAVRNINKIRARCRMHGLTIPRLALRDPSHRRQWLFKINQPVLARQLNMLWIGYDATAKQTRVAKQQLIQLSKNYPIIRFFKELPGIGLIRATTLFAYLDTPWRFKEKNKLWKYCGVGLQRTTSGTDKKGRPKPARLQLPWAVNRTLKNMILGAAISAINQKDNVFKAYYERMVKDGVIPSNARHAVARKMLTVMWGMWKTNSRFDEKRCQESNRPTASALSR

SEQ ID NO: 490690 - protein, 343 aa, unidentified
MKQALFAGIDLHSNNVMIGIVDQSGRRLKHQKLGCDLKEITSFLEPWKPQLKSVAVESTYNWYWLVDGLRALSYPTKLADPAQIEQYSGIKHADDKNDAFFLADLQRLNILPTGYIYDPALRPVRDLLWRRLGLVHQRSALLLSFKSLYARTTGQAMSLSRLKAMEPNDTKTLYRHPANCLIALLQKEHIDKLCQSIELIEKSVLAQARELPCYQKLLSLPGVGRVLGLTITMEVGEISRFKTPGQFASYCRTVNSQRLSNNKKKGDNNRKCGNKYLAWAFVEAANFAKQHHQHCRRWFDRKAARTSKLIATKALACKLAKGGETEICESCRQPENRGWQKPF

SEQ ID NO: 490691 - protein, 426 aa, unidentified
MAELIPLAAVIGIDWADQHHDVALQESGMTRVERQRLPHTPEAIGTWMATLRARFANRPIGVAVETSRGPLIHALLDHDCVVLYPVNPRSLKRFRETFAPSGAKDDVPDADLLRELLVKHRDRLRPWVPEDVETRALRRLVESRRKTVDLRTKLTQQLVAALKEYFPQALSWAGDDLASDLACDFLLAWPTLEAVQRVRARTLRKFYTTHNCRRPAIIEQRLEEIRQATPLTRDPAIVETNALLVQMLAQQLRTLAVSIERFDSEIKRRFAAHADADLFNALPGSGAALAPRLLVVFGTDRERFRRAADVQQFSGIAPVMERSGNSRYVHWRWAAPTFVRQTLHEFANQSIRRSAWARAYYALQRSRGKGHHAAVRALAFKWIRIIWRCWQERTPYDEARYTQSLLRHNTPLTSRLSLESNLSATE

SEQ ID NO: 490692 - protein, 363 aa, unidentified
MFSERTSVGLDVHARSVAAAAVDGVTGELRQARLTPSHEHIRSWVGDLPGPVAVAYEAGPTGFGLSRVLNDSGIRCVVAAPSKLQRPSGDRVKTDARDAIHLARLLRLDEVSAVVVPSVEQEAARDLVRAREDARGDLMRARHRLSKLLLRQGFVYSGGRAWTGTHDTWLRQVGRAELVSPATQMTFESDYEAALMVKARRDRLDAAIATMAADSEFTAMVRRLGCLRGIGTLTGFALAVEIGDWDRFTGKTIGSFVGLTPSEYSSGASRVQGEITKTGNSHVRRLLVEAAWHHRPRYVVGQTIRDRWELAPAAACARGDEGNRRLHGRWMRFNERKKRSVVANVGIARELAGWCWSLAVMDD

SEQ ID NO: 490693 - protein, 438 aa, unidentified
MMSKSQNPTKEVVPIMKKRIYRRMPVNDFQPDSISQADLGGKLVFAIDVAKVDMVAAIAAADGHVLQTICWKAPEQNPNVLTILRHFRTAGIPVETVMEPSGTYGDVLRHQLEQDEFPVFMVSGKRTHDAKEIFDGVPSLHDAKAAAIIARLHADGLSSRLRDEGPDRRQLRAALAIMDLHQERYLQLVHRLESWLARHWPELPTLIELTSSSLMALLARIGGPADVAASPDQASKLLLGISHRLLPDDSVAAILASARSSVGVPLVGLERDALMAIADDAYRAHRAFTIAKTQVDKLAATTPAALLAPAIGHTTAAAVFAEVGDARSYSCTRAFLKAMGLNLKEKSSGTIQGQLKITKRGPSRVRQYLWLAVFRWIQKDPIANAWYQRKKQRDGGRASRAAVALMRKLAKALYHVGRGATFDSNKLFDVRRLQLSEG

SEQ ID NO: 490694 - protein, 324 aa, unidentified
MIDGILGIDVSKNTLDASMSSCNKVRVKSFANSPDGWRHLLDWLIGQKIRRVHACLESTGLYSLGIACKLNEADHVVSIVNPAQIRDFARTKLGRNKTDAVDASHIREYCELFKPPPWSPPSHAHRQLGELQTIRAGIVAGLTEWKNRKNSGMIDVVAQSLADATISHFTRQLGAVEKAIAQAIDNDTDLRRKRDLLLSISGVGETLASVVLAELPGPDVLRSSAEAVAYTGLNPRRHQSGTSIDRLTRISKIGNAVLRAALYMPAMSAMRYNPAIVALVTRLKARGRLNPKQIVVAAMRKLLVLCFGVLKTGKPFDPALAMGC

SEQ ID NO: 490695 - protein, 349 aa, unidentified
MVYVGLDVHRKRTQVAIMQEDGTEILNRNVANDPAELSPLLGTLEPGTPVVFEAAYGWGWLVELLDDWDLEAHLAHAKSCKAIASARLKNDKVDARTLAHLLRADLLPEAWIAPRAVRDLRALLRHRASLVRFGTALRNRIHSVLADSGIRREVDDLWTQPGRAWLASLELAPVQRAVVDDCLALIDAISVPIKRLDREIRALAKPDARVEALQRLPGIGRLTAMTLVAEIGDISRFPTARKLCAWAGLTPTVRNSDRSVRHGHISKQGSRWVRFVLGEAAHVAKRYPPFARPYADIVTRRGKKIATVAISRKLLARCFHVLKEVSRDNTSSEAGEGLRAGCARGTNCA

SEQ ID NO: 490696 - protein, 397 aa, unidentified
MYIVGIDIAKRKHEAAVIDGDGAVIIKPFSFTNNCSGYNRLLAMLAKAKLPLDEVSFAMEATGHYWLALFTRLQKEGFRVQVINPVQTNSIRSFYIRQAKTDPRDALLIAEVIRFGHFSESTLHPENIYELRELCRGRHAIVSMQADVKRKVVALLDQVFPEYETAFTNLFGDTSMAILQTCPTPKELSEMPLEELCHLIEVSSHKRFRMAKARELQELARNSFGFAMAGDVFSTMIRLYAKHLDFLKQQVREMDRKIAEIMDTLDTPITTITGIGPTLGAYILSEIGDISRFSSAAKLAAYAGIDPTMRQSGEYNGVRNRMSKRGSPYLRHAIWLAASSAVLHDPALKLYFQKKRDEGKPYMASVGHACRKMVSIIYAVMRDNKAYTPCIPNEISA

SEQ ID NO: 490697 - protein, 390 aa, unidentified
MEARTVNDLLPAASHDDAVGCLVAIELSKKSWIVAVNTPLSDKISRHTLKPGDGKELLDLCERIRTRVARETKRRVEIVSCYEAGYDGFWLHRLLEAHGIRNYVIDPASLQVDRRARRAKTDHVDVERLLRSLMAYLRGEPKVWSVVCVPSVAEEDDRRLNRERGRLINERIQHVNRIKGLLAIHGIYDYQPLRRDRMLRLERLRTAADGQTLPPRLKAEILRELQRLEIILGMIKTIEAERDAIASPKTETEHTSAKKIQDLAKIKSIGPEFATTLVGEVLYRSFDNRKQLASYVGLTPAHFQSGAMCRDQGISKAGNGKARTVMIELAWLWLRHQPDSPLSVWFRERVGKLKGRIRRITIVAVARKLLIALWRYLETGLVPKGAILKA

SEQ ID NO: 490698 - protein, 446 aa, unidentified
MSDRSGLSRGDRNRNARLARLRQLLPVDHAIVGIDLADDKQAAVVTDHDSRVIARRRVSARAWELGELLDWAVARAAPAGFASVTVACEPTGHRWRVLDQLAAERGLALVCVQPLLVYRAREGEDLTFDKSDPKDAVIIARLAAGLHCYEPERADAVWARLRHLGARRSRLVTDATAEVNQVRDLLECAWPAVLGAAGVPFRSASWRAALAVVLDRCAGDLARVRRLGLDRFTAAVRRELPRWGAVRPCLRIVRAVFGALADSSGVVAHRPGALERAHLALGDRRETRARLAEVEARMAAVLDDLGLTSLLATIAGLTPVGAAAILAETGDPARFASPRSLVKHAGLCPRDNASGGYQGKTSISGRGRPALRLAAWRAVWAALPNNPVMAARFTHLTTREENRLARQQARTACAAALLRWIHVVITRHVAWDPAIAAGSTPLQQAA

SEQ ID NO: 490699 - protein, 307 aa, unidentified
MATDIGIDVSKHTLDWCPGPSVKIQQTRNEPRCIASLVQRVIAVEPERIIVESTGGYERKLVLKLAEANLPVIVVNPRRVRSFGEGMGMLAKTDAIDAKLLALYGEKVQPPIRPILQGRDRLLADLVARRRQLIATVVSEKNRRETAARPVQRSIAAVLRVLEREIKRIDQQIDQSIEEDADRSELSELLQTTPGIGPGVTRTLLVDLPELGHLGRREIAALVGVAPFAKDSGQYRGRRSIRGGRASVRTALYLAAMTASRFNPKMREVYQRLRDSGKPPKLAFIAVARKLLIALNAIARERRAWQP

SEQ ID NO: 490700 - protein, 356 aa, unidentified
MNYIGIDISKDTFVVAYSWEKNIKTRVFKNTTKGIHEFIGTISKEEHHCVVEATGNYSALLVYLLSKAGITTSLENPLKVRNFARAMLSTVKTDEVDARMIALYGQRMRPKPYVLPSDALLILKQKRAVIRQLKKQLIATKNMKGSMEVLPYFDTKCRLSLERTITHFEKQLKHLEEDLVALTGKEYKKQLELLTSIKGIGLTVATALIITTGGFTYFDNAKQLTRNLGLSPTYQQSGTSVRFKGHINRNGDASLRSQLYMAAISSLRCNTACKTFYDRLRSEGKPVKVSLIAVANKLIRQAFAVVTKERPYVDGYVSTFRPTSPQSQNGIHASNNNMKNTAGFGGAQPPKRLQSC

SEQ ID NO: 490701 - protein, 341 aa, unidentified
MEQATTIGLDIAKHVFQVHGADAAGHVLFRKRITRGKLLGFLAAQAPCVVAMEACAGAHYWAREVGKLGHRVRLIAPAYVKPFIRRQKNDAADAEAICEAAQRPSMRFVPVKTEEQQANGIVFRARDLLVRQRTQCVNALRGHLMEYGYVFPKGITHVETLAAVVEDLQSSLPDRVRVILQLLVDTFTALEAQITALDAEINQRSKSDPTARRLMTIPGVGPITSTAITALVPAAEGFPAGRDFAAWLGLTPLQKSTGGKQKLGAVSKRGERTIRRLLIIGASAVVQQASRRGAPKGSWLAQMLARKPKMLVTVALANKMARIVWALLVKGGTYRTPTAAA

SEQ ID NO: 490702 - protein, 416 aa, unidentified
MLYVGIDWAVEGHAVTLLTRPGEVLKSLAIANTLKGFLTLLDAIRGYIGKDKPASVSVEVLFIIEDRNQRLVDFLLAQDFAGYLMEPNRMTGYRLRYRSSGNKTDPDDAFIMADVLCRDRDQLPTISPMNATVQTLKTLLLDRESFVRDQTRLINRLTACLRQYYPEALELFSDVAGKTALEFLAAYPDFAAAHRLSREQIQQFLTEHHCHRTKRLERIVAVLAQEPIAVPAAVIETKRRLALHIIQQLQAVQTTVAEYDAEIQRIGAENAEVQRFKGLPGAGPQIAGGLYTLMGDDRTRTRFRCATGLQSFVGTAPRTIQSGKMRAVCFRFGCNGFHRSQAQQMALGALRVSAWAKQYYRGKRAEGKRHQHALRCLANLLMKIAFAIWRDQTVYDENRHLAQIMRHQMRQKSSMA

SEQ ID NO: 490703 - protein, 357 aa, unidentified
MERSVTDNSINFNGKIVNVGIDVHKQSWRVTAMVEGVVIKAVTIKPYYSVLKKILSHFSGAHIRVAYEAGPAGFSLYDELTADHIECMVVPPSLIPVESGNRVKTDKKDSTKLAHYLENNLLKRVWVLSKEERAHRQLLRTRRQIAHHRSDVMRQIKSLLLFHGIPYPSEGPQIWTKTFVRWLRTVKGDEYIVHSLNVLIDVYEYLTQQVKGLTEEVIKLARSEKYAHRVQVLTSIPGIGVLSAMEILVELQDVGRFRSADQLAAYIGVTPSQYSSGERVRMGSITHLGNHRVRTILVESSWTVIRKDPSLYKVYESIKQRRGAKRAIIAISRKLVIRMRRLLLDDKPYTINHSLAA

SEQ ID NO: 490704 - protein, 479 aa, unidentified
MKENLRRCCGIDVHKNSVTVCVLAPAGQQHIETKKRKFRTFTRDLKQLRAWLKNCQVTEIAMESTGQYWRPLWNLLEGEFTKLILVNPQHIKGLNGYKTDPKDAQWIADLLDSGKLRGSWVPPRSIRELRDLTRHRVNILEDLNRAKNRIEQLCQSGNLKVSSVATDLFGVSGRKMLKAIVENQHDAGWMADYARGQLRNKRRELELALQGTFTDEQRWLLEKELRQVEWLEGQVEGLEEEIERRVSGFEEAIQRLLTIPGIDRKTAWTIVAEVGVDLSAFADAKHLASWAGLCPGNRESGGKRMSGRTRKANRYVKRAMCQAAWAASHSKNTYLSAFYRRMAIKKGAPKAVMALAHHMIVVIYQVLSRKEEYVEMGGDYYDQRNKPRTIARLVARLGRLGYQVDLKLLENAMPADPTEKDNESEPAIQPDAVPEEGLGAKRKRGRPCKCRQRGIICKHQAAREVNPLIQQQPSEGRFS

SEQ ID NO: 490705 - protein, 347 aa, unidentified
MKHYAGIDVSLNSCSVCVVDESGKIVREVKVASEPVALIHCIKSLGVRVERIGLEAGPLSQWLYGALRESRLPVELLETRHVKAALSAMPVKTDRNDARGLAQLMRLGWFRPVHCKSMAAQEVRALLTARKLVQSKLYDIEMSLRGILRGFGLKVGPTTSGSFAARINHLAAGHPSLEMVAEALLSTHAAALCAFKNLEKNVRQISRADARVRLLMSTPGVGPVVALTYISAIDDPKRFTSSKRVGAHFGLTPKKYQSGETDISGRISKIGDSSVRAVLYEAAHIILTRPIHGGALKSWAMRLAKRAGMKKAKVALARKLAVVLHRMWVSASTFDFEKANGCMGAAA

SEQ ID NO: 490706 - protein, 422 aa, unidentified
MLEETQETEEIIQRVAALDVGKAELTCCVRVPGQGSSGRRAQEVRTYKTMTRSLLVMVDRLAELGVTRVVMEATSDYWRGAFYLLEAHGFEAWLVNARDVKHLPGRPKTDTLDAVWLCKLAERQMLRPSFVPPRPTRQLRQVTRYRADLVAARTAEKQRVEKLLEDAQIKLSVVASDIFGVSGRAMLTALIAGERDPKRLAQLARARLRAKLSLLEEAFSGFFTDQHAFLLGKMLARVDALDADLAELDAKLQALIAPLAGAVERLDEIPGVGQLAAHLLIAEIGTDMTRFPTAGHLVSWAKFAPGVKESAGKRKGRGSTGHGNPYLARVLGEAAVAASKTDTFLGERYRRIARRRGKRRAIVAVGRSILVIVWHLLSDPSARFQDLGAGFYDTRSNAEHAKRNHIRQLEALGYKVTLQPAA

SEQ ID NO: 490707 - protein, 343 aa, unidentified
MKDKTIAVDIAKDVFEIAVSDKPGKVSQRKRVTRSRFLHFFTTIEPGTVLMEACGSSHFWSREIQKLGHTVILLPPHLVRPYRRGNKHDRADAKAILEAHRNEEIQPVPIKSIEQQILASIHRLRSAWRDTRTARINTIRGLLREIGIFIPKGASQVVPRVQGLVEDAESGLPDALRSYLYEACLEILDLERRMKEAENQLDALAKQSPATQRLLTIPGIGLLTATALVGFIGDLKRFRSGRHFASYLGLVPKEHSSGNVRRRGRITKRGDVYIRMLLTHGARAVLNAAKRKEQPDRLRSWALKIETTRGHNKATIALANKLARIAWAVSTQETQFQSMATAA

SEQ ID NO: 490708 - protein, 316 aa, unidentified
MSIPPVSIGIDVAKAWLDVARAGERTVERFANDPAGIATLVVTLHDLAPQVVVLEATGGYETATVTALHAAGLAVAVVNPLQVRHFARSTGKLAKTDALDAQMLALFGERMRPEPRPQPDATSQELASLLTRRRQLVEMQTGERNRRATTPPQLRAGLDEHLDWLAEQIAVLDRAVQETVAEDPATHAKATVLRTIPGVGPVVAATLVGFLPELGTLDRRQIAALAGVAPLNRDSGQRRGGRRIWGGRGTVRTMLYMATVTGIVHNPLLKPLYDRLCARGKPTKVAMVACMRKLLTIANAMVRDGTVWSPQLVALS

SEQ ID NO: 490709 - protein, 455 aa, unidentified
MARKKTIPHPKLKPMNVGAAAIDIGSTMHMAAVNPEHSDEPIRAFGTFTHDLHDLADWFASCGVTSVAMESTGVYWIPAFEILEQHGFDVILVNARYAKNVPGRKTDVNDAAWLRQLHSYGLLRGSFRPDAEIATLRAYLRQRERLVEYAAAHIQHMQKAMMEMNLQLHHVVSDITGATGMRIIRAIVAGERDPDVLAAFRDVWCHSSTETIRAALVGNDRDEHIFALTQSLEFYDFYQTKMLECDRRLETVLAELAADKVYDATTLPRARTKTKQVNTPSFDVRAALYGVLGIDLTQIHGLGPSLALKLVGECGTDLKAWPSAKHFTSWLCLAPGNKISGGKVLSSRTRRSSSRAAALLRLAAVTIGRSDTALGAFYRRLAARAGKAKAVTATARKIAVLFYNTLRYGMTYKDPGASLYEERYRSRVLGNLQRRAKAFGFVLKEVPDQGELAVS

SEQ ID NO: 490710 - protein, 363 aa, unidentified
MIIIGADYHPGFQQIAFVDTETGDCGEQRLQHREETEKFYRDLAAQGMKVRVGMEASGHARWFERLLAELNIELWIGDAAEIRTKRVRKRKTDREDARLLLRLVQEDRFPQIWVASWENRDLRQLLWHRHRMVQARTRLMNQLQAVALNEGLRCKKKLWREHGREQLESFRLAPWASRRREDLLKLLDQLNPTIAELTQAIEQEAENCPEARRLMTHPGVGALTALAFVLIIGRAERFQCGKQIASYLGLVPLEDSSGNRRRLGHITKQGNSLLRFLLVEAAQVTARSLPEWRSKYVHLTMRRGRKIAKVAMARKLAVRLYWMMRKEWNYEQVQKFGSHVGQPENRHGVQENTELLTGASRSS

SEQ ID NO: 490711 - protein, 326 aa, unidentified
MGGRSFVPVLGIDISKADFHCCLLDGTKRAQASFPNRRAGFNKAISWVRRHGAKDVAVCMEATGAYWRGVAMALYDAKMTVSVVNPSRTAFFARSQLRRTKTDRVDAHMLAEFCQTQKPHPWTPEPPEILELRGLRTYRRHLVEERATLKQMVSQVRVNKALKAAHAAQLRATENTLKTVDHEISELVKRHKSLAEDVARVSSIKGIGPVAATAIVALLPVQRLPNGKAAGAYAGATPRERQSGTSVHGKPRICKTGNSELRRDLYMAAIAARRFNPVFKAFGDRLEAKGKPPKVVFVAILRKLVVLAYTLLKNKTTFDPAIGAKA

SEQ ID NO: 490712 - protein, 347 aa, unidentified
MRFYTKQHKNYCGIDLHTNKMYVCVINQDGEIVFHRNMKAEPETFLRAIKPFRDDLVVSAECMFAWYWLADLCKQENIPFILGHALYMRAIHGGKSKNDRIDSHKIAALLKGGLMPMAYVYPRKMRATRDLMRRRNHFMRKRAELFAHIQNTASQYNLQDPLGRIAKPKNREGVIERFDLPCVQKSIEANLEMIETYDRVISGLERDIIQSAKNHDPVSYALLKTIPGVGRIIALNLLYEIESISRFPRVQDFVSYCRLVKCAKESNGKKYGSSGKKIGNAHLRWAFSEASQLFLKCNEPGKKYLQKITNKHGKGKALSILAHKLGRAVYYLLKNQKAFDLNKFLAT

SEQ ID NO: 490713 - protein, 341 aa, unidentified
MKRFIGIDLHKNQFTVCYRDEKENEELRKYAMSQLDDFKKTLCSEYEIGLEATGNSSHFRDEVKEFVSAVRVVNPSQFKVISSSAKKTDKQDTALLALYLSKGLFPEVRVMDSERARLKSLLGTRDRLTKLRTALKNKIHNVLNAHGIVSKRESLSSRKGLAKVLDHELDDLSKFELRILVDQINHLNEGIDKINQELKDPGNQLPGHKNLTSIKGIGDVSANVLLSVIGDINDFPDAKKLSAYFGIVPRVHQSNEVEHHGRITKRGSKIGRTTLVQCTLIAIRYSSYLRGYYDRLKAKKGSGKAIIATSRKLLGIIYDTLKNDIIWEDFPNGVIQSSRSS

SEQ ID NO: 490714 - protein, 346 aa, unidentified
METLTIVGLDASKTSIVATAVDPLGRRIDQQKLGPGDSELIGFLDGLSGPKRVVLEASNVWEHIYDAAASTGAEVLLANPAKIRFIAEATLKTDRVDSEALALLGRLDAVAPAYAPTLEQRALRRLVRDRVFYEKKRKDVASHTYAILLQKGIPYEEGILVKKTRRDVLRSHHIPEVDRGLDALVKLEEITRPLDLEVHEAFVRSTEAQLLATIPGVGEITAITLAAFLCPIERFDDLEAVVKYCGLCPSVYQSGATNHTGRLVWDAHKILKWVLIEAQWQTRRRERTGDVAKVGKRVARRGNVNDGAVAAARKLARICAAVLRRGTAYELHAPGTSSRRPTTAEP

SEQ ID NO: 490715 - protein, 313 aa, unidentified
MSQNNSSISYVGLDVAKLSLQLHLAGRFHTLANDAKGHAQLLKLLRDQPNAHVICEATGGYEQRVVRTLQAAAIRVTIVEASRVRYFARAQGQRAKTDPIDSAVLSLYGATFKPAPTAAVSAHQQRLADVSQRRRQLIHSRTMETNRAEHYTDPLCVRQHRQLRKTLDKQIDQCDQVITDLIAEDAGLAQKAQRLQAIPGVGPVVAATVLAELPELGKLNPQTAAALAGVAPYNRDSGNLTGHRHISGGRRPVRCALYMATLSAVRHDRILKEFYTRLLAAGKKPMVAHTACMRKLVVLMNLLLKNDKFQLAN

SEQ ID NO: 490716 - protein, 413 aa, unidentified
MDRVALVGVDWGKSENAFVVRGKDGAVWRDRFPQTPQGVHLWAAALRSRYPEGKVAVALEQSRGALIYALSTYDFIELLTVHPSQTAAYRGVARPSGAKSDPIDADLIYDFVEKHSEKVRALQAVDALTRELTLLVEWRRKLVEQRTSLGQQLSETLGQYYPQALELMGERNSPMSLDFILQWSTLEKLQRSRPATIRNFYTSHNCRSKKVIEQRLALIASAVALHTDAARISALSAIACSLASLVQSVSEQISELDRRIKELWSSHPDYAVLDSFPGVGEVFGPRLAAALGTDRDRWDATTLSNFSGIAPLTEASGSTRWVHVRWACPKFIRQTFHEFAGSSIAQCGWAAAFYQRQRAAGKGHHSAVRALAFRWIRILVRCWKDRVPYDDARYTARLIAAHSPNAPKPQVAA

SEQ ID NO: 490717 - protein, 323 aa, unidentified
MDNKAEVVFPQVVSVGCGIDVHQNLMVATIRSSNEDYEMQSFEGYTSSLTALRDWCQSKGVTHVAMESTGVYWKPVFNILEESFEIILVNARHVKNVPGHKTDKKDSVWLSKLLLSGLLKGSFIPKQDIRELRDLVRYKKKVVEQAASDKNRIIKILEDANIKLSTVLSNVDGAVGTKIINDIIAGKNKAGDLARHYHGKMKASKETLIKALEGRITKHHQFMLKTIQQSIADKEKIIACLEIQIDVAAEAYKIDVENLQTIPGVGKDSAIKIIAEIGGDMDVFPNEHHLSSWAGMSPGNNESGGKKKAQEPYTEINISNQRL

SEQ ID NO: 490718 - protein, 337 aa, unidentified
MDYFAGLDISMDETHICVVDREGAVVYEGKSASTAEAIVDKLSEAPGCHRIVFETGRMAPILFHGLSQIGLPVVCVESRQAYQALKSLATHKTDRNDARGLAHLARTGFFKPVHVKSLSAHAVRSLIIARKKLVGQRVTLENQILGLAVVFGVRLPRALTAAFIDNALRASEGIAGLSAATRGLIAARTAVMSAVAAIDADIRRMTRASAACRRLMTIPGVGQLTALAFVAAIDDPSRIRRSRDVGVYLGLVPKRYQSGEVDYVGGISKCGDRRVRTLLYEAANVMLTRYNGQLKLKEWAFAIARRSSMRKAHIALARRLAIIMHAMLRDGTEFVAA

SEQ ID NO: 490719 - protein, 320 aa, unidentified
MAQNASLVGIDVSKAKLDWCVRGVACGTAANSVRDCTALAKELVGRGIRLAVLEASGGYERTMVAALRKLNVGVMVISPKRVRDFAKAAGRRAKNDPIDADTIAWFGEIFVREGGAMPDPAREQLAALVAERQDFIGLRTECLNRNEHKAPALCQRLRKATLNILERAIAELDAAIAALIAKTPHLAACGRLLASVPCLGRQAVAALLAWLPELGKISDARIAALVGVAPFDDDSGTHKGVRRIAGGRRQLRNILFMAVLGGATRYNATLKTFYQRLLAKGKLKKVALIACLRKLLTIINVMVARGQPWDPPSRVSKAAA

SEQ ID NO: 490720 - protein, 425 aa, unidentified
MKKIDYLSTLFVGIDIASRTNVVSAIDFHQEYFIRTKSIPNAQGGAEVLEDMIADVLAKHHQFRYVIIGLESTGFYGVHIANYLSSCSKLAPFSTHVYCLNPKEVANYKKSFNALDKTDAIDSFVIADFARVGRISIKPWRGSQYLALQRLTRHRLHITECIAREKTYLLNNIFLKFSEFAMLKNNEHPFSNKYGATAEAILTKFMTNEDLVTASTEELIDFIHRKSRGRISNPAETAALIQAAARNSYRLDQCLYEPLTVSISSSFNCISAFNKELKAIDAAIVKAVKGLNPVEYQVINSIPGIGKVFSAGILAEIGSIRCFPNNNALAKYCGIVWKANDSGDFSAENTPMSKAGNRYLRYYIIEATNSVIKHCSEYKNFYDKKYAEVTTHQHKRALALTSRKFIRMLFGLLDKSQLYSLDKSR

SEQ ID NO: 490721 - protein, 331 aa, unidentified
METDQYIGVDLHKVFFQACAMTRHGERQWEGRFPRTPEGIGALVARCTATSAIAVEATTPTWHFVDQIASRVATVCVVDTRKTKLKAGYAAKTDRLDARRLADALRRDSVVSIYVPPPAIRELRELSRHRLMLTQLRTRVLQRMRALLLRQGLGDPPASRLRSAAGQAWLDQVRLPPQAQAALTTMRRVEHDLTAQLAVVEADVAREALADPIVERLQRLHGVGPVLGLMLRAEIGEIARFPSPRHLASYAGLVPYVDSSASHTRYGRITKARSPWLRWALVEVGLHTLRRKDPLGRWGRKLAVRKGKLTAQVALAREMCQEIMTMWQHVA

SEQ ID NO: 490722 - protein, 438 aa, unidentified
MSNKVIFNLDDLFISVGIDVGADFSWMSIALPNQQFVGKPYKILHNSIDSLTTAVSKIKEAEELYSLESRIFLESTGIYHYPLFCYLRDKGFNCSVINPIITKNSTNINIRKVHNDRFDSKKAALVGLKPDLKVSLMPSDLALNCRNLCREYYDLMDNRSAYVNKLQGELRMAFPQYLGIFSKVTINTSLALLETYTSPSAFLEADKQEIIDIIKSTARFGLTYAQNKYNAIIQAATDANQFGYIIDSNIKRIRLYISFIRKYDEEINNILESLHELVDANEDADFVKQIHLIETFKGAGFLSAVSIMGEIGDFSAFSKPKQLFAYFGLDPAVKQSGKFEGTKVQMSKRGSAIARRVIHTLTLQSISISRNGEAKNPVLREYYLKKCDSKPKLVAMGAVSHKVCNMIFAILRDNKPFKIIAPQEHIKQYNAAKCDIAA

SEQ ID NO: 490723 - protein, 310 aa, unidentified
MEQVYVGIDVSKDRLDVHVRPGGEAFAVSRDGKGLEELVDRLRTLAPALIVVEATGGFETVVAAAIGGAQLPLVVANPAQIRHFAQAVGKRAKTDPIDAEMIARFAEAVKPTPHQVPDEAARLLGELVARRRQIIEMLVAERQREGRAGNVRVHKSLVRHIKVLERELQDISDDISGLIRGSPVWRETEDLLVSVPGIADKTSSSLLAELPELGRLTRRQIASLVGVAPFTQQSGRWKGKSMIAGGRAAARAAIYMAALSASQHNPVLKPFYRRLLAAGKPKMVALIAVARKLLVIINAMIRDKTPWRYA

SEQ ID NO: 490724 - protein, 387 aa, unidentified
MQPILECCCGVDVHKDMIEACIIKGLENPQFIRMQFSTFPNSLKDFVEWLYNNDCYHIAMESTGVYWRPIYEAIEANSPYYENIIVANAHNMRNLPGRKTDVKDAEWIATLLQHGLLEPSFVPERMIRDLREFSRTYKNAVSDKARCLNRLEKFLQTHGFKLSSVLSDINSVSGMNILCLLAQKGSLTVEETSSALRGKHKHTAEDIQKAICGTLNTNECFLLQDFIDEVKHIQEHINKILGKMQEIAEPYSEIIERLDSIPGIDITAALLILAEIGGCPQQSFKTSKNLCSWAGLSPRNDESAGKIKSKKIMPGNPYVKSILCQVAWVAVKNRKTPLGNWFWSHQAQLGKKKAIIAISRKILTLSYALISNNTFYDNNYLTPRLNE

SEQ ID NO: 490725 - protein, 429 aa, unidentified
MRTESTPGARGPVFCGVDTHADSHWLCVLDWRGRRVLSRRFPADAAGYEALAGAIAAAGEPACVAMEGTSSYGAGLTRHLASLGMPVREALSPARTQRRRPGQGKCDESDAERAARAAMSGSRLGTPKSQDGWVDGVRCMLAARSGAVKARTSAINTARSLLTTAPEGLRSRFRGMEGPRLMEELPSVRAEGALGAALGALADLWAAARDAALDMELAIEASLEENCPALLAMYGCGPVSAAKLAVAAGDNPGRLRSEASFAAICGACPIPASSGKTVRHRLNRGGDRQANSALHEIARQRVMRDPETAEYAERARGRGKSDREVMRCLKRYVAREAYRALMHPHEIRRPEDASELVAARRAAKVSQVRAASILGTSEKYISMLERGQRELKPIRRAYEAWVEAGLPLDWDRQAFEAERKMDSKKHLAK

SEQ ID NO: 490726 - protein, 418 aa, unidentified
MEAIVERCCGLDVHQASVVACLLVGRAGPKPRKEVRTFGTTTRELLELRDWLASEGCTQVGMESTGVYWMPVYAVLEDQFELVVGNARQIRNVPGRKTDVKDSEWIADLLRHGLIPKSFVPPKPIRELRGLLRYRRKVIEARTAERNRLLKLLETANIKMASVVSDVFGVSGMLMLKAIIDGHPTPEQMAQLARGSMRKKIDLLVPALEGRVEEHHRFILRLQLRRLEHADADVTELDARIDQKLEPYAKQHQLLKEIPGVERTLAATLLAELGTDMTVFHGPTQLASWAGVCPGNNESAGKRSSGRTRKGNIYLKTALIEAAVGASRKKGSYLKDKYWKLKSRRGPKRAAMAIAHKILIAVFHMLATGASYRDLGEAFLDRLDTSRTVHALKRRIERLGYAVHLEQTPPALPPPTIA

SEQ ID NO: 490727 - protein, 391 aa, unidentified
MPMYFVGIDISKYKHDCCIIAADNQSIITKFTFKNDKAGFNQFLTTINSLSSSEDIKIGFESTSHYALNLELFLENASLSFMEVNPVLISEYKKSTTLRRTKTDSVDCESIARWLMTVEYKPHSKGFYHSYSLKSLTRLRDRLVRQRSLYLVKITNVLDHTFPEFKPFFNERFSKTAIYLLETYGSAEKMAVMNEDDYNAIRKLSRGKFSPQQFLELRKLALNSVGTNNSIFDVELNSLLILYKSLNQEINTLEDEIIKLVKEANPHCLTIPGIGLISAAIIYAEYGDISNFSTPAQMLAFAGIEPGVSDSGTESHGGRMVKHGSSQLRYALINCCLPLIRFDMTFATYYAKKRAEGKPHRVAITHVAKKLVRVIFALEKQDIDFNPSKVR

SEQ ID NO: 490728 - protein, 411 aa, unidentified
MSCQSSHIGVDASNDYLDLDGLPGQSRRRLANTPETHTALAALLSGHGGDDQDVLVVLEASGGCERGLHRALVEAGVPAAIVNPQQVRDFARSQGLRAKTDRVDARAIRMFGEVKRPHPTPLPEPARADLIELLGYRDQIVAEITARTLQRAHLSSAFLIKRADAALERLRRESETLARLIEATVASDPELSRRAEVLTSFPGAGPLVAADLVAHMPELGTLNERQAASLAGVAPFACDSGKMRGVREIAGGRPKVRRALFHVARVGLRHNPALKALYERLTARGKPGKVALVACMRKAMVILNAMLKSGRRWDPDYQTNRKAARKAAGDALTPISLCSIGATIPPSRPEGPAGGGRSGGQGGPQAPAKRRAASLRAAPPAATLDPRWGAAIAPTQPPPPQVVGGGAGARL

SEQ ID NO: 490729 - protein, 411 aa, unidentified
MKIINQLFVGIDVGSRENAVYIMLPDGSKHSSFQVQNNLGGAQTISKRVVSALEGKNLSAATIGIEATSVYGDNLMCFLREDGALARFERKLHVLNPKQVKCFKDIHPELPKNDPVDAFVIADNLRFGRIAAPIQIGDYRYKALQTLTRARFYTVLNLTREKQRFMNYLFMKCSGLAQEKVFSDNYGAAALAVFEEFETPDDIADLDVELLAAFIAEKGKNRSPRPDEIAQAVQSAARGSYRLPKTVNDSVNQVLSISISSMRAMQAQIKALDKEILRQFQNIPNTLTSVPGIGPVFSAGIIAEVGDIKRFEKGQSGLAKYAGLVWKENKSGMFEGQHTRMIKSGNRFLRYYLIEAANSLVRCDTEYKRFYDLKFREVNKFQHKRALALTARKLVRLVFRLLKDNRLYIPA

SEQ ID NO: 490730 - protein, 517 aa, unidentified
MVCKVIHQRGRRSGRGARIPKVVNNFAAGYSGAGEQLATAETRLFEPSPARADRRLPTPPPAPGPSAERTPPLEGSNIRSRPSQVPAPLRAARIMNTKWNEQPYFAALDWAKDHHDVIVVDRVGTIIADFQFAHTAPGWEEFNGHMQPFGKCPVTLETSVGMAADQLLQRGYTLYPINPLAAKEYRRRKAPSGSKTDRHDAWCLADALRTDGQAWRPLRPQDEATATLRLLCRDEIGLIETRTALVNQLQATLGDYYPLALDSFDDWASPGSWAFVRTFPTAADLAKAGQRKWQNFLHQHKLWRPETAPQRLERWAQGQQLNASAATVNAKSLLALSLVKVLEALQRQIQEYRSRITQAFKQHPDHDLFGSLPGAKQTLGPRLLSLIGARRDIFPDADSLMCQAGVSPVAYQSGKLCKARLRYACDHFLRHTVHLWVDQSRKKCEWAQTYYQAKRDKGHDHASALRCLGKRWLKVLWRMWQDHTPYDEAKHLGSLQQHGSFVWQALQDAVTPQPACE

SEQ ID NO: 490731 - protein, 355 aa, unidentified
MNDEKYIGLDVHQATIVVAVLDSTGKLVMESILETEAATILQFFAGLRGTLSVTFEEGTWSVWLYDLLKPHVDKLVVCNPRKNALLKDGNKNDRIDARKLAELLRGNQLKPVYHGENGVRMLRELSRSYLTIVKDLSRVMNRLKAVYRSWAIPCAGRDVYYRRHRAQWLAKIREAGVRRRAERLYEQLDMLQYLRQQARRELLVESRKHAITAKLRQIPYLGPIRSALAVALIQTPHRFRSKRQLWAYSGLALETRISAEYRMVEGQVRRSKKLLSIRGLNKDHNHDLKGLFKGAATMASVRPGPFQDFYQAALAKGIKPTMARLTLARKIAAITLTLWKKGENFDAEKLKSQAA

SEQ ID NO: 490732 - protein, 426 aa, unidentified
MTTATNFAATIGLDWADKKHDLWIQPSDGSKAEHLRLQQTPEALHEWVAKVRERFGNRKIAIAVETSRGPVISALVAYDFIVLFPVNPKGLKSYRDAFSISGAKDDRTDAQLLEELVRLHPSKVRALEPDTELTRKLGGLVENRRHLVDERTRLINQIHATLKTYYPMADALLEGQMNTPMAADFLLRWPDLDSLQKAQPEVIRSFFYKHNSRNAKKTEERLEAIKKAKALTTDRAIIVPARHLVVALAGMLRPLHQAVARLNKEIEQAMDQHPDAPIFRSFPGAGPALAPRLLVAFGTNRDRFDKSKDVAEFYGVAPVVIQSGNSKTVHVRYRCPKFGRQTFHENAGCALKKEPWAKFYYQQQKQRNKGKHHQACRALAYKLVRIYFACWKQRKTYDPNLYLKALETHASPLYRKLENFTDTHCE

SEQ ID NO: 490733 - protein, 409 aa, unidentified
MSTKPSGTKTNLPVPGRWRGGLKAARLVCLKTSILWDDGGSVTNRPRHDWKPVRVLAVRPRASLALQPYLPYPNSCQGTSPHQQGRGTKVSEPYYVGIDVSIDRLDVAIRPGGRGFCVTNDAAGWAELVARLPQGAIAAIGLEPSGGYERGIVRVLLAAGFSVRRINPNKLRQFARAAGALAKNDRIDARLIADYVAVIPTRVVERNPALERLAETLTMRRQLCDEHIAVESQASHLEDALLQRIAKRRLTRIKADIVLLDKRLAELVAAQPDLVQRFRLLCSMPGVGATLAYTLLALLPELGQIGRKQIAALVGLAPYAFDSGRFRGQRHIYGGRTAVRNTLYMPALAAFRFNPALRTFHHRLVAAGKKPKVAIVAVMRKMLTTLNAMLRDGNSWTDGHTGRHTVLAI

SEQ ID NO: 490734 - protein, 345 aa, unidentified
MEHYAGIDVSLESASLCVVDATGRIVREAKVASEPDVLIGWFRGLEFAVTRIGLEAGPLSQWLYAGMREAGLSVELLETRHVRDAFKAMPVKTDRKDARGIAQLMRLGWFRSVHCKSLPAQEVRALLTARKLLQTKNHDVEMSLRGVLRGFGLKVGRTTPRTFVGRIRELVAGHATLSTVAEALLAARGTLFEQWQKLEKRLRSLAREDRRVRLLMTAPGVGTIVALTYASAIDDPGRFRSSKAVGAHFGLTPKKYQSGETDVTGRISKIGDGGVRTALYEAANVILTRPVKGSTLKSWGMRLAARTGMRKAKVALARKLAVVLHRMLADGTSFLANKAAAAVAR

SEQ ID NO: 490735 - protein, 355 aa, unidentified
MTKHPTSVQLLDDSQPIFMGIDVHKHTWSITVVHGERRVARVTLPADITELQRWIRRYEGFHIVSVYEAGFCGFHLHYALEALGIHNIVTPPNKIPTLTGDKVKTDKLDSLKLATFLAKGLLPAIYIPPKEQLDKRQIIRTREQLKRKRTRAINQIKALLIQNGISLRSVGVNMRLLEQIRTYNLPTHVKLAIDLFIGQLELLDKQMKTLKDAYLATATDEQFGNTYRLLLSTPGIGPLIAAALTYEIGDWHRFHNEKQVAAFFGLTPSEHSSGAHVYRGRITGQGNPMLRAHVVEAAWRLIKADPVMAAFYGRVTKQTGSRKKAIVAVARKLVCRLYSMIKHNVGYEIGVGAPA

SEQ ID NO: 490736 - protein, 404 aa, unidentified
MIDIEIIFGIDVSKHSSNVAILADDSVIKEFKITNDRIGYETLDDALNSFKSPKVIFESSGIYSRSIRAFLQRKNWIYTEINPLAAKKDMDGFRHNKNDQLDAVALATAMAHYHYQSTFREAGVYEELHDLERTYQEFNEDLVRAKNRLHKNLQLTFPEVEQFISTTDGTLYWHVVQQFPHPTFVLETKLSELAQLILKATLKNMSEKRALGLAEHLKELANKSAPAVSSDACAVSSVVYLAGEVERLNDKKDEIIREMSQISVSLNEIPILQSIPEFGIKTAVCLLAELGDISRFHSSNAINAYIGIDLIQYQSGDYEMGQHIRKRGNSYARKILFKAVLNMVCAAKYHPSNVSILYQRKKQSSSETHTKKIAIAAMGRLIRTIYHLIKNNELYDSRKCLPQH

SEQ ID NO: 490737 - protein, 401 aa, unidentified
MKVSGLDVHKDTVFCAIYDGKKYGKVNEFATFTENLREMVQLLIGEGVKKIAMESTGIYWIPVWNILEEAGFELMLVNPYLIKQMPGRKSDVKDAQWIAKLLHKGLLRGSMIPCKTIRQLRTYSRRFVKTQEMITRVNQEMERTLEMSNIRITSLVSKVNSVSVLKVIEQVVAGNDTVEELACCIHARVINSKGELVKLSLDGHIEEHHRYSLSLSYQQHKLYTEQLHSLEKKMEELCKQHYSQEKKLLMSIPGVSSQAAMQIIAETGANMQTFPDSGKLTGWAGLRPRNDESAGKLKSRAITHGNKYLRRIMVQCAWAAVRTKGSNYKSKFEQLCIRKSKKKALIAITRKLLTVVWHVLNESEPFNDQLLPVYDPKKVEMKMKYHIRELENLKTLGFQLT

SEQ ID NO: 490738 - protein, 411 aa, unidentified
MRLFVGDDWAEDHHDVEVMDEGGKVLAKRRLPEGAAGMTQLHALIGRFLPEDAEDAEVVIGIETDRGPWVAALIAAGYTVFPVNPLQASRYRERHGVSGAKSDGGDAHMLADMVRTDSHQLRPAAGDSPEGQGIKVVARAHKTMIWDRTRAVQRLRAQLREYFPAALEAFEDLDAPDVLELLGKAPDPARAAKLTRAQVAAALKRARRRDIAGKTDAILAALRGEHLGQPAALTAAYAAAARSLIAVITTLNAQVKVLEEQVRDHFGRHPDAEIYQSQPGLAAISGARVLGEFGDDPRRYVSAKARKNYGGTSPITRASGKKKVVAARFIHNDRLVDALMSWAFSSLQASPGARAFYDQQRASGHDHSDALRRLANRLVGILHGCLKTRTLYDEATAWGHRENLPQSSAAA

SEQ ID NO: 490739 - protein, 413 aa, unidentified
MKDRTITAVGIDVSKGKSTIAVRRPGGEVVLTPFQVEHDAAGLSALVKTLRSIGGDIRVVMEHTGMYWRPIALALKEAGFFVSVVNAMLIHDFSDNSLRKIKTDKADSMKIANYALSFWAELRDYSPEDETRQMLKMQNRLYLRTKKSSVILRNGLISLLDQTFPGVNMLFDSQPKRSNGHFKWVDFVKRFWHKDCVAGISLAAFSDAYRKWCARSGYRFSQSDAEKFHTAARNAVATFPKNDSTKLLIAQAVDSLNAVYDALYILRGEMLRLASLLPEFDIVMAMQCAGEVTGPQLMAEIGDVRRFTHKGALVAFAGMDAPPFQSGTFDSKSRRISKRGSPNLRKTLFMVASTILQHSDPANPIFQFMDKKRAEGKHFYVYMVAGAAKFLRIYHARVKAHLLALDAEASTAA

SEQ ID NO: 490740 - protein, 462 aa, unidentified
MKHTREKKHQEKHPERESLPLITPNAAGIDIGSSEHWVAVPEDRDENPVRSFGCFTADLHAMARWLKKCGVTTVAMESTGVYWIPVYQILEAYGFEVKLVNARHVKNVPGRKSDVSDCQWLQRLHTYGLLSASFRPENEICVLRSYWRHRDNLVRYASSHILHMQKALTEMNLQLHRVIADITGVTGMRIIRAIIAGERNREKLALMRTPGVKSTSEEIAKALEGDYREEHLFVLKQAVELYDFYHDQIDACDKEIEICLSRFDTKVDLESHPLPALKKGKKKSKNGPLADLRAHLYRMTGVDFTQIDGLDVLTVQTIVSETGLSPDAFPTMKHFTSWLALCPDNRITGGKVKSTRTKKAANRAAMAFRIAAQSLANSNTALGGFYRRIRARLGAPKAIIATAHKLARIFYTLWKTHKQYVDLGARHYEERYKDRVVRSMKKRLHDLGYAVTIEPMAAAAEL

SEQ ID NO: 490741 - protein, 406 aa, unidentified
MKVVHPICAGIDIHKKSFTVAIATTKKDGTYSTKVKTFSTMQKGITQGRLWIIENKCYTVALESTGKYWIPVYDRFEDFFDLTLANPRFTKTFPGNKTDRRDAKWLSELHRIGLVAKSFIPPRDIRELRELTRYRFKLIKMRSSEKNRAHNSLIISNIMLSSVATDIFGKSGMNIIEALIAGTELDEQALSTLVCGKLRSKIPDLLEALDGTLSQLQKDKIRIILDNFISLSEKIAKLELLILEKVKPHQQIIDLLCSIPGIKSTAAIGIIAEIGVDMSAFYSDKHLCSWAGVSPQNYQSAGKRKNVPAKSGNGYLTSMLVQCANAAVKEANSWLTNRFESIQARRGRRKAIIATCRSMLTAIYHIISTKEPYREPQKTSYISASKEKKLIAQLQSLGYKVEKLAS

SEQ ID NO: 490742 - protein, 412 aa, unidentified
MSRSVGRAIGLDVHRDFCEVAIVEEGVVRSAGRIQTSPEQLEMFARSLGPEDRVALEVTGGAWEIARILEPHVRRVVVVSPDDTGIRQARAKTDRLDARTLAKLLAAGELDAVWMPDERCRVMRRRLARREQLVRSRSRAKNEIHAVLMRRLKGRPPVSDLFGVKGRTWLGELELPVEEAETVQAAMRHIAFLDAEIAEVERLIAREALHSADARRLMTVPGVNVICAASFLAAIGDVRRFRSSRQLVAYLGLDPRVRQSGSEPARGGRISKRGSASARWALVEAAWSVVRQPGPLHAFYDRVRARRGHGKAVVAAARKLASLFWCLLTRGEDYAHQQPSLTAKKLRLLEIRAGAPTLKGKQTGTWATRQQMRTAERELAQQAEASYQRMVSDWKAASPKKDVGASVTAEHA

SEQ ID NO: 490743 - protein, 342 aa, unidentified
MTYFTALDVSLRFVSICVVDDTGQVCFEAKVPADVHRIATCLRKFSDQVKIVGFEAGALTQYLTYGLQAAGFEVVCLEARQVNAALAAMRNKTDKNDARGIAQILRTGWYSRVHVKSLESHQIRALLASRKAILKKCVDLENELRGLLRVFGIRLASKVPHGAYDAVVREQVETEPLLARALLPLLDAREVLYRTYLKLDNEVKAIVRHDRICQQLMSVPGVGAITALTFKAAVDDPHRFKRSRTVAAHFGLTPRRYQSGETDNPGRISKAGDPDVRCALYVAAHSLLSRSATWSSLKAWGVRLAKTRGHRRAVVAVARKLAVIMHKMWIDGTEFRWSAESA

SEQ ID NO: 490744 - protein, 315 aa, unidentified
MNLKEVFVGIDVSKDHLDIGVHPTGKTWQLVHDEAGKEQLCQELRKLKPDLIVMEASGGMEGALAVKLQEAKLPAVVVNPRQVRDFAKAHGILAKTDRIDAQVLARFAERIRPEVRPLPDEAQRALGGLMVRRRQLVIMMTAEKNRLRSASKEVAQGIQDHIEWLKRQLDEVDREISRRIQRNDVWKQKEKLLKSTPGVGPVVSRSFLSGLPELGTINGKKISALVGVAPFNCDSGKFKGRRRIWGGREHIRSILYMGTVAAVRWNPIIRSFFLRLVKAGKSKKLALTACMRKLLVMLNAIIASNKPWKYGKVVY

SEQ ID NO: 490745 - protein, 431 aa, unidentified
MSKFFYRPVVGIDVSADFSFAAILAPNGEIYRKPFKIMHNRNGFDYLVDQIKKVEEEFNMKTGIFMESTGVYHLPLFHFLKDTFEVCILNPLITNCNKNGDIRKVKNDKKDALTIANIGKFQNVKYSSNFDVEIYTLKSLCRDYYKFTDSKSTFKKKLSTDLRVIFPSYSTVFSDIAGKTSIAILKKYSNPEAILSADRDEVINIISINSRKGQAHSEKIYSKLYDAAEEAAYIGLKSPSLFVKIINTIAVIQSLEIQIENLLNEIQLLMSSNRISDEFKKNVQLLYSIPGVGKLTATTIMSEIGNIKGFVKPKHLVAYFGLDPSVSQSGKFNSDRNIMSKRGTRIGRRALYAVALASIRKSRNGEPINKVLLNFYNENMKGKSKKVGLVAIMHKLINYIFSVLKNQKEYELRDPKIHSQMYLNNQSKPAA

SEQ ID NO: 490746 - protein, 404 aa, unidentified
MGLDVHRDIIVACLVKGAVDAEPEAETRTFSTLIPEMQKLRDWVIESECRNIAMESTGIYWQPIYEMLESCFDGEISILVVNARHMKNVPGRKTDMKDAQWIATLLRAGLLKGSFIPDKAFRELRHLTRYRKSVVHDITAQKNRIDKFLQSSGFRFTAFLSDTFGASGRNIIRHLIEHGSIDREALDKCLKTKTRNRIDEILVALNGSLSEHQRRFLNMVFRHLEDLEAHKHTVEDEITEEVLKHTDTLNLLCSIPGIDVTAAAAIIAEIGTDMSSFPDSQHICSWAGLSPGNNESAGKRKSVHINKGNPYLKSMLCEVAWIMASHRKLYLSGWYWKVKQRKGAKRATIALARKILSIIYTMLKTGTPYNEECFEQRRLRCERKRANRLVNELQKLGYVVVAPD

SEQ ID NO: 490747 - protein, 481 aa, unidentified
MNATTVKRSSASVVGVDVAKSVFQLAVADGNWKVVETHRLTRSQFERWFVNREVGLVVMEACGSAHHFARWLNGLGIEVLLLPARYVRAYVKRNKTDAADAAALLEAARASDISPVRVKSVEQQALQGLHRARSLWMGTRTSRINALRGFCREFGIAIAQGSRLAVEQISRVLADPNSAVPELIRGTMKLLVEEIRLLEARIGQLERELSVLAKQSPACTILLSIPGVGLLTSTAMSAATGGSVSHYKSSRHFSSWFGLTPREHSSGNTRHLGRISKQGDRYLRMLLTHGARSVLRAATVAKAWFGVIWTQKLGPLPRLACQNATTTIFPARTGSRYGTGPLIGTDAANRDNGPCSTSRQRPVHATTAPLLPESRRGLRLAQPACSSPTMLLPLRSVLRREGLPQRRALCSGDSTQTFKNFFSGDRFSSLGLSDRLQEFRLKFSRNFKGFVRFASKNGDDGTFGQGISFHDDLSAYDSSSG

SEQ ID NO: 490748 - protein, 337 aa, unidentified
MEYFAGLDVSMEETHVCVVDRDGSIVLEAKSASLPEEIRATLMKGPPCKLVVFETGRMAPMLHHGLEALGVPVACIESRHAHQALRSMATHKTDKNDARGLAHLARTGFFKSVHVKSLGAHAIRALIGARKKLVGQRVTLENQVRGLAIAFGVRLPRGLSSAFVDEVVRMSEDVVGLSSAMRGLIAARGAVLAAIAAIDGDMKRLARASDACRRLMTIPGVGQLTALAFVAAVDDPTRFKRSRDVGAYLGLVPRRYQSGEVDYVGRISKCGDRRVRTLLYEAANVMLTRYKGALKLKDWALAIGKRSTMRTARIALARRLAIIMHAMLRNGGEFSPA

SEQ ID NO: 490749 - protein, 334 aa, unidentified
MLNLNEATFIGVDSHTTEHTALAINRFEEEKGHIRFENSKNGIINFLSWINKIDADSKNVVLGIEGGGWEKNIFFRRLALKYDEVYEVNPLFTKQRRSFGTKKDKSDKLDAKLIAEVLTKKLNQLPKIHPESLDIDRLLLKKHVWYWEHLVKEGTRIKNQLKALERERSLAEEKEHIKGLDLIIRLKRRELKGIKKYKAILKAKLEDFVGKLGGNLISMPGISTIQAAKIIGFTGPIARFKKADSFCKYAGVVPSERSSGKTIRRIKASTGNRHLNSTFYILALNQIRWDKKAKAYFDKKVSEGKTKKHAIRCLMKRLACITYGMMKSKEDYRN

SEQ ID NO: 490750 - protein, 372 aa, unidentified
MKKNNTAQNHKEAKGNKSWQAMEGLTIGIDLGDKRSCYCVLDGAGNKIEEGSLSNTAAALAKHFGGLRPARMAMETGAQTGWISRELAALGHEVIVANARELRAISGNARKSDRRDAEKLARYARVDPSILRPVRVRGAQAQLDLGRIRARDALVRARTLLVNAARGLAKTRGQRLVRSVTASFGERSQALLDAELATVLEPLLEQIDALGKQIQRYDKQIEQQAAERYPETAALDAVPGVGPLTALSFVLTLEDAGRFPHSREVGPYLGLCSRRRQSSSSDPKLRISKQGDEYLRRLLVQCAHWILGPFGADSALRRWGLRLAESGGKDGPKRARVAVARKLAVLLHHLWVTQQPYRAFPQSEAAVEPVSS

SEQ ID NO: 490751 - protein, 408 aa, unidentified
MQLPPMHKRAMALDVHQAKISACAIVEHDDGRVEVTMREFGAFKRDRRALAQWALEIRPEVVVMESTGVYWKSPFAALESVGITAWVVNARHVKAVPGRKTDIADAQWLATLARAGLLRASFIPPLLMRQLRLVARQRQKLVGMCSAEKNRLHKVLVDAGMRINVVVSDIHGTSARAMVKALIADKPMHEVLDCKGRLRASREELFEALDTEQFSAVHRFVADEIVQHIEQIEQRIARLDAYLLEGLKAYGPQLNLLQTIPGIDLQGAAMLLVEIGADMSPFGSAERLASWVGICPGNNESAGKRKTGKIRKGNAWVRRLLCEFAQAAARTRCALRAKFEALAIRKGHKKSIVALAHKMLRTVYAMLSTGTHYQDKTVDYEALSVARNAPRWIKMLRKHGFIATPAAA

SEQ ID NO: 490752 - protein, 338 aa, unidentified
MERQYVAIDLHRRRSLIVRNNEHGEELEVVRIENDPVALSIALAAAGPEPEVAIEATYGWYWAVDVLQAEGARVHLVDPLGLNWDSRRVKNDYRDCRELLDRLRLGILPEAWIAPPEVRELRELVRYRAKLVALRTGLKAQVKAVLAKEGLHPPINDLWGVGGTHYLDGLNLPEAYAIRMQSLRHLVGVYSGEVEKLEREVHGLLADHAGYQAIQALDGVGRILGAIFVAEIGDVTRFPNPQTLSSWAGLTPKHRESDVKVYRGGVTKRGSPLVRWAAIEAISHIRGGPKLKTDYHRIAARRGKNIARVAVARKLLTLVYYGLRDGEIRCLARADEAA

SEQ ID NO: 490753 - protein, 406 aa, unidentified
MGPAASNNFMEVIPMIIVAVDVAKDKHDCFITNTDGEVLFDSFVIQNNQDGFEDLFQKICSVTDSPQNVKVGLEATGHYHLNLLGYLLDKGFPTCLINPLQTSLFRKSLSFRKTKTDPVDARAIARLLMSDRTLQPYSLTSYQNQELKSLTRYRADKVRERAKLKSSLARLVVILFPELEKLVPILHMATIYDLLHEFPGASYVASAHLTRLSHLISESSKGRYDKEKALEIREAARHSIGSVSPAKSLELRHAIDHIRFLDDEIDEVEAQIFALLDKDPPRMLDIPGMGPRMAAVIVAEVGDFNRFSSPDKLLAYAGLSPSTYQSGQLTSTYAKMEKRGSRYLRCALFNATKYVCMWDPVFKAYLAKKRAEGKHYNVAISHAAKKLVRLIYHLETTGKSYRSKAA

SEQ ID NO: 490754 - protein, 366 aa, unidentified
MRKVMAGMDLHGNNVMVGIVDDQGARLQHRRLACELPEIIEFLDPYKSELESIAVESTFNWYWLVDGLRAAGFPVVLANPAKIDQYSGIKHADDKNDAYFLAELQRLKILPTGYVYNPELRPVRDLLRRRMSLMRQRTTLFLSAKSLHQRTTGRGLELRRLKAMEPEEAAAFYTHPANQLIAQIQKEQIDSLDQSIRQIEKAVLKVALQQPYYQRLQTIPGVGIILGLTISMEVGDIDRFAGPGQFASYCRTVDAKRISNGKTKGDNNQKCGNKYLAWAFVEAAHGARRFDATCRRWYDRKAAKKCTTVATKALACKLAKAAWYVMAKGTEYQAGKIFPGLTEPKAEEISGEQASASKGVGPNPED

SEQ ID NO: 490755 - protein, 359 aa, unidentified
MSSIALSRGDVIVGVDTHKDEHVAVAIDGLGGRLGDLALVANPAGYAELIVWAAQLGAVAAFGVEGTGSYGSGLARYLRRNGLKVIEVSRPPRKGERRLSGKSDTIDAEHAAREVLAGTASATPKLADGIVEAIRLVKIARDSAVKAHSTAMITLKATLVTASDELRADLEPLTDFKLVIACAALTGDGDLADPGAAMRHVLGSLGRRWLELHEEIKIHSRHLKKLTKTAAPDLVAAFGIGPDIAAEMLVTAGDNTDRIRSDAALAKLCGACPIPAGSGKTNGRHRLNRGGNRQANAALYRAIIVRMRWHPPTIAYVERRTAEGLSKREIIRCLKRYLAREIYSLLPAPSSPAELASAA

SEQ ID NO: 490756 - protein, 324 aa, unidentified
MALTRIGLDLAKNVFEVHGVDERDKTVLRKTLRRDQVGIFFANISPCLVAMEACSGAHYWAREIADLGHATRLISPQFVKPYVKTNKSDPNDAGAICEAASRPSMRFVTIKTGEQLSIQATHRVRTRLVENRTALVNQIHGILAEFGIVVARNLASLRRRLPEILASEKFDLDPLLRSLMHDLHKELLVSDDRVRVYDRQIRQLCRNSEVCQRLLRIEGIGPVTATALVAAAGNASSFRNGRQFAAWLGLVPRHHSSGGKTRLLGISKRGDRYLRTLLIHGARSALGRIRHKKDPRSRLLQKLCERRPYNVTDVALANKNARIV

SEQ ID NO: 490757 - protein, 369 aa, unidentified
MADRITYVGLDVHKESIVVAVASGGLRGEVREYGRIANTATALDRLLRKLGDAGMALRFCYEAGPCGYGIQRHVSARGHECVVVAPSLIPKRAGDRVKTDRRDAASLAKLHRAGELTAVWVPDPQHEAMRDLVRARLDAVHSLRRARQQLSGFLLRQGCHYGRPAWTKLHRRWLAGLIFEQAIHHIVLEDYIAAVEAAEARRDRLTAQIGTMLPDWTLAPVVAALQTMRGMAMVNAATLIAELGDLSRFADPRQLMAYLGLTPSEYSSGSSARRGGITKAGNGAARRLLIEAAWSYRFPARLSRELLLRQESQPKPIRDIAWKGQVRLCARYRRLARTGKPANVVTTAIARELTGFVWAIARQVTVTPG

SEQ ID NO: 490758 - protein, 320 aa, unidentified
MDRIIGIDISKQDFVVAILSNNKPIIKKFVNNESGFHKLVKYLKMLKIDNAKICMEATGKYGEKLANFFYDLGYKVSVVNPACIKAFAKTNLSRNKTDSADALLIANYANKCDPKLFIPKKPILKEIQEIHRCIQDLKSQLNQVTNRLENVDLLTQVVSSTWQDLASSIRLKIEALQNHLVKLALSDENIKKDYENLQTIPGIASISAIAIIAEVPDIDILPNARALAAYAGLNPKHTLSGSSVKGKSRISKIGSGNLRKILYFPAIVSSSVNRNFQEFKQRMRAKGKHNMVIIVALMRKLLHIIFAILKNKSIFSYELA

SEQ ID NO: 490759 - protein, 339 aa, unidentified
MTKLYGGIDLHANNSVIVLVDDQEQVVYEKRTPNDLPKILSQLCPFQPSIHGLVVESTYNWYWLVDGLMAAGYSVHLANTAAIKQYDGLKHTNDHSDARWLAQLLRLGILPTGYIYPKEERAVRDLLRKRSQLVRQKTSNLLSIQNLVTRNTGTSITGNRIKTLTAEQVQTLLPTAELALAVTSTLVVMRCVADQIAELEQAIKARISLRPTFRHLLTVAGIGQTLALTIMLEAGEIRRFPTVGQWASYCRCVNSTKLSNSKRKGQGNTKNGNKYLAWAFIEAANFAVRYYPAIQGFYQRKKAKTHGVVAIKAVAHKLARACYYVLRDQVPFELDKAFA

SEQ ID NO: 490760 - protein, 358 aa, unidentified
MNRNTGMNAGQIIGTMNGQQVVGLDIAKKVFQLHTVDMGTGEIINVQLKRAKTLEHFANRKPCLIAIEACGSGHHWARELQVLGHTVRLLHAKIVRPFVSGNKTDATDARAIWLAVQQPGVKFVGVKTVAQQATLTLHRQRESLMKMRIMQTNALRGLLYEFGATFAKGKKALFSDIETTLEALVDTLPQVVVDSLREQVVRIKKLDEDMLIIEKRLKLQLKQDPQMQRIAKIPGVGLLTATAAIATMGEASAFKSGREFCAWLGLVPTQTGTGGKVRLGGISKRGDTYLRTLLVHGARSVVNNGKTPGPWLQGLQARRPANVVCVAQAAKVARTIWAITAKDQEYQSDHKSVRPQAA

SEQ ID NO: 490761 - protein, 372 aa, unidentified
MTSIIYVGMDVHTTNYTLCCYSMEDDRFFAEVQVEPDAKNILKYLARIEKQQSRDCRIVCGYEAGCLGYSLYHQLHAHGIDCVILAPTTMMTKPGKRIKTDRRDARLISKCLAFHTYSPVYIPTEVDDAVKEYIRMRDDANSALARVKQQIIAFCIRHGKIHDGKSYWTNKHLEWISSLDLGNKILSEVLQEYLIRYYQLREQVDMYDMRINELAQAEPYRQKVEKLSCFRGIAAHTALSFCVEVGDFRRFATAQQFASYLGLVPGECSSGDKQQYTGITKAGNSHLRKLLVETAQVFGRSATKSGKSVALKERQAKCDSLTVAYADKANARLKKKYFKIAMRSKVNIAKTAVAREMACFIWGMMTDNISCA

SEQ ID NO: 490762 - protein, 356 aa, unidentified
MSIIETGFRVANIIIGVDTHKSTHVAVAINQQGARLAAISVPANSKGYMELNNWSRSLGSVQAYGIEGTGSYGAGLSRYLLSLGLNVIEVTRPNRQLRYQQGKNDSLDAEGAARSVLSGQAIAAPKTQLGSVEMIRHLKIARDTAVKSRSVSMVTLKTLIINAPAELRDGIDQIKGKIALIRYIAAFRPGPITSTTASAKAAMRSLARRWLMLNDEIAELDKELKALVEAKAPSLMASHGIATLTIAEMLILVGDNPGRIRSEAALAKLCGVCPIPASSGKTHRFRLNRGGNRQANAALYRVVIVRMRNHEPTLAYVRKRTKDGKSKSEIIRCLKRYIVREIFTHLCRSETLKNSC

SEQ ID NO: 490763 - protein, 408 aa, unidentified
MGRAAEVVAPSSSIRTDGGCPVAQVNDLSRSLTAFDPISTLVVVVEMSKASWLVNGVVPGVERQPLKKLEPDATALLRLIERWRNEAVRAGRPISRIALAYEAGRDGFWLARWLIARGIEAHVIHSASVAVSRERKRAKTDRLDAAMLMRVFLGWLRGERGHCGMVAIPTMEEEDARRPSRERESLVDERSRITNRMKSALARLGIRGFKPHLRKAPERLAGLQTAEGTGLPANIIEEFRRDMARLALVREQISSIEKTRAERLERAPDIGPHAMVRLLARVIGIGIETADMLVREILSRKLRDRRAVARYAGLTGSPDESGLKRREKGLAKAGNARVRRGLIQLAWRFLMFQKDSALAQWYRTRTEGPSGARKTTMIVALARKLLIALWRLVTTGEVPDGVELRPAA

SEQ ID NO: 490764 - protein, 340 aa, unidentified
MKKFFIGIDFSKLTLDASLVARGSDTLLGVGKFENSAQGFEALIAWILEKTRCTPDSWLICGEHTGLYSYGLAQCTHDKGIDFWLESALQIKLSKGMSREKTDPVDATAIARYAMRFEDRAKLYRPSSGILEEIKDLLSYRDRLIKVKGSLSKAARELTRVKQSSASVRFIGEDSQRLAAEMEKQVKAAEGRMNELLLQDVGLMENYQLLTSIKGIGTINALMVMVLTGNFTLFDSARKFGCYCGVVPFEHRSGTSVRGKTRVSHLANKPMKVLLTQAARTAVTYNPVLKAYFERKKKEGKHSLLIINNVRNKLIHMMFAVVKKHQQYDINFKHPLAEAA

SEQ ID NO: 490765 - protein, 391 aa, unidentified
MVCVGIDVAKDKHDCCILDSDGMVRADCFTIPNNMDGFKQLLQTIRNCTKKSDKIKVGLEATGHYSYNILGFLLDNGLPTYVINPLHTNLYRKSLSLRKTKTDRVDARTIATMLLSDVDLKSYTDTAYHNEELKSLTRYRFDKVRERAKLKQSVSRLVTILFPELEKLVPSLHIASVYALLSEYPGAKQISEIHLTKLTNLLATASKGRYGKDKAIQIRDAARTSIGSVMPAKFLELKHTIKLIQELASEINEIEDSIQKIIDELNPPILSIPGMGVNSAAVILAEIGDFSNFSSPDKILAYAGCSPSTYQSGKLTNCYAHMEKRGSRYLRYALYNATKYVCYWNPVFAEYLAKKRAEGKHYNVALSHAMKKLVRLIYALQKSGKAYLAAA

SEQ ID NO: 490766 - protein, 321 aa, unidentified
MKQEQSNMKVAGIDVGKRHLDVAIHGGETTRVANDAVGIETLLAWLKTRRVGRVGMEATGGYQNRVCAALEAAGLETVVHKPSEIRAFAVFKRLKAKTDPIDAVLIAAATAQSDAVKAASDLRLTELAERLTAYEQATDRLAEQKTQMEHVTLKDLRLDLEEQIAAAKAFKAALLKRIVALIKAHADLAARYDLMLSLPGVGPVVAAGLVVRMPELGAMNRGQAASLMGVAPFDRQSGQFKGQSFIFGGRSRPRRLLYLAALAAKRWDPDLKAFAQRLAERGKQPKVVIVAIMRKLIEAANLVIARGKPWEKRDLGQTAVG

SEQ ID NO: 490767 - protein, 430 aa, unidentified
MNYKQNERLNQLTNETLIIGVDIAKEFHVARAQDIRGMEFGKSIKFNNSLSGYLEFESWIKEIKFAENKRSIIIGMEPTGHYWLNIARYLKDKEEYTIVTVNPMHVKKIKELDDNNQTKTDKKDAKIIAQLVKDARYSTPNLLEGKYEELRNAKNLRQMMVKDSNRTKNQIHNWLDRYFPEYKEAYVSWESKSFIKIIKKYIFPSEIQKVSPNEIYEMLPPKMRRGVGLHKIERLVTASKNSIGIKEGLSFAKVEIRYLLEKYEGFIQQIEEIDNHVTELCSNLEETKKIIQIKGIGIVSASGIVAELGDIRKYGNSKQIIKMAGLSLTENSSGKMKGKTTISRRGRKDLRRILYQVILGMIRTNPAFKEMYSYYTTRSKNQLTGKQAIVALCRKLLRIIHTIILKDIDYDEDKMMSAIQYPEEFLNTAA

SEQ ID NO: 490768 - protein, 339 aa, unidentified
MQISIIGFDIAKQFFQVHAADAEGRAVAQVKLRRAQVLDYFRAMPPSLVGMEACATAHFWARELIALGHEVRLMPPAYVKPYVKRNKTDAADAEAIAEAVTRPTMRFVTIKSAENQAALMLHRVREMLVRQRTMLATGLRAHLAEFGIIAPQGIHRVERLAAEVHNPAVPPLAREALMLLIDELASVWRQIDVLEEKLMARHRVDEVSRRLATIPGVGPITATAIASTVPDPAMFRSAREFAAWLGLTPKSHSSGGKDKLGRISKRGDRYLRHLLYVGAGNAIRFAKARAATGEAWIKGLQERRPPKVVIIALANKMARIAWALMTRGQSFRSPNVMPV

SEQ ID NO: 490769 - protein, 379 aa, unidentified
MEQSSTLYVGLDVHKDSIDIAVADAPRDAEVRHLGSVAGGVTAVSKSMRRLVSAGHRLHIVYEAGPCGFVLQRHFTALGWRCDVVAPSSIPHPCGERIKTDRRDAMKLARLARSNDLAVVRVPDGADEAIRDLVRARDDAVREQRNGRHRLKALLLRNGTPYAGKCSWTAAHLRWLATVKLEHAAQQISFQEYLHSITESGARIGRLEQAMRDALPEWSLRPLVQALQALRGVQLIAAMTLVAELQDFLRFDNARKLMAYVGLVPGEHSSGPKRRQGSITKAGNSAARRMLVEIAWHYQQGARVSASIATRQADLPAAVTAIAWAAQLRLSAKFKRLVARRVMKTKVVVAIARELAGFVWAIGREVQISGWQGVKPATA

SEQ ID NO: 490770 - protein, 423 aa, unidentified
MEVVHERVAGLDVHKDTVVACLRTMSSGKARRDGRSFETTTQGLMSLRDWLAEGRCQVAAMEATGVYWMPIWKILSEGDFTLVVANAAHIKAVPGRKTDMNDAAWIADLAAFGLIKASFVPDESVQELRTLMRTRKQLVREQTGHVQRIQKTLTEANIRLDSVISDIMGLNGRRMIEAMIAGVRDPRKLAGLADNRLKATPKQLYDALHGRLTDHHRFLLTLHLQQWDALAASIQVVDHEVDQRLARMDKEVKADQAKFSDLIALLSTIPGVSKLSATTIVSEIGPDMTRFPTAGHLVAWSGLCPAQNESAGKRKRSRLRKGAPWLKTMLVQCAWAAKRKKDSYYKAQFHRLRIRRGPQKAICAVAASILSAIYHIIKNRTPHRDLGVDYFDRRSHRAKLTRLTQQITKLGYNVTLNPIPDAA

SEQ ID NO: 490771 - protein, 343 aa, unidentified
MAIVAGYDVHRSQITFDALDTESGEVSSGRIPSTPEAVGAWVGRFPGLEVHVAVEACTGWLFVCQALADAGAVPHLAEPAETSARRGKKRRAKTDRQDARWLRTLLAEGRLPEAWIPPAHVRAWRTRTRLRKTLVDERTEWLQRIQATLFHHGVPASAVPPRLLGAQGRAFLAQLALPEASRQRIEVALALIAAIDARLAPIERELRRLARRQKGCRALMRHFGIGELTSLTILVELGDVSRLSASRKAVRCAGIDVGVHRSDRRSRAGKLSKQGSPQLRWALYESAQSATRPTSPDHPAYLALKQRGLSHTRASLTIARKLARRCFHTLRELGPEALEPVTD

SEQ ID NO: 490772 - protein, 344 aa, unidentified
MYYCGLDVSIKSTHVCIDNVRGRHVREAEVPTTADAIRTLLNRYRGKSLQVAIEAGGQTAWIVDVLRELGAHVHVVHPLKVKWIAESKKKTDRVDAALLAHLLRIGGLPEPVHVPRPESRELRHVLVARRQLVTMRTKLINVVRGLLRQQQVVLPSRALSTRTGWDRLKRVPLSASVHIIVEAYADLAVTIASAMKVLEHQLSTHASDDRRVVQLETIPGVGRISAQTLLAAVDTIQRFPSAKCLVAYSGLAPSVRASGGQVRYGAITKQGRSEIRAVWVQAAFAALAVKAPAARPLQEWWQRVARRRGKKTAIVALARKLLVIAYHILRDQTIYQPQRLGAAA

SEQ ID NO: 490773 - protein, 482 aa, unidentified
MAQRKKTTFQRLKEDRLNRKQRRELARKLSAEDPGLEIVHRNTAGIDVGNESHFVALPPGRDPQPVQEFGSWTADLQRMADWLKARGIEEVVMQSTGVYWIPLFDVLEARGLRVWLVNARDTKNLPGRKTDVQESQWLLKLHTYGLLRNSFRPPDQIRALRSLWRLRDRHVKEAARTVQHMQKSLTTMNVQLSNTISDITGVTGQAILRAILRGERDANRLAQLRDRRIQATPEEVARSLEGNWREDMLFELRQAVDAYDFVQKQIQECDKRLQTLLGNLPARAVTEVPVEDQNATAPHKKSRKRKPNKQKNAPRFDLEAELKRICGVNLLSIEGISVMTAQTVVSELGTDFSHWKDEDHFASWLNLCPVRPVSGGKVLKQGTRKKVKNRVASALRTAANTLQFSDSYLGARFRTFRARRGDPKAIKAMARYLACLIYRMFTRGQEWVDRGAKAFEDQRARRELAALERKAAARGLKLVSIA

SEQ ID NO: 490774 - protein, 409 aa, unidentified
MFCGIDWAEKHHDVALVDDAGKMLAKARISDDAAGYRKLLDLLAEHGDSETEPIPVAIETSRGLLVSVLRTGKRQAFAINPLAASRYRDRHGVSRKKSDPGDALVLANILRTDLHMHRPLPADSELARAIAVLARAQQDAVWNRQTIANQLRSLLREYYPAALDAFVTGRKGGLAHPEARAVLAVAPTPAKAAKLTKTQIKAALKRGGRQRSTEAEATRLQGVFRAEYAHQPALVEEAMGRQMLTLLRQLDAAAEGADDLAEAVEASFQQHPDADVITSFPGLGNLLGARLLAEIGDDRTRFADARALKAYAGSAPIIRASGKKRYVGRRFVKNDRLVHAGYLWAFASISASPGAGAHYRRRRERGDWHAAAQRNLFNRMLGQLYHCLQTGQHFDEQRAFAPFLQAAAA

SEQ ID NO: 490775 - protein, 400 aa, unidentified
MGQPLWAGVDAGKSDHYCVVIDADGKRLLSRRVANDEAALLELINAITALADGGELTWAIDLNAGGAALLIALLIGAEQRLLYISGRTVHHASGGYRGEGKTDAKDAAVIADQARMRRDLQPLRPGDDIAVELRILTSRRTDLVTDRTRAINRLRAQLLEYFPALERAFDYSASKAALILLSGYQTPDGLRRAGAARLAAWLRKRKARNADAVAAAAIEAAKSQHTVVPGQQLAAAMVARLAEEVMTLDTEIGDTDAMIEERFRRHRHAEIILSMPGFGVILGAEFLAATGGDIAAFGNTDRLAAVAGLAPVPRDSGRISGNLKRPRRYNRRLLRACYLASHIAIRTDTASRIYYDRKRAQGKRHTQAVLALARRRLNVMWAMLRDHKPYQPAAPNAAAA

SEQ ID NO: 490776 - protein, 387 aa, unidentified
MPQPNDLSRSLVALDHDSTMIAVVELSQSSWLVGGVLPGIERQPRKKLEPSPERLLAVLHRWRDEAIKAGRNVTRIALAFEAGRDGFWLARWLAARGVEAHVIHPSSVAVSREHRRAKTDRLDTELLKRGFLGWLRGERGHCSMVRVPTLAEEDAKRPNRERECLVKERTRLVNRMKGALARLGIRNFRPTLRNAAEHLAGLYTPEGTPLPPNVAAELERDIARLGLVIGQIKQIEEARRQRLEEQPESRPHAMVRLLVRVVGIGTETADMLVNEVLSRPMRDRRAVARYAGLTGAPDESGAKRREQGLAKAGNARVRRGMIPLAWRFLRFQKDSALARWYQARTADRRAGTRKTMIVALARKLLIALWRFATTGETLEGVVLRPAA

SEQ ID NO: 490777 - protein, 343 aa, unidentified
MNSTTIAVDVAKAVFEVAVSEHAGQVRERHRFSRERFRRYLGEQPPATILMEACGSAHYWGREAQTRGHRVVLLPPHAVRPYVVRNKTDRTDAKALLEATRNDEVRPVPVKSETQQALAALHRLRSTWLATRTARINTVRGLLREFGVVIPIGARHVVPALGSLEDADVGVPSLLRPALAEAAREIRELEGRIRTVEHQLEAVAEQTPVVSRLCSIPGVGLLTATALVAAVGDVQRFPSGRHFASYLGLTPRERSTGQRRQLGAISKRGDAYLRMLLIHGARAVLCHAKTKTAPAPDRLRAWALHLERFRGHNKAAVALANKLARIAWAVWKYDTDFAAAPAA

SEQ ID NO: 490778 - protein, 409 aa, unidentified
MDQLIERCCGLDVHRDTVVACVRGPGPNGRRQHEVRTFGTTAVELLALRDWLEAHAVTDAATESTGVYWKPVFYVLDEAFTCLLVNAAHIKQVPGRKTDVKDCMWIAQCLEHGLLRGSFVPPAPIRELRDLTRHRKVLIQERTRAANRLHKLLEDAGIKLASVATNILGVSGRAMLEALVHGTTDPAVLADLARGKLRKKLPALRQALAGRFRPHHAFLVSQLLAHVDYLDEAITTMSEEVEGRLAPFAAQLTQLDTIPGINTRTAEVIIAELGVDMSCFPSDRHLASWAGICPGNNESAGKHQSGTTRKGNRWLRMTLIEAAGAAIRTKDSALGARYRRVMRHRGHKKAVVAVAHAMLRAVYHLLAEGTTYREPGADYYDRHHTHRVTCRAIQLLERQGYGVVLEPAA

SEQ ID NO: 490779 - protein, 429 aa, unidentified
MTKTYILKTQTVPADRSAVETYLAPPPPSKGKIIGLDCHPDTFTAALFVGQTPHDARKIGSRENLSLDALLKWAAAELTPQDIILMEAGSNSFELCKRLGNLGLKACVLESCHVGKHAKTYADNDKMAAARIALVYLAGNAPCVWVPDEQSRERRELLHAYRKAVDEHTAATNSIKSYLNGRGLRLCKHSLDEKTTSQWILDQADWSVLQKNILAEHLANITESKERRKRLYRLIAAEIAVDPTMMRCMKVLGVGIVSAFALLAVIGDIGRFHSPEKLVAYIGLNPGQRQSGKGKDIRLGVGRRGRGDIRNLLIQGAHAIMRSGRNTPLGQWGWKLFARKGNRNVAVAAIARKLLVQVWHLLHGNPPLALESDTSFRIKLQKLAVALGSTLRTGIGLGKTLEDSVKTLISRCQTHAEPSASPCETPQPA

SEQ ID NO: 490780 - protein, 393 aa, unidentified
MNKIIYIGMDVHSSNFTLCSFEPGYGMFEDKIFGQVQFKDDLIKNTEKYICNLKSQRKDIDIVCGYEAGCLGYVPYRELTRSGINCKILAPSTMAVQKGGKKLKNDFRDALDIARCLASGSYKAVNVPDVEDEDVRDYIRMRDDHKTALKQIKQRLNAFCLRHGFQYDKSKWTLAHIRWIKHLECTLKQKEIINEYLATYEVLKSKLDAFDVRIDDLATSERYAEKVNKLVCIKGIKTNTAMSFISEVGDFKRFRSAEQFAGYIGLVPGEQSSGDKVCRTGITKSGNTHLRKLAVECCNSFRRGLVGQKSVELKKRQQNAPSEVINYADKASARCQRKYYRMVNKGKNPNIAVTAVAREFCCFIWGMMTSNYEYSNNEVRELMPANGLIRVNL

SEQ ID NO: 490781 - protein, 373 aa, unidentified
MKTYTLKDGTLKATPVACAKEIKNEKAPKAKLIAVGIDTGLGNNQASRKVDNAAIGPVQKLRSETELLLYVDKQLELAEEVVVVYEAGPFGYGLYRKLTARGAKCLVSAPDSTQQKRKRRKNNAIDSRTLTSNLSNYLNGNEAALQLVRVPTPEQEQARLVSRQHDQLVEERKRLGAQGNALLLSQGFGSWKNWWRPQAFKALERVVPQWVLEMLQTWVDLLRVLDEKIQKAKAGLAKGWSGPRPKGAGANSMVQLQSQVLDWNLYSNRRKIACLAGMVPSEWSTGKNQRLGSITKVGVPAIRRIITEMVWRMILFQPHYRPVQKWQEVLRGTNRALKKKAVVAIGRQLIVDLWRLQTGRISAQELNLVMIGG

SEQ ID NO: 490782 - protein, 453 aa, unidentified
MGRCIGLDVHRDFAQVAVWDRGRVVDAGRIPTSPEGLRAFTKTLRRSDRVALEATMNTAAIAALVGERAGQVVVSNPFKTRAIAEAKIKTDKVDARVLAELLAADYLPSVWLADDATRALRRQVSSRVSLVRQRTRIKNQVQAILARNLCPRCPASDLFGNKGRRWLAEQPLPVDESRAVASLLRQLDFAAEELRLVDADLARVALDDSEVRRLMTIPGVDMIVAVAIKATVGDFSRFASASKLVSYVGLDPKVHQSGGLPATHGRISKQGRAWARGMLVEAAWVAAKAPGPLRGFHERVKARRGFQIATVATARKLLVICWHLIHDQTDYAFARPSLIAKKTRALELRAGDHARKGHRGTAAAYSLKTVRDRERAVLEQAETAYRHLTGNWQTQRPAGTARPARPSGPRRTSVPTATPRAVKASPPGGAAGLDSPPDPASRSRKTSVTRQNA

SEQ ID NO: 490783 - protein, 361 aa, unidentified
MQSTTIIAFDQHAATTMAAVLLPGHRTSAVHPLTSDVPTILRFVTQLQRQGPVQCCYEAGPCGFELRRALAAKAIPCDVIAPALIPRRAGDRVKTDRRDAGQLAVLYRAGALTAIHVPSEQEEAARDLLRCREDIRAELLRARHRLSKFLLRHGRRFTGTKKAWSKRHDAWLRAQTWPMPALDHTHRAYLRGVDEVLARLRDVETDLRALLTLEPLQSRVQRLRCFRGIDDLTALTIAAELGDPRRFATAPRTMAFVGLVPSEHSSGSKRAQGRITKTGNAHLRRVLVEAAWHYRHRPFVGAALRARQRNAPADVTARAWAAQQRLYRRYARLAARGKPKQHIATAVARELTGFVWAALTQ

SEQ ID NO: 490784 - protein, 357 aa, unidentified
MPSSDVKYIGLDVHKEASAIAVLNGAGKLVMESIIETKASTLLDFLHGLHGELHATLEEGTWAAWLYDVLKPHVLEVVVCNPRRNALLKEGSKSDKVDARKLAELLRSGMLRAVYHGENGLRALRELARSYEVVSKDLKRVMNRLKALYRAWGIPCTGTQVYSRRHREQWLKKIREAGVRRRAELFYQQLDGLQVLRRTVRGELLAESRKHQAVKVLRQIPFIGPLRAAQLVALMQTPHRFRSKRQLWTYSGLAVETHDSAQYRYMDGQLQRSKKPQQVRGLNQNHNHAMKEIFKSAALSATGRAGAFQDCYAGLLAKGMKPELARITLARKIAAITLTLWKKGECFDAGYVKRQAA

SEQ ID NO: 490785 - protein, 356 aa, unidentified
MIYAGVDIAKTDHVMGAVDERGAEMCPPMPFKNTEAGLERAVAWLEGLAGSPSDVVVGMEATGRYWMACYSFLVARGYSVAVINPMQVKAVRKLKGLDKVKNDRVDAGLIAEALRIGQCDETRLATDEVASLRSLSRYLQSLRGMVAELKTQCVCLMDAHFPEYAGVFSDMFGAGSRAVLSKSPLPFELARRRADSLARDIAEASGRGGKSAGYAAKIKAAARSSIGVRLGQEAASFQIKSLIRQIEFADSECAKVEARVRALLDEVEPLVLTIPGVSYVTGAQIVSEIGDVSRFRNAPALVSYAGLNSSVSQSGKFDSGGGPAAHFAMPGKHSIFGSQAATFGQLTVLENLRFSP

SEQ ID NO: 490786 - protein, 337 aa, unidentified
MMYSGIDLHSNNSVVAIIDEADRVVAQKRLPNDIEKIVGFLARWQDDLAGVVVESTYNWYWLVDGLQDAGLHVHLANTAAIKQYEGLKHSGDEADAQHLAHLLRLGILPTGTILPREHRAVRDLARKRMQLVQCCTTQVLAVENIMARQLGGRMTSNQVKRLTADAIDSMPLAADVGLAMKANVAVIATLHSQIEVLEKRLQERVKPRPQYGFLTSVPGIGQTLATVIFLETGPIDRFADVGNFASYARCVDSVLTSNRKKKGEGNVKNGNKYLAWAFVEAANFAVRFCPEAKRFHERKKAKTNNIVATKALAHKLARACYHILKEGKPFDVTRCFA

SEQ ID NO: 490787 - protein, 404 aa, unidentified
MKGPIVSIDVSKGKSDYQAFKNLNVKYTGSRSIKHTKEGFDEIVNLVREMEKKLETEVCVVYEATGVYHRVLKKVLEDNNIKQFIINPLLSAKTRKNDSLRCPKTDKLDPKSIAKTYYSHSLHNSHKQETIYHELRELSRYYEDILVHIRKDKVAFRAQLDIVFPGYDALYDDLYGPVALAVIEKYPHPEMLQKKKINTVSKVIQSKTCHRKAVSDTMADKAIEYSKTIYSGCDKDDIEVLILQRFIKKLKEDMAEAERTIGEMIKLAQELPDFSIIKSIPGIGDNLAARIIAELGDMTRFKKKNELVAFAGLDPRISESGKNDGDHMHITKKGNKRLRCLLYLAVTCSIRLKRDDNSIKDFYIKKKQQSNPMCSKAAKTACASKLVRIIYSMCKTGELYQYNK

SEQ ID NO: 490788 - protein, 349 aa, unidentified
MTITTVGIDLAKNVFAVHGVGQNGKTVLVKSRVTRAALPGLIAGLPPCVIGMEACSGAHYWARLFRQYGHEPRLMAAKFVSPYRMVGKSGKNDAADAQAICEAVRRPHMRFVPVKDESQQAMQCLHRTRQGFIEEKTATYNRLRGLISEFGVIAPQSTDALRHMVSVQKSSLPLQVQQCVDDLLEHVDRIEANITEYDRILSRMAKTDHRSQRLMELKGVGPTTACALVACIGNAHDFKNGRQLAAWLGLTPSQYSSGGKSKLGRITKAGDSYLRTLLVQGARSVLIGAEKRTAHSVVGSVHWSNAEDTGALLWPSPPKMQGCAGHHCITVMISGCIQPAKARSNSMTI

SEQ ID NO: 490789 - protein, 386 aa, unidentified
MQKLNDLSRSLTALEPDGTLIAVIEMSLSSWLVAGMVPGVERQPLKKLAVDESALLKLLHRWREEAEKAGRRIDRIAVAFEAGRDGFWLARWLKARGIEAYVIHASSVAVSREHRRAKTDRLDTELLKRSFLGWLRGERDHCKMVEIPTMKDEDAKRPNREHDSLIGERSRIVNRMKAALVRLGIRGFNPKLKRATTRLDGLRTPEGEPIPPNALAELRRDMERRRLVNNQIRQIEEERLERIEQAPCDGPHVMVRLLARVMGVGIETADMLVHEVLSRNLRDRRAVARYAGLTGSPDESGRKRREKGLARSGNVRVRRGMIQLAWRFLLHQKNSALTKWFRSRTENARGTRKPMIVALARKLLIALWRLVREGIVPDGVVLRAAQ

SEQ ID NO: 490790 - protein, 342 aa, unidentified
MNKVTIIGIDLAKRVFHAHGAAADGSVVFRKRLTRAQVLPFLAGRPRCVVAMEACASAHEWGRAIQELGHDVRLIPPTYVKPYVKRQKNDMADAEAIAEAGSRPTMRFVAVKTEEQQARSMVFRTRDLLVRQRTQSINALRGHLAEHGVVAPQGPAHLKTLAAAMDGAGRSLPQLVRDVGGIYLEQIEQLNRRIADLEKVLRREAQFGTETRRLQTMPGIGPITAMAVEAFAPPMATFKRGRDFAAWLGLVPVQHSTGGKQRLGRTSKMGQRDIRRLLIIGAMAVIQWASRREAEAGSWLHRMMERKPLMLVAVALANKMARSIWAMLTKKEDYRNPGNAAA

SEQ ID NO: 490791 - protein, 405 aa, unidentified
MFYGGIDIAKHQHEICVLDQEGRSVLKMHFKNTHKGLEKLIKALDALQVHTGDIRFCLEATGHYWLPLFSQLEQLGYQLHVINPIQSDALRNLYVRKTKTDTKDAMLLADMMRLGCTSETKLAEETTLKLQTLSRSRFSFVRQVGSLKNQVLGILDRIFPEYASCFSNVFIRTSKELLKKYPEPEELAEVDLSELSQFLSEHSRGRLGQERAEQIQTLAKGTFGIRLALDAFTLQLRLLVEQIEFIQDQIAIIEEAIDQVMEELRPQGADYRHVLETIPGIGATLAAAIIGEIGDINRFLNAKALVAYAGLDASVKSSGQFEGTRNRMSKRGSPILRHSLWMAAVSARRFNPELKEFYELKRSHGKHSNVATGAVARRMTHLLYSIWKNNKPFEQDYQWRPPGIL

SEQ ID NO: 490792 - protein, 320 aa, unidentified
MKSILGIDVAKAKLDVALQLVDGKIRSKVVDNTPQGFAVLSTWLNQYGVTDLHVCMEATGIYWEAVAEFLADAGHTVSIVNPAQIKAFGAAELVRTKTDRVDARLIARFCVAQRPEPWQAPSPAIRELRALVARRDALNAMRTQESNRLLVAREAVRAGIETHLAYLEKAIAEIDAALRQKIDDDPDLKEQRALLDSVPGLGDKTIAVLLSYYGGAPRFNKAREAVAFAGLDPRQHESGSSVRGKPRLSKVGHALLRRALYMPAMVATTRTVWGRAFRDRLAAAGKPPMLILGAMMRKLVHVAFGVLKSGKPFNPTLHIS

SEQ ID NO: 490793 - protein, 443 aa, unidentified
MKELPVLDSRAAFCDVGSEHMHVSIAGGLPKVFGTFTSQLHELRDWLLGEGVHSIAMEATGVYWLSLYGVLEAAGLEVVMVNGRQTRNLPGRKTDMKDCQWGATLHAHGLLKAGFVPPSHIRKLQDYQRLRTDHIASAASHVQHMQKALERMNIKLHNVISSLMGVSGLAIVHAILDGERDPAKLLELCYSTIRHKKAKDVIEALRGTWEPEHLFALRQALQSWEHYHRQIAECDQQIQLLLQEITFNDTQGGGIGEKPKATAGKHPSANAPQISGLHRMLIDLCQGKDLSILPAHTDYSILQIISEVGTDLSKWPTEKHFTAWLGLAPGTSQSGKRKSNVKHSRSRVGRYFCIMARSLARSKDMALGGFYRRLAARRGGLIANIALARKLAALFWRVMVKGTEFVEEGLAAYEAKFLEGKKRSLRRLARELGQAVSPIPVTV

SEQ ID NO: 490794 - protein, 402 aa, unidentified
MNSVGIDISKGRSTVAVMRPFGEVVISPFEVRHTDSELSELARQLKSLDGETRVVMEATGNYHTPVAKLLHDAGLYVSVVNAKLVHGYGNNDLRRVKTDKKDSVKLANYGLDRWLALTRYVPEEDTRLLLKNCYRQYRQYSKVQTVLKNNLISLLDTVFPNVNRLFSSPAREDGSEKWVDFVAEFWHCRCVSEKSEKAFANKYQRWCRKYGYNFNEAKAHTIHAEASGHIGVMPMSETTKLLVEQAVAQLRATSTALAALKHEMQALTSMLPEYPVVMDMFGVGPTLGPQLIAEIGDVRRFYSKKALVAYAGLDAPPNDSGDVTGRHKSMSKIGASSLRRTLFLVMSVYLQTAPLDEPVYQFMDRKRAEGKPYRVYMMASANKFLRIYYATVKAYLEILEQI

SEQ ID NO: 490795 - protein, 451 aa, unidentified
MSKRGSKSAGLPIIQARAAAIDVGARFHVAAVPPELCDEPVQTFQAFTSDLERMADWFVSLGIKTVAMESTGVYWVPVYEVLEDRGLEVIVANARDARAVPGRKSDVNDSQWLQRLHACGLLRASFRPGRDIAALRAYLRLRERHLDDAAAHIQHMQKALTFMNLQLHHVVSDVTGVTGMKIIRAIVTGQRDPDVLARMRDVRCKADFKAVHAALVGNYQPEHLFALKQALALYDFYQERVGECDAEIEQALARLNIDKPCPAEPLPKARHRTQQPNQVKFDTRPMLYQLTGVDLTQIHGIGPYLALRLVSESGTDLSRWPTAKHFTSWLTLSPGCKISGGKVLSARTRKTNNRLAAHLRLAATTVGRTNTALGAFYRRLAARIGKAKAVTATARKIAVLYYNAMRYGMTYVDPGADQYERKYRERVVRQLHRRAAEFGFTLQEVTPQSVS

SEQ ID NO: 490796 - protein, 425 aa, unidentified
MAYRIAGIDAHKKMLAVVVADVATEGGYEFMRRKLGTTPERLKELAAWLMEQEVEEVVMESTAQYWKPVWETLERYWQPERRRREGAPPMSGKLHLAQAKSNRGRRGRKNDFGDAERLLKRLVAQELQLSFVPEPEQRLWRTVSRKKLQLTRQRVRLQNQLEALLEEAHIKLSSCVSDLLGVSGRRILEALAQGVSDPVELAKLADPNLKATREQLADALSAATQLNPVYHRLVKMHLKELDLVEEQIQKLEKEMAQLLRPHQDAVQRLAEVPGLGVDSAQQIIAEVGPTAAAFPSAKCLASWVGTCPGEEESAEVSKSTRSPKGNRHLRRLLNQAAHAAVKTKGSIFQVVFERLKHGLEYQEAIWAIANRICRLIWKLLHNCVRYKEFGPAVGAKAKQVRTAKMIRALRKLGYVVEPVIPAATS

SEQ ID NO: 490797 - protein, 343 aa, unidentified
MKIYALGIDLGKTVFHLVGLDSSGQVVVRKRCSRTQLLAFTGNLEVQVIGMEACSGAHFLGRALREQGHEVRLMPAQYVKPYVQTNKSDFLDAEAIAEAVQRPRMRFVPIKTEEQLDLQALHRVRERWVMRRTAVVNQIRSLLLERGLTVPKGRSHLDEQLPRILEDAELNLSDSFRVLLAQLKLELEQLAARIEQMDSVIQKTAKENEACQRLTEIPGVGPVTATALIAAVGNASAFRKGRNLSAWMGIVPREYSTGGKQKLLGISKRGNKYLRRLFIQGARSVLQQRHKQAPGLSDWLAQLLGRTHQNVVVVALANKLVRMAWAVLCKNERYRAPVLAVTT

SEQ ID NO: 490798 - protein, 436 aa, unidentified
MNTTNMPHTPPAATPTPLVFAAYVGLDWGDEKHAVSLAAAGSDKIERRTLEQTPEALVAWASELRQRFPGGKIAVCLEQARGPLIYGLQCYEHLVLYPINPKSLARLREALHPSHTKDDPLDADVALELVRKHREHFRPWQPDTVPTRQLALLTEGRRGFVDHHTAGTNELQTHLKSIFPQALELIGQDLGSPLATDFLKKWPTLQHVQKVKPAVLRKFYYGHNSRSEELIQQRLELVQKAQPLTRDPALLAAHSLAIQSLAAQLAVLRQTITQYDRQIAAVFASHPDAPIFQSLPGAGEALAPRLLAALGTDRSRYPDALALNCASGIAPVTEKSGKTQYWVHLRWSCPKFQRQSWHEFAGCSIKLCPWARCCYDQLRKRMGHHEALRKLAYKWQRIVWRMWQERQVYDEGRYLKSLQRDGLKTYAELVPAANCE

SEQ ID NO: 490799 - protein, 287 aa, unidentified
MYVCILDQTGETRLHRHMTATPEALLTAIAPYHGQIVLAAECMFTWYWLADLCAEHGIPFVLGHALSMKAIHGGKAKNATIDAHKIAGLLRGGLLPQAYVYPAEMRATRDLLRRRMHLARKRGELLAHVQNTNSQYTLPAIGKKIAYKANRDGVAERFADPAVQKSIEVDLALIGFYDTLLRDVELSIVKTAKHHDANTLYLLQTVPGIGKILSLVLLYEIHDIERFPRVQDFASYCRLVKCARESAGKRSGTSGTKIGNAHLQWAFSEAAVLCLRDHPAAQKLLSR

SEQ ID NO: 490800 - protein, 337 aa, unidentified
MQKSYLGIDVSKLSFDVSLIVVDKGQKQPIVCNKFDNDTSGLIRFKTWLDDHQVAFDKNSLLVIENTGIYHRLIWNFCTTHLLPIFIGNAADLKWSFGIARGKNDKVDSMRLCDYAYKHYEDIKPTPGLNKTLITLKDLLSNRSKLLKLKNAIRQTLNELKASNDKITQSLMVNLNKPALDGLKKSLKQIDAELLKIVKQDQSILTNYKYMLSVPGIGKITAIFIICCTNNFAIKVTGKQLANYAGVVPFGNTSGTSVKGRNRVHFMANKDLKSLLTMGALSAIQAYPEFKDYYDRKTKEGKKHLQVLNAIKNKMLLRVASVVNLQKNYVNMYKKAS

SEQ ID NO: 490801 - protein, 411 aa, unidentified
MPSTLFVGIDVSSQFNSVFFIDQDGNNLIKKPFSVSNDIPGADSIISEVISHANAINASCVKIGMEATSHYAWHLHLHLASSPDLAPFNPKFFVMNPGVVKGFKKAYTYLPKTDDFDARIIADCVRFGRVNPTPMPDFRYAALQCLTRFRYHLVQTISSEKSRALNLLYLKFSSFKEDCPFSDVFGSASTSVFDSFTPDEIAVMPVEELVDFVLSHGNNRLKNPEEIAKTLKSAANRAYRLNPDMCDTVSMTLTMTLENIRFLESQLKKLDKEISKQLNGFRQTLTTIPGFGNVLAAGLVAEIGDVKRFKNECAVAKFAGLVWNKYQSGNFSAEDTSLAKCGNQYLRYYLVEAANCVRIHAKEYADFYCKKYNEVTKHQHKRALVLTARKLVRLVFAMLSKGQIYQPGGNG

SEQ ID NO: 490802 - protein, 366 aa, unidentified
MKKSITPIGTPVGVDVHKRRCKVVELDHGEIKVRKPMANTREEWLEMLTELPPDAEIGLEVSTAGYFAMSVLEEAGWRERTHWVHTAGMDSHRRQKNDRLDAERLARKLAAHHLDPLPEAWFPPPEIRALRLRARARCWLALLRTQCKNHLQSLLQMHGLLLPGSDPLGAAGQKWLAQQTLPLPLIESLPQIQRLLKLLEEEIKISEKYLQAVEAQFPELALLRTIPGIGAILAPVIWSELGSRERFPSAKALANDTGLVSSFYDSGDVKVSGPITHQGSRWLRWAFVTAANLAIPYRNPFARRYHRLRRGKKPNVAKAAIAHSLARCVYGVLKHGCPYREDRWGRKVGALEQEARGSARSTKTVL

SEQ ID NO: 490803 - protein, 311 aa, unidentified
MTLHPICIGIDVAKAHLDLFHPVTGHRRIDNTSPAIEAWLQPLSGTDPFIVFEATGGYDWVLRCALGQARIRHARLNPTQARRYAQATGRLAKTDRIDAAMLCELGERLAPPPQEAVDASRKHLSDLHKRRDQLIAERGAEKVRLSEARGLCQTVLANLAAHIAWLNEAVNALDAAILGLIEQDGELQRQAALLRTAPGIGFVTAATVLAQMPELGLRRPGSIAALTGLAPFNCDSGAMRGQRHIRGGRGRVRRALYMAALSAVRTNARMRAFYQRLLDAGKAKKLALIAVARKLITILNAMFRDGQPFIV

SEQ ID NO: 490804 - protein, 404 aa, unidentified
MNSEKYIGLDVHQATISVAVMDCRGKVVMESILETKATTILEFLAGLRGTLSVTFEEGTWAAWLYDLLKPHVANLVVCNPRKNALLKHGNKSDKIDARKLANLLRLNDLEPVYHGETGVRMLRELARSYLTIVKDVSRVMSRLKAIYRSWAIPCAGRDVYSYLTIVKDVSRVMSRLKAIYRSWAIPCAGRDVYYTRHRGEWLGKIPEAGSRRRAEQLYQQLDMLQPLRQQARRELLAESRKHTITAKLRQIPSLGPIRSALAVALIQTPHRFRTKRQLWTYSGLGLETRDSGEYHYVEGQVRRRKKQVFIRGLNKDHNHDLKGLFKAAATRASVQPGPFQDFYQRSLAKGIKPTMVRLTLARKLAAITLTLWKKGARATPSGWLYDSETVRAKCAMSVKRPGAN

SEQ ID NO: 490805 - protein, 315 aa, unidentified
MDTPFVGIDVSKETLDVAVLPGGGRKTFRNDDLGCEQLTTWLLDVEPVIVVLEATGGFEMLAASTLSSAGLPVAVVNPRQVRNFAKALGKLAKTDAIDALVIAHFAQAVKPKNRPLPDDQALALKALVTRRRQLIEMLVAEQNRLGGAHPRVKPAIRISIDWLRTQIEEIDRTIATSITDSPLWREKEELLTSVKGVGPVVASSLICLLPELGILNRKQISALVGVCPYNRDSGAYRGTRSIRGGRADIRSILYMAALSATRHNPVIKAFYQRLKQAGKVSKVALVACMRKLLTILNALLRTNQKWNAARALSLT

SEQ ID NO: 490806 - protein, 400 aa, unidentified
MDVFCGIDWAEDHHDVALVDAGGQVLARLRITDNAAGLAALLELLADWGDSPQDPVPAAIETPRGLLVACLRATGRPVYPVNPMAVARYRDRHSVAGRKSDKGDSAVLANVLRTDLLAQAVAVLARAQQDAVWERVHAQNKLRSHLREYFPGFLAAFGSARGGITRPEARAVLAAAPTPADAARLTKARLAGLLRKAGRQRGIDEEAARLHAAFQQEQMRQLPLVEQAMGRQALALLRQLEAACQSADDLRQAAEESFSQHPDAGIITSFPGIGALTGARVLAEIGDDRSRFQDARGLKAYAGAAPVTRASGKSRSVTHRKVKNNRLAAAGYTWAFAALTASPGARARYDRRRDAGDGHAAAQRNLYNRLLGCLWHCLATGQRYDEATAFPTAEATPAAA

SEQ ID NO: 490807 - protein, 333 aa, unidentified
MQFTHILGIDISKDTIDLALSQNKANTNIVNSKFSNNLKGYKALLKWFKNQEVKTDQLLICLENTGIYHRPLTAFLFSEQAFVWVENALEIKWSIGLQRGKNDQIDAQRICLYAFRNQDKARFYSAKDKFLQKLADLLANRERLLQASKMLLVPIKELKQIGLKVESKDIEKSCKKTLAAITKDIQAIKEELENIIAQHKEMADNYRSVCSVPHVGKITALHLLVATNNFKRFDDAKQLASYCGIAPFEYRSGTSVRGKTKVSHMANKKLKKALHLCAVSSLRHHSEMSIYYERKVEEGKNKMSVINAIRNKLLQRVFACVREKRMYINKQAA

SEQ ID NO: 490808 - protein, 420 aa, unidentified
MVLWKGTRVLFVGGDWAEDHHDIEIVDEAGQWLVKCRLAEGLAGLSTLHALIAAQLPEPGRGTDQAQVLASVKVGIETDRGPWVAALVCAGYEVFAVNPMQVARYRERHSTSGAKSDAADAHLLAEIVWLDREHHRPVAGDSAQAEAIKLVARAHQTAIWDRSRAVLRLRAALRDFFPAALEVFDDLDAPDALQLLAYAPDPQRAAHLSKAKITAVLNRAHRRNAATEATEIHRTLRAPRLRQPPAVQAAYAALVTTTVRLITELNRQINELGEVVADHFGRHPDAEIYLSQPGLGAILAARILGEFGDDPHRFADTKARKNHAGSSPITKASGTKRIVLARYARNKRLSDAVHQWAFCSLRGSPGATAYYQALRSRNIGHQAALGQLANRLVAILHGCLNTGTTYDQHTAWSHHTPAAA

SEQ ID NO: 490809 - protein, 355 aa, unidentified
MTASYEYHIGVDYHKSYSHLVVQDSSGKTLRSGRVKNDRQSLGGFLERYRENSHAVVEATRNWMVIYDWLDDICDDVVLAHPLKVKAIADAKIKTDKIDATVLAHLLRADLVPEAWAPSDKARELRVALRERMFYVRLRTMTKNRIVTVFDRYPEQTAQLKKLGDLFGKAGRIRLAQVNVSEIDRIQIDRGLAFIGDIDIRIKQSEATLRAMTKASGNVRLLKTIPGIGEFFARLIDAEINDISRFRNAKKLAAYAGLVPSTYSSGGKTFHGKIIKQGNKWLRWAFVEAVTPAIASDAQLRAQYEHLKIRGTNKARVAIARKLLTIAFQILRDQRAYEPRGTNTTEGASTISRLS

SEQ ID NO: 490810 - protein, 342 aa, unidentified
MYYIGLDVHKKTISYCVKDESGRICQEGKVGATRWELDIWIKTLPQPWTVAMEATIFTGWIYDHLKPHAAAAKVAHPLMLRAIATAKKKNDSIDAGKIADCLRCDFLPECYMAATEIRERRRTLRYRHLLVRQMVQMKNRVSGLLMETGVSHNKQRLHKVGYFPELLANADAVSASIRPLLQLSRESITRLQRTEGAIIRSLQRDPLLAERVRRLQTIPAVGKVTALSWALEMGDISRFRSIRQAISYCGLCGDEKRSADKVARTPISKQRNKHIQRVLVEAAKLAPRRNPDLALVYENARQKGNANCATLAVARKLVAYLMVVDREQRDFEPVRGLAGIAA

SEQ ID NO: 490811 - protein, 297 aa, unidentified
MSQSSTLFIGMDVHKDSIAVADVAQDHGAEVMYLGAIGPRQCDSDQLIRKMPSNAKPLIFVYEAGPWGYWLSRYLSKTGYDCGVVAPSLIPQKPGARVKTDRRDAVQLARLARSGDLTAVYVPKVEDEAIRDRPRAREDAISDLKDAKCRLKALLLRQDSRSVGRATWGPAHLRWLSEVGCPPPAQPIVCQEDVRAVHEQTERLQRLEQERQEHVKAWRLNPAVEALQAVRGVQCTVAVTLVSESGDLTRVDHPRELMNFLGLIPAEYSSGEQRRQGAITNAGTTHARRALVEGAWA

SEQ ID NO: 490812 - protein, 327 aa, unidentified
MEREYIGIDLHKAFFQACAITSTAERRWEQRWPTSDAGIAALLTRCGPHSAVAVEASSPTWAFVDRLVGQVGAVHVVDPRKTRIKAGYAAKTDRLDARRLADALRRDSVVGIYYPPPAIRDLRELGRYRCHLARLQASLKQRIHALLLRHGVQTPRALFTLRGARWLDALVLAGWAGQELRGLRQVLTDVRTQLVPVLAAMRTVAATDPVARALDQRPGFGPVFSVTLRAEIGTIARFPDGPHLASYAGLVPRVDRSADRHWTGRITKTGSPWLRWVLVEAALHQFRRQDEFGRWARRLAIKAGILKTRVAVARALCTEIFQVWPRP

SEQ ID NO: 490813 - protein, 402 aa, unidentified
MNAVGIDVSKSKSVVAIMRPFGEIVSTPFEIKHTASDIHSLIELINSVEGESRIVMEHTGRYYEVLAHQLLEANLFVSAINPKLIKDFDNDSLRKVKSDKADAVKIARYALDKWQNLKQYNVMNELRNQLKTMNRQFGFYMKHKTAMKNNLIGILDQTYPGVNTYFDSPARSDGSQKWVDFASTYWHVDCVRKMSLNAFIDHYQNWCKRKKYNFSQSKAEEIYGKAKELVPVLPKDAITKLIIKQAVDQLNSASTTVESLRTLMNETASKLPEYPVVMAMKGVGTSLGSQLMAEIGDVSRFTHKSAITAFAGVDPGVNESGSYEQKSVPTSKRGSSDLRKTLFQVMDVLIKTHPQDDPVYQFLDKKRAQGKPYYVYMTAGANKFLRIYYGRVKEYLASLPES

SEQ ID NO: 490814 - protein, 320 aa, unidentified
MMAQNDLVVVGIDVAKDKVDACIRALGLRQTFPSTIQGHRKLVAWLRKHQVNKAVMEASGGYERAWAKVLREAGLEVRIVDPKRVRSFALSAGRLAKNDTIDAEMIAWFAETFSDAPGQKHDAAHEELQALVKARLSLIDLRMRLVSQSEHAAPGLVQRAHAHILKSLASAIAKLEAAICAKIKSLPDFAERAEIIESVPGFAETSSANLVAGMPELGQVSDEIAAALIGVAPYDDDSGKRRGERHIKGGRRWVRNAIYMPCVGAATLNNPVLKAYYQRLIAKGKEPKVAIIACMRKLIVILNTMIARRQKWDPSRYALS

SEQ ID NO: 490815 - protein, 394 aa, unidentified
MCQQYKTEASMLKHNILFIGLDTHKTFTEVAYIEDQRGAKSTHVGKILSNKAAFKKLARQLQSKYPDATLHFVYEAGPCGYWIYRLLTSLHHCCYVIAPSLIPKKPGERIKTDKRDALKLAKLLKSEELTPIYVPEPEDEAVRDLSRSRETAMKDLKDAKYQLKALLLRNNINSKVKDNWSLQHLRWLAELVLPHPCQQIVLQEAVSTITERLKRLKRLDNELTHQVKHWRYYPVVKAVQALRGVRLLVATGVIAELGDLTRFDHPRKLMSYLGLVPSEHSSGGKRHLGAITKCGNSRARRLLVEGAHAYKHNANISKEMQLRQEGISKEIIEMAWQAQLRLCRRYNRLMHKGKHRNVVVTAIAREMIAYIWAISREVVLPKVDVKLRLARMPA

SEQ ID NO: 490816 - protein, 408 aa, unidentified
MPHHTIVLETEWGLAAKLQADWNTLPIRLSAKRIKTEVIMTFFIGVDLHKTQFTVHVRTEEKVESLEQIKQYPTTASGYAEFLTRIETYKATGAAVKIGVESTGNTRFFKNQVEKAGAEVTVINTLKFKVINESTKKTDKHDASTISEFLSKDMLPESYLCGKETENIRRLLKSRERLVRSVVGQKNEVHALLVSMGLPDELRSLQSKKGRRKVLDTLESNNDYVLEAQSVKLMFQIIDRMTESVKVIEKQLAELTKDDEMVNRLMTIRGCGKITAWTIRAYTEDIGRFASAKKYAAFCGLVPWVQDSNATIHHGKITKRGPQELRTCFVQLVLGIRRCKDTSEWRMMQRYEYMKKNKGSGKSIVAAARKMAEIVWAMLSEKQDFNADKMKGIYKPMTFADEALSAMN

SEQ ID NO: 490817 - protein, 390 aa, unidentified
MIYVGIDVAKDKHDCCILDDEGRKMYPIFTISNDKVGFDELFSRIEEVTSDKTEIKVGLEATGHYSNNLLASLVDKGFPTVVINPLHTNLYRKGLSLRKTKTDKVDASAIAMMLMADRTLKPYSETSYHNEELKSLTRYRFDKVHERSKLKAALARLVNILFPELEKIVPTLHQNSVYTLLEELPGADYIAGCHLTHLKKILEDSSRGHYSRDKAIEIRNAAIDSIGTPMEAKSMELRHTIHLIWILSDEIEEIEASIKAIMDEMQSPIMTIPGISYRMGAMILAEVGDFERFDNADKILAYAGLSPSTYQSGQLDSSHSHMEKRGSRYLRYALFNATKFVCKWDESFGIYLGRKISEGKHYNVAISHAAKKLIRTIYRMELTGQAYSPS

SEQ ID NO: 490818 - protein, 438 aa, unidentified
MRRRAYGAARVNDVDVAKVVHGPDGLAVVVGVDVGKYKLLAVCRWADGRFERPWRVDNPGEIVELVALLKRLGAGRKLLVALESSGTYGDAVRQALQDAEIEVHRVSTKASHDYAEVFDGVPSQHDGKDAAVVAELAALGKSTPWPYRPTEVWEQELAYWVDWMVGHRQVLNLWQGRLEGLLGRHWPEATRVLKLSSVTLLRVLWHYGSPQAVAADRAAAAQLARWGGRFLDTEKIKRLLAEARVSRGVRPGEWETRRIQDFAQQALQARAQGQRGQRRLRVLARGHTVLEAQGKVVGVPTACVLWVNTGDPRKFYAAAAYRKAIGLNLVERSSGTYQGQLHISKRGSARSRQWLYFAVLRLVQRAGVRSWYQAKKARDPDAAKSVLVAVMRKLALALYHVAVHDKEFDPRRLFARIMCSHTKTAPAFSPEKRVSVEG

SEQ ID NO: 490819 - protein, 354 aa, unidentified
MSQKLNSEIAVIGIDIGKNSFHLVGQDRRGALVLRQKWSRGQVEARLANLPPCLIGMEACVGAHHLSRKLQGLGHDARLMPAKYVRPYCKGEKNDYRDAEAIAEAVQRPTMKFVATKTAEQLDLQALHRVRERLVSQRTGIINQIRAFLLERGIAVRQGLHFLRAELPGILAKRTDVLSPRMLRVIEDLAGDWRRLDERIESLSAEITQLVERDPACQRLMTVPGIGPLTSSAMVAAIGTGDVFSKGRDFGAWLGLVPKQMSTGDRTILGSISRRGNRYLRKLFVQAAWVVLVKVKPQQWERYGLKSWIEAAKKRLHRNVLAIALANKLARIAWAVLHNGRAFECVKTNAPRPA

SEQ ID NO: 490820 - protein, 380 aa, unidentified
MPDVSSTAPAQVRMWVAIDQHKLSLVAAMLPASGGQPEVVRVENTERAIRRFLQRLGGAEGLAVAYEAGPGGYELHRLLSSMGVACDVIAPSLIPVRAGDRVKTDRRDAKKLVRLFRAGELAFVQPPSPMQEGLRDLVRCRDDLRCARTAARHRVAKALMRHGHVYRQGKAWTLRHRAWVESQRLADPLAQAALEHMLTHLGGLDVQIAALDQQLEQIATREPWADPVAWLCSFRGVSTHTALGLLSEIGDFRRFAHPRELMSYLGLTPSEYSSGQQQHRGHITKTGNRHARRLLVEAAWHYRHRPRQSTRAARLQEHVPTEVTIRAWQAQIRLHHRHRVLAEHGKRSTVANVAVARELTGFIWAAMTKAPLREQEAAAA

SEQ ID NO: 490821 - protein, 342 aa, unidentified
MNHAGVAFDPCGIEVSRQVLVVALRLEDHDQPLREFPNTPAGHQALLRYLARSGRSVRVAMESTGLYGLDLALTLHQAGVAVMVANPRAVRHFAQALLQRSKNDRLDAQVQREYAARMPFEPWRPPSAAALRLVAVARRLEALTEMMTQEKNRLHAASLSQALPPVIRLDLQRSIRSQQRALERLRQAALEWVLSDPQLARRYELLLSIPGFGITSALHTLAELALLPADLDVRQWVAYAGMDPREYTSGTSVHKKARISKAGNHHLRRALYMPALVAVQHQANLRAFYEHLLARGKTKLQALVATMRKLLHAIYGMFKHNQLFNGSKVYELADAPLPQEVA

SEQ ID NO: 490822 - protein, 466 aa, unidentified
MTPHKDYCLDPPPPATPTLPQSPVLSDALQVCHPHAAGIDIGEAEHWVAVPPGCDPQPVRSFGTFTADLDALADWLIDCGVTTVAMESTGVYWIPLFELLEARGVQVLLIDPRQAKRAPGRPKTDRLDCKWLQRLHTYGLLAGAFRPADQVCVLRGYLRHRQMLLTYAAHHIQHMQKALEQMNLKLTQVVSDITGVTGMAILKAIVAGERDPQHLAKLRNPHCHHAEDDIAKALQGTWRAEHLFALRQAVELYEFYHQQITQCDQQIKAHLETFADQSAGQPLPPKARRHRKTNEPRFDARTPLYRMAGVDLTTIEGIEEGTALVILSEIGTDMHRWPSVKHFCSWLGLCPQHKISGGKVLSRRVRPGAHRVTVALRLAARSLHHSQSALGAFLRRMKARLGTPKAITATAHKLARLVYHLLKHGSAYVQQGLEAYEAQYRERKVKTMAKQAKALGYTLVPLAAQG

SEQ ID NO: 490823 - protein, 362 aa, unidentified
MMLVVNKTSKTKERRAVNNHNSKGNITTLGIDLAKNSFQLHGVNEKGDRMLRKKLTRRQLTAFVANLEPCLIGLEACGGAHHWVRVFSQFGHTVKMIAPQFVKPYVKSNKNDAVDAEAICEAVQRPSMRFVPSKSLEQQDIQSVHRIRSLLVGRRTAQANQIRGLLMEYGVVIPQGIHQLRRAIPEILEDAENTLTAYFRELLQELYEEIIHFDQRIETIELKLKRVSEQNKDCQRLLTIPGIGLLTATALIAAIGDISVFKNGRELAAWIGLVPRQHSTGGKPTLLGISKRGDSYLRTLLIHGGRSVVRVASRHQDKRNQWITEIKQRRGENISNVAVANKNARVVWALLTNKQTNKIIMS

SEQ ID NO: 490824 - protein, 341 aa, unidentified
MDIITVGLDLAKNVFQVHGVNADGDVIVRRRLRRAQVGTYFAGLNPCLVGMEACATSHFWARELIALGHEVKIIPPSYVKPYVRRGKNDATDAEAICEAVTRPNMRFVPIKTEEQQAALMLHKARELLVRQQTMLVNALRAHMAELGMVAPLGRGKVKDIIAVIEDSEDESIPDLAKAALKPLATQLRANEDATAALDAEIKAWHKSSAASQRLATIPGIGFLTASAIAATVPDPSFFKSGREFSAWLGLVPRQNSSGGKERLGRISKQGNPYIRRLLVIGATSMLRYARAKTAPGADWVNGLLERRPPRLVTVAMANKTARIAWALLTREETYRAPAAVV

SEQ ID NO: 490825 - protein, 314 aa, unidentified
MNLSTIGVDVSKDWLDAHRLADGAARRFANDKTGRKALIKWIVTTPPKCIVFEPTGPYHRQLERALDAAGLPIAKVNPRQARRFAEAAGKLVKTDRVDAAMLARMGELLELQPRPCVSETIVELKELHLARAALIKDRTAARNRAKAITLALLERQNKKRLAEIEVKIQEIDVAIEKLILDDAPLARRFEILLSIPGVSKITAFALLIEMPELGGLDGKQAASLAGLAPVERQSGSWKGHAYIRGGRAFLRQALYMPALVACRFNTDSRALYQRLVKAGKPAKVAITAVMRKLVVLANALLREDRSWAENAPCA

SEQ ID NO: 490826 - protein, 322 aa, unidentified
MSQPGSLCVDIDVSKAILDIAASSAIEQFSVGNDIDGFDAIIAELRMYAIALVLMKATGGLETAIVCALQAEGFELAVVNPRQARDFARAMGYLAKTDSIDARVLSQMAEVLNRHPERERFIRALPDTECQVLTAMVVRRRQLITMLVAERNRLHPAHPLNRKSINIIIKALEDELARLDADMNSHIHSHFKELAKRLSSIKGVGTMTAAALLAEVPEQGNLSRREISALVGMVPVNRDSGTMRGRRTIFGGRAGVRTALYMAALVATRFNPVIKVFYMRLLAAGKPKKVALVTCIRKLLTILNAMLRKNEEWNESYHHVAP

SEQ ID NO: 490827 - protein, 368 aa, unidentified
MSADRPNLNTPIQEVKEATFMVVVGADVHKRKHTFVAVDEVGRKLGEKTVKATTAGHTLAVLWAREQFGTALIWGIEDCRNMSARLERDLLSAGQQVVRVPTKLMHAVRKSARTRGKSDPIDAQAVARAVLREPDLPVASHDEISRELKLLTDRRDVLVAHRTSTISRLRWHVHELDPEREPAPRALRAIKHQQALAAWLDTQPGVVAEMARAELADIIRLTTEIDTLEKRLGERVRDVAPTLLDIPGCAELTAAKIVGEAAAVDRFKSEAAFACHAGIAPIPVWSGNTEGQVRLSRSGNRQINTAIHRIALTQIRITSSETHAYYQRLIANGKTKAAARRCIKRRISRNVYRRLLKDYQARTQPSAA

SEQ ID NO: 490828 - protein, 374 aa, unidentified
MPTTILTQATAARNLPLAGIDVGSKHLDLHIIVGEKHMPRRFQNSKEGRGKLIRFVKQHQVTRIVMEATGAYHRAIARSLEASGIHADVRNPAQIKHFALAKGWIEKNDQIDAKHIAIIASMIDPGPRYIHCTTRERLRALVTLREQFVGMRVALKNQFHAADVSSGEQPDEFVEAASMATLNHIKDQIKCIEAEILALIESDPELLAKYELMLSVQGVGKVTAATLLAEFPELETANRKQLAKLAGLAPIISQSGTSKGKASIKGGRSSIRRILYCSAKVAGRHQPTLKAFMEKRIAAGHSRKQATVACAHKLLRMLSAILKTKTPCRESAATAAATRSKNAAAPGSAAARRSAGASAVAPAAASPALAASAT

SEQ ID NO: 490829 - protein, 384 aa, unidentified
MSVPSHAAVSTQLNAIFVSLELSRSTWLVTSLSPGRGERISRHQVKGGDVPALMERFAQLQAKARERTGEQYPLVVIQEAGLDGFWIHRCLVREGIESHVVDAASIAASRRSRRAKTDKLDGEALVRTLLAYKRGEPRVCAMVTVPSIEDEDRRRICRERRSLVVERIRHINRVKGLLFAQGVGDYEPLRTNRRARLEELVTGDGRPLPRHVKREIERELDRLELVMRQIKEVERERDEMLETVADDATEPTSARLLQLRGIGPEFAGVLHAEAFFRSFSNRRQVACYAGLAPSPWQSGSMDREQGVSKAGNKRLRVTMIQVAWLWLRHQPESELTRWYAARVQANGGRVRRVMIVALARKLLIALWQFSSAGVVPQGAMLKAA

SEQ ID NO: 490830 - protein, 344 aa, unidentified
MHIASIGIDLGKTTFHLVALGERNKVLVRKKFSRAQLLAYTANLPPSLIGLEACAGAHFMGAALREQGHEVRLIPAQFVKPYRKSNKNDFIDAESIAEAVTKENMRFVQIKTQEQLDVQAMHRVRDRLVQRRTALINEIRGFLLERGITFAAQPIYLRKNLPTVIEDAEQNLSPLLRWLLARLWQEWKQTEIDIKAITDEIERISNHDARCRRLRQIPGFGPLVSTATVAAIGNGSAFRRGRDFAAWVGVVPRQYSTGGKQRLYGISKRGNVYLRRMLIHGARAVLLRVKYDTGGFGQWVHRLAQRAPRNKVVVAIANKLARIAWAVLSSGKDYQHQPLQITAA

SEQ ID NO: 490831 - protein, 340 aa, unidentified
MSNISTIGLDIAKSVFQIHGVDTAGEVVVRRKLTRGRVLAFFESLPRCLVGIEACSSSHYWARELIALGHDVRLLPAQYVKPYLKRQKNDAADAEAICEAVTRPTMRFVPVKSPEQQSVMMLHRVRLMLNRQRTQISNALRSHLSEFGVVAPIGRNGIEQLLMVVNDENDSRIPADARLCLRMLEAQLKVVKEQILENDRRVRASARETELGRRLMEVPGVGPLLASAFVATVADPHAFKSGRCLAAWIGLVPKQNSSGGKERLGSISKAGNRYLRQLLVVGSMAVIRYAERNGTRRPWLVQLMARRTTKVAAVALANKTARMVWALMTNGERYREPIIA

SEQ ID NO: 490832 - protein, 433 aa, unidentified
MQDVQDEPLFVQRVADLDIAKAEVEVTIRVPSDTRPGRRQQETRTFGTTRRALEDLGDWLRCWGVTTIGMEATGDYWKPVFFLLESRGLDCDLYNAAQVKALPGRPKTDRADSIWLAKITERGMISSSFVPPEPIRTLRTHTRYRRHLTQARTAEKQRVEKLLEDGHLKLSSVISDIHGVSGRDMLNALAAGQRDPKALAQLARGTMRGKIRRLEEALECSFFTDQHAAVLAMMLTTIDHYTTQIEQLTARIEVLAEPYLHQVGQLDEVDGIGVICAQDIIAEVGADMTVFPTASHLVSWAKWSPQVRQSAGKRKGSNSAGRGNPYLGAALGEAASSAGRTQSFLGVRYRRLTRRMPKKKALVATGNSMLTIIHALLSDPDARYTDLGADYYEQRMHARRQARNHVTSLERLGYKVTIQAITPDTGQPQLATR

SEQ ID NO: 490833 - protein, 334 aa, unidentified
MNYIGLDIHKKNTQACMKNEAGKVLLTGRFPSRPKDLNAFIEKVEEAGGPASFVIESTGFCIPVYDIIAGRGHQIKVAHPLKVKALTAGRAKTDKNDAEMLAELLRLNAIPESYIPPAELRELRELTRFRRSLVRNSTEIKNQIHAFLASRGIETPPEHRSPFSKKHQDWLRSLHLLQIDDLLDIYLLLLTKIEKVEGEIERSNQRKDDVELLKTIPGVGDVIANTLVAEICDIRRFSSPENLFSYAGMVSSIHQSGEKGWAGPITKQGNARIRHIVVEAAYSHVRCSKDSDLTRFFERKKSEKGTKKAIVAMARKLLGVIYQMLKKREVYHAH

SEQ ID NO: 490834 - protein, 328 aa, unidentified
MTASLSNYQCARGVNVGIDVAKDTLEVAVRPDNEQWSTKNRVEDFPALIEKLRQIAPERIILEATGGWEAPLANHLAAAGLPVVVINPRQARDFAKATGKLTKTDKVDARGLAHFGEAVKPQVRPLPDEQTQALAALLTRRRQLVEMLAAEKNRLVTVQHRPALKRDVEAHIKWLEKRIEHLDDDLGKQLEKSAVWRVNDQLLQSVPGVGDVTSRTLLSQLPELGALSDKEIAALVGVAPHASDSGQRKGQAHIRGGRANVRSVLYMASLTAIRCNPVIKAFYQRLLAKGKLKKVALTACMRKLLVILNSMIRKQKSWSPVQIPATQD

SEQ ID NO: 490835 - protein, 411 aa, unidentified
MDAVRQICAGLDVHQETVVACVLSGSLEHKPKSEIRTFGTTTRELLELQDWLEERECREVAMESTGVLWKPIWNVLESTCELTLANARQIQKMPGRKTDVQDAQWIAQLHRCGLVQPSMVAPQEIRELRDLTRYRRKLVQQTTSEKNRVHKILQDANIKLTTFMSDLFGVSGRALLDRLVDGEVLEEAEVRQLVKSQLKKKVKPLMDALNGKLLKHHREMIKYHLEHLKFLEDQIGRLEEKVQVLIQPYEEEVKLLDTIPGMDRTAAITLLAEITPNAAKHFSSDAKLASWVGVAPGNNESAGVKKKAKARKGNKYAKGILCQAAWANARSSNRIGDYFRRVRKRRGDQKAAVATAHLILRIAYAMLRDRVNYQEIESIVFQESTSKMVERLTKQLHQLGYNVDLKPTGTT

SEQ ID NO: 490836 - protein, 347 aa, unidentified
MRFVGIDIGKAKCRAAIMDPSGVMLEEFTFMNNHEGIECLAARLTLDDRVVMESTGSVWTNLYNHLDARHIPVALANPLKTKAIASARIKSDKVDARILAHLLRSNLVAESYVPPQHLREIRALVRHRAGIVKIRTMVKNEIHAIVDKHGLEHEFSDLFGKRGLEWLRSLELPPLDRLILDNHLTHLKSLNQQTERVDDEIHSKACEDPDVRLLLSMTGIDVYSALLIRSEIGSIDRFPNHKKLVSWAGLAPSLHQSGSVEYHGSITKQGSRTLRWIIVEAARVAVNHDAKMRSFHERVKHRRGDQKAIIAVANKMLKIIWFMLTRREPYESRNEKRYQKKLNSITA

SEQ ID NO: 490837 - protein, 364 aa, unidentified
MYDSTTTVAVGLDVHARSIRLAAVRADELLEERTLPYDHEAVERTLRRWPSVRCCYEAGPTGFGLYRHLIGRGIDCAVVAPGLVPQRPGDRIKTDPRDARKLARLLAGGLLEPIHVPSRELEAARDLVRAREDARLDRMRDRHRLSKFCLRHGRLLPTSSWTVVRRRWLGEQRFEYAAEQLTFDTYLHTVDLVDRRIEALERAIRETAEQGPWRALVAQLRCLRGVDTLTALALVSEIGDFDRFRNAEEFMAFVGLVPSEHSSGEKRRQGTITKVGNSHVRRLLVESAWHARRRPRVGYELARRQRGQDAAVVERAWRCQQRLYQRWQRMAGRGKPQQKVVVACARELAGFVWAIATEQPLKST

SEQ ID NO: 490838 - protein, 402 aa, unidentified
MPMLSIGIDVSKGKSTVCGMKPGGEIVYTPFEVQHTREGMSELVSLLRSSGEEVRAVLESTGSYHCPVVAALLENGIFVSVVNSLRMKRFCSQSIRKVKTDRIDAMQIALYGLAYWQELQPTKLPEDTYRELQLLARQYYQMTSLLIKAKVDFNAICDQVLPGMQELMNDHAGRHKLSDFVLRYHHTTHILEMGETRFRKDYCKWAEKKGYRNCERMAVLIFATAQNGIPVLPNAPSTQIVITEAIRVLHTVEASRDAILTQMQALAKTLPEYSLVREMPCIGDTLAPRLIAEIGDVRRFHSKRALIAYAGIDAPPYQSGKFCANNRHISKRGNRYLRKTGYEVMQSYVMHKPANDPIFTFIEKKRGEGKSGKLAMVAGLNKFLRVYYGKVTELYRSLSAIE

SEQ ID NO: 490839 - protein, 381 aa, unidentified
MEPETTCTSNNTPEKGKLYMAMELSQKEWKLGFSVGPGQAPRLRSVPGRDLGGLITEIQLARERFRLGKDVEVASCYEAGRDGFWLHRFLEKQGVRNLVVDSASIEVSRRFRRVKTDRMDTGRLLGMLMRFHLGERKVWSVVHVPSAKAEDERQLHREMMALKKERTRHINRIKGLLVSQGVVIEVDSGFMEAIETVRLWDGSLLPGRLRMRLEREHERMELLGTQIGQLEKEREEVIRNSQEDAIEQVRRLLQLKGIGVNSAWLYVMEFFAWRGFRNRREVGALAGLTPTPYQSGESSKESGISKAGNRQVRGMAIEIAWSWLRHQPDSALSCWYDRRFAKGSSRVRRIGIVALARKLLIELWKYLETGVVPEGAYLKST

SEQ ID NO: 490840 - protein, 359 aa, unidentified
MIVIGIDPHMKTHTAVAVDAASGRTLAEKTVSADARGHDELLSWARGLGRERCFAIEDCRHVSGRLERHLLPRGERLVRVPPKMMAGARCSARSYGKSDPIDAAAVARAALREPDLPEASLAGPEQDVRLLADHRDDLVGERQRIQKRLRWNLHDLELDLELPPRVLDRYVWLERIELALRSLPPSTRSRIALEQTRRCRELTAEIRALERETRALMRVLAPELLALPGCSALLSAQLVGQVAGASRFRSEAAFAMHSGTAPLPVSSGKSTRHRLNRTGNRRLNAVIHMIAITQARMHPPAIAFMERKKAEGMSPREARRCLKRHIARTVYKTMLHSEQARMGQVLQAEFGAEMLAVAV

SEQ ID NO: 490841 - protein, 355 aa, unidentified
MNDAKYIGMDVHTATISAAVRDSSGNLVMEATLETKAETILEFVHGLRGSLRVSFEEGTCASWLHDLLKPHVTEVLVCDSRKNALLRVGNKNDREDARKLSELLFLNKLHAVYHGETGIRTLKELARSYLTITRDLTRVMNRLKAIYRGWGIACAGQQVYAPRYRAEWLAKITEAGVRRRAEIYYQQFDVLAALRQEVRRELLAESRKHPAMRLLRQIPSIGPIRAALLIALMQTPHRFRTKRQLWAYCGLALRTYDSGEYRFVGGQLKRSKKAVTIRGLNKNHNHDLKNIFKGAATRAAATAGPFQKFYEARIASGLKPPMARLTLARKIAAITLLVWKKGVRFDAEQLKQQAA

SEQ ID NO: 490842 - protein, 351 aa, unidentified
MSTSTDHSRTDLPSDLPSDLPSDPGSPGSRMYAGIDVSKAKLDLARCGSGSDAVETFANDAAGVGRVVEVLAALGPALSVVVVESTGGLERPLVEALLDAGLPVALVQPGRVRYFAKGLGILAKTDRIDALVLRRFGELAAPRLLERRSKNQAELRDLVACRRQLVQTRAQQYNRRSSTFSKAALRSIDAVVGALDRQVESLDRQIRRLLEADDDFKHLDGLLRGVPGVGPALSATIAAELRELGRVDRQRACALAGVAPFNDDSGAVKGKRSIRGGRTALRCVLYMAALSAMRSNPVIRAFAARLKAGGKAGKVVVTACMRKLLTLINAMLRDGLTWDQLDIVKKLATNG

SEQ ID NO: 490843 - protein, 363 aa, unidentified
MFYAGIDAHVKSSTICVVDRKGRKVHQCEVLTSAEGFQAGVDKWARRGLTAAVESSGITPWVCELLKAMKVKVVVVNANRVRLIAESRKKADRVDAETLAELLRLGGLPEVHQASAEARRLRTELGVRRQLVGQRTALANQVRGLLRAWGVNLPARFLGRQGSWKQLTGKDIPEYVRALLRTLEGVYEQLTQAIRELGCRLESAAGEDDRVERLRSIPGVGPLSALTLVSAVDDVRRFSRAKQLTSYCGIVPTVRSSGEREQQGSITRQGRSEVRAIWIQAAHSLAQSHRPAAPTPAALVWAGGTAPRLSHGHRGAGAEDAEFGVLSLAGWNALRTAAAETGLSLNQKTIAANRGDRSKQEKK

SEQ ID NO: 490844 - protein, 341 aa, unidentified
MTIVAEKYDYVIGIDTHARTHTYAIINTHTGTREACQVFPTSPASMKRALAWITKRTSGTLLAAVEGTRSYGATITHALVDAGIAVVEVKPPRKQARAGVGKTDEIDATAAAMSILPQDIERLLTPRAEGTRSALNVLVAARERIDAERTRNRNALNALVREIYLGVDARKPLTDKQVKEVSAWRERPTDSVAQRFARAEAIRLATAVLDADKLLAQNKAQMAPGLIAEFGYGPVTVAWILIAYSHTGRVHSEAAFASLAGVAPLQASSGNTVRHRLNRHGDRMLNQAVDVIAKVRMRTDPTTKKYVQKRTAEGLSYREIKRILKRYILRKVFRQLQVLMP

SEQ ID NO: 490845 - protein, 341 aa, unidentified
MKVSTLGIDLAKNVFQLHGVDHEGHTILRKKLTRAKFVQFVIQLEPCLIGMEACSSSHYFARLFTRYGHEVKLIPPQYVKPYVKTNKTDAADAEAICEAVTRPNMRFVQIKTEEQQAVLTLHTERGILIRERIACANSLRATLAEFGITIAAGQSHLTRELPAILEDGENGLSPFVRTSIYRQSKHIRELEEQVKQVEEALASWYRTQEACQRMAKIPGVGMLTATYVVAAVGNARQFSTAKQFASWLGLTPKEHSSGGKQQLGGISKRGDGYFRYLLVHGARALTAWVNRNGAVEENSWLQGLLERKHYNVAVVAMAAKTARIMWSMLSHNTEYQPRQLA

SEQ ID NO: 490846 - protein, 406 aa, unidentified
MPQSVDKMEGPVVTTIVGYAFESFSCFENTEPHWEYWSMSKLRFIGLDVHKDTIVMSVAVAGTDEANLVGSFPNDVNRILKQLKKMSSDRSLLRVCYEAGPTGFGLCRRLNQAGIDCIVVAPSLVPRQAGLRVKTDRRDSRKLAHFLRSGDLTEVWVPDEQTEALRDLERSRDDAKNAERSVRHQLSKFLLRNDRKYSLGREWTQKHMAWVRTQQFDDPCRQCVLDEYIKAVEDVTERVKGLMKYIETYVQTHSLQPLVKALMSFRGIQLLSATVIAAEIGDLRRFKTARQFMAFLGLVPSERSSGKSIRRGSVTKTGNAHVRRILVEAAQHYRHSPRMSAALRQRQEGVSEDVVKISWEAQQRLCRRLKHFIDNGKTRNKAIVAMARELAGFIWSIGQVSQLLKS

SEQ ID NO: 490847 - protein, 407 aa, unidentified
MDVLHPKCAGLDVHQQTVVACARTGAGKAVTYDVRTFGTTTAEVLALSDWLTAHGCTHVAMESSGVYWKPVWHVLEGHFELVLANARHIRNIPGRKSDVNDAPWIADLLAHGLIRGSFVPPEPIQELRDLTRTRQQLVREIAQHTLRIQKTLENANINLTAVLADVLGSSGRAILRALARGERDPERLAELASDRVKASRAELVAALHGRVPPHHRFMLTLHLTQIEALEAAVREVEARLGDALAPFRAALDRLITMPGVSETVARVIVAEIGFDMTRFPSAGHLVSWAGLCPRLHESAGKRLSNRTRSSNPWLKTTLVQAAWAAARKKDSYCRAQFLRIKSRRGPKKAVLAVAASMLTAAYYMLKHGVDYRDLGADHFDRRDKAKLAKRLIARLHDLGLTVEVRAA

SEQ ID NO: 490848 - protein, 416 aa, unidentified
MNAAGIDVSSRKSTVAVLRPFGEVVRVPFEVNHSAEGLASLVQQLKGIEGETRVVMEHTGRYYEAVANVLHEAGFFVSAVNPLLIKEYGGNSLRRVKTDKADAVKIARYALDNWADLRDYTPMDRIRYDLKTLNRQFHLASKQKTATSNNLIALLEQSFPGVRKCFDSPVRSDGTQKWVDFSHDFWHADCVRKHSLAAFTERYRKWCKRHGYHFRQGTAQQVYDLAKSVVVLVPKSDLTKVLVQEAANQLTTISKSVETYRAEMDHLASQLPEYPVVMGMYGVGDSLGPQLLAEIGDVRRFERKQSLVAFAGVDPMPNQSGEKNVRSNKSSKRGSPYLRKALFNVMICYLQKAPADEPVFQFLDRKRAEGKPYYVYMTAGANKFLRHYYGKVMEYLSTLEDLPPVDMDSTGLPKHP

SEQ ID NO: 490849 - protein, 406 aa, unidentified
MKRFFAGLDWAAQTHALCVIDAHGAVRQRLEVAHSAAGLHELLGKLRGVARDAAQLAVAIERPSGLLVDTLVEAGYPVVPIHPNVVKATRPRYRSHGAKSDASDAYLLADLLRTDGARFEPLKPQSDAIRALRALVRGRDDLVATRLQLANQLRSLLESFWPGAAALFADIDSPIALAFIERYPTPQAASHLGEKRLTAFLAQRRYSGRRTPAELLERLRAAPAGHSAELELEARGELVRALVRTLEPLVAQITELSARIEHTVTELPDGHIVMSLPRAGRLCAAQILAELGDVRERYPTDDQLASEAGVCPVTYASGKHRSVTFRWACNHRLRRAITCLADNSRHACPWAASRYAAARARGCDHPHAVRILARAWVRVLWRLWTDRSTYDPAQHRAALAFNTARG

SEQ ID NO: 490850 - protein, 387 aa, unidentified
MSATASGVAQTAIDVTLAAIFVSLELSRDRWMITSLSPGKGEKMSKHSVDSCDVTGLLSHFKTLRAKAQARTGKSVPIVVIYEAGLDGFWIHRVLEREGIESHVVDAASVLTSRRRRRAKTDRIDGEALLRTLLAYKRGEPRVCAMVRPPSPEDEDRRRLCRERKTLVSERVAHVNRVKGLLFAQGISDYEPCRRDRRERLEQLATGDGRPLAAHLKAQLSRELDRLELTLQQLKAVEAERDALLAPKGEAAPAPVAALAGLRGIGPEFAAVLWLECFFRSFGNRRQVAAYAGLAPTPWQSGSVRHEQGVAQSGNPTLRSTMVQLAWLWLRHQPTSALSRWFRERMKQNSGRGKKATIVALARKLLVALWKFVSSGVVIEGAVMKAA

SEQ ID NO: 490851 - protein, 356 aa, unidentified
MQLQDTQTSPKLFIGLDIHKKSWTVSIQTDLFFHKTYSMPSTAEDLYQYVERTFPNHDINLVYEAGCCGFTAARYFLNLGWNVLVVNPADVKTGDKERYQKTDSLDSKNLSNQLKSGVLKGIHIPTEAEEQFTTLARHRTQVTKKLRQTKAHIKSMLLFHGIKIPDEYDNSNWSLDFIAWLENLKFSTPCGDLALQGKIRMFKFIKSEYLEIANQMRSYCRKSNKKDYNLLRSIPGIGGYLASVILAECGDLRRFNNESQFASYIGLIPGIYNSGGSEKCLGITPRSRSQLRSYLVEAAWIAIRKDTEMQNYYRKHHGKNVKSIIIKVAHKMARRILSVIKTETPYQINRNLIPTQ

SEQ ID NO: 490852 - protein, 353 aa, unidentified
MRTYYVGMDVHQASIVIAVLNGAGKVVMESIIETGVETVRGFIKQLRGKVYVTFEEGTQATWLYDVLRPLVTEVVVCDPRHNKLLQTGHKSDRVDARRLAELLRNGSLQAVYHGAKGARQLKELVRNYDCLVGDTTRVMNRLKAIFRGRAIACAGHDVYRKDRRAQWLKKLSEPGAQQRASFLYEQLEALQRLRHEAKRLMLKEAHRHSAYQLLLSVPLLGPLSVAQLIAVVETPFRFRSKRQFWTYVGLAVVTRTSAEYVLVDGVVRRSARPVATRGLNRNHNHLLKRVFKNAASSACVSGPFKAAYDARVAQGLEASLARLTIARKLAATTLAIWKRGEQFAPERMNQQVA

SEQ ID NO: 490853 - protein, 352 aa, unidentified
MNEFTTVAADLAKELIVVCGADASGRTMFFKQFSFRGFASWAANLPPCTIAMEACSSAHFWARTLERLGHRPKLLSPDLVTPFRKSKGAKNDRNDAQAILIAALQPDMRFVSVKSIEQQSILACHRMREGWKVERTALINRVRGLLAEFGVWLGRSPQNLARSLPRLIQDEELPGRVRALLVQAQNQLVGLEALMEQCGRDIGEHTRHSEAAQRLCTLNGIGPITASAIVATVGNARDFRNGRQMAAWAGLVPKQSSSGGKDRLGKITKRGDSYLRGLLTQGARSTLNAALARAPDKRSHLEHWVVALRGRVGYHKTLVAIANKHARICWAMLAREKAYDPNSWQQHARAAA

SEQ ID NO: 490854 - protein, 337 aa, unidentified
MDNETIEFEQVVARGCGLDVHKETVVATVSGTGIKKETRTFSTFTRSLKELKEWILSLGITHVAMESTGIYWKPVFNILEGSGLTILIVNARHIKYVPGHKTDKKDSEWISRLLLAGLLKGSFVPPKEIRQLRDMTRYRRKLQGAITAEKNRMIKMLEDSNMKLSTVLSKVHGVSGTRIIDALLEGQTDPVLLASLCHGKVKAEKEEIILALEGKLTEHHKFMMGIIRRDIQQTEALINELDVEIEKQLLPYAQEVALLSEIPGVGHQTAGDLISEIGVDMEVFATDKHISSWAGVSPGNNESAGKKKVGEQTTGTNKFDLSSANRHGRHLEPREAF

SEQ ID NO: 490855 - protein, 350 aa, unidentified
MRRPKDKVIAGIDLHGNNLVIGVINQDGKRLMHRKLDCELKQVEEFLRPLKAQLESMAVESTFNWYWLVDGLRAHGYPIDLANPAQIEQYSGLKHADDKHDAFHLAELQRLDILPKAHIYDAELRPVRDLLRRRTNLVQQRTALFLSFKSLYARTTGQVMPLSQLKSMEPKEAKELYEHPANQLIARVQLEQIEALDKGISRIEQAVLACARELPLYEKLLTLPGVGKILAMTITMEVGDIGRFKTDGDFASYCRTVDSRRLSNGKQKGANNQKCGNKYLAWAFVEAANFARRSDEDCRRWYDRKKARTSTVLATKALACKLAKAAWHVMAKGTDYDARRMFPESAQKRK

SEQ ID NO: 490856 - protein, 407 aa, unidentified
MPLFVGIDVSSKNLDACLMDGMGETLATQTVTNNLPGASELRDAILQHAEADDTIQIAMEATSVYSWHPAMFFHEDPELKQRRTKVFTLNPKLVRNFKKAYAEMDKTDPKDAWVIADRLRFGRLPKSVIQSEQYLALQRLTRMRYHLIQSLTREQQVFLNHLFFKFSAFNLEVDTPVFGHAITEFLLEAYSLDEIAQMPLEDLAMYLQTKGHGRFSDPKDLAASIQKAARSSYRLSKCVEDSIDLVLGSSIEIIRHLKRQIKDLDKAIARVLDGIPNTLQTIPGIGPVSCAGILAEIGDIERFDDQAAIAKFAGLFWPRHQSGDFEADDKMLARTGNRYLRYYLVEAANLVRRHEPEYRAFYQKKYREVHKHSHKRALVLTARKLVRLIDALLRNDQIYAPKKKVTR

SEQ ID NO: 490857 - protein, 345 aa, unidentified
MQSMYYIGLDVHKKKISYCVKDGSGIVHAEGAIPATRWDLDRWMKMLPQPWTAAMEATIFTGWIYDHLKPHAAALKVAHPLMLRAIAAAKKKNDRIDANKIADCLRCDFLPQCYMASTKIRERRRTLRYRNLLVHQVVQLKNKISGLLMEAGVSYNKQKLHKVGYFKELLASNPDINEGLRPLLRLCRETLVRLQKTESALVRSLQRDALLAERVERLMTIPAVGPITALTWVLEVADVKRFSSIKKAISYCGLCGAEKSSAETIKRTPISKQRNKHLQSVLVEAAKMAPRFSPELALIYDREKQKGNANRATLAVARKLVAYLVAIDRSQRDFLVVEKENGAAA

SEQ ID NO: 490858 - protein, 355 aa, unidentified
MSRDIKYIGMDVHKEATVIAVLNANGNLVMESIVETKAGSLLQFIHGLRGELHVTWEEGTWAAWLYDLLKPQVQVLVCDPRRNALLKEGNKSDKVDARKLADLLRTGMLRPVYHGENGLRTLRELGRSYQTISQDLNRVMNRLKALYRGWGIACAGTQVYAPRYREEWLQKIEHAGVRRRAELLYQQLDGLQALRRTLRPELLAESRKHKATKLLRQIPCIGPIRAARLLALMQTPHRFRSKRHLWTYCGLGIETRDSAQYRFVRGQLQRAKKPQQIRGLNRNHNHEMKEIFKGAATRASCGVGPLRDFYVALLDKGMKAEMARLTLARKIAAIALTLWKKEERFDAEQLKTQAA

SEQ ID NO: 490859 - protein, 454 aa, unidentified
MARKRKGKKTQPTKMLQQIEPDAAGIDVGATAIYIAIPDDNRAPETVRCYDTFTQDLHDAAKWLQSCNIKSVAMESTGVYWIPIFQILEAYGFEVILVNARHVKNVPGRKTDVQDCQWLQYLHSVGLLKGSYRPAQDVCAIRSLLRHRDSMIKISATHVQHIHKALTQMNLQIHNVIRHITGLTGLAILDAILAGERDPKKLAALKHGRIKASNDVIEKSLMGDYLPEHLFTLKQALQSYRHYQDMIKACDQEIEAYLTDFESRIDPEDPPPAPRIKKIKPTGNEPDFDLRAHLYRVFGTDLTQVDGISVLTAQALFAEIGPDLSRFPSSRHFCSWLGLCPNNKISGGRILSSKTKPGSNRAAQALRLAAHALWRSQSYLGHFYRKIRARHGTPKAITATAHKLARIVFHLITTGEKYNESVFEKEEIVQKKRLLQRMRSQAKSMGFQLVPCES

SEQ ID NO: 490860 - protein, 386 aa, unidentified
MPQLNDLSRSLVTLEQDATLIAVIEMGQSSWLVAGIVPGVERQPLKKLAVDESALLKLLHRWREEAEQAGHKIKRIAVAFEAGRDGFWLARWLRARDIEVHVIHASSVAVSREHRRAKTDRLDTELLKRVFLGWLRGERHHCKMVAIPTIKDEDGKRPNRERESLVGEQSRIINRIKATLVRLGIRGFNPKLKKAAERLEGLRTPEGEPIPPNTLSELHRDMERRRLVRDQIRQIESARLDHLEHEPGEAAHAMVRLLARVMGIGIETADMLVHEVLSRNLRDRRAVARYAGLTGSPDESGTKRREKGLARSGNPRVRRGMIQLAWRFLMFQKDSALAQWFRARTENARGTRKTMIVALARKLLIALWRLVRDGVVPDGVILRPAQ

SEQ ID NO: 490861 - protein, 363 aa, unidentified
MPIIRPNVAGIDLGSERHWVCAPTRDRSGREVASFGATTAELLRMAEWLKARQVESVAMESTGVYWIAPHEVLEAQGLELLLVDTRQLAQVPGRDKKSDPTDCEWIQRLHSCGLLRGSFRPEEAVCILRTLVRDKANLVAETGDWLRRMQKSLDQMNVRVHRAVSDINGATGMAILRAIAGGERDARKLAKFRDARCSQTEQEIAEQLSGHWREDHVFSLQQALKMYDAAQERIAAYEQEILRKLHEMEQGEPPEPTAPPLQNANKAKMIKKRGQEAKRQALYRMSGVDMTQIDAIGVETVEVVVSEYGCDLSRFPTEKQFVSHATLAPRVPKSGGKPVKKKKRNSASTRVAAALHGRALAAP

SEQ ID NO: 490862 - protein, 437 aa, unidentified
MAVSLRTWAQRSPIHLEDEMEPIVERCCGLDVHQATVVACLLIGQAHQKPKKEVRSFGTKTRELMELRDWLRENCCTHVGMESTGIYWKPVHAILEDDFEVVIGNAHHIKNVPGRKTDVKDSEWIADLLRHGLIAKSFVPPKPIRELRDLLRYRRKLVESRTAERNRLQKLLETANIKLGSVAADVFGVSGMAMLNALVRGDSTPQQMAQLAKKRLRQKLAELELALEGKFEEHHRFLLKMQLSRLEQVDEHVAQLDNRIDTKIVPYQEHRTRLMKIPGVDRVLATVIVAEIGTDMSVFKSAGHLAAWAGVCPGNNESAGKSKRSNTRRGNVHLITALVEAAHGASATKNTYLKDKFHRLKARRGYLRAAVAIGHKILTAVYVMFSKGVEYRDLGTGYLDAIDSRRISGNLVRRLQRLGYDVTLTPRAQTAGAPVEA

SEQ ID NO: 490863 - protein, 349 aa, unidentified
MTRKNTLKSLPTDTEFRAVGLDLAKSDVSVAAIPVDDNTPSLVDRMTYADLLDWAGKISPTLFAMEPCNGYSLLCLQLENLGHEIKVISGSTVSMWINTHLSGQKTDLNDAIALARLAVSDAELTPIRHKSITEIRIQTVQAVRQQLMSQRSKSIVSFKALAQQWGIPCAAGHRNLKKLRESIEAKVDLITRPVVNAMLFLLDAVKSLDRQIGQLNQTLQELVMSDERGRLLQSVLGVGTQISARVITVVGNVERFNSPRSLVAYVRVAPRNFITGHKNLTKKKHGNCPDLSHKGQGKISRRGDKLLRSLFIQGAACLTRSANHQWFSVRTFLPGCQIFKRRTLHRIFP

SEQ ID NO: 490864 - protein, 418 aa, unidentified
MNEDESARDVRRYIALDIHKHYCVIAAVDREGRVVLYPVRVEHSDLEGWLKKRLQPSDHVVFESTTNAWHVYDLLEPLVERVVVANPIKVKQIASARVKTDVRDTLILARLLAANLVPDVWVPPAHVREMRQLLSQRRQLVETHTQIVNRMHSVAHRHHLKHERGKRFNEKNTHWQRDERLSKTEQFQLELEMENRAYTERQIGRISKEVAKVSHQKPWAESMTYVMQLPGFGVITAMTVLAAIGEIERFGSAKHLASYSGLTGGVDQSGTHLVQKGITKEGRPELRWAMVEVAQRAVKSDPRWTRKFQELHKRMHRNQAIVAVARQMLELVWHVLTRRQPYRHFSQERIAYKYLTWAWQMDEAARDGLTRQQFARYYLMRLGIGHDLTRIALDPKHPRRIASEAEVLALRPELQHIE

SEQ ID NO: 490865 - protein, 459 aa, unidentified
MRTIGVDLAVQGAHKAIVADERGHYITPVLKFYPEAEQLDWLITRAREGAEDLALLVVMEPTGMAWFPVAVYMTRHNIPCWLVSSRQVADLRRFYKRHAKSDQIDVRIQARLPLINPDKLHRLALPSAASLACQRGCKELDRLRVQATAIQNRLLAVDRFAWPGLEKVFPDAFSPAACWFRQYWYNPARVCQAGGAAIRQSWLASCCDEQDQGTWVDALLDVAAEVVQLYGSKGKYLDFELLQAEVRREQEHLTFLQRVHQQLKVKTVRALYRSIHPSRNLETIKGVGQDGAAVYASFVGDASRFPSTRHFRGWSGMVPNSKQSADSESKGLSITQAGPKLIKKFAYLDAEVARRYDPQIAAIYYDQMVHKGKHHRQAVCACATHLLDRVLAVMRQDRPYQLRDVDGTPVSAEQARAIIAQRYVVPEEVRKRNRKRARRERADRRAERKRLRESRPRVR

SEQ ID NO: 490866 - protein, 404 aa, unidentified
MLWGRTLPELLFKVAGVQNQIVEPATMPSESTVHIAIELSVSSWLIAARLPGAEKSRLHRVEGGNTAALLALIGELRSRASAKLGRNADLACCFEAGRDGFWLQRLLSAHGIATYVLEPTSILVNRRARRAKTDRSDAEGMLRVLAAWLGGDRQVCSMVRVPTPDEEDAKRTHREREHLVQEKLRIENRIQALLFTQGIRARPSLRSWARDIAELRTGDGRALLPLLRTELNRLRRRLILILELIRELEAERAEALAAATDDAMVRKITALQCIRGIGSNFAAVLVREVLYRSFANRRQLASYVGITPMPYQSGGMDRDRSISRAGNPRARTSLIQLAWLWLRYQPGSALATWFRERVGTLQGRTRRIAIVAMARRLLIALWRYVETGAIPQGVEIRAEATTMA

SEQ ID NO: 490867 - protein, 312 aa, unidentified
MENRDNVFIGIDVAKESLEVAMRPDGVNGSFPNTEEGRLELVRLVHTLTPQLVVLEATGGYELELAHLLALRNVNVAIVNPRQVRDFARATGRLAKTDSIDAGVLAHFAEVVRPDSRPLKDPEARKLQTLTARRRQLVEMLTAEKNRLGIADGWARPDIEDHIAWLEDRLNTVNKTIGSVIKKSPLWRAKEDLLKKVKGIGAVTACGLIADLPELGTLNRKKIAALVGLAPFNRDSGIYRGKRAIWGGRSHVRSSLYMATLSAIRHNPVIKTFYDRLTGAGKLPKVAITACMRKLLVILNAIVRDHLCEATQ

SEQ ID NO: 490868 - protein, 403 aa, unidentified
MSNYFAGLDWASRTHALCVVDERGGVVERFEIGHDAAGLADLQRRLRRLGSPPVAIERPSGLLVDTLVEAGFMVVPIHPNAVKASRPRYRSHGGKSDASDAYVLADLLRTDGHRFRALVPQGDEILALRALVRGRDDLVATRVQLANQLRSLLESFWPGAAAVFADIDSPIALAFVERYPTPESAKALGPKRMAAFCAQYAYSGRRTAEDLLARLHEAPAAVCAEVQMEANGELARCLARTLKCVVEQIRLLSSRIEHHVDSLEDGKIIMSLPRAGRICAAQILAELGSVRERFVSDEHLAAEAGVAPVTYESGKSKAVTFRWACNHRLRTAITCLADNSRHANAWAAGVYAKAKARGCDHPHAIRILARAWLRVIRRAWTDRKTYDPTQHRAAQLLLKTAGG

SEQ ID NO: 490869 - protein, 333 aa, unidentified
MEKLIHFIGIDVSKLTIDVAIIINNDIGRIIQLVFTNDSKGFKEFKNRLNKEKIPFPETIFCMEHTGYYSKQLSRFIIAQHGNLWMEMSLKIIRSLGVQRGKNDKLDAKRIALFAQRNQQDFVPYNPPRLIVENLKTFLMLREKLINSKIALVVPVNELTCVDKAAGKIALKAISKALQGIKKNINTLDAKIDELIASDKELAEKLKLVSSVPGVARITFCYLVYFTNEFKNYTEAKQLACYCGVVPFEYTSGSSVKGKPKVHNMANKKMKKLLHTAALCAVTYYPEFKQYYERKIEEGKPKMLILNNVRNKIVLRIAAVIKNNLPYKTHVAA

SEQ ID NO: 490870 - protein, 367 aa, unidentified
MREVSTLANATIGIDLGDRRSHACVVERGEVIERFSVETTAADMQRAFAPWKGARVLVEAGTHSPWVSRLLTALGLRIAVANPNRLALLTRSQRKTDRNDAETLARVASSDLGLVHPIQHRDERRQIDLEMLKARDLLVRARTMLVNHVRGASKSLGTRLPTSDTDTFARNVAAHVPAPLQPALRLMLTQIRFLTRAIRRYDAKVRELCRDVYVETDALQEIDGVGSVTSLAFVLVVGNPKRFRHSRRVGSYLGLCPALAQSGDADPQLRITKAGNGFMRRLLVQSAHYILGPFGEDCTLRRVGERLMVSGGRRGKKRAVVAVARRLAVILHRIWVTGEVYDPMRDAPAEPSSPARAPMSPAPAATS

SEQ ID NO: 490871 - protein, 412 aa, unidentified
MPGKGIAMQVMHPRCAGVDLLVAAVRVQDAGGIKRECRTYGTMGRQLLELSSWLLSQGVTHVVMEATGSYWKSVWHVLEGQFDLTLANPAQIRNLPGRKSDVNDATWMADLVAHGLVRGSFVPPAPIEALRELTRTRKQFVREVARHTQRIQKILDIASLKLTGTITDVLGVSGRAIVKALIAGETDPERLADLAHPRLQVKRERLVEALHGRLTVQQRHLLAMHLNLVETIEASIAQLDHDIERAVDPFRGIVERLKDIPGLSDVSVPALLAEIGVDMTRFKTHRHLVSWARLCPRLDESAGKVHSTRTLKGAAWIKTLMTQAAWAGIRAKDSYLRAQFLRIRARRGSKKAIVAVAASILTAVYYVIRDGMPYRDLGIRYFDQQDRSRAARRLLARLQHLGYNVHITEAVA

SEQ ID NO: 490872 - protein, 344 aa, unidentified
MQITTIGLDLAKNVFQVHGIDATGQVVVRRSLRRSQMLPFFAKLRACLVGMEACGTSHYWARELIKLGHEVRLMPPAYVKPYVKRGKTDAADAEAVCEAVTRPTMRFVPVKSPEQQAALSMHRTRDLLVKQRTQLINMIRGLLAEFGVDIPKGLERALLMARQIVDGKAPEVPIEAAKIVTTLSQQALDIHVRLREIDRDLAACLRGNDVARRLMTIPGIGPVGATALAASVTDPHQFRSGRQFAAWLGLTPLQKSSGGKERLGRISKMGDKYLRKLLIVGMTSLVRHAKYNPATIDPRLADLLARKPSRVATVAMANKTARVIWAIMTRGETYRAGHRPALAA

SEQ ID NO: 490873 - protein, 354 aa, unidentified
MEQIFSEAEVILGVDTHLDVHVGVVIDQVGRVQGTYSIATNVPGYEELLGWAKRFGNLKRAGIEGTSSYGAGLTRFLQANGITVIEINRPNRTRRRGRGKSDPTDAENAARAVLAEDANSVPKAQSGLAEALRMLNVARRSAVKAKTQAVNQLRALLVSAPQSIRDMALKENPAQCLAACAGLDCGDEKNPVIVSLTTTLRLLAKRWNALHEELKELDQQLSRLTKIAAPRLLGRFGVGPQTAATLLITAGDNPTRLRNEAALAALCGVSPLQASSGKTSRHRLNRGGDRQANNALWTIAMVRMRGDARTREYVARRTGEGLSKKEIHRCLKRYIVRELYPLILDDLKDAALGT

SEQ ID NO: 490874 - protein, 331 aa, unidentified
MNQSASNLSILGIDVSKGKFDVALLREGKCKHKRFLNNLEGFKKLREWLAEYKVERLHACMESTSTYGEALAEYLHDRGFMVSIVNPARIKGFAQSELIRSKTDKVDASLIARFCAAMKPSLWTPESKEIRELRSLVRRVDALVEMRQQEINRLDVSDAVIKKTIENHIDYLTKQIDSIKEQINKHIDRHPQLRDKQKLLQSIPGVGEATIHLVLANFANTEKFSNAKRLSAFLGIAPREYQSGHSVRGRRRMSKVGRSSLRKAFFMPALVALRYNPIIVEMKRRLTEAGKPKMLIVGAAMRKLIHIIYGVLKHGKPFDSNFALKNTVNAK

SEQ ID NO: 490875 - protein, 338 aa, unidentified
MTNFVGVDLHRNNFTYCIRVNGEERKIGKCEITELKGFAAMLGPNTAMAVEATGNTFMFCSSLKAYVGRLVVVNPSQFKVISMSTKKTDKHDAKVLAEFLEKDMLPEVRMKDDLQAKISSLTQTREKLVQLRTVLKNKVNNLLAANFIVLKREELSTEKGLVKALSYRIDPITDTEMLVVVEQIRSLNKSIEKLDKAIEDHGSKMDGFSNLKSIKGIGTKGAAILLATIGNIHDFRSSKHLAAYIGIVPRVSNSNDTVCHGRITKKGSKTARTALVQCALIAKRYSPYLNAFHESVKSRRGGAKANIALARKFLDIVYKTLKNNWMFEDFSQFKLVKN

SEQ ID NO: 490876 - protein, 457 aa, unidentified
MRKKSKRTKGIEEAHPFSGMSRIHPHAAGVDIGAIEIVACVAGDENTQIVKAFGNYTVDLQALACWMKDHQVKTIAMESTGVYWIPLFEELERQGFECLLISSRSLRRVAGRKSDISDAQWIQTLHTYGLLEGSFRPQGDLVALRTLLRHRSQLVEHRSPHIQHMQKALLQMNVQLSQAVTDVTGMTGQKIIRAILTGERDPQTLAAMREPGCKKSAEEIGKALTGSWREEHLFVLNQSVMLYDFYTEQIQACDLEIERLYGLTRPDWDRGEVQPLIKRKKNSHSKNLPHNAEEVRKHLKRISGVDLSAVDGFGVSLAQTVIMEVGTDMSKFPDEKHFCSWLGLAPKHEISGGKVLKNNTLKTKNRAGQAFRMAAQSVKQAECVFGAFYRRLRARLGPSQATVATAHAIARVVYRMLKYKVEYEPLRVNEYQKHYEEQQIKYLKNRAAKFGFQLLPT

SEQ ID NO: 490877 - protein, 483 aa, unidentified
MKSKPWEKTDKTTNHPTQRHWHEMNRKQRREMTRQIQSEDVSLEVVHPDAAGIDIGNEIHYVAVPPSRDSQPVQRFGCTTAELKTMANWLKQCRIRTVAMQSTGVYWIAVYDILEHAGLEVYLVNARDTKNLPGRKSDVQESQWLMKLHTYGLLRNSFRPPQEIRTMRTYWRQRNDLVQSAGRHIQRMQKALTQMNVQLANVLSDVSGVTGQAIIKAILAGERDPHKLAAFRDPRVKASEEQIAQSLEGNWQPGLLFLLQQEQDGYEFCQKQMVECDRQLEQYLQQRDDRSHGAPLPEEKRKGRLKKKKGNAPQFDLREGLFRLSGTDLTQIDSIDVITASTILSEAGWDMSKWQTENHFVSWLRLCPDNRISSEKIIGKGRLPTNNRATIALKMATSTLRQSNTYLGAQFRRLRTKLGAPCATKAMAAKLARLVYRMLRYGMKYVDKGAHFYEVEHRQRQIKHLKWKAASLGYKLTPIPEAA

SEQ ID NO: 490878 - protein, 416 aa, unidentified
MNAAGIDVSSSKSTVAVLRPFGEVVKLPFDVRHSVEELASLAKQLKSIEGETRVVMEHTGRYYESITKVLHEAGLYVSAVNPLLIKEYGNNSLRKVKTDKADAMKIAKYALDNWSELRDYTPMDTIRYDLKTMNRQFQLAIKQKTATANNLIALQEQSFPGIRKLFDSPVRSDGTQKWVDFTHDFWHTDCVRSGSLNAFTERYRKWCKRNRYQFSTEKAAKVYALAKSAVVLVQKTSVTKTLVQAAADQLTAISRSVETYRSELNKLASQLPEYSIVMEMYGVGESLGPQLMAEIGDVRRFERKQSLVAFAGIDPAPSESGNYCSRSNRTTKRGSPYLRRTLFNIMKVHLQRAPADEPVFQFMDKKRAEGKPYYVYMIAAGNKFLRRYYGKVMAYFSSLEDLPPVDMESTGLHLTK

SEQ ID NO: 490879 - protein, 397 aa, unidentified
MIAVGIDIPKAKSTVAVIDSDGTVLASPFTMAHTQPEMEAFVTYLKGLGEPTTILMEYTGHYHYPVLKKLQDEGFPVCIVNPYQMKKYGDVEIHKAKTDKKDALRIAAYALEKSYKLVPYSSMEQKYEDLKFLSRQYSQRITYVAKLKVQLIALLDQTMPGITRILPLNSRNPEKCALLLFIKRFKSFDEIQRIGKARFLASYDVLAKKASERSASSKGLSIYELAVDSITTRGEDPYIWLSQNQCVDLLSATQNAADEIISQMRNIAETIPEYKVLRAMHGVGDRLGPIILAEIGDVHRFHSGKALNSYAGNDAPPYQSGQFESRNHHISKRGSSTLRKACYEVMQALKLTKPQDDPVYLFMLKKEQEGKPFNVAKMAGVNKFLRIYYARAMELYK

SEQ ID NO: 490880 - protein, 363 aa, unidentified
MKSTTIWVGLDVHKESISVAVFEGGHAQGRPGVSIPNDAGQIRKLFSRLKKEGEVHACYEAGSCGYEVYRQLAAMGIACDVIAPGLIPVRVGDRVKTDRRDAEKLARLFRAGELTSIRVPTQAEEALRDLIRCREDAREDVLRHRHHVLKFLLRHGRIFRETKHWTLAHWQWLRTQRFEQSLAQTVFTEYLATLEKTLARVTTLDQEIAQQAEKEPYKAMVGRLRCLRGIDTLSAMALIAEVCDFARFEHPRELMAYLGLVPSERSSGNKQRRGGITKTGNSHARRILVEAAWHYRHVPKRSVTFKARWKGQPQPVVDHAFKAQERLHRRYFRLTSRGKPASVAVVAVARELAGFVWAIGCAA

SEQ ID NO: 490881 - protein, 340 aa, unidentified
MIRFYVGVDLHRNNFTYCMRLKNGEEKMGKLAIRELKGFARMLGKHAAVAVEATGNTWMFCQEMKEKVGRLVVVNPTQFKVISRSTKKTDKHDARILAEYLEKDMLPEVRMKDGLQSKISSLTQTREKLVQLRTVLKNKINNLFASRFIELRREELSSEKGLLKVLACRFDLITDTELRVMVNEIRSLNKSIDELDRTIEENGSKMDGFDNLKSIKGIGSKGAATLLSVIGKIEDFRSAKQLAAYIGIVPRVSDSNDTSHHGRITKLGSKIARTILVQCSLVAKRYSPYLHRFHESVKSRRGGAKANIALARKFLEIIYKTLKNNWIFEDFTKFKLAENN

SEQ ID NO: 490882 - protein, 441 aa, unidentified
MHAKMQYIYVGIDTHKYTHTASVINCFNEMLDTITINNDKVGYKALVDMVNKYTSDNLTPIYGLEDTKHLGYGLCSYLLDKNCLVKTVLSTLTYNERKRNPIISKTDALDSLCVAKVLLDFLDTLPYAKSDEIYWTLKQVVKMRRTIVKSNVEYKNKLHAQLLHHYPNYKDFFNNIFCNTALMLWETYPSPDLLPSSKELAEFLYNVSHKRFRVKKANEIIKLSSEFDIFNTIYQEERNIIIRTLVKQIKNNNIRLKEIELEIISIYDKIGAKLHTCPLLDKISASDVLSEIGNINRFENNGKLAKYAGVAPVNYSSGNSDKDVSNEYGNRELNGLIYAMACRSLAAGRNNNKPTNAIFLEYYEKKRANGKTKHQAIVCIMRRLISIIFHILKYEKEYEIPTELVSECMELFKERKLKEQEELEKKEQKRLLKREKIKIAK

SEQ ID NO: 490883 - protein, 420 aa, unidentified
MKVVYQTCCGVDVHKSFLVATIIKTISGVEPSYQKKRFSTFNNSILQFKNWLIENQCRDVCMESTGKYWVPVFNLLEDDINVTIANPKWVKAVKGNKDDTKDSKWIGDLFRLGLVPGSYIPCKPIRILREFTRYRYKLTSCRTSEKNRYQNALTVCNVALDSVVSDIFGKSATSVIDYLIERSDNSINHEEIASRLLRSLKKKSDSVIESIEGYQMTDSQKYRMRLVRAHLDYITSTINDIDTMLDSLIAPYENAVQLLCTIPGVDRNSAITVISEIGTDMTPFSNSKRLCCWAGLTPGNNESAGKKKSVRITRAGVYLKPALVQVAHAAVKSDKSPYYKQKYERIMKRRGKKRAIIAIARMILTAIYQMLSTGEAWNPTDLYKIDIPEPLKEKQKEKAIKQAKKLLIREGTLSESQLAS

SEQ ID NO: 490884 - protein, 371 aa, unidentified
MDKITRGVAARVGVDLSKRVIQVQAVDACGRVLTNRTLGRDKFLPWCAQLPAGCMVVMEVSSSAHHWARKLLAMGLDARIVSAHLAAPYRSEGHVGKNDANDAAAICEAASRPHMRFVPVKSIEQQSLLCVHRLREGVKADRTACINRIRGLLLEFGIAVATGVRALQTTLHDILEDAGNELNGLARMTLQRAHAQWRELDEHLAWCDARLAAHAADSADVQRAADLMGVGPITASAAVATVGDFKQFDSGAQFGAWLGLVPKQRSSGGKSNLGTITKRGDAYLRTLLVQGAKSVVNTAHTRTDPISRWALALKQRSGWQKAVVALANKNARILWAVMTRELRFDRHHVSTKPTGAMQPPRSADPSSAAMA

SEQ ID NO: 490885 - protein, 399 aa, unidentified
MLAVGIDISKSKSVAAILNQDGSMHTSPFEFHHTQPELDAFIKYILNSNQSATILMENTGHYHYPVLKAFQEAGLPVCMVNAYQIKKFGDMDLRKAKTDKKDAVRIARYALEKSYSLVPYTSMEQKYEDLRFLARQYNQRMLTLKTNKVFLLNLLDETMPGITNILPLTSRTPETSLSVLFINRFKSYDRIKKMGKNRFLDAFEKIARKSRNRQTKTYGLAIYEAALRNITTRGENEYILAAQDQCLELVCESQKAADSIILKMQTLAETLPEYAVLRSMAGVGDRLGPLILAEIGDIRRFHSGKALNAYAGNDPPPYQSGTFESYNRHISKRGNAALRKYCFEVMQALKLTRPQDDPVYLFLLKKEQEGKPYNVAKMAGVNKFLRIYYARAMETLKQQ

SEQ ID NO: 490886 - protein, 416 aa, unidentified
MESKMMSGASSPKPTPAALAYVVGIDIGMESCLMCCLTMEKRQIIKPSQFSNDARGFDWLFGHLKSLRVAPNQILVGLEATSRYGENLYHALLKAGYRVCLLHPGQIHAFAQQRGLRAKTDRVDAMTIARALRSFEARFGYVPSEQVATYRELTRLHQQLSDDVVRYKNEMHALLVVLFPEVTQVFVDPTRPTALAVLKVYPSAQAMAQADPAALSKLLHEHCPSHYGRQTAEELVRLARGSVSSGLAIAARSNSLRILCDQLQHTQSHLKQLQEEIERLVNQDPKAKGALSITELGPLTVAVVRAELGDLDRTTSMDQVVAYAGLDLRVKESGKWKGQTKLSKRGSGRLRRSLYLAALRSIRLPDSPFGIYYHRLVDRGMKKGMAVVAVMRKLLIVAAHLILTEQVYEPGKVAAK

SEQ ID NO: 490887 - protein, 350 aa, unidentified
MTILADDADVVIGVDTHKHTHSAAVVGAQTGAVIAELTVSADPDGYHDLLDLANAHGHRRAWSIEGTGGYGAGLARFLLEAGERVIELDRPHRTPRRGGAKSDPIDAVRAAREALGRTKLAEPKIGGERAALAALLAARRSAVDSCTDVQRQLHALIVPAPEALRQRFRGYSTVRVVQHAARLRIDERWAVEMKTTAQVLRTLARRALALGREAKEHEAAIGAIVRAWRPDLLTQLGVGPIVAATVLCAWSHPRRFRSEAAFAMLAGVAPIPASSGVTNRHRLNRFGDRQLNRALHTVVINRIRLDPATQAYVEVRTKEGKSSREIKRCLKRYVARQLYRQLEHPPLDRS

SEQ ID NO: 490888 - protein, 353 aa, unidentified
MSNVKYVGMDVHKAITVIVVLNALGQFESRSQVKTKSENICDFFRGISGKVEVVFEEGTHSAWLYQMLKPLVASVTVCDPRHNKLIEDGNKSDDEDAETLAQLLRLGAVKAIYKGDDQQRRLKEICRAYDNLVEDSTRVQNRLKAIYRGRGISCSGQALYRADQRPDWLAKLDEEAARFRAASLLEQLESLSQLRKRAKQRLLAQARTHADYRILIKLPGFGPVRVAQLIAVVGTPHRFRTKRQFWPYCGYAVVTRSSSDYRIVDGKIVKQRKKVSTRGLNRNHNPQLKQVFKGAALAALRNEAIKAYYQRQVDSGTRPELARVSVARKLASIALTVWQRREEFDVKKAFAQD

SEQ ID NO: 490889 - protein, 395 aa, unidentified
MDNAEPKVWVGVDAGKEVHWAHVLDASGTQVLSRRVENDEADLSLLIDEVLALSEEPLWAVDQPGGSAALLLALLWERAQRVLYLPGLAVERVREAYPGESKTDARDAYVIADQARMRSNLARLAPGEDALAEMQLLLARRRDLVADRTRCVNRLRDVLLSLFPALERAMDLNAKGALILVRHYQTPGAIRRVGQRRLAAFLKNRGVKGAEEIASKAITAAKAQSVSLPAENVAATICAELANEALALKESVAALDGELEKRFFARPEARILASLPGMGPVLGSEFLVSVGDLSAFSSADQLAAYAGLVPAAHDSGKRVGKHRRMRGGNKVLKRVFYQSAFASLRSSPHSRAFYDRKRAEGKKHTQALIALARRRVNVLWAMLRDRATFEARSAA

SEQ ID NO: 490890 - protein, 344 aa, unidentified
MEKHTTIAMDIAKNVFEVAVSEEPGRVKERRRFTRSQMVRFFANREPARVVIEACGAAHALARQLEGYGHEPVLLPPAQVRRYVLRNKTDRTDTKGLLEADRNEEIVPVPVKTVGQQALVAVHRLRSGWMATRTARLNAIRGFLRELGVTVPVGATRVLPALAGALETGRVPGTLETLLRTTADEVRELDRRIEEAESTLKRLAREMDAAVRLQTVPGIGLLTATALIGSVGEPGRFPSGRHLAAFLGLVPRESSSGDRRRLGAITKRGDGYVRMLFTHGARSVLRAASVRKQNDRLRTWALETQKRKGHNKATVALANKLTRIAWAVWLKDRPYEGRAPEETL

SEQ ID NO: 490891 - protein, 312 aa, unidentified
MTLHHRVIGIDVSKDHLDLNDSASGQTWRIANRLEAIGSWLAGLEGEEAFVVFEATGGYDTELRLSLEADGRSFARINPVQARAFARARGYLAKTDRIDARMLAELGLRLQPAPTPVSCPKRLELQALGRRRSQLVDMRKQEKTRLKQVREPELVSDIEDHIDWLGRNIKVLETRIARLIKATPELARDYTLITSVPGIGPVTATTMLALMPEIGKATRRAVAALAGLAPINNDSGRKRGHRTIRGGRRQVRQNLYMAAIAAVRGTSRFAVAYRSMRMRGLAHKVAIIAIARRILITVNAIVRTRTPFAIQT

SEQ ID NO: 490892 - protein, 409 aa, unidentified
MNKVDIAPFEVFCGIDVGKTSNHIVALDRHGDKPLINRKVPQEEAEIRAALEEAGDFGLALVIVDQFGAFGRLVVGVAKSMDIPVAHMPPRRFRQVAETYGEDKFDEKDAFILADASRTTPRNIEFVGNRAESMAEIKVLSSRRDDIVEERTRCYNRLHDFIHQVSPPLEELFSKRKLHNDLEIRLIARYGGPIGFRQAGRARASTWAAELKYHCVDGPKKGEQVFDVLDRQTVMLPGAAVIEEQIRSIASRIIELLAEEKRLNLMIDQRAKMIPEVDLLQSIPGVGPVYAALIAVEIGDIGRFRDSNHLASYAGVAPRKEESGTSVHKRRKRKGGNRRLKNALMQSSQRSVQCDPLARAYYERKRAEGKKHLQALRALARHRVTVIFAMLNEGTFYEPPVEVDENGRG

SEQ ID NO: 490893 - protein, 394 aa, unidentified
MVAIYRPFNEMVAKPFEVRHTGSELKQLADYLKSLDGETRVVMEHTGRYYEQIAQYLHDEGIYVSAVNPKIIKDYGTGNTLRHVKTDKADAKKIAKFGIDRWTELRQYASMDTIRYQLKTLNRQCGLYTKIKTMMKNNLIALLDQTYPGVNALFDSPVREDGHQKWVDFAASFWHVDCVRSMSQTAFSERYRKWCKRHGYNFSSDKAVKIYGKAQDQITMMPKDALTRLLIKQAVDALDAVSATLERLKAEMLDLASQLPEFPVVMAMHGVGDSLGPQLMAEIGDVSRFAHRGAITSFAGVDPGANQSGTHEAKSVHTSKSGSPELRRALFLVMDCLIQTKPQDDPVYQFMDKKRAEGKPYLVYMTAGANKFLRIYYGRVKEHLASLEQPSVPD

SEQ ID NO: 490894 - protein, 345 aa, unidentified
MGYFAGLDVSLEETAICIVDETGRIVREARAGSEPEALVDFFRACGMEMERIGLEACSLSAWLHAGLTQAGLPAICIEARQAKAAMGAMPNKTDRNDARGLAQIMRTGWYRAVHVKSSSCQSWRALLTARRLVLNKRRDVENGVRALLREAGLKVGTPSRKDFAARVRELTGDDPVLAGLSESLLSVIDVMSQEVERLTKRVLDEVKLEPTCRRLMTVPGVGPLTALAFRATIDQPCRFRRSRDVGAHLGLTPRRYQSGETDVQGRISRCGDELARTALYEAAHSLLIRSSKWSALRAWGMGIAKRRGMARARVAVARKLAVILHRMWADGSEFRWGKQAASAIA

SEQ ID NO: 490895 - protein, 371 aa, unidentified
MKFYTDQHQHYCGIDLHARQMYVCILDAAGKVCFSRNLECSPQAFLAAVKPFREDLVVAVECMFSWYWLADLCQREGIAFVLGHAQYMGAIHGGKAKNDKIDAHKIAGLVRGGMLTKAYVYPPQMRATRDLLRRRCHMMRKRAELITHIQNTISQYNLPPFEGRMGKRCEREGLLAHFPDPQVRNSVGLDLAMIDQYDALLPKLERHIRTCAKEHDRKAFTLLRSIHGADLIIPLVILYEICTIERFPRVQDFVSYCRLVKPGRESAGKLLGHAGGKIGNAHLKWIFGELATTPLTRQCPGPGPARAAEETIRQGQGPCHPGRQARPRGVLHAQARTDLRPAQVLPGLIRSRRRSSTPNWSHQGQTCSRSR

SEQ ID NO: 490896 - protein, 425 aa, unidentified
MKIENTTGWNFKDLEGMLGNAKALKRNNWECKGILIDVITTPASTVRVDCFGVHPNRLGPKEAEMRIIGCDLHARQQALAMLDTTTGETVAVTLKHEGNNVREFYSKLPRPVRVGIEATGSMQWFVNLMEELGIECQVGHPANIRAAEPRKQKHDRRDADLILKLLVENRFPKIWLPSKEQQDLRALLRHRHQWVRIRVRIQNALQAMALANGLRRGPGLWSQEGQRTIASLPLAPHAAYRRSELQAMYAKFAKEIEKLNQRVEEQACERPGARLLMTHPGVGPITALATEVFLGDAARFADSKALASYVGMIPSEYSSGERQRFGGLSKQGNPLLRFLWAEAAIHAVRRDPELQRFYRRKLVQKGLGKTRVAVARKLGIRLWIMLRDEIDYNEFCRRGQKQQKSSEACAGMPDRGHGAKQSPAI

SEQ ID NO: 490897 - protein, 341 aa, unidentified
MKKNLFFIGLDISKADFAASIYKTPDKPIVTKEAIPNDQKGFEILLLWLKDHHIDKKNSRICMEATGVYSQAIAYYLLFAGFPVSIEPPLKVKRAFDPVGHKTDPVDSKQIAEYAYRFQDELTSWQPRDEILEKIRQLLSVREQFSKQKVALDNSLQAYSKQRVQVVLIKKAQKETLNQLKKQITRIDKELANLIKQDPEIFQRANNLDSIPGCGMLLAAHLLVITENFTKIQQYKRLAAFIGIVPYQHQSGTSVSKRAKIRHFGPGPSRKLLRLAAQSVATHNATFRSYYLRKLDQGKAKPLVLNNIANKLLKVACTIIRNNTRYIKDYRSIHPMYLKSA

SEQ ID NO: 490898 - protein, 339 aa, unidentified
MNPIPVGVDIGKNVFQIHYIAPGSGEIVNKPLKRANFLEYFANLEPCLIGMEACGGSQHWARSLSKLGHKVRLMAPRFAKAFNIGNKNDAADARAIWLAVQQPGNKVAVKSEAQQAVLALHRLRQQLVKFRTSQINCIRGLLGEYGEVMPASRRAFDANIAAVLDRVSQHVAAPLIDTLREQWSALTHLDEQIARIEQRLKQWMSTDSSAQAVGAIPGVGLLTATAAVATIGDASAYKSGREFAASIGLVPRQVGSGGRTTLLGISKRGDAYLRTLLVHCARVISVQLRSKHPWIEQLLKRRPYNVAIVALANKLARVIWAVLARGRPYQQDFVSTKPA

SEQ ID NO: 490899 - protein, 403 aa, unidentified
MYVLALDVSMGKSYVVIYHENTCLFEQEILHDKTHFNALLQEIYALPERPQIVFEATGVYSRVIETFCQKNHFAYCLLNPLEAKKQLNIDLRSVKTDKQDAHRLAQTHGQFLRKQKQSQTEVYKQTRDFARFYQQIERDIKRTRMNLHTALQLTFPELETLFTNRLSKLALNLVELFPHPDYLAHLSQTKVKNVLKKNTDKKISDQKALAKAQTLLSLAQNSYPAESGQSISVQKVVYYAQQLKQLLVTKEQLAKQLVEIAKQTIEFDFYQSIPGIGELSAGLIIGELGDIRRFSSHKQLNAFVGVDTRRYQSGKYTAKEHMNKHGNPKARKNLYFIMMNMIRQQPAGPNHLVDYYYKLKTQPSPKKHKVALVACINKLLKCLHSMVRHSSPYDYSYTASNDQ

SEQ ID NO: 490900 - protein, 357 aa, unidentified
MAQQRQAVDVVGGVDTHRDTHTAAVLDTAGCQLGLAEFPATEAGYGQLLEWMRGFGTVVKVGVEGTGSYGANLTRHLTAAGVMVVEIDRPDRKTRRWQGKSDPVDADAAARAALAGRRTGIPKDRDGQVEAVRALRVARRGAVSHRADVVKQMKALIVTAPEPVRAALSALTTARLIAVCAEVEVSAVQAGDPAVAVRLALRSLARRFQYLSSEIKDLEKVLSRLVAMVAPTLLAVNGVGADTAGQLLVSAGDNPDRLRSEAAFAMLCGVAPLPASSGRTHRYRLNRGGDRQANAALHRVVVCRLRWDPATQAYVERRTAEGKTKKEIIRCLKRYVAREIYPILTAPDTAKDLPVAA

SEQ ID NO: 490901 - protein, 440 aa, unidentified
MSSSFPRRAAGIDVGSEQLFVAVACGPVRVFSTFTAALIQIKDYLIEQQVTTVAMESTGVYWVPVFEVLEEAGLEVYVVNAAHARNLPARKTDMKDCQWLAELHSKQMLNSGFIPPAAIRELRDYTRLRQDHIQMAMPHILHMQKALDQMNLKIHEVLSDLTGASGRRLVEAILSGERRPEALVQLCDVLVLKNKRTQMLAALQGRWKESQVFALRQAYENWCHYQKQIAACDQQIGQVLEKLAAQHRPTTPEAGEDAAPRKRLHKNAPAIKNLGPLLRSLSGGHDLTQLPCLTHYSVMQLLAEVGTDMARWKDAKHFTAWLGLAPGSRQSGKTKKSQSRFRGKAGKLFCVVAQSLAQSKYLALGGFYRRIRGRHGGQVANIAAARKLAVLFYNTLRYGWNYVEQGLIEYEKRYKEQYLKRLKASAKRFGMQLVPQLTPS

SEQ ID NO: 490902 - protein, 347 aa, unidentified
MDKPRFFVGIDIASATFTSAVGSITDKWHIVVKPATFANEYDSFPKYLKWLQDHGIHPDNCVICMEATGVYNEVLAHFLIANSYRVSIEPPLKVKRAFKPEGHKSDPVDSCQISEYAYRFWDQLSLWAPRKEILEQIKVLLTTREQFVVDRTGHQNSLLALKRKAIRTPLAEKIHEKAITELKGHILELEAEIQRLIDQNPDFRNLVTLLISIPGVGMLLAAQMLVLFQSSPKACSPKHLAAFIGICPYDDSSGSSLHHTPTSRHYGPSGLRKLLFLAALSIRTHRKQFKQYFLRKLQEGKPKQLIINNIANKLLKIMCAILRSNTPFIENYRSVNPALLVQGLTLS

SEQ ID NO: 490903 - protein, 417 aa, unidentified
MLKIVHKVCCGIDVHKKFVVATIGKTNKAGVTDYETREFSTFTENLVQLRDWLVSSGCKEVCMESTGKYWIPVFNVLETECNVFVANPKYVKGIRGKKTDKRDSVWLCDLHKHGLVQNSFIPPWQVRQIRDLMRYRYKLTNLKSGEKNRMQNSLTVSNIMLSSVVSDTFGKSAMRIVNHLLEDSEDTTFDVAPLLDGRMKATAEDVSKSIQGTLTKPQAEKISVCLAHLDDIDKYKAVIESAVLELAEPYMEQIKLLLTIPGIKDIYTAIGIIGEIGVDMSVFLSARHLCSWAGLVPANNESAGKKKSVRCNRAGTYIKPLLVQCAHAAVKSKECPYFRLRFEQISRRRGKKKAIIAIAHMLLNCIYHMISRNEAFNYDLYRIDNAPKPKHPPEITKEQAILLLESLGAQVILPTAV

SEQ ID NO: 490904 - protein, 408 aa, unidentified
MEILHRRCAGLDVHQKEIVACRRIASGRKVESELARFPTTTPGLLALSAWLAEAKVTHVAMEATGVYWKPVWHVLCGDFKLILANASHIRNVPGRKSDANDATWIADLLAHGLIRASFVPPQPIQELRDLTRTRRELTREIVRHTQRIQATLEEANIKLTSVISDILGWSGRRILKAIVAGEDDPLRLAELGHPKLACAREDLAAALQGRLRDHHRFLIGQHLKTIEQIEATISEFDARLDSALAPFRDAIERLKEIPGVGDNVAQTLIAEIGADMTAFPTADHLVSWAGMCPRLDESAGRKRSKRLRKGAPWLKPVLVQAALAATKVKNSSLRARYFSLKPRLGHKKAIIAVAAAMLRIVYHMLKDGTFYQDLGPDYRRPKNRERAAQNLAKRIRALGFDVELKMAA

SEQ ID NO: 490905 - protein, 368 aa, unidentified
MSLAKIIALDLGKFKTVCCVMDAATRESAFETVQTSPTSLHELIVKQLPPSPADALVVFETCDLAGWVHDLCQGLGVKVIVTHANGEAWQWRRVKRKTDRDDALKLAKLALLDQLGPVHMPSPDQRQRRRLVLHRRSVVSRRTQSRNAIRAIFNQQGLSLAKGGKQWTIAGLAQLREHARPLAECDLADLWRGRLEVELSLMQAADAQLKVLDAKLDELGKHDARIQLLQTVKGVGPRVAEVVVLHLDDPHRFKSADHVAGYAGLVPKQIESGQMSRFGHITGRGPALLRSMLVEAAWVVWRHNAWAQAWVAKISRGSRARRKIAMVALARKLLTMLWSMMKHNRPFQTPTSGPPMAALPLPPMLALA

SEQ ID NO: 490906 - protein, 357 aa, unidentified
MSIVGGLDIHRKQLTFDWVDEQNGKWEHGRIVPADREHLAGWLTRFDPAVAGPVAFAMEGCTGWRYVAEEMGKAGVDAHLAEPADTSALRGPKRRAKTDKADAKLLRELLAQGRLPECYIPPAQVLEWRALLELYQDLRTQHTGWAQRIQAVCFHQGTTAPGQAGIIRGDRARLMKIVDEQLSISGRLQVNTALAIMDILADHLERLRRRLLCTARGVNGARALMHEIYGVGPLSSLALCAWLGGPDRFSSSRKAVRFVGLDITVHSSDGKRGPGRLSRQGPEVLRWLLFEAAKTSARAGAAGYGYYAQVKDRYDANRACLSQARRIVRHATHILTGLGDDAFTIVAQPAAPTTIAR

SEQ ID NO: 490907 - protein, 409 aa, unidentified
MRIMNPRCAGLDVHQKTVVACSLIGGPGEEPAVQKRTFQTMTRQLLELSDWLREQGVTHVAMESTGTYWKPVWAVLEGEFDLTLCNAAHVKQVPGRKTDQKDAEWIADLLRHGLLKKSFVPPQPQQDLRELTRYRARVSADRSAVGNRIRKLLEGANIKLGSVASDVMGVSGRRMLTAMIEGETDPEKLADLALGQLNEKRPQLLEALNGRVRDHHRVMLRLELAQWKFLDALVAELDVDIEKALVPFAEALQVVKSIPGFSEVSAAATVAEIGARMEQFGHAGRLASWAGLCPGNNESAGKKYSGKTRSGNIWLKRILCQTAWAASRTRKSYFAALFRRISAKRGAKRAALAVAHSLLVTIYTLLSTGRPYQDLGNDYFDNLNADGLKRYCLRKLQAMGHRVILEPAA

SEQ ID NO: 490908 - protein, 367 aa, unidentified
MKCGSPQIYGIIVPRKDAFRIQRLEEPQMNYIPVGLDIAKHVIQLHMVDFHTGEMVDKQIKRDALLTFFANREPCLIGMEACGGSQHWARELEKLGHRVRLMPGRFVKAFVMGNKNDVMDARAIWLAVQQPGKSVAVKTEEQQAVLAMHKIRHQMVKYRTAQINGLHGLLLEFGETVRKGRSALDKAMPLVLARLEKRLPAALVEMLREQWERLSRFDEQIEDIEKRLKVWAQQDKSCQKLLKIPGIGVLIATAAVATMGDSKAFRNGRELAAYIGLVPKQTGTGGRVKLLGISKRGDKYLRTLLIHGARSAILLANAPGPWDEKIKERRATNVAVVAMANKLARTIWAVIAHDREWNKDYVSVRPY

SEQ ID NO: 490909 - protein, 390 aa, unidentified
MSESTSVLSSASDPKSMHYVGLDVHQKRSSICILDANGKQVKSLEVKGHWPKVLEEIARQVPRPFSICYEASCGYGYLYEKLSPLASHVSVAHPGQLRLIYRSKKKNDKVDGQKLAKLLYLDMVPQVHVPRADVRAWRALITYRHKLMNKRVGIKNNLRALLRGLGIVALSGKKLWSRKGLKWLREQSLEESDALRRDIAVEELDEVNAKIRRVEKDLNKRADAHPGVTLLRTIPGVGVRTAEAVVAHLDNVSRFSRNKKVGSYLGLVPCQDSSAGNNRLGHITKDGPASVRKLLCEAAWQGIRHNARIKAYFDRITHDDPDRRKIALVATAHYLARVMAAMLRSGEVWREPGVPTPADNPNKPAPDNQEKNPELMNRKEKVKEKKNAKR

SEQ ID NO: 490910 - protein, 500 aa, unidentified
MALVYRRCAGLDIHRDTVVACIRIRVASGKHEEKKETFRTFTADLKRLAEWLHEHKVKQVAMESTGVYWIPVWNILEPSRYRFRLTLVNPAQVRAMAGHKTDQIDATRIAEFLAHGRLAGSFIPAPPVREARALQRMRVHLQQDRNRVINRIGRLLQTVNIKLSSVLSNIVGVSGMRILRALAAGKKGEKLAELAHRSLEAKKPQLREALAGRYSEHFRYLLGGLLDDLDRLDKKMAELTGRLDLYMVPHADLIRRMCEVPGIDRITATTVLSEIGSDLSAFPDGKHLASWAALCPGNNESGGKRKQGRTRKGNRYLRRALVQAAWAAGHSKGTFLSTLFFRFARRMGMKKAAVAVAHRILVILFHIIRDGASFHEAGDDYFDRLHPERAAHRLMNRLEKLGFDVSQVRCAQPAVPPPTVDRRGRGRPCKCDERGLVCTHVYAGLEIRERTTPAPRVPRLPKPFPPTNGCTMCAAWKIPCIHVRPKIKSTPASAKTESSQ

SEQ ID NO: 490911 - protein, 472 aa, unidentified
MCVALAASPRVPRLGCPIGAEAGRVRPGVPPICGGSDVQQAPLRACRRRVDTDGQVPQAVRELATTDKAVRIWRPWWTAEQGPVVALERPGGYGRPVSHVLVGTVEGLVGHAPERRRRPGHQTDKADARGRAERLAHGRMRPSGIPPPPLQALRDLTRPRVALIQARTQAKNRVVNGLEATQSTLTSVVSALFGRRGRRRLAARVAGERAPNTLAARARGVWRRHQSQRALARTGPCPDHHAGLSQGAVERSARRDRQRTDLEPQLGARMAPVAPPRAQLTRLPGVEATAARAILAALSPERRHCGSAARRASGAGVCPGPDERAGTRRSGRTRQGHRSLRRGLGPCAGAARNPPTVLGHTCRRLDGRRGGTHAAMAVAHHMLVMVYHRLREGTDAEEARDDRRQDRPEEGQQKRAVKALERLGDRVTLERLASRSGTSPLLLHAPLASPSWRHTRVRGESSVSGCERFRGK

SEQ ID NO: 490912 - protein, 342 aa, unidentified
MTMIGIDPHKATHTAVAIDDNEVVLDEFKLRASTTQGERLREWADGFEKRQWAVESANGLGYLVSQQLVAAGETVFDVPPVLASRVRLMGSGRSQKNDPNDARSVAIAALRSDRLAQVTPDAHDRVLRLLAKRHRDMARIRAKHCTRLHALLLEIQAGGIASRITVNKANAVLDAVVVTDEVMRYRVLIARELVADIAALDAALKTSKERVATAVAASGTTVTEIVGIGPISAAILIGFTGDVTRFPTRGHFATYNATAPMDASSGPNPRQRLNPRGNRQLNHAIHIAAVSQLRHDGEGRNYYDRKRAEGKSSKEAIRSLKRRISDRVYRHLVDDARRVAAS

SEQ ID NO: 490913 - protein, 421 aa, unidentified
MKPQVPEAFAAFVGLDWADAKHDICLQVAGSTRREFLRLEHRPEVIDAWVCTLRTRFNGQPIAVCLELNKGPIVSALQNYDFLVLFPVNPLTVAKYREAFTPSRAKDDPTDAELQVELLLKHRDKLTPLVPQSPTMRALAQLVEHRRRLVGDKVRLTNRLTSALKNYFPHVLQWFQDKDTAIFCDFLSRWPTLKAAQLARRATLESFFRAHHVRSADVITTRIEAIKNAVALTTDEGVIAPNTLLVQALVAQLRVTLHAIAAFDTAIAQRAQAHPDFPLFDALPGAGAAFAPRLLVAFGEQRERFTSAEELQKYAGIAPVTERSGKKSWVHWRLQCPTFLRQTFVEWAAESIRHSFWAQVYYQQQRDKGKAHQVAVRALAFKWIRILYRCWQERLPYDESTYLQALHRRGSSLIQNLAKAS

SEQ ID NO: 490914 - protein, 429 aa, unidentified
MNDQAESHSADEPAFGAFVAIDWADRKHVWSMQAAGSERRQHGEILHTPEAIEVWVGELSSRFPGQPIAVAVEQSRGALVFMLSKYEHLHIYPIHPRAAAQFRAALYPSGAKDDPIDANLLLDLLVHHRVHLRRLSPDTEQTRLVQQLVEARRKLVNEKTRQSNRLTAKLKLYFPQVLTWFDEVDSELVGALLERWPTLEALQKSRQASLRSFFTRHNCRHAKLIEQRLEQIRQAVPAIRDGAVIQSAVAMVSVLVRLIATLREGIGALDRQIDRAAGAHPDSAIFRSFPGAGPVMAPRLLAAFGSQRDRYQSAAEVQQFSGIAPVLVRSGKTAWVHYRWACPKFLRQTFQEWAGHSIGFCGWARAYYEQQRKRGAGHHAAVRALAFKWIRIAFRCWKDGVPYNDSRYLQSLHQRGSPLAILCPGGLSG

SEQ ID NO: 490915 - protein, 474 aa, unidentified
MQQPIEVQVDEHEPIVERVVGIDVAKASGMVCLRVPHETIPGRRVTKVWSVKATTRALVELGDHLRCQGVQRVVLESTSDYWRPFYYLLEAAGLTVWLVNAAQAKNVPGRPKTDKIDAVWLAKLAERSMVSPSLVPTEPMRQVRDLARARFDLVADRARVKQRIEKLLEDALIKISSVLTDIHGVSGRAMIEALIAGQRSPKALAELAKGRARARSAALQEALDGRFTDHHARLARLLLDQLDELTARIDQVTALLEAAITALTPPQADTDTPTGDSGDSGDSGGDSGGDSGDSGDSGDGAPAQPAPGRYARAVERLCAIPGGGPDSVRAVIGEIGLDMSVFGTHQRLCSWAKVAPRTVQSGRKTGRARTGRGNPYLKSALAQMAMGAAKTDTFLGERYRRLIKRMPKAKALVALQRSILVIIFHLLADPTAEFTDLGSDFYQRRIDRARRTTHLLRQLHALGYQVQLTETEAA

SEQ ID NO: 490916 - protein, 364 aa, unidentified
MKRIYYIGLDVHKDNTQMAVLEEKGKEPVTVKVIESDPGKVAKAILPFRKNGAVQVGYEAGCMGYTLYRVLTGMGIDCRIIAPNKVFRGGNNEKIKTDKRDAIAIAWMLRREEGAGITVPEREDEAARDLLRCRGDIQDDLKRAKQRMLKFLLRHGHIYENTRYWTGKHRKWMKALVFEMPLDKAVFEQYLYTIESIEERVGRIDLQIKEIAESPRYKEKVTRFRAFKGVDYIIALSLVTEIGDFKRFPTATAFMSYIGLVPSEYSSGKKRKQGGITKTGNSHIRKLLTEAAWHYARPVLVSKRLAGRRVGTNETVISYADRALNRLHFKYEKLLHKGKSKQASVTAVARELSGFLWGVMTSVA

SEQ ID NO: 490917 - protein, 330 aa, unidentified
MNFKNVIGIDVSKNTIDVCIHNSQSFSQFKNTKKGLVRFLEWVKQNVENHMSILFVFEHTGMYSHLLTVFLNDKKCNYLIASGLDIKRSMGITRGKDDIIDAKRIALYGHRLKDEIKPSKKRDNSITKLKSLMSLKTKLIKQRASYKATLGEQKSIYKIKDFKTIFGVQEKMIHYLTKQIKNIETEILEIINHDDKLKHNLTLALSIKGIGLQMATTMIIATDNFQKFENWRKFASYCGVAPFPYQSGTSIKGRNKVSQLANKKIKALIHMCAINAIQHNPEMKIYYEKRLELGKNKMSTINIIRNKLIARIFAVIRRQTPYVDIMKFAS

SEQ ID NO: 490918 - protein, 415 aa, unidentified
MNNTISDIDIDLTAVCEAEDDAAQAEAQPAQNESDDTYAQKMQEQLALARSSANCRYIGIDLHSNNIWLSVIVNEQRPSGSVGKVIFSRSIGTQRVDGTLPEDLIKPVIERFCKDQPHIACVEATYNWYWLADLFERNGWNLVLADPSTVSEAKTKAADDRKDAEYLADRLRYNALRYAVIMPKQLREIRDLVRTRGTAVKQRAREKIIVINKLTNLIGRKITGKELRELIKEHAEFGTEAPMLLNWGLTEEVRTILDYHLTMATNIDQGIQKLEEHINTVGRNLRYTRELQKMPGYGPVISSILASEIGSIRRFATAANFVSYCRLASTSKLSNGKSKGLGNAKNGNAYLSWAFTELATLMVRYSEAAKRHFEKLMRKYGQLRVKAIRVLAAKLARSVYQCLSKNEPFDVLRCF

SEQ ID NO: 490919 - protein, 349 aa, unidentified
MKIVGCDLHARQQSIAMVDTETGEFTEKTLCHEGNAVRAFYASLEGPVVVGIEATGAMQWFLELLDELGIEGRVGHPAKIRAQETRKQKHDRRDARLLLQLLSEDRFPEIWMPSTEQRDLRTLLRDRDQWVRMRTRVQHRLQAIALNHALRQGRALWSATGQTALEALPLPPYTRQRRDELLALYAQLQKRIQELNKEVEAQARQRPQARRLLTHPGVGPVTALATDVFLGDPSRFATGNQVASYIGMIPSERTSGKRQRLGKMSKQGNALLRYLWTEAAMSTVRKDPELQRFYRRKLIQKGMGKARIAAARKLGIRLWIMMRDQIDYQEFCRRGKLRQTGETHAGMPA

SEQ ID NO: 490920 - protein, 417 aa, unidentified
MSIDPSTSAARVTAGVDWAKDDHAICVVGGQGEALERFTVRHDAAGLRQMAARLLRAGVLQAGIERGDGPVVDALPQAGLTVFVIPPGQVKNLRSRYGPAGNKDDRFDAYVLAGVVRTDARRLRPMERDSEQTTALRSTVRARRDLVGHRVAAASQLRAHLEIAFPAAARLFAGIDSAITLAFLSRFTTQEQADWLSPLRLAAWLKSVAYSGKTDPAVLHARLLAAPRGHAGQHAGVHAGTTLALVAVLRALNTQIQALAASIAAQLAAHPDAEIFTSLPRSGTIRAARLLAEIGDARGRFPTRDSLTCLAGVAPSTRQSGKVKSVTFRRGADKQLRDALCDFAGDSRRASPWAADLYDKAIARGCDHPHAVRILARAWAHVIWRCWQDHAPYDPAAHNSLQALLNRDQPSAARPRG

SEQ ID NO: 490921 - protein, 328 aa, unidentified
MQGKVSSERTAMATVYVGIDVCKEWLDIHLHPLGRSFRVANDTAGLRRLKRELDALDQMPRSALPIVMEATGKWHRAVHRSLHADGFYVSVVDPLRARLFAKACGFLAKTDRLDARLLAIMGEALKPAQTPPPDQALEALQELVNARSAANGERTALSNRMKTAVTAFLRKELTRRLAALDTHIARLDAEIERSIGAEPEMRRRLDILISIPGIGAVTAASLIAGLCELGACSGKQAAMLTGLAPLACESGERVGHRAIRGGRPAPRNAIYMAALSASRHNPDLARFAERLKKVGKPNKVVLVAVMRKLIVLANTLIAKNRIWTPNPP

SEQ ID NO: 490922 - protein, 414 aa, unidentified
MEGQQKTHRGLEQDPMRQDKPMLKISVSRLAHRGDIMRTDIEERVLAVSLELAAAKWKVALHDGHREQPAVHTVAQPQASARLQEVLDLIEQHKKKWSLPAGLRVVVSYEAGQDGFWICRALQAHGIKCYVIDPASIPVERHKRRAKTDRLDVIKLVINLRAWLRGERDRMHVVHAPSPQDEASRHLMRDRGQLQKEVLQHRDRMRKLLATFGCWDEVDHKHFAGRLARDEVKCHDGAPLPPEMRERLLRECERLALAQQQLTALEKTRQASLPAPARKRRDDLARLKGIGEVGASRLALELFWRDFSNRRQVGACTGLVPQPYDSGESQVDQGISKQGNRRVRALLVEMAWCWLRHQPDSALTRWFNARTQSTGPNRRARRIAIVAVARRLAIALWRYLKDGEIPEGARLKSA

SEQ ID NO: 490923 - protein, 285 aa, unidentified
MATWVGIDIAAKEFELVSRIDGKSSRPMKFKQTSEGHQRAIEHLRALAPSGVVMEATGVYYLDLAVALFRAGLPVMVINPKSFHHFAKLMLKPSKTDGIGTALLAEYGERMTPARWIPPDTTCLGLRDIGRQINRLTASRTQAKNRLHALQAKGMTLSLLLEDEQEGIALLGELCVLPREMKASQVSRYAGLDVRLNLSGTSVHRPARLSKAGNAYLRAAMSAVRHDARAKAFNDALVGRGKKKIQALCAVMRKYLTGLWACLQLGTPFDSTKLFSDCHQANACN

SEQ ID NO: 490924 - protein, 359 aa, unidentified
MKKVFIGVDVSKEKLDATIIEKTEARHEVTGYETFENSKDGIRKLSAWVRKTAKATKEDCLYCAETTGGYDRLLCEQLYAKGLTVWRESALEIKRSSGLRRGKDDKTDSKAIAEYAMRHADKAEPYRPADKRLEELRELYLYRDSLVEEKKAKATRAKEIKATCTNSPSATFMHKTSMEDVKRIEGRIRECEKRIVRLIASDEGLSRNYGHVTSVKGISLVNGVALLVYTANFTKFDNPNKLATYYGVAPFRNRSGSSVNSRADVRCYSNRKLKGQLSQAALIATLYNPTLKAYHDRLIAAGKPRSVALNNVKNKLLHIIFSLVVHDCDYEENHEWKRKLQNSGTGKTEAVSEQNCHQP

SEQ ID NO: 490925 - protein, 371 aa, unidentified
MDHSTFVGLDVHKKRTSVALAEAGRGGEVRFHGEIPSTADAMRRLVENLGRPGRRLAFCYEAGPCGYGMHRLLRGLSQDCIVVAPSLIPSRPGDRVKTNRRDAVALAKLHRAGELTEVWVPDDAHEAMRDLVRARATARRVLGKARQHLQGFLLRHGRVYSGKRGWTQAYRRWLTTVRFDHPAQQIVLQDYIHAVDDGDVRLACLEQQIEELLPSWSMAPVVEAVQAMRGVGLIVAVTVVAEVGDFSRFANPRQLMAYLGLVPSEHSSGASVRRGGITKAGSALARRVLIEGAWTYRMQARVSRKLLDRIEHLPKEVRDTAWRAQRRLCNRYRRLAAAGKPKVVVTTAIAREMVGFIWAIARMVQPRPAIG

SEQ ID NO: 490926 - protein, 350 aa, unidentified
MTMVGGLDVHRQQITFDYVDDDGVVHWGQIRPATRNSLRGWLAEHCPDGDGEFGLEGCTGWRYVSEELAAAGVGVHLGDPAETAALRGRKKRAKTDRADAKLLRTLLLEGRFPESWIPPAHMVEIRTLGWLYCSLIEERRGWQQRIHAQLFHQGCPPIRALLSEAGRAALAVAELSAAGRQYVQTALRRIDELTPEIDSLRAQLVNFARRQAGCRALQAHYGIGWLCAAIMWAEIGDARRFSSSDQLVRYAGLDVTVYSSDTKRSPGHLPRQGSPELRWAAFEAAKCAARRGSPDYAYYRRLAAKRDGHNGKNPTLAVERKILRRCYHMLRELGDAALALPVPDRQEVAA

SEQ ID NO: 490927 - protein, 438 aa, unidentified
MIHPHAAGIDIGSREHWVAVPEERDEPSVRRFGCFTADLYALADWLKRCGVETVAMESTGIYWIPLYQILEDRGFEVKLVNARHVKNVPGRKSDVQDCRWLQRLHSYGLLSGSFRPEAQVCVLRSYLRQRDNLVRYASAHIQHMQKALGEMNLQLHKVLTDITGVTGMRIIRAILAGERNPAALAALRNYRVKSTEDEIAKALEGDYRTEHLFSLQQAVELYDTYQQKIAACDGRIEALLGSFEPRVKGEPCVPATPRKRRKNEPYFDLRGHLHRVTGVDFTQIKGLDTSTVQTLLSEVGLDPTRFPSEKHFCSWMGLCPDHRITGGKVKKRSTRKVSNRAADAFRLAAQTLANSASALGGYYRRMRARLGAPKAITATAHKLARLFYRLWKTGDAYQDPGADYYERMYKERILSNMKRKAKELGFMLELKPLERAVS

SEQ ID NO: 490928 - protein, 337 aa, unidentified
MNYVGIDLHKKTISLCLVNQEREVLNRKRFYCHDPERIVAFFEEIRPFEAVVEATASYEWLIGLIEPLADHVLLAHPKKMRVIAESTRKSDKLDAQVLAEFLALDMIPQAYRPSKRQRAHRILVRQRSYLSRRLTSVRNKVRRILSNYNADQKDLFTEAGLVYLSKTSVIEADRFVLDQLVVEFRLYTQQLKEADQRLEAFAREAPAKEAEARAILATIPQVGPVTIDVVLSELAEVSRFRSQKKACAYAGLVPGQRESAGRSRELGITKEGSGSLRWVLVQAAWRLVNSTTRWGRIFEGLLKRRGKKKAIVAVARRLLCVMVSMLQSGRGYKAAMG

SEQ ID NO: 490929 - protein, 383 aa, unidentified
MKSVCGLDVHKDSVYLCILSEFGELIEKVFGVLTYQLEEMRDLMLHHHVIEVSMESTSVYWIPIWRVLSPHFKLNLANPYFIKQLPGRKSDVKDAQWIAECTMKELIRGSFVPPETIQQLRQYDRRIFDLNEEIVRKLSKLDAVLQRCNIRLSNYVSNVDSKSYKTVVRAISQGISAPEELVKLIHGRIINHHGIDVITASLKGVVSLAEIDMISQLRDELDMAEAHKEKCQARMLEICEREFPEELRRLQTIPGIKERTATSLIAEIGTDMNKFETANHLASWSGLKPRNDESYKKIKSRSITHGNVYLRKTIIECAWAASRTKDCFFSRFSYHQTQVRKKNKMKVLVAVARKMLIAVWHVLHDNTNYIDFNTDCKTSQTRG

SEQ ID NO: 490930 - protein, 342 aa, unidentified
MQIAIVGIDLGKNSCSVVGLDLAGRVVLRRRLRRDGVIKLAAGMSRCVMAMEACCGAHHLGRLLRDHGHQVRLMSPEYVRPYVKAQKNDDRDAEAIAEAATRPTMRFVELKSEAQLDMQSLHRARDRLVGERTALINQLRAVLLERGIVVPQGRRKLEHYVDALLAEGGIRLSLRTGLLVEDTRAEWRELDRRILAFDDEFAAQARTDETARLLTSIPGIGPLNATALTAAIGNAQTFRRGRDLAAWLGLAPKQVTTGGRPKLLGISKRGNGYLRKMLIHGARAALPTLSKSEAPLGAWLRGLLARAHVNTVVVALAAKLARIAWAVIRSGEKFDMKAATAS

SEQ ID NO: 490931 - protein, 364 aa, unidentified
MVTAAEHVYSTWQFTKQQEEKMEQRHIGIDLHRNNFTCCVRLENGRNYLSAWKLEALPQFVKKLRATDEVAVEITSNTRLFYDSVAPHVARVVAVDPNQFRVISQSVKKTDSNDARNLALYLSKGLLPEVRMKEKNQAQIASLTQTRDTLVKLRTALKNKVNNILSAHGINLEKEALSAEKKLREVLALRFDPMVRIELKVVVEQIRSLNESIAELEKTITEEGQKLPGHKNLTSIKGIGPLSGSILLSVIGNIHDFPEGGKLAAYFGIVPRVSNSNETERSGRITKRGSKLGRTALVQCALIAQRYSPYLRRFYEKTKARRGSGKAIIALARKLLGIIYRTLKNNWVFEDFPNFVLAEEKAAA

SEQ ID NO: 490932 - protein, 364 aa, unidentified
MYDSTTTVTVGLDVHARSIRLAAVRADELLEERTLPYDEQAVEQVLRRWPVVRCCYEAGPTGFGLQRFLVERGIDCSVVAPGLVPQRPGDRVKTDPRDARKLARLLAGGLLEPIHVPSRELEAARDLVRGREDARLDRMRDRHRLSKFCLRQGRVLPTSSWTVMRRKWLGEQRFEFAAQQITFDSYVHTVDLVDARIEQLERAIRETAEQEPWRGLVARLRCLRGIETLTALALVTEIGDFDRFTTAEEFMAFVGLVPSEHSSGEKRRQGSITKVGNSHVRRLLVESAWHARRRPKVGYELARRQRGQDAVVVERTWRCQQRLYQRWQRMAGRGKPQQKIVVACARELAGFVWAIATEQPLRNT

SEQ ID NO: 490933 - protein, 408 aa, unidentified
MRVIGLDVHRTMAVVAILDGTSLSSGGRIDLTRDAVIAFGRKLRSDDEVVIEATVNTAAIVRLLRPFVRRVAIANPLQVRAIAHARIKTDKIDAAVLAKLHASGFLPEVWMPDEATSMLRRLVAQRTQIVQQMTRVKNRIHGLLHANLIPPFPGELFSIAGRSWLEAQPLAHDEKLAIRRHLADLDYRISDLAALEQALAKRALQDERVQRLMTISGVHVAVALGLLAAIGDIGRFASPKKLVSYLGLNPSVHQSGNRAAHHGRITKQGRSHARAMLVEAAWAAGRAPGPLRAFFVRIQGRRGKQVAAVATARKLAILAWHLLTKAEDYAWARPALLQAKLRHVELLAGQPAAKGRKPGRAHAYNSRAVRDRERAWLQQTEQAYARFVANWQTTPPRRTGAASGTRSS

SEQ ID NO: 490934 - protein, 355 aa, unidentified
MTAFYDYHIGVDYHKSYSHLVVQDSSGKTLRSGRVKNDRQSLGGFLERYRENSHAVVEATRNWMVMYDWLDDICDDVVLAHPWKVKAIADAKIKTDKIDATVLAHLLRADLVPEAWAPGERARELRVALRERMFYVRLRTMTKNRIVTAFDRYPEQTAQLKKLGDLFGKAGRVQLAQVNVSEIDRIQIDRGLEFISDVDIRIKQSEATIRGMTKTNANVKLLKTIPGIGEFFARLIDAEIDDIKRFRNPKKLAAYAGLVPSTYSSGGKTFHGKIIKQGNKWLRWAFVEAVSPAIASDAQLRAQYEHVKIRGTNKARVAIARKLLTIAFQILRDQRAYEPRGTNITEGVSTISRLS

SEQ ID NO: 490935 - protein, 403 aa, unidentified
MASTSPHPASLLRVQTREVVTKIMPCGCDRVSSQCIGFPRGGMLKTEGRARRFVLACRGGVPMSASAPLLCVGVDIAARTLAIVFAPTDAPPLPALTLPNDRVGWLALIDRLTANGATRATTLIVMEATGAYWQGLATALHTADWPVSVVSPGRVRAFAHARMRRAKTDAVDAALIADFGHRMTPERWSPPPPEITALQLLLRERDDLIAIRTQLSNQRHAMAHLPQGASALGMARGVVAQVVEEQIAVIERAIKQHASATTTLATEIARLTTISGVGALTAAIVLTEIRPLRGSATPAEVVAFAGLDPAPQESGTSVRGARHISKTGNARVRQAVYMAALSAVRCNPVLKPFYERLLARGKKKKVALVAVARKLLVLMVTLLTHERDFDPTWAIRHVATHPR

SEQ ID NO: 490936 - protein, 317 aa, unidentified
MEFIGIDVSKDRVDIAIGSSDSGFSVLQLANREDALADWVATLEDRTIERVVLEATGGYERLAVRLCATAGLPVVIVNPRQVRDFARSMGELAKTDRIDARMLALYGERVKPPLRSISSEEQEDFRDLAARRRQLVSMLTAEKNRLAATRKARRRRPLQAHIRFLEKQIENVERELEAMIEASPLYRSTNALLQSVPGVGPAVSITLLADLPELGRLTRKEIAKLVGVAPLNRDSGNFRGRRSTWGGRAHVRSKLYMSALVAVRHNARLKTYYERLLSNGKSAKVALIAVARKLLTILNSIVKSATPLDPIFEIPKA

SEQ ID NO: 490937 - protein, 357 aa, unidentified
MTTHCAVDFHARSQTIKYVSDRDGEIRMVKLVHETDDVRRFYSELEPPVIVALEAHGYTAWFEEMLAELGITLRIGDAAKIRASNPRRQKSDKRDTDHIFNLLMEGRFPDIYAPSPESRAIRQMIGYRHSLVKTRTRIANSISAIALTRGATRKPKVLTKKGRKRVLSMPMNPELAQQRSDWFEILDLVESKIKSIEATLEAEAKNDPRVILLRTQPGVGLITGLTLVHVIGPPERFASSRKITAYAGLDPVEASSGEKKRIGAISKQGSRYLRCLLVEIAVTCARLDKTLGALYGRVSKRHPKNVAKVAVARRVLVRSWIMLRDNIDYTEFCRRGQKTVASNRVCLGGPMGKCPKP

SEQ ID NO: 490938 - protein, 414 aa, unidentified
MKVTRWIGRAIGLDVHRDFCVVAICEDGVTSSAGRVPATPEGIRALAESLLPSDRVALEVTGSCWEVARILEPHVNRVIVVSPDDTGITSARAKTDKLDARTLASLLWRGELEAVWMPDERCRVLRRRLARREQLVRSRTRTKNEIHACLQRRLQGKPPCSDLFGVKGRQWLAGLELPLEERESVDAGIRHVEFLDSEIAAVEKLIAQQALSWPEIRRLMTVPGVNLICAASFIAAVGDPNRFLTSRKLVAYLGLDPKVKQSGEAPARSGRISKRGSPAARWALVEAAWTAVLQPGPLHAFYERTKNRRGHGKAIVATARKLAVLFWCMLTRSEDYAHQQPSLTKKKLRRLEITAGAPKNTRRSAGIWSTNDLMRQAERELALQAEASYKRMVTDQQAGAPARKVGASVTPERA

SEQ ID NO: 490939 - protein, 322 aa, unidentified
METTDRNTVEFVQLVERGCGIDVHKSLIVATIKGTGIKEQTRSFDGFTASIEALRDWLLENQITHVAMESTGVYWKPIYNILEEHLEILLVNARHIKNVPGRKTDKKDSRWIAKLLLSGLLKGSFIPPKEIRELRDLTRYKRKIVQQISSEKNRLHKILEDANIKLSSVVSNLSGSSATKIIDAMIAGEEDIAELLKFRHGKMQSSVEDLAASLKGSLTNHHRFMLRTIKESILEKEKTIEKLDRQLEAQLKAHELVLDAELLESIPGVGKEAAQYIIAEIGTNMEQFPNEQHLASWAGMSPGSNESAGKKKVVEPPTETNI

SEQ ID NO: 490940 - protein, 430 aa, unidentified
MEIVYPRSCGVDVHKSFIVAVICISESVKPKYIKKRFSTFNNQLIQFRDWLIENNCQNVCMESTGKYYIPVYNALEGHISNVVVANPKWVKAIKGEKDDNKDAKWIADLFKFGIVRSSYIPEKDIRILREFTRYQYKLVTMRSSEKNRFQNALTTGNCKLDIVFSDIFGKSASAIVDTILSNNPYTSEDILSKVHARCKASHEDILSAVDGIQLTQFQKARIRIVQKHMEYLDSLLGEIQHHIDLMVANYEEYIQILCTIPGINRKSAITIISEIGTDMSQWSSHRKLAAWAGLAPGCNESAGKKKSVKISKAGVYLKPCLVQVAHAAVTDKNCDYYATKFKKISKRRGKKRAIIAIARKILIAVYHLLKTGEVFNPTDMADVETTKKQRIEYVKNNLRNAFNQLSRTGLSEAEILQLIRKESPNSPQIE

SEQ ID NO: 490941 - protein, 413 aa, unidentified
MLKIVYPICCGIDVHKKFIVACIASTDDKGITTYKLSRFSTFTNGLRKLADWLRSNSCTEVCMESTGKYWIPVFNVLEATCKITLAHPKYVKAIRGKKTDKKDAKWIADLFKHDLVAGSFMPPLLIRQLRDLMRYRLKLTNFKSSEKNRIQNCLTVSNIQLSNVVSDTFGKSSMAIIEHLLENPNDKDFDFVPLLHSSMLDKVDDIRLAIDGIITSDQLQKMNIILQHYDELTKCKLNLESLILSLAGPIAKELKLVSTVPGIKNPFTAIAIISEIGADMSVFPTAKHLCSWAGLTPQNNESAGKKKSVRISRAGVYIKPLLVQCANAIVKSDKHPEIRGRYLSIKKRRGHKRAIIAIARLMLTAIYHILKKNEPYNAELYKKAELIPFTREITIEQAVFIAQRQGYSVIKAG

SEQ ID NO: 490942 - protein, 355 aa, unidentified
MTSAKYIGLDVHKESISIAVLNSAGKVVMECVIETKASTILQFIHGLGGDVHLTFEEGTWAGWLYDLLKPYVTELVVCNPRKNALLKEGSKSDRIDAHKLAELLYMSKLSSVYHGEHGLRMLKELSRSYLTITKDLGRVMNRLKALYRGWAIPCAGTQVYAPHYRSEWLAKIREAGVRRRAELYYQQLDALRLVRQQARKELLAEARKHRATKLLRQIPGIGPLRAAHLVALMQTPHRFRTKRQLWTYSGLGLETHDSAQYRVVEGQLQRSKKPVTLRGLNDNHNHDLKDIFKGAAMRASTAAGPLHDFYEALLAKGRKPTMARLTLARKIAAITLIVWKKEVRFDANYLKQQAA

SEQ ID NO: 490943 - protein, 403 aa, unidentified
MTDRYYLFPFYLLEFEQNVRNYVCHDIQDIRPGEKTKGGSSLYIKLKMMKKILKEVLGVDVAQNELVVTAGRMLDDLSIDLYAHKVFKNNESGFLALLDWTKKLSSDEFKVRFVMEATGVYHQKFAFYLYDRGREVTIVLPNKISNYIRTPEDKTITDKSCSAAIAQFGLERNLDQWHRPKKVFHVLQQLTRERDQIVSERVTVKNQIHAEKSEVEPNERSLQRLYERIKLLNRQEKEIKADLKMLVNGDANLTGEIKRICSITGIGELTAIIVLAETNGFELIRNKKQLTGYAGLNVKEKQSGTSVKGKPRISKKGNRHLRKAMYLPALVAVRHDKNFTEIYLRIVSKHGIKMKALVAVQRKLLEMIFVIYNSKQEYQKEYSVLKESSALNLKDQHATLASS

SEQ ID NO: 490944 - protein, 310 aa, unidentified
MDRIIVGIDVSKDRLDVAVRPSGEAFTVSRNATGVEQLVARLRKLSPHIVALEATGGFETVVAAALGAAGLPVVVVNPAQVRAFAKAIGQRAKTDPIDARVIAHFAEATNLEPRPLPDEQTRLLADLVSRRRQIVAMIGAERQREQRLTAPRLRKSIARLIKALEKELASLDADIDDAMKGSPAWRAKEELLTSVPGVGPVITRTLVAELPELGQLGHKQITALVGFAPFTRQSGKWRGKSFIGGGRTAVRAAMFMGAMVAKKHNPVLKAFFDRLVAAGKPKLVALIAVARKLLIILNAIVRDNRPWQTA

SEQ ID NO: 490945 - protein, 334 aa, unidentified
MLELLPPLPPGAVCVGVDVSKDKLDVHVDNAKKPFSVPNTPAGRGKLIARIRGLPLARVVVESSGGYERPLLFEMLEADLPGSHVNPRVVRDYAGSFNQLAKTDPVDAKVLSCFGRERQPRLFTAEDKLRHMLQDLNRCRRQLLEQITALKNQAESALHPSAVKVLSNSAAALEEQLEVIDRDVQAEIDKLPELKRRQELLLKVEGIGPVTSRTLVIELPELGKIDRRKLAALVGVAPLNDQSGLSDNPRVTRGGRPHVRSALYMAALTGARCNPVLAPYYKRLTESGKPAKVALVACMRKLLTHLNAVVAHDGQTRNVPDGGEPAPGDGGEKE

SEQ ID NO: 490946 - protein, 421 aa, unidentified
MAYRIAGIDIHKRVLMVVVASVAEEVADTTGAAMEFECRRFGTGASERNHLVSWLQQRQVREVVMESTAQYWKPVWLDLEPHFEKLHLAQAQSNRAPKGRKNDFRDAKRLARRLLAGELMLSFVPEPEQRTWRLMTRGRLQLVRERVRLQNQVESLLEEARIKLSSVISDLLGVSGRRILEALSQGETDAAKLAELGDERLKCTKEQLADALRGAPEPGHLKLLKLHLERLKLLDEQIDQLSQMSAAALRTNQSAVARLAEVPGFGAESSQQMIAEVGPSAEAFASAGEFASWSGTCPGSDVSAEENHSSRCPKGNKYVRRILTEAAQAAVKKKGSHFQNVFRRFLPKLGYKGAIWVVAHRLARLVWKILHDGVSYIEQGEETNPRAKKRRAQKLAKALRKLGYSVTLTEIKLGAVANASA

SEQ ID NO: 490947 - protein, 338 aa, unidentified
MKLYVGIDLHSNNSVLVIIDKNDKVIYSKRLPNDAQVILGVLAMYKEQIDTIAVESTFNWYWLVDALQAEGYEVRLVNTAAVVVYDGLKYSGDFADARHLAHLLRIDLLPCGYIYPKEPRALRDLARKRAQLVRQKTTQLLSIKNLLMRNLGRDTPSYTIKTWTAEQVAALPLLPEQLLALQANWTVMQALAQQIQAVEAELLRQLKPCKDFQLLKTVSGIGDILSMTICLETGDITRFDSCGNFTSYARMVTSKRESNGKKKGEGNRKCGNRYLCWAFMEAAHFAIGSDELIKRFYQRKCAKNLKVVAMKAVAHKLARACYNMLKDGVEFDVKRAFN

SEQ ID NO: 490948 - protein, 347 aa, unidentified
MIIIGCDLHTRTQQIAMLDTETGEVVERRLEHDSGEAKRFYEGLKEQALVGMESTGYTRWFAEMLAELGHELVVGDAAKIRAMEPRKQKHDRRDAQHLLNLLVRGDFPRLWLPSAEERDVRVLVEHRHQLVELRTRAKNGLQAMALSSGLRRRGRLWSQAGQEELQKIPLREGMARRREDLLRLLAQLNEWVKELDQRIGQEVARRPDAQRLMTHPGVGPLTALGTVLVLGPVERFPDARHVTSYVGLIPQEESSGQRQRFGHLTKQGNRLLRFLLVEAAQTASRFDPGLRRTYRRLAFRKGAASAKVAVARKLAIRLYIMLRDQIDYAEFVRRGSHAGMLGDVALA

SEQ ID NO: 490949 - protein, 370 aa, unidentified
MKKRITFVGLDTHKNSIEVALADEGTNSEVRLYGSIGGDLDSLDKMIRKLRQPGAELRFVYEAGPCGYEIYRHLRAQGLHCDVVAPSMVPRRSGDRIKTDRRDACNLTRLYRAGELTAVYVPHEDDEAMRDLVRGRQDAINAQRKARQQLGGFLLRHGVRYPGKCLWGLAHGRWLAGIKMPHPAQQIMMQEYIHTVEECTQRVLRLNEQIQQLLPDWRMHPLVAALQALRGVAPVVAATVVVEIGPMGRFKNPRQLMAYLGLVPSERSSGGSVRRGAITKTGNGHARRALIEAAHSYRHPARISRTILKRQETLAEPIRQIAWKAQLRLCARFRRLIARGKSRNRVVAAVARELSGFMWAIAKQVPVPQG

SEQ ID NO: 490950 - protein, 370 aa, unidentified
MNHYITVVGLDVHKETIVAATLPPLSDRATETVTIENRPEAIEKLVKRITVKAPAVFVYEAGPCGYEVQRQVATLGHKCVVIAPALTPVRPGDRVKTDRRDAEKLARLYRAGELTEIRIPTREDEAARDLVRVREDVLGDRLRARHRLSKFLLRQGRVYRETKSWGVKHRAWLKPQHFEHEPSQQSFEAYIRAHEEAEARLEVLNQQVQDLAQKEPYRVPVRHLRCLKGIDTLGALTLAVEAQEFRRFPNARAFMGYTGAVPSEHSSAGKCRRGSITKTGNAHIRRILVEAAWGYRRGGVMNPELALRRQGCPPEVVSIAKKAQNRLHRKFTRMVSRNKPNQVAAVAVARELAGFVWSIAQHSASAQGIS

SEQ ID NO: 490951 - protein, 315 aa, unidentified
MPNTKEQFVGIDVSKDWFDVAILGPKGRKQFANMKRGIGKLVKWMRTLQPQLIVVEATGGYEEALVLALFEAGLPVALVSPQRVRQYAKAKGRLAKTDPLDAQLLAEYGKAMQPRLFVGKREERKQLSALVGRRNQLNAMLQAEKNRLRAQSGAIRSSLERVIACLAAQLQQIDQEIRALLQQHTDLQAQEKLLRSAKSIGRVTAATLLADLPELGQLDRQEIAALVGVAPMNSDTGKKRGYRKTKGGRPAVRRTLYMATLTGIRYNPVLKPHYEQLRQRGKEKKVAITACMRKILTILNAMMRDQQPFRYPATA

SEQ ID NO: 490952 - protein, 341 aa, unidentified
MKLIRVGVDLAKNVFQLHGVDRSEKTVWRRKLVRGDWIKELLERIEPGCEIGMEACSGAHHWARMLQAKGYTVKLIAPQFVKPYVKSNKNDANDAEAICEAMSRPSMRFVAIKTVEQQDIQAVHRVRSGLMDQRKAKANQLRGLASEYGLVAPKELLHLRSAIPRWLEDQENGLTERFRRLLHGLWRDLKALDERVEELDREIGQIARQDPVAIRLQQVRGIGPLTATALLATVGDATQFASGREMAASFGLTPKQNSSGGKERLLGISKRGDAYLRSLLVHGARAVIRTAQAKTDRLSIWVIRIATTRHPNIAAVALANKTARIAWAMLTKGTDYRSQAA

SEQ ID NO: 490953 - protein, 411 aa, unidentified
MNPVVGLDVAKGESQVQMFLDKKMPYKNSVKVEHTVEGLEELHSYLLDLERQTGMKPPVVLESTGHYHAPVVQFLEAREYIVIIVNPLVSYRAKSSNLRKTKTDAIDAYHLGELYYKEDLEPQKKRGIQLLNLRHLTRQHENMTEIMVQTKLQFQAVLDQVFPDYKGVFGDLYAEISLKTLQSYSTSELVLETDVEEIAQFIDAHCKARSFKWTREKAEALVLAAERNPFQSTLYQSLLVSLKMYIDLLQAYHQQLSTLEREIDQLAAQLEEYELLQSIPGVGEKIAATIISEIGEIDRFNHPKKLVAFAGLDPSVFESGRFKGTKNHITKRGSARLRHMLFTAVRCSIRDSRKKKTTDETIARNKRLRDFYDLKREEGKPYKVAIIACANKLLHWIYAMLKTKTPFQETI

SEQ ID NO: 490954 - protein, 399 aa, unidentified
MYDTSGIGVFLGLDVGKGEHHGHGLTPAGKKVFDKRLPNSEPKLREVFGKLKTKFGTVLVIVDQPANIGALPLTVARDCGCEVAYLPGLAMRRAADMYEGEAKTDARDAFIIADVARTNPRALRQITVADETEAELAMLVGFDDDLAGESTRTSNRLRGLLAQIHPSLERVLGKRIHHPAVLELLQHLGSPEQLRQAGTEQITVILKPKAPRMAGRLAAAITQALAEQTVVVPGTAAAEVIVPSLARQLSEILTQRDALEGRLAALLEAHPLHRLLTSMPGVGVRIAATLLVTIGDGRTFPDADHLASYAGLSPATKASGSSIKGEHAPRRGNRQLKRAMFLSAFAALHDPASRAYYDRHRNSGKTHTQALLRLARRRITVLFAMLRDGSFYAAQPATS

SEQ ID NO: 490955 - protein, 285 aa, unidentified
MKQYDHVFGVDVSKKTVDITYVINQQFTHRQFTNDDAGMEQLMKWLKELTLEFEKTLFCMEATGLYCFTLTHFLASHSIDTWIEHAAQIKKATALARGKNDKVDSQRIALYATKNLDRLRLWKPVTATLEKIRHLASLRERLVDTKKRLATPIKEFEEVGNLAMAKLLTKTIKSSLAAIDKDLKNIETKIIDVINEDDNLKLLYKLITSVVGIGFVTAINLIVHTNGFTMLKDSRKLACYGGVAPFEYSSGSRRRGRTKVHYMANKKRKCKRNMEQVTEVKREES

SEQ ID NO: 490956 - protein, 471 aa, unidentified
MHKNNKERINKKNSKRPPQGRIQPEGFPVVRPDVAGIDLGSEGHWVCAPTVDGAALEVQEFGATTPELERMAAWLRERKVVSVAMESTGVYWVPPHEVLERHGIEVVLVNTRELARVPGRKKTDRIDCKWIQRLHSCGLLQGSFRPPEQICMLRTLVRDRGTLVAERADWVRRMQKSLDQMNVRVHRAVSDMEGKTGMAIMRAIVAGERNAQELAKLRDPRCQKSVAEIAAQLSGHWREDHLFSLVQGLKMHDAIEERVQAYEQEILRKLAEMERAECQGTSAPQSANPNKAKMIQKRGEEPLRQALYHMSGVDLTGIDAIGVGAVQVVLSEYGPDLSRFPTEKQFVSHVTLAPNQPITGGKPMRKKKKRESASSRVAAVLRIAATSLRNSQTALGAYYRHIARRISPDVAVFATARKLATLIYRMLRWGQPYVDEGAEAYEKRYREARLTSLKDSAGHLGYQLVPKPMIP

SEQ ID NO: 490957 - protein, 427 aa, unidentified
MPYRIAGIDVHKKMLAVAVADVEVEGEVHFERLKVGTSPVQLRALAEWLVEREVEEVVMESTAQYWRPVWEALERYWTPKRRTRTDASPVSGTLHLAQAQSNRGAGGRKRDFPDAERLVKRLVAQELTLSFVPDAEQRLWRTVMRRKYQVTRSRVQLHNRLESLLEEAHIKLSSVVSDLLGTSARRMLHAVGDGETDPAALAALADQRLRATPEQLRDACGACADLHPVYRWLLKLTLDELRMIEDHLAQLDQQMAQLLAHHHAAVQRLAEVPGLGVDSAQQIIAEVGASAAAFPSAKQLASWMGACPGNEESAGVNYSHRCPKGNRQMRRVLNQAANAAVKAKGTIFAIVYRRLVPRLGHAQAIGAIAHRLCRLIWKLLHEGIRYEERGPAVSVEAKKVRTRKMIRELRTLGYRVELLPAPSSNPA

SEQ ID NO: 490958 - protein, 319 aa, unidentified
MTQIVLGIDVSKRTLDVALIFEARTLCKQFKNSTDGFRSLADWLASLEIKQVHACLEATGIYGEAVALFLHECGHLVSVVNPLRIKGYAQSNMQRNKTDRLDARLIADFCQTQKPESWQPPSAEVKHLQSLVRRVEVLEEMLQAEENRLTNAAPQIKSSIERIITLIKEEISELERQIKQHISQNSNLKEQSELLQTIPGIGARTANLLLSEIEFDRYDSARAIAAQAGVTPRKKQSGTSLKQTSLSKLGNARIRRALYFPAIVARQHNEIVKEFAKRLKKNGKTPMQIVCAAMRKLLHIAFGVLKHKRAFDASLAFSA

SEQ ID NO: 490959 - protein, 359 aa, unidentified
MCRVGKPVDSLLSLTLQINIMAIQSKKIIRESKPLFAGIDVGAEELALVIRKNGTPYKAQKFTNTPADRARLVKKLAGLPGIIVCLEATGVYHFDLSIALHDAGLALMVVNPKASHNFAKALMKNSKTDAVDAETLAQYAERMDFVAWTRPSDEKIAIRSFARRIDALTRQKAAAKNHLHALSATQETPKGVLRDVNLSISQLEKRISRLDREALALIGKHPDLERVFLLLVSIKGVAQTSAIALMGEILLLPPGLSQREWVKFAGLDPRAFDSGKSVHKQARLSKAGNRHIRSALYMPALSAKQHDPHVKAYFQHLLDNGKKPLQAVCAVMRKLLHAIHGMLKLDKPFDNARFYAIPA

SEQ ID NO: 490960 - protein, 393 aa, unidentified
MPVLATQPEATIAVRTDLCAIFVSLELSRSTWLITSLSPGGGEKMSKYSVSAGDIEGLFRRFGDLQERARVRTGQSFAVVTIQEAGLDGFWIHRLLEREGIESWVVDPASILTSRRRRRAKTDRIDGETLVRTLLAHKRGEPRVCAMVQAPTPEDEDRRRLCRERKVLTAERILHVNRIKGLLFAQGVRDYEPLRRNRRVRLEELKTGDGRCLPVHLKAQISRELDRLEIILVQLKTVDSERDALLAKGNEDQSPTPASLLVQLKGIGPEFATVLWSEGLYRSFNNRRQVAAYAGLAPTPWQSGSIDHEQGVSKAGNSRLRTTMIQLAWLWLQHQPGSALSIWFRERVQRNGGRGKKTAIVAMARKLLIALWKYAVHGVLIEGVVANAAFEKG

SEQ ID NO: 490961 - protein, 386 aa, unidentified
MDHLTTLSVPDPTGICGDCATLFVSLELSRSTWVATSLALGSRKMSKHTLVGGDARKLLDLLARLKNKAEQRMAAPVKIVAIQEVGLDGFWIHRLLETNGVESHVVDPASIAVPRRHRRAKTDAIDGETLLRTLMAWQRGEPRVCAMTMPPSPSEEDRRRVSRERAILLRERIRHTNRIRGLLFGQGITNYNPLHKNRREDLEELRTGDGRLVPAHLKAEILREIDRLELVLRQISEVEAERDEMLRPAQASSPAALLMRLKGIGAEFAGVLYLEGLFRHFENRRQLAAYAGLAPSPWKSGSVDHEQGISKAGNPRLRTTMIELAWMWVRYQPASALSCWFRQRVGSERGRIRRISIVALARKLLIALSRYIKHGEIPAGAIVKPV

SEQ ID NO: 490962 - protein, 503 aa, unidentified
MVLLLVVPPELMSPAMHGEVLMEGQDSQPGCRRLVGIDLGIASRHSVRVLEADGQLVCRSSCVPTVESLSAAERAALAGAPEGTRLAVVFEPTGPAWMPIAVFFARRGHAVYRVSSARASDLRKFLRRHAKSNGIDAETLARMPLADPGGLQQLELPGPAAAALDRRVRACDRLTRAASEHKVRIKDLVRRLMPMTPLTGDLGKADLAILEQLASPQALMAAGLAELTRLISTTSNKQQGQYRARQWRAAAAAAIELYGDDPAVPFDELAAEVATEVRLLRAVQAELAVHAAAREKHYLQVDPGQLARSLPGFAEISAPALVAVMGRPGRFRDGTRFKSYAGLAPRASQTGETDRKGQPMSKAGPSLLRATLFRAADTARRQDPQLARVYYQQMTERGANHLKATCVVAGHLAERAWMVMNRGTPYVICDSSGQPVTAQQARQIIAGKWTVPEEVRKRRRSRKLGGRAPQAATTGPDRRGDPPRPRSSRPRAQAVNLASASQT

SEQ ID NO: 490963 - protein, 316 aa, unidentified
MQSALFIGVDVAKDNVVVACSQETFASRTLLNKTSALKAFLVSLPPQSSIAMEATGSYHQNLADLAHRLGLRVYVLNPRDLYHYAKAMGLRAKTDRVDAALIARFLASEGARLRPYHPPTAAQRQVDHLLRRRAKIVSLKTALQLTCAEAPSIRAETASVLKSFAALLKKIDRQLDELQQAMPGRTQQLERLQTIPGVGALTACWLTNLLDRIKFRNSDALVAFAGMDPRPCDSGQKRGRRRLSKRGPAEGRRLLFNAAMAASRCTAWKEVYTRCRQQGWASTEAFMILARKILRIALAMYKTQTNFDPAFIGKRA

SEQ ID NO: 490964 - protein, 348 aa, unidentified
MSRTKAQSLSRMGIDIGKNTFHVVGMDDKGNILIRRCFTRVKLIEYLARLPQTTIGMEACPGCHWLARKAKSFGHTPCIVPAQFVKPFVKSNKNDLIDAEAIAEAISRPTMRTVIPKTTAQLDLQALHRIRERVVSHKTAVVNQARAFLLEYGLTIHSGIAKFTHDMPSLLSDEQNELSPSMRDILIDLWHEYRSLEEKLLHLRRQIESIADADGIAKRLTSIPGVGKLTATAMTAFVGNGQQFKSGRNLAAWLGLVPREYSTGGKQRLLGMSKRGNAYLRKLLIHGARTCVLHLNRTTNFLGQWVQLMEERGVHRNKVVVALANKIARIIWAVMTRPGAFYLQQREI

SEQ ID NO: 490965 - protein, 414 aa, unidentified
MQVVYPICCGVDVHKSFFVATIISTTDGIQPHYQKKRFSTYNGDIRAFADWLSLHSCLDVCMESTGKYWVPVFNILEERGINVTVANPKWVSVVKGNKDDIKDSKWIGDLFRLGIVPGSFIPSKPVRLLREFTRYRAKLVAMKSSEKSRFQNAFTVCNVALDSVVSDMFGKSASAIADYLISDEPFSPEHCVSLLHRSLKKKADAVLESIEGFSISPEQKHRIQIVRAHLDYIESSIEAVDAAIDSMAETQQSAISLLCTIPGVGRSSAITVLSEIGTDMSQFGSSKRLCCWAGLTPSNNASAGKKKSVRISRAGVYLKPALVQAAHAAVKSNTSLYFRTKYECISKRRGKKRAIIAIARMILTSIFAMLSTGEVFNPCDLYKIEMPETLVAKQKDKALKQAIRLIESQGLSVA

SEQ ID NO: 490966 - protein, 345 aa, unidentified
MRGASNNQEADVEHCGIDVATKSSSICVTDGRGAIVVEQSVTTDEAGLGRVLGGRRRMRCVLEAGPLAEWLAGVIEKLGHKAVVIDARKARGVIRTKKKTDRLDARNLAKMSRTGWYTAVHRKSVEARAMRTFLQARQGLVKTALAQGSRIRGLLKAHGLKLGEVAESHFGAAVRRLSLEKGPQLWEMLEPLVEVRGHALRAAEQMRKQVVRRAAAQPVHQRLMSVPGVGPLTAAAYVATIDDPSRFRSSDQVPAYIGLVPSVDQSGEIEVHGHITRDGDGLLRGYLVEAAHVLLTRKRGSCRLKRWGLRLAKKKGHGKARVAVARKLAALLHRLWITGELYQAA

SEQ ID NO: 490967 - protein, 348 aa, unidentified
METAYDGRQVVGMDLHRRRSVLVRMTEDGRRLGMARIANSPEELRAQLARAGKSPRVVLEATYGWYWAADTLAAAGAEVHLAHPLGVKAFSYRRVKNDERDAADLADLLRMGRLPEAWIAPPEVRELRELTRYRQKLVGLRTSCKDQVHAVLAKLGVPVTCSDIFGAAGSAWLDGLGLGQPYAGKVTSLRQLAGELTTEISMLSEVLAGLLAGDCGYRVIQQLPGIGPVLAAVITAEIGDVHRFRTAAQLCSWAGLTPRHRESDVKVSRGHVTKQGSRMLRWALIEAIQRVPRDSVIGSAKEAIITRRGKEARNIAKVAAARRLLTLVYYGLRDGQIRCLSAAPGRAA

SEQ ID NO: 490968 - protein, 356 aa, unidentified
MNKIIRVGVDLAKHVIQVHAVDAAGKVVTNRALKRDKFLLWCADLPAGCLIAMEACSGAHHWCRKLTERGFDARMIPASSVVPYRIQGRTGKNDANDAAAVCEAASRPHINFVPPKTLAQQGMLCVHRLREGFKEERTSCINRIRGLLAEFGVVLPQSPDVLRHHLSDVIEDASNDIASIARLVLQRAQDHWRELDAHIKWCDQRIADHQKTDAQVQRAAELMGVGSITASAVVATVGDFRQFKNGAQFAAWLGLTPKQNSSGGKSSLGSITKRGSIYLRTLLIQGAKAIALTRQYDNPIFLWVQKLRERAGWQKAVVALANKNARILWAVMTREKRYDAHHISSYPAPVPIMTPA

SEQ ID NO: 490969 - protein, 402 aa, unidentified
MTRSVFVGLDWAYRSHAVCVIDAQGSVIKHLTINHDRQGLGELQHALAAFGKALPIAIERPSGLIVDALLEAGHQVFAIHPNAVKASRPRYRSSNAKSDAADAFMLADLLRTDGHRWRAVQPQSPAIRALRALVRTRDDLVTTRIRLANQLTALLDAYWPGATGIFAAVDSPIALAFIEQWPTARKLTARQIAAFCKRHGYSGRRSPGVLLERLQAAAPSFCEPTLAQAQATAALALVALLKPLAAQIKSLDAHIARAMGQLPQAVSVMSLPRAGCICAAQILAELGDVPERFASAEQLCSEAGVVPVTYESGKSRAVTFRWACNHRLRRAITCLADNSRHASPWAASIYHAARKRGCDHPHAVRILARAWTRVLWRIWTDATVYDPAIHSSACRIEISREG

SEQ ID NO: 490970 - protein, 345 aa, unidentified
MDQVSRIGMDTSKHVFQLHGVNAAEEVVLRRKLRRKEMVTFFEKLAPTVIAIEACGASHHWARLLQSFGHTVKMIPPQLVKPYVKRGKNDAADAEALCEAMSRPTMRFVPVKTAEQQAALMLVGVRDQMIRHRTQLANAIRGYAAEFGLTAAKGMAHLVPLLERIQADESLPAAARELFAIQAKEYEQLQAQIAEIDAQLMARHRADECSRHLAKIPGIGPVGATLLRMKTPTPELFQSGRQFAAWIGLTPRDHSTAGKVRLGVITRAGDEGLRSVLVVGATAVIQHARRSGKASPWLAGLLKRKSPKLAAVALANKMARIAWKLMLTGEAYTATPAPAAAAGAA

SEQ ID NO: 490971 - protein, 277 aa, unidentified
MGEISMIGLDLAKNVFQVHGVDASGAVVVRRQLRRGQVEKFFAQLPACTVGLEACGSAHHWARVIGRYGHQVRLMPPAYVKPYVKRNKNDGRDAEAICEAVNRPTMRFVPVKSVEQQATLAVHTARALLVRQRTMLANSLRAALSELGIVAAQGIKGLRELMVKLEAPNQEIPEMMRGALLMLAQHWQALDVDERALEKQVAKAARGDGEARRLMEVPCVGPIIASVVLAKVPDARVFRSGRDFAAWIGLTGRDHGTGGKHRPGRISKQGDRMLGPC

SEQ ID NO: 490972 - protein, 337 aa, unidentified
MPGSDVMEARTVIGIDVSKATLVVAVQPSGETWTSDTTSPALEALVARLRERHPQLIVMEATAGYELPLAAACAAAGLPVAIVNPRQVRAFAQALGRTAKTDTLDAGVLALFGVRMQPAARAVTDGETQALADLVTRRRQLLEMLGAERRRLEHAPPTGPVTRDLRHHIRWLERRLADFDDEIGTAIQHSAVWRVNDDLLRTVPGIGPTTARTLLAELPELGHLDRRTIAALVGVAPFNCDSGQFRGRRRIWGGRRSVRASLYMAALVASRHNPVLAAFYRRLRDLGKPPKVALVAVMRKLLTIVNAMIKHQCRWNPKAASTPASTSEPARGVAVLA

SEQ ID NO: 490973 - protein, 344 aa, unidentified
MMYIGMDVHQVSTTFCLFDPSATDRQRYRTLTRPTTVEAIRAVLEPYDGCCKVTFEVGTQAQWVAKIVRPLATDVEVANPSRIPWLFRDGRKNDRLDARKLVTLLYLDQLPTVHLPSEAVSAWRALINHRRTLVKRRTMIKNQIRSIVRTFGCRCPHKSCWTRAGVAWLRSQTFDEARHFMVATMLDELAFVGSQLVKVEGQLDGIAETRPNVALLRTVPGIGPRTAEAIVAFTDMVGRFSNRKQFASYFGVTPTEDSSGLIERHGPISKRGPSVVRWLLVEASHRVIARCPALRAFFDRVHRGQKNRYKKAIVATGRKVLTICYGMMRDQTAFDARKVVRSAA

SEQ ID NO: 490974 - protein, 393 aa, unidentified
MNFYTKQHKYYCGIDLHAKTMYLCILNQEGEIVLQRNIQTDSEAFLKTIERYREDIVVAVECIFTWYWIADLCAKEHIPFVLGHALYMKAIHGGKAKNDKIDAHKIAVLLRGGMIPQAYVYPSQMRSTRDLLRRRMHLTRKRAELLAHIQNTNYQYNLPEFEKRIARKANRAGVAEHFPDESVKKSIELDLKLLDYYDQLLPRLEHEISLIAKAHDADSYFRIRSIPGIGRILGLLILYEIHDIRRFPTVQDFASYCRLVKSAKESAGKRLGSSGKKIGNVHLKWAFSEAAVLFLRRNPEARKYREKLQKKHGKAKSMTILAHKLARATYYILKRKEVFRMDTFLKRPRETERACPPNWYQQGQVRWMAPSVYGPDHQDVHPGIVCPVPLALD

SEQ ID NO: 490975 - protein, 326 aa, unidentified
MTYQLGIDISKAKLDVALLNADGKYRSKVFPNDATGFKSLLQWLRTHVPSGKAEVHVCMEATGSYHEALALFLSDQGVAVSVVNPLLVKRFIEVDRVRNKTDDGDAKCLARFCQMTQPELWEAPSVAVRTLQALVLRLDTLQEMRQGELNRLEVAHASVQQSMRDVIAGLERSIEAVREQIRQTIDDDPDLKQRQGLLASIPGLGDKTIPQLLAYIGRPERFKSVKALIAYAALAPLIRQSGTSLNHHKGTHPQGHRELKSALYYPAMVAGKYNPLIAAFWQRLKAQNKPGKVIVVACMHKLLAIAYGVLKSRKPFNADHLKPIVT

SEQ ID NO: 490976 - protein, 346 aa, unidentified
MIGVDTHKYIHVAVALDDFGGILGAEKFTADTLGYEQLIDWSMSHGHLLTFAIEGTGSYGAGLTAAVRRRDIGVVEVMRTDRRDRRLRGKSDFLDAENAARTVLAGNASAIPKSADGVVEMIRTVKVAKDVAVKARTSAMISLKAVLVNAPPTLREQLQSLTKMALINRCAGLRPGPVTSIEAAAKHTLRSIARRWQQLHDEITAHEKLLTELTTAAAPGLSAAFGVGADTAAEMLIVAGDNPHRVRSEPAWARLCGVAPIPASSGKTNRHRLNRGGHRQANAALYRTVIVRMQHHAPTKAYFARRTAEGKTKAEIIRCLKRLLAREIWSLMRPLREAPQVSESAA

SEQ ID NO: 490977 - protein, 341 aa, unidentified
MKKFIRIGVDLAKNYFQVHALESENGRAVTRKLKRSKMHAFFSQIEPCLIGMEACGSAHYWGRELKAMGHEVLLMPPAYTKPYVKRGKNDAVDADAICEAMSRPGMRFVPIKSPEQQATLMLHKTRELLVKQRTMSVNALRGHLSEFGIVAAKGIGRVDELLDQAESDATLPNAAKASVKVLAQALEGLDKAIDDLEKEISSAHAQNEMSRLLDKVPGIGKLIASVIAASVPDPSVFKSGRDFAAFLGLTPRQNSSGGKQTLGGITKQGNRYVRKMLVLGATSLLNVVGKRKGALRDWIVGLLAKKPARLVTVALANKLARILWAMMKNGECFRTEMFAKA

SEQ ID NO: 490978 - protein, 391 aa, unidentified
MAPTRTTHFMPTEDIFSVAFELSNGYWKLGLHDGKRENPAIQTVSADNPEQRLTEATDVISKIKSKWGIDSSVRTVVLFEAGQDGFWIQRALSALGFEVYICDPSSIPVERHARRAKTDRLDAIRLVECLLAWLRGERGRMRVIHVPSAEEEAQRHLVRDRGQMQKEVLQHRDRIRKLLRLVGCWQSIDGDIGNRLAQGQLRCYDGSALPEQLQHRLRRECERLALAEQQFATLEKNLIEQLPPALQERVTQLRKLKAVGPVGAVRMVLELFWREFDNRRQVGACVGLVPQPYDSGNSRVDQGISKQGNRRVRSLSIELAWLWLRYQPDSAITKWYLRRVHGNEKNKRGKRIAIVAVARRLVIALWRYLAQGEVPHGAVLKKVKGMATSAA

SEQ ID NO: 490979 - protein, 340 aa, unidentified
MTHHNLVSIDLAKSVFQVCLFTDDIKIVSNKKVSRKKLSQQIAQLSPTTIAMEACYSAHYWGRVFEQYGHTVKLVPAQHVKPFVRGNKNDANDAIAIAEASLRPHMKFVRVKTVEQQDIQSLHRIRERFVGSRTRIGNQTRGLLSEYGLIGGAGFKALNILIQQALESDSLSALFKEEIASVYEELLDLEYRLKRVNRKLKALAEHYPLCRLLMTIPGIGFINATAIYAAIGDGKQFETARHFAVWMGLTPQQYASGEKSYTGKITKRGNRYIRKQLVHGARSLLIRAKGKKDRLSVWANTIRERRGLPKACVALAHKLARIIWAVLTRGEEFKLQTMAA

SEQ ID NO: 490980 - protein, 369 aa, unidentified
MEKDTTYVALDDSKRTITAGILRPGEGEPELRQIPNEARLLRRLVERLTREGPVRVCYEAGVSGYDLHRQLTGLGVPCEVIAPALTPRRPGQRIKTDRRDAAKLVRLSRAGELTAIHVPNEAEEAVRDLLRCRDDIREDVVRWRHRLVKFLFRHGRVYRTGTHWRQAHWTWLRAQRFELPALQRTFDATLFAVEQAQARLVELDREVETLAERAPYCEPVGWLRCFRGIDTLGAMILLAELVDFQRFRTPRELMAYVGLVPREYSSGDTERRGAITKAGNTHVRRILVEAAWHSRHGPRLGRAIALRIQHQPRAVVAHAWKAQQRLHRRYRHLVGHGKRAPVAAIAVARELVGFLWAAMTHVDPRLATA

SEQ ID NO: 490981 - protein, 397 aa, unidentified
MYIVGIDIAKRKHEAAVIDGEGTVIIKPFSFTNNCSGYNRLLAMLTKAKLPLDEVSFAMEATGHYWLALFTRLQKEGFRVQVINPVQTNSIRSFYIRQAKTDPRDALLIAEVIRFGHFSESTLHPENIYELRELCRGRHAIVSMQADVKRKVVALLDQVFPEYETAFTNLFGDTSMAILQTCPTPKELSEMPLEELCHLIEVSSHKRFRMAKAQELQALARNSFGFAMAGDVFSTMIRLYAKHLDFLKQQVREMDRKIAEIMDTLDTPITTITGIGPTLGAYILSEIGDISRFSSAAKLAAYAGIDPTMRQSGEYNGVRNRMSKRGSPYLRHAIWLATSSAVLHDPALKLYFQKKRDEGKPYMASVGHACRKMVSIIYAVMRDNKAYTPYIPNEISA

SEQ ID NO: 490982 - protein, 343 aa, unidentified
MQTVATVGLDIAKLVFQVHCVDAAGQVVFRRQLKRRYVLAFFQKLPRCLIGIEACASSHYWSRELQALGHNVRLMPAAYVKPYVKRQKNDATDAEAICEAVTRANMRFVETKTPEQQSCLMLHRTRHLLIRQQTAVINAIRAHLAEFGIVAPLGRLGVEELLGVVADPKDERVPDVARACLAALGSQLRVFKKQILEFDRMINAWHRSNETSKRLDEIPGVGPALATALVASVANPRVFRSGRDFSAWIGLVPRQHSSGGKDKLGSISKQGDRYLRGLFTAGALAVIRYAKIRGTKHRPWLAALLARRPTKVAAIALANKIARMAWAMMAKGERYKEPVALAA

SEQ ID NO: 490983 - protein, 337 aa, unidentified
MTLYCGIDLHANNSVVSVLDDQDQVRYEKRLPNDLTLITDTLLPFHKDLLACVVESTYNWYWLVDGLMDAGFDVRLAHTGAIPQYAGIKYTDDETDARHLAHLLRLGILPECHIMPREQRAVRDLMRRRLLLVQQRTLHHLSLQSLIARYTGERLSANQIKTLDNDAIASKLDDPIRLGGQVTRLARDWLENAIDLLEQEVLKYLQPRHDYQLLTSIPGVGKILASTIVTETGDIKRFPNQGHYASYARCVNTEKLSNGKLKGRGNKKNGNRYLAWAFMEAAHHAAIWSPEIKRFYQKRQAHRHILVAKKTVANKLARACYHMLTKQEPFEVKRAFR

SEQ ID NO: 490984 - protein, 408 aa, unidentified
MARKRTLSTLDTSIAYEAVGLDLAKEDTAIAAFGPDHEGPYLIDRMPYDKLYELLADMAPTLVAMEPCSGAHQIAEQIQELGHEVMMISGRHVQAWVKDHCNGQKTDLNDAFAILNLAYDRWLTPIRGKTREECRLLALQSSYRQLKGQRTKTMVHVEATLHAWGFPIRTGSFNQKALHELIDANREAFGDEVVETLHLMINRVHDLDHDIATVLKLLTEATQRDPRASLLRSIPGFGVLPTSRWCAVVGDIARFDTPKQTMAFIGLVPNNRITGHHTETSSGREARGQGKMSKRGDKMLRSLCILGAGALCLMVRNDRLPDCPFVASIKERLASPRPWFKVLVYVAAKLVRIATALLKYGETFSFEKAGISKAVLKQWELEQAKAAKALTARKRIVRPQARLIHEMP

SEQ ID NO: 490985 - protein, 366 aa, unidentified
MKKITTATGRRTGEVQEQRLTIGLDVGDRSSFYCVLNGAGEVILQAKVATRPEALKEAFGRMPRSRVALETGTHSPWMSRLLSELGHEAIVAHARDVRLIGESRRKDDKIDAQTLARLARIDPQLLSPVQHRSAEAQADLSVIRARYALVRARTGLICAARGLTKSFGERIRGRNPKAFRAEMGETLSPQLRVALTPLLNALETITERIREYDDQIEQLAEEKYPEAALLKQVKGVGTLIALTYILTLDDPRRFRRSRDAACYVGLQPGRRNSGQSEPQLHITREGDSYLRMVLVQGAQHILGPFGEDSDLRRWGLQLAERGGKNAKKRAIVAVARKLAVLLHHLWISCEAYEPLHNTQKQRPAAA

SEQ ID NO: 490986 - protein, 362 aa, unidentified
MPATASLQVTRSGHIVIGVDTHKHVHVAAALDCVGGVLATMTIATDSGGFKQLLAILEWAATFGQIIAFGIEGTGSYGAGLTSFIRRAGHRVVEVNRPDRRMRRLVGKSDTLDAENAARAVLAGFATAEPKTADGTVEMIRQLKVAHDTAVKNRSAAMITLKAMLIHAPEQLRNDMAKKTPIMLARHLAALRPTRLETPDDSIRHTLKSLARRWQHLDVEITELEAMIKDLVTRTAPQLIEPFGIGVDTAAEILIVVGDNPERIRSEATLAKLAGISPIPASSGTTSGRQRINHGGHRQLNAAIYRTVIVRMRFHQPTIDYITRRTAEGLSKRDIIRCLKRYVIREVYHLVIPARNLPQITS

SEQ ID NO: 490987 - protein, 327 aa, unidentified
MWWIRQASCCARETVNSTPEAIVEFMKLKPAGAIRIGLETGPTSTWLWTAIKGLGFPVICIDARHAKAVLKMQINKSDRNDAFGIARIMQCGWYKEVRVKGLDSHAMRALLEGRALLVKMKRDLENQIRGLLKNLGLLIAKARGQGFHARVQELVEGKPHLAVAVLPLLETRNEIVRQIADLERKVLMLARKDNQVRSFMTVPGVGPITALCYRATIDEPSRFKRSRSVGAYLGLTTRRYASGEVDWTGRISKCGDAMLRSYLFEAAGVLLTRVQKWCALKAWGLRLAKRVGLRKAKVAVARKLAVILHRMWTDGTEFQWSTEKVVA

SEQ ID NO: 490988 - protein, 323 aa, unidentified
MEDTPVTMWVALDVAKDSLEVGCSTPQAVRLRTVENAPAGFRQLLKALPPRESAAVVLEATGGYERNVVAELIEAGYRVAVVNPRQVRDFAKGLGILAKTDRIDAQVLAKFAQHINPRMLREMPEQQQQLADLVTRRRQLLDLRTMESNRLKQALSQAASKELKKSLNKMIQTLDAQIKTVDVLIAKLIDSDDDWSEKSRILQSTPGLGKVTAATLLAELPELGELNRQQIAALVGVAPFNDDSGRHQGGRHIAGGRASVRSVLYMATLSATTHNPTLKAFAERLEKDGKKFKVIQTACMRKLLVILNTMIKNKTSWNLAFDA

SEQ ID NO: 490989 - protein, 458 aa, unidentified
MAPRKRKTTAPADALPPQLATVNLHAAGVDVGAEEHWAAIPPCDDPQPVRRFGANTADLEALADWFWDHGMTTVALESTGVYWIPLFEVLEARGFQVLLVDPGKMPRNGRPKSDVHDCQWLQRLHTYGLLSACFRPEDQVVVLRSYLRQRAALLADAARDIQHMQKALTQMNVKLQHVVSDITGVTGLAIIKAILAGERDPHTLAQLRDHRCKQDAAAIAQALYGTWRAEHLFALQQALERYEFQHRQLAACDDRIHAQLQTFADRSQGEPLPPKAGQRRRHRNRPAFDPRGPLHRMTGVDLTRIEGIDETTALIVVSEIGLDMSRWPSEKHFTSWRGLCPHQKVSGGKVLSSRTRPTTNRAAAALRLAAASLHHSNSALGAYFRRMKSRLGPPKAITATAHKLARLIYSMLRHGTAYVAQGLEAYEQQYRDRTVKHMARRAKELGYDLVRTPEEALA

SEQ ID NO: 490990 - protein, 400 aa, unidentified
MIDTRDVAVFLGLDVGKGDHHATGLLPDGKQVTDKPLPNSEPKIRAMLDKLTAKYGRVLVVVDQPASIGALPLAVARDAGCEVAYLPGLTMRRIADLYPGEGKTDARDAAIIADAARTMPHTLRSIELTDETVAELHMIVGFDDDLAGEVTRVANRLRGLLTQIHPHLERVLGPRIQHPAVLALLERCGSPAAIRKAGRRRLVTLLRPKAPRMAERLVEDIFTALDEQTVVVPGTEAAAVIVPKLATNLTALLDQRKELAATIGSLLEAHPLSKLLTSMPGIGVRTGARILIDVGDGTAFPTAGHLAAYAGLAPVTRRSGSSIRGESPSRRGNKHLKRAFFLAAFASLSDPASRTYYERKKAEGKRHKQALMCLARSRVDVLFAMLRDGTFYTSPSTSAA

SEQ ID NO: 490991 - protein, 403 aa, unidentified
MNSVGIDISKGRSTIAVMRPFGEVVISPVEVRHTDSELSELARQLKSLNGETRVVMEATGNYHAPVAKLLHDAGLYVSVINAKLVHGYGNNDLRRVKTDRKDAVKLANYGLDRWLTLPRYVPEEDTRLLLKNCYRQYRQYSKVQTVLKNNLISLLDTVFPNVNRLFSSPIREDGSEKWVDFVAEFWHCRCVSEKSEMAFANKYLRWCRKHGYNFSEAKVHTIYAEASGHIDVIPKSETAKLLVEQAVAQLRATSAALAALKHEMQALASMLPEYPVVMDIFGVGPTLGPQLMAEIGDVRRFYSKKALVAYAGLDAPPNDSGDVTGRHKSMSKVGASSLRRTLFLVMSVYLQNAPLDEPVYQFMDKKRAEGKPYRVYMMASANKFLRIYYATVKAYLESLEHTA

SEQ ID NO: 490992 - protein, 317 aa, unidentified
MTNVTFPQLIQRGCGIDVHLKVVVATIDGVGIQKETRSFNTFTSCLTEMKEWLLANGITHVAMESTGVYWKPVMRVLEADIPNVWIVNARHIKNVPGHKTDKMDSEWICKLLLAGLLNPSYIPPKEQRQLRDLTRYRNKLIQTMAAEKNRMMRVLEDCNIKLSSVVTNTSGVTATALIDMLCEGRKLTMADIESVYHKKLSASPQELLEACTGFVEEHHVYMLQMIRKSIAQTQDLVDELSKRIKDMLIKYDNVLELLKEIPGFNTKIVEDLVSEIGLDMSVFPSEKHLASWAGICPGNNESAGKKKAEESLTVTNK

SEQ ID NO: 490993 - protein, 352 aa, unidentified
MSGLDSRIAAIGIDIGKNAFHVVGQDGRGALVLRQKWSRGQVEARLANLPCLIGMEACVGAHHLSRKLQVLGHDARLMPAKYVRPYSKGQKNDFRDAEAIAEAVQRPTMKFVATKTAEQLDLQALHRVRERLVGQRTGIINQIRAFLLERGIAVRQGLRFLRAELPTVATRSDALSPRMLRLIEDLADDWRRLDARIEAISGEIEELARKDQACERLMTVPGIGPIISSAMVAAIGTGDAFSKGRDFGAWLGLVPKQISTGDRTILGPISKRGNRYLRALFVQAAWVVLVKLGKKWERYGLRSWIEAAKKRLHRNVLAIALANKLARIAWAVLHRGRAFECAKTDVMAPRSA

SEQ ID NO: 490994 - protein, 357 aa, unidentified
MNTTRTLSFANAHFFIGVDTHLKNWKVTVRTGGIELKTFSMNPSPLEMLAYLHKHYPDGIYHIVYEAGFGGFWALRIFKEHNIDCIIANPADVPTSDKEKVNKSDPIDSRKLARELENKSLHGIYIPSPEQEELRMLMRLRYRIVQSQTRTKNRIKGLLYSQGIQIPIQFSGRSRWSHAFILWLESLSLKTSAGQFTLRNLLIQLKEIRQHNTSILKQLRQEAKHHSIASIINALMTVPGVAFITAMTLFSEIFDMNRFQNENHLAAFIGLVPSIRSSDETIKANSITKRQNAFLRYILIESAWTAVREDPAMTLKFKELCKRMKSQDAIVRIAKKLLKRIRHVWLKQEEYQYALVA

SEQ ID NO: 490995 - protein, 414 aa, unidentified
MEVVHTQCAGLDVHKKTVVAAIIVPDGQGGLYKETRTFGTMTADLLALSDWLSGHSVTHAAIESTGEYWKPVFNILESTFEVLLVNAQHVKAVPGRKTDINDAEWLADLLRHGLLRASFIPPVGQRELRELTRHRSNFVRERATLVNRVQKVLESANIKLASVASDVMGVSGRAMLAALIEGHASPAEMADLAKGRLREKREQLVKALEGRVKPHHRFILTELLCQIDNLEEAIARFDEQITALCGPFEAAIALLDTIPGVARQTAEIIVSEIGIDMNRFPSAAHLAAWAGVAPGNNESAGKRRSGKTRKGDRALGVALNQAAHGAAHTKNTYLAALYHRLAARRGKKRAIVAVAHAILVIAYHLIKRQESYRELGGDYFDRQHPETTAKRLVKRLETLGYTVSIQQPPASVPA

SEQ ID NO: 490996 - protein, 444 aa, unidentified
MRIIHRVVAGLDVHKKTVVATRIQVNEEERLVWETKTFGTMTQDLLALLDWLAEWECTHVAMESTGDYWKPVFNVLEGTFEVYLVNAQHVKHVPGRKTDVTDSEWLAELMLHGLLRPSFIPPKPQRALRDLTRYRTKLVQERSRTVNRVQKLLEGANIKLGSVVSDVQGVSAQAMLAELCTGKMSPQEMAQLARGRLRNKIPELEKALTGVVETHHRFLLGKQLTHIDFLDEQVADLSAEIARQLEEMSAPPPMPGEGDSSHPPETTSEPDDRVAPLTWTEAVELLDTIPGVNVKTAESILAEMGLDMSRFPSADHLTAWAGLAPGNHESAGKRYSGRRRKGNRPLATTMVQAAWSAVRTKGTYLKSRYHRLAARRGKKRAIVGVARSMLVSIWHMLSYRQPYQELGDDFLDQRRKEAKLNYLTRQLEKLTGGSVQIEFQPVAA

SEQ ID NO: 490997 - protein, 453 aa, unidentified
MKPERKKKNQSKKVLMTVVNPNAAGIDCGSRSHFVCVSQDNVIEFGSHTQGLNEIKEHLKSHGIKTVALESTGFYWQQLFMILQSAGFEVFLVNARHIKNVKGHKTDVVDSKWLQLLHSIGLLENSFQPDAFTKEIRQYARHRRSLIETSSRYVNKMNKSLTLMNIQLKTVLSDLSGASGLKVIKAIVEGERSPEALEQLVGKGIKATRQEILLALKGDWRNEHLFELAQNYEGYLFTQKQIEQTDKQIEILLKDWESKNGNKELSQEYSKTKHRSSQKNDPKADIRPFAFQMAEGVDLSQIEGVSTNTIFTLMTETGFNLKEKFNTAKHFASWLGFAPNRKITGGKTISSHTTTVQSPLSYALRQAANAAGNGKGRLGDFFRKIAFKNGRMAAIVATARKIAVIIYKMLERKEAYAYNYSVIETQRAKQYQLKNIQKKIKQLNIKQEDLVFC

SEQ ID NO: 490998 - protein, 296 aa, unidentified
MTGPADGEPKAETRKFGTFHADLLTLCHWLTEEQCTSVVMESTGCYWKPVFNILEDSVAVSLANGQDVKGRKGHKTDWNDCRWLAHLLRHGLIRPSFIPPKPVRELRDLTRRRKQVLSNATSERNRVQKVLEEANLKIGSVLSDVFGVSGQLMLDALLEGKATVEEVANMARHTARRKIPEIIRSLEGNRLDSHYRMLIKLSLEHLAFLEQQLQRIDAEILLRVERPEFRQAFELLQTVPGIKQDGAARILAEIGPSMAQFPSEAHLSSWAGVCPGNNCMGGKARPARIPRGNRWL

SEQ ID NO: 490999 - protein, 338 aa, unidentified
MQKNYLGIDVSKLSFDVSLIAVISGRKQPIIISKFDNNTGGLKDFKKWLTDHQVSFDENSLLVIENTGIYHRPIWKFCTTNLLPVFIGNAADLKWSFGIARSKNDKVDSMRLCDYAYKNHEDIKPTTGLNKALVTLKDLLSNRSKLLRQKNAIKQTLGELKISNDKATQQLLEKLNKAALDGLKTSIKLIESEMLRLVQKDDAVFTNYKLMLSVPGIGKITAIFIICCTNNFAIKVTGKQLANYAGVVPHEHQSGTSVKGRSRVHFMANKELKSILTMGALSAINTYPEFKDYYERKMSEGKKHLQALNAIKNKMLLRVAAVVNQQKLYENKYQAACA

SEQ ID NO: 491000 - protein, 482 aa, unidentified
MRIYAVAYTSTNNWDIEPVHFTLTKTVIVLPLRRQSLSLFFISKGVLQMKIVYPVCCGVDVHKKFLVATIATTDKKGITQYITETFSTLNRDLYSFRRWLTEHNCFDVCMESTGKYWIPVFNILEEGSIRVMLTHPKFVRAIKGKKTDKKDSKWIADLFKHDLVSASFIPPPEIRALRELSRYRYKLVCMRSSEKNRYQDCMTISNIGLASVLTDPFGKTASDIMKHVLSSDVFNNKDIEKLIRGTAKKKTDLILESIRDNRIESDQRFKMNEVSKHLAYLEQSILKTEVELYTRITPYMPVVNHLAKQLPGVTELSATLILAETGVDMSVFESDKHFVSWAGLAPSNDQSAGKKKSARISKAGQFLKPILVQCALSAVKSKKQPYFANKYHKLKRRRGHKKAIIAIARMMLACIYHMVLTGEVFNPSDLKPICKPAPKKQVLTDETAIAFLAAQGYDVSLLVKTEQTTEPSVTVPTLTDSA

SEQ ID NO: 491001 - protein, 388 aa, unidentified
MQVAADRTDASTAIQTDLPAIFASLELSRSTWLITSLSPGAGEKMSKHSIRAGDVAGLLVRLAQLKEKARGRTGRDFPIIAIQEAGLDGFWIHRVLQSEGIESHVVDAASILTSRRRRRAKTDGIDGETLVRTLLAYKRGEPRVCAMVKAPTPEEEDRRRICRERKTLVGERVEHVNRIKGLLFAQGVSDYEPLKRNRRARLEGLKTGDGRPLPAHLKAQISRELDRLELVLPQLKAVEAERDALLKPVSEGCPAPAAMLAQLKGMGPEFTAILWSEGLFRSFSNRRQLAAYAGLAPTPWQSGSVAHEQGVSKAGNPRLRTTMIQLAWLWLRHQPTSALSVWFQERVQSNGGKMRKTTIVALARKLLVALWKYSTSGVVIEGAVMKTI

SEQ ID NO: 491002 - protein, 454 aa, unidentified
MQKQDSYDYFVGIDCAQNKHDFAMKNNQDKFLIKKGHFSNTLQGYEKFLNTVLSKCLNKDKILFGMEVTGIYGTNLYERLKSDGYHVVMISPDSVKNYRDYKRLNKTDKIDSACIAELLLNGDAQIVHVEKNGYTDLKAYIRRRNALKVTCTQETNRFLAKVCLYFPDLLKVFPSGRATLKAIFSIYPTPYSIIEADFDELVSVLQKASKNKFGVDKANELIHAARNSIVVRKSISDGELYNIHSLIDSIDSLESEIRNLEKIIDSKAEEFPAYHVLLTLTGCGKITAATIVAEIGDISRFHKASQIVSLAGLYGDNSKSGSSVNKRGKISKKGSRYLRHAIYMVAEFARRNNPIFKAYFTRKKNGDRTKHTLAVNAVANKLCKVIYSLMKKQSTYIIQYRDLAKLSESTQNEFFQNAETDFSAKTRRKKYLYEDEYGELHEFVFKSLKTALIE

SEQ ID NO: 491003 - protein, 313 aa, unidentified
MTNEEKPVVGIDISKRQLDVAVAGEATAREWTNDAKGIGDLSRWLKKLRPKLVVMEASGGLEGPLIGHLAGEQLPVAVINPTRIRAFARAEGQLAKTDRIDAAVIARFGLKMEPAPQRPHDQTQIDLNALVTRRRQVVTILTSEKNRLHTAPDVIREDIENHIAWLQTTLEKLDQQIAQTIVDNPDWQEKHNILQSAPGVGRVTATTMVSHLPELGQLNRQQIAALVGVAPFNRDSGPRRGKRRIFGGRAAVRSVLYMATLSATKHNPVIKSFYERLLANGKPRKVALTACMRKFLTILNAMVKNRQTWAFPA

SEQ ID NO: 491004 - protein, 347 aa, unidentified
MNITTVGIDLAKLIFQVHGIDAQGKVVLRRQLRRSQVASFFAQLAPCLIGMEACGSAHFWARKLMEFGHTVKLIAPQFVKPYVKTNKNDAADAEAICEAVGRPNMRFVPTKNTEQQALLGMHRARQGFVTERTAQANQIRGLLAEFGLVIPVGIRSIGRKLPEFLEDAENGLSGASRALFARLFEHFRALDRQVEELEREINAWHREDTASQRLQGIPGIGPLTASALVASVGDARVFHTGRQFAAWLGLVPRQSSSGGKTNLLGISKRGDTYLRTLLIHGARSVLLHLKSHPDQAEGWLARVAARRNPNIAAVALANKNARIVWALLAHGRDYQAGYRTANGMVAA

SEQ ID NO: 491005 - protein, 379 aa, unidentified
MMPSENRVLIAIELSVSSWFVAVRLPGSEKSRLHRVEGGDTTALLALIRDLRSRAETKLRHAADVACCFEAGRDGFWLHRLLTAHGAIAYVLEPTSILVNRRARRAKTDRLDAEGMLRVLAAWLGGDRQVCSIVRVPTPEDEDAKRPHREREHLVQERQRLENRMEALLFTQGIRGRPSLRSWDRDIAKLRTGDGRALPCLMQAELNRLRRQLVLILELIHEMEAERAKALAAKGDDAMTRKIVDLQRIRGIGANFSTVLAREVLYRSFANRRQLASYVGIAPMPYQSGGMDRDRSISRAGNPRARTTLIQLAWLWLRYQPGSALSDWFRGRVGTLQGRTRRIAIVAMARKLLIALWRYVEIGVLPDGVELRAMEEATA

SEQ ID NO: 491006 - protein, 343 aa, unidentified
MKLTRVGVDLAKNVFQLHGVDRAERPVWCKRLKRNRWIKEIEQNVEPGVEIGMEACGGAHHWARLLQSKGYRVRLIAPQFVKPYVKSNKTDANDAQAVCEAMSRPSMRYVAVKTIEQQDIQAVHRVRASLISERGAKANQLRGLAYEYGLVAPREIAALRVAVPAWLEDASNGLTVRLRALLSGLYTDLRALDERVRELDKEIRAIGRENEAVGRVQQLRGIGPLIASALVAMIGDARQFKNGRHVAVALGLTPRQHSSGGKERVLGISKRGDSYVRTLLIHGARSALRTAPGKNDRMSRWALALAKRSHVNVAVTALANKMARVAWAMLKHGTTYEPNGLAG

SEQ ID NO: 491007 - protein, 343 aa, unidentified
MQVVRIGLDLAKYVFEVHGVDERGNVVMRKTLRRGSVSTFFANLPRCLVGMEASNGAHYWAGVLRDLGHEVRLISPQFVAPYVKSNKNDRNDAEAICEAVGRPTMRFVPPKSPEQLAIQALHRIRQRLVQSRTRLVNQIRGILSEHGIVIARDIWRLRRALAEIAGNATDDLNALVRALTMEAQAELIELDRRIASYDRRIRELYRTSELCQKLGEIEGIGPVTATALVAAVGDRSCFKNGRQFAAWLGLVPKQRSSGGRNRLFGISKRGDRYLRTLMIHGARAALGKAGGKQDPRSRWLVGLRQRRHPNVAAVALANKNARIAWAMLAGNVSYEPARSVQAA

SEQ ID NO: 491008 - protein, 340 aa, unidentified
MTIVMGLDQHRAQVTTEWLDTVTGEIGRARVVPAHREGVRRFLHRFADQELEVALEATTGWRFVVEELRRAGAEVHLAEPAQTSALRGNKKRPKNDRADARHLRELLMIDRLPESWIPPDHLLDLRSKVRLRHTLVDQRGEWQQRIRAVLYHHGLPHRRELDLLTREGRAWLADVEVPEAAREQITVALAMIEALATQIAPLDKYLGAYARRQTGCRALMAHYGIGPLTSVAILAELGDCRRFSSSRQAVRYAGMDITVHQSDQRRSPGHLSRQGPPALRWAIYEAAQTARRQGSPDRGYYDQAAERLGGNRACLAVARKLLLRSYHTLRELGEEALQPA

SEQ ID NO: 491009 - protein, 365 aa, unidentified
MKKLYVGLDVHKKFCQAVVMTESGDVIKREKIRTCMDDIVEFFRDLPPSVVAVESSGLVEPVYNWITGAKSEHGSSGNGHVVKVSHPLKTRAIASARIKTDKIDAEILANLARTDLLPESYIPPMDIRELRDLCRERANYVRERAKWKTRLKAELARLGISPPIDDIFTDAGMRWLTSIAEKLRTNKREKILDMISTIKFESMIIKRIDERIKSAAAGNKYIRILKSIKGIGTYSASLIYSGIGDINRFPTPEHLCSYAGLVPSTHQSGNTIRHGRITKNGSKYLRWILTECVRVHINKCDSSITRFYRRLRRSKGTQKATVAAARKLLLAIYWMMKEGREFEPFPDIPKGTKRQNSEQRTANSE

SEQ ID NO: 491010 - protein, 390 aa, unidentified
MRANPPAAYDHNTTLTVALELSGKSWEVGAVVPGVTRRPRRRLDPRDVAGLLKQLEHWKAEATKAGRTIERVVRTYEAGRDGFWIARYLIAQGIEVHIMHPASIPVDRKKRRVKTDRLDLDMLLRTLLAWLRGEPRACSMAAIPSETEEDQRRPGRECERLVSERIGVENRMQNLLCLHGVSGFKPRLKKAAEWLETLRTFAGERLPEQLMAELRRLMARHQLLSAQLKEIETAREKVLMTEKPDRAAQQIQALVALYGLGLGTATELAYEVFCRSFRDRQALASFVGLAGTPFNSGGSEREQGISKSGNPRVRRLLMQLVWRWLRLQPQSALSQWFMARTGGAKGRIRKVMAVALARKLLVALWRYVETGELPAGAATVRPSASAVAAA

SEQ ID NO: 491011 - protein, 400 aa, unidentified
MISVGIDVSKGKSTICILKPYGEIVSKPFNITHTQKDLSELSSMLFRLNDEVKIVMEATGIYHLPVLTYLQEKGFFVSVINPYLMKSYRNESLRKAKTDKIDSRIIANYGIDHWFKMKEFQTSGEIYEELKLLGQQYRHYMKLHLLSLAELTHLLDLTMPGIKNLLASWNETNRKDKRSDFVERFWHYDVITSMSEQEFTEEYILWATEKKYVPSQEKAKVIYALAQESIPTLPSETSSFKMLVTEAVRVLKEVDATLGLILSRMQEIAKTLPEYSVVREMGGVGNTLAPKLIAEIGDVRRFRNGKALVAFAGIDPPPYESGQFVGCNRKISKRGSASLHKVGYETMRSLKMRSRPEDPVYRYVVKKESEGKSKKSAKIAGLNKFLRIYYARVTELYKNI

SEQ ID NO: 491012 - protein, 428 aa, unidentified
MSNQELIRRKQYCQIVKEITGSDQYLVVGIDVGKDKHHGFMGSATGKSLFRKLIFENNLDGFSRLLKTADEIKSQNGLSKIVYGLEPTGNYHKPLASHLIRCDSNVVLVSGEATKKNRSLLDGRWDKHDTKCAANIADLVSRGRCLYYDCPSPSIFELRSLLSLRRRLKREEHGLKMRIRNTLLAQYFPELDRFYSTCESESLAIVQWFLNPDTISAMEFGEFFHMVTKTRRGIAQTLRMRKIHGLATESVGCPMGPSGEFEADLLVEKLKQVRQQIQKTADLIRNFCLEFDEYSYLLTIPGFGPYISARVLASIGDPFRFENRKQLIKLAGYDLCAKRSGKTSAKAIPVISKKGNSELRYALYQAANVAAARVDLFRTYFTRLLRGRERERGIKTKMRVKLAAKMLVIAWTLMKKREPFDPAHLNIE

SEQ ID NO: 491013 - protein, 355 aa, unidentified
MNSSTQTNKLSFKGQLFFIGIDVHKKSWTVTIRVNGMHLKSFTMEPSASKLAKFLNKNYPGGIYYSVYEAGFSGYWLHYQLLDLNIKNIVINPGDVPISNKEKSYKDDVIDSRKLARELENNSLKAIYVPTLKQSATRQLSRLYALQSEQCRRTKMRIKSFLNYLGISIPVEVGERWTNRLIKWLERLEFKEEGLCYYLKQLTKDLKRKRKEMAKTIQKIKDHYAEEEIIKLLRTIPGVGLITAFTFYAEIMDITRFSNQDKLASWVGLIPSLKSSGERVRVRGLNNRQNKILKWRLIESAWVAIKHDPALTACYLEYVKRMSRQEAIIKIARKLLNRMRSIWLNREAYQKGRTL

SEQ ID NO: 491014 - protein, 340 aa, unidentified
MGEITTVGLDLAKQVFQVHGVDAEGATVVRKQLRRAQVLAFFSKLPRCLVGMEACATAHYWARELRALGHEVRLMPAQYVKAYVKRNKNDAADAEAICEAVVRPTMRFVPVKTADQQAAVLLHRGRERLVRQRTMLVNALRAHLAEFGIVAPQGLRNVGKLIAIIRDEEDARLPDLARQVLGVLAVQIEQLETAIASLEKQLMAWHKSNPVSQRLATIPGIGPIIATAIAAMVAEPSGFRSGREFAAWLGLVPRQNSTGGKTRLGGISKRGNRYLRRLLINGASANLLRSKATNADPWVIGLRRRRPSMVVAVALANKTARIAWAVMHRQENYQRTALAA

SEQ ID NO: 491015 - protein, 364 aa, unidentified
MARIGEPNVTCWLRNQSRRIPMNERYYIGLDVHKKTIAVCVKEADGRVVSEETVEATREGLGRWVSGIDRPWIGGLESTLFSGWIYDFLLPHAEELKVAHPAMLKAIAASKKKTDRIDATKIADLVRCDLLPECYMAPARIRELRRVLRFRNLMVSQAVRLKNKTAGLLMEVGAPYNKKRLHGKRYFGELLQSLEDVPDSIREMLRLSRGGMELFERVQKRLLKALHGDPLLARRVEALTILQGVGEVTALTWALEVGEPERFSTINRAVSYCGLCSALSRSAGKDHRGPISKQRNKHLQTILIEAAKLAPRWDPSLQAVHERELKRGNKNRATLAVARRLVARLLAVDKRYSRAVQDHAVTKD

SEQ ID NO: 491016 - protein, 366 aa, unidentified
MRKNSTVVKNGSKIFKQPALTIGLDLGDRTSCYCVLDGLGNVIVERGVPTTPSGIRQAFGKMPRSRIALETGTHSPWVSRQLARMDHEVIVAHARNVRLIGESSRKDDQLDARTLARLARIDPGLLGPVRHRSAEAQIQLTVIRARAALVSTRTALVNTARGLTKSYGERLKKCGTEQMNRDSSEGLSPELRAALDPLLREIESLNERIKEYDQRIEQVAKEVHPEVARLKQVKGVGTLIALTYVLTLDDPRRFRHSRDVGCYLGLRPGRRNSGKSEPQLHISKEGDRYLRTLMVQGAHYILGPFGQDSDLRRWGLKLAERGGKNAKKRAVVAVARKLSVLLHKLWVSGEIYEPLRNNRKAVRAVA

SEQ ID NO: 491017 - protein, 312 aa, unidentified
MTSSVTPTRFIGCDVGKRSITVFDSQTQRSFAVANTAGALRAFAKRLDPCCWVICEATGGYEGRLLASLVAAEVPAHRADARKVKAFIRSFGTLGKSDKIDAKGLSRYGAERHARLGRWQPRDEDRLSLQTLVLTRQDLVKSRTAFQNRLVAPQSQAARPYLRAVLAKLDAEIAKIEARIEELERDSAPLRQALKILIGIVSIGTTTASALLALMPELGTLNRRQIAALGGLAPHPNQSGEQERYRRTRGGRHAVKDALFMAALSASRYHPTLSLLYQRLVQRGKKQIVALAAVRRKLLIIANAKLRDAMAV

SEQ ID NO: 491018 - protein, 313 aa, unidentified
MSLNTNSIIYAGLDIAKLNLQLHLAGRWHDLPHTATGHRRLLKLLASHPNVHVVCEASGGYEREVVAACHQAEVSISVANPAHVRHFARAQGQRAKTDRIDAAVLSAYGQALQPKPTAARTQSQEQLTELVRRRAQLVSLLTAQRLEAQTLTLPALKRQAQSLLRRLERDLEQIEVQLSQLCAQTEELQWRVEKLRAIAGVGTITAMSVLAELPELGTLNRRQVAALAGLAPHPRESGLWQGRRAIGGGRAAVRRSLYMAALVAARFNPCLRDFYQRLRAKGKPAKVALTAVMRKLVVLMNYVLKNPNFILAT

SEQ ID NO: 491019 - protein, 343 aa, unidentified
MAEVTIIGVDLAKRVFQAHGAAADGSVVFRKKLTRAQFLLFLSDQPRCIVAMEACATAHDWGRAIAELGHEVKLIAPVYVKPFVKRQKNDANDAEAIAEAASRPTMRFVPVKTREQQARAILFRTRDLLVRQRTQLVNALRGHLAEFGIVASQGLAHLAKLARDLEEQTETLPATVQEMGRLYIQQIELLSTRISDVDAHLRDAAAAGDMTKRMQTMPGVGPITAMAMEAFAPPMQSFRRGRDFAAWIGLTPRQNSTGGKQKLGKVSKMGQRDIRRLLIIGASNVIRAVSRKGPPEGSWLARMLARKPLMLVIIALANKMARGLWAMLAKNEDFRDPGVMATV

SEQ ID NO: 491020 - protein, 404 aa, unidentified
MPKRVGIDWGSQEHAVCVLDGDGSVVDRFRVLHTAAGLQQLVDRLSRWGTPEQLAIAIERPSGLLVEALVAAGYPVVPIQPNAVKASRPRYRVAGGKSDPEDAYILADLLRTDGHRFRQLQPTSDQVKALRALVRTRDDLVAERVALANQLRALLESFWPGAAAIFADVDSAICLAFLARYPTPQSAARLGIKRLATFLAQHSYSGRRTPEQLLDRLRSAAPPRAGDLEMAAKGELVCALTSILGTLVKQLHALSARLERTVAALPDGQLVMSFPRAGRINAAKILAELGEDRSRYPSEQQLAAEAGVAPITNQSGKSRGVHARWACNRRLRVALTTFAHHSRRASPWAAAVYHRARQRGADHPHATRILARAWTRVLWRAWQDHQPYDPSKHRAAAALSAAGG

SEQ ID NO: 491021 - protein, 412 aa, unidentified
MDGWIERCCGLDVHKQTVAACVRVPGAQGRRTQEVRTFGTTTPDLLALQDWLAAHQVTHVAMESTGVFWKPVYYVLEARFTVLLVNAAHIKQVPGRKTDVRDCQWIAELLEHGLLRGSFVPPPVIRDLRELTRYRRTQIQERTRVANRLHKVLQDANVKLSNVTHHVLGVSGRAMLDALVAGTTDPDVLADLARGQLRKKLPALRQALTGRFRAHHAFLLGQILAHLDYLEEAIAAVSAHIEEQLRPFAPQVERLMTIPGVQRRTAETILAEIGTDMAVFPTAGHLASWAGMCPGNDESAGKRRSGKTRKGSKWLRTSLIEAANAAARTKATALGARYRRILPHRGHRKAIVAVGRHILEISHHLLRTDRTYQELGPDYFDRRHAERLQRRCIRQLEQLGLQVTITPASAAA

SEQ ID NO: 491022 - protein, 340 aa, unidentified
MKHIGMDLHSTTTEACVRNGKGKIVLRRQIETTRAELEKFVVGIPGRKRVAVEECQMADWVTRVLKPHVDEVIRCQPQFNKLISESEDKCDKTDSESISELLYLNRLKRVHHPELAYRILRETVRAYWIASRELTRAKNRLKGFFLFNGLHEAGDKIYSAHNRSRYLKKLEKAGGHVELGQLLYERMDHCRQLKAKHIRLVRKSAKPMKDLVRLLMTMPAIGAIYASTLVAYLEAGWRIPNKRKLWNYSGLGLRNHESRGIGRRHVSLSGSRLVKHVVMSAAATIASRRGNNALSELWEKDIQNNVDPEQVQRNLARKILVIVQHLLRSKQEYSDEGVRG

SEQ ID NO: 491023 - protein, 307 aa, unidentified
MIPTTSPYVGADVAQDTIAFCGATAATIPNEPVALRAYLGTLPPDAHLVCEATGRHHHRLHQVCATAGRPLTVLNPARVRDFARSLGRLEKTDSLDSAVLRRFGHERHPAPTPLPGPERQVLLDLLMVRTALVSDLCGCRRRDHLVAPAARAELRMLARVLHTRQQALERRLDAWLEAAPALWRDRVQTLCLVLGVSTLSALQLLAYLPELGTCNRRQIAKLAGLAPLPWDSGTLHGVRCIQHGRAPARRVLYQCAVVAARWNDELRPVYLRLRARGKPAKVAYVAVARRLLTYLNALLRPSTLTHA

SEQ ID NO: 491024 - protein, 386 aa, unidentified
MPQPKDDLSRSLVALEQDKTLIAVVELSSATWLVGGMVPGIKREPLKKLAPDPEALLALLHRWRDEAIAAGHPITRLVVAFEAGRDGFWLARWLRSRGVEAYVIHPTSIPVSRERRRAKTDRLDIGLLKRSLLGWLRGEKKHASMAAIPTLEEEDAKRPTREREQLVGKRTGIVNRMKAALVRLGIRGFNPKLRKAPERLATLRTPEGCPIPPNTLAELTREMAHLRFINDQIKQIEVERLRQLKHAPQQGSNAKVLQLQQVNGIGVETADMLTHEVLSRDLRDQRAVARYSGLTGSPDESGSRRREKGLSKMGNARVRRGMIQLAWRFLFHQRDSALAQWYQASVAAGKKRKTMIVALARKLLIALWRFLTTGEVPEGVVLRPIP

SEQ ID NO: 491025 - protein, 344 aa, unidentified
MSKHSIRAGDVAGLLVRLAQLKEKARGRTGRDFPIIAIQEAGLDGFWIHRVLQSEGIESHVVDAASILTSRRRRRAKTDGIDGETLVRTLLAYKRGEPRVCAMVKAPTPEEEDRRRICRERKTLVGERVEHVNRIKGLLFAQGVSDYEPLKRNRRARLEGLKTGDGRPLPAHLKAQISRELDRLELVLPQLKAVEAERDALLKPVSEGCPAPAAMLAQLKGMGPEFTAILWSEGLFRSFSNRRQLAAYAGLAPTPWQSGSVAHEQGVSKAGNRRLRTTMIQLAWLWLRHQPTSALSVWFQERVQSNGGKMRKTTIVALARKLLVALWKYSTSGVVIEGAVMKTI

SEQ ID NO: 491026 - protein, 344 aa, unidentified
MTYYAALDVSLRSVAICIIDNDGDIQFETSVPSEIEDITQVLEAFDGDIVSIGLEAGVLTQFLTYGLQSTGYEVVCMEARQVKAALSAMRNKTDKNDARGIAQILRSGWYSPVHVKSMRSHEIRALLSSRRAVLSKCVDLENEVRGLFKIFGIKLPPRLDHGPFDKKVRPLIEADAALAHALLPLLEARLALYQVFRELDKRVRRMALEDPICCRLMSAPGVGVVTALTFKAGVDDPTRFKSSRTVAAHFGLTPKRFQSGDMDISGHISRAGDPDVRAALYISAHSLMTRSAKYSSLKVWGMQLAKKRGHRRAVVAVARKLAVILHRMWIDDSQFHWSSEGSAA

SEQ ID NO: 491027 - protein, 338 aa, unidentified
MEAYAGIDLHSSNSYIGIIDEHDRRHFSKRLPNSLTQILVALEPFKKDLKAIVVESTYNWYWLVDGLQEEGYKAHLANPSAIKQYEGLKHTDDKSDSFWLAHLKRLNILPEGYIYPKEERPIRDILRRRLLFVGQRTAQILSLQSSIARNLSLKMSGRAIKKLKGEDTEELFDSPFLVLAAKSNIAVIQSLTKTIKAIENAVKSQAKLRKEFQLLKTIPGIGDILTLTIMLEVGDINRFSKVGNYSSYCRCVKSARFSDGKKKGENNRKNGNRYLSWAYVEAANFAIRFSPEAQKFYQRKMAKTNKIVAIKALSNKLARASYYIMRDQVAYDADKLFG

SEQ ID NO: 491028 - protein, 407 aa, unidentified
MLEVKVERCAGIDVGKKFLEVCILIGPVDRKPAEEVRRFGVNVRDLEALRAWLLEKGCSEIVMESTGSYWKPVFNVLEGQLKVTLANPEQVKALRGKKTDRKDCRWLAGLLRHGLVQPSFIPPRDIRELRDLTRRRRTLLQNGTQERNRVQKVLEDANIKIGNVLSDVFGTSGQAMLEALLENKLNVEQTAELAQGRLRRKIPEIIEALKEHRMSDHHRLLIGQALKHMQFIEEMVDDLDKEIQEKLRPYQKQVELACTVPGIGSDSAASILAETGMDMSEGGPFSSCHHLASWAGVCPGNNSSAGQRKSGRIRKGNRWLKATLSQTAWAGAAKKNSAFQFRYQRLKIRRGAQRAAIAIGHAQVIALYWVLRNGVSYQEQRREMEERQRQSLIRHHLLRLAQLGHTA

SEQ ID NO: 491029 - protein, 392 aa, unidentified
MLFVGIDIAKRNHEASVIAQDGHVVRKAMRFANSQAGYNKFMDMVRSLSEPVVFGMEATEHYWLTLYTHLRNDGFTVHVINPTQSDALRGMYIRKTKTDSVDSVIIADVIRFGRYCETSVDPGDLQAMRELCRQRFYIIDMASDLKRKVIALLDQVFPEYEKLFSDSFGLSSMELLSQYTTPEEMLSVSSQQLAEVLKKASRGRLGAEKAVEIQDAAKNSFGIVMASSSFSLIIRQYIEQIRSLESSVDIFDTEIARLLSGFDTQLTTITGIGSTLAAVILSEIGGDIRRFSSPAKLAAYAGVDPTVKQSGDFSGTRIKMSKRGSPYLRRAIWLASTVAAFKDPVIHALYERKRAEGKDHMTVIGHVCRKMISIIFAVLRDNTPYVPAGISD

SEQ ID NO: 491030 - protein, 336 aa, unidentified
MYYVGHDGHKDISVFCITSASGNVKETFEVPATPKGMDVLIEKMKGKKFKVLAEASTYTIDLHDYLVSKGVESYLAHPHALKLITDSCRKTDRNDSKTLASYLRLWDKHELDISISFVVDGDNRSLRELCRLRESISEMKGSTMQQIKSHMRINGQYVEFEDLKTIKARKHIREHFCEDLCLMMLLDMYVVFEDKGKILDAEIERRFGDRREVQLLATIPGIGITTAAQLMSMIVDVSRFPTADKMRSYFGMAPTVRDSGGSLKHGHITRRGDPMMRKILSRVVAQLIKNAPGDNLAVYRESHRSAMRPGMLMVACMNRLLDIYAVLVRGTPYIHM

SEQ ID NO: 491031 - protein, 354 aa, unidentified
MNTQVRQNCFRGHQIYVGLDVHKNSWQVSILLNAVSQKTFHMSPGSPKELKAYLNRYYPEGEYHCAYESGFSGFWIQEELTRLGIDTAVYHAIDIPTTDKEKRQKTDTRDSLKIAKALRKGDCEAIFVPDKAQQKARSLVRQRGCLVRDRQRIMHRIKSHLSYYGIECEVLEWRQEWSGKHIQWLDQQARQQQDQALSWMLQELAWMRKLEKDVLKQLRQLAKEAPYKVAVDLLLSVPGVGLKSALVILTEIGLDFKRFSKFDGLCAYCGLMPDTSSSGEQERIGDLTHRGNRRLRCILIECAWAAIKRDPELALAYSNYKKRMAGQKAIVKIARKLLNRIRRVLNKKEKYTLA

SEQ ID NO: 491032 - protein, 355 aa, unidentified
MESLKYVGLDVHRDTISAVVLEESGKLVMQTVLATQSSALLDFVGGLRGSVHLTFEEGTHSAWLHDLLARRVARVVVCDPRQNALLKAGNKNDRIDARKLAELLRAELLSPVYHGENGTVTLKHLVRSYAALTEDTTRVKGRIKALYRSQAIASAGKKAYGRRHRGQWLAQLTQAGMHRRAELLYEELDALLSLRREARRELIVESHKHDAVKLLCTVPFLGPIRAAVLIARVQTPHRFRTKRQFWAYCGLALETRSSADYHFQEGQLVRARKPVFIRGLNLNHNHDLKNLFKGAATSAGALPGPFRTFYENLLVKGMQPAMARLTLARKIAAIALCIWKKGEPFQAEYVKPQAA

SEQ ID NO: 491033 - protein, 352 aa, unidentified
MYIGVDTHKQTHVFVAIDANGRTSGSRTLANTPEGWATALRWAQEQQQQHIRWGIENSGSLGKGFAQFLLAQGETEVREVVPHRTAQYRRRGRTQDKTDTADALAMARLLRAEGELLPLVHVDDVSTELRVLSDYRDNLVVDRTRLINQLHAQMLQLDPRYAERSGPLTRAAGVRYCLGLPEADGVAQTRLLVVRQLATRLLQLDADISAVTKALEQQVAATATPLLQCCGVGAVVAARLLGELGSPPRVHSAAALAALAGIAPLTVASGGRQGHRVNPGGNRKLNRAIHIIALTQRRCEPLAQAYYAKKRAEGKTARAAMRCLKRRLVDVLFRLLLPLPAVSPAPLPAIAA

SEQ ID NO: 491034 - protein, 427 aa, unidentified
MSYKIAGIDVHKKMLAVVVSDVEGDGEYQFERRLFGSNPEQLRLLAEWLLDQEVEETVMESTAQYWKPVWGALERFWKPVRQKRDGAGAMSGTLHLAQAQSNRGPQGRKKDFPDAERLVKRLVARELTLSFVPDVEQRLWRTVMRRKYQLTRNRVQLQNRLECLLEEAHIKLSSFVSNLLGVSARRMLKALAEGETNPASLAALADRRLRATPEQLCDALGACMDLNPVYRRLLKMTLEELRLIEEHIGKLDQEMADLLHPYQDQVKRLAEVPGLGVDSAQQILAEVGALAAAFPSAKQLSSWVGACPGDNQSAGVNYNHRSPKGNRAMRRILNQSANAAVKAKGTIFEVVYRRSVSRLGHKQTIGAIAHRQCRLIWKILHEGVRYEERGPAVSKGSKQRRAWRMIRELRCLGYRVELENSQQANPA

SEQ ID NO: 491035 - protein, 369 aa, unidentified
MKKHSTAKTTARRNRLARVRELTIGMDLGDRVSRYCILDETGDVISEGSVPTTKAGMNQIFGPMARCRIAMETGAHSPWVSRQLSGFGHEVIVANARNVRLIGESTRKDDRLDAKTLARLARIDPGLLSPVRHHSAQGQAHLTVMRARAVLVSARTTLVNAARGLVKPHGESLRRCGTQQFGKAIGSHLPAELGAALEPLLSAVEALNEQIQLYEQQLEHIAKEEYPQIARLKQVDGVGTLIALSFMLTIEDPHRFRRSRDVGCYFGLRPGRRSSGASQPQLHISKEGDRYLRKLMVQGAHHILGPFGKDCDLRRWGLKLAERGGKNAKKRAIVAVARKLAVLLHRLWVSGAIYDPLRNSQTQMGRAAA

SEQ ID NO: 491036 - protein, 283 aa, unidentified
MKRILKIGMDVHTTNYTLCAMEPIIGEDDRVFATIKVTPDYKNILLFIENLKTKLGLNDEYDIQCGYEAGCLGYSLYKQLTAAGVKCVILAPTTMLTPQGVRIKTDMRDAYMIAQCLSYGGYHAVYIPTEDDDSVKEYLRMRNDHKLALKKIKQQINAFCIRHGFCYDGTKWTLKHLKWLKKLEITNELYRETLDEYMASYEEQEAEIERYDKRIEEIAEQTKYHDKVKKLECFLGIKTHTALSLIVETGDFERFAKGNQYASYLGLAPGENSSSGYNYPAKV

SEQ ID NO: 491037 - protein, 403 aa, unidentified
MNVNCVGIDVSKGKSMIAVMRPLGELVIPPFEVGHTDAELCELSRRLGDLDGETRIVMEATGNYHLPVASFLYDSRFYVSVVNAMLVHGYGNNNLRRAKTDKKDAIKLANYGLDHWLTLPRYIPEDEVRLMLKTTYRQYQQCAKVQTMLKNNLISLLDTAFPDANRLFASPTRTDGSEKWVDFVAAFPHCECVCGLSEKAFAAKYQKWCKKHGYHFSQDKALDIYASACGHFSVMPKTDTAKLLVEQAVSQLRAASAALAALRNEMQSLAASLPEYPVVMGMFGVGPALGPQLMAEIGDVRRFHSKKALVAFAGIDAPPYQSGQMEIRSRSISKRGSSALRRTLFLVMSTILRRSPADEPVYQFMDRKRAEGKPYRVYMMASANKFLRIYYAAVKQYLDSLEA

SEQ ID NO: 491038 - protein, 378 aa, unidentified
MIAYLESKTRQLLANSFILKRYKGMKKIFIGIDFSKEKFDATLIQAEGLKECAPSVHEVFYNKTSGYRRLVKWVKAHAEGFAADTWLFCGENTGGYSIGLSNYLYASGYDMWLECAYKIKHSAGIQRVKNDKADSRAIAEYAMRNYDKMILHKPQSASLTCLREVFLYRHSLVRQKVALTVRRNEKRLTQEKSDARAFMSFTSKHLITEVNKAIAKCDQKIKEIIASDDELREIFDIITSMPGIGVQNATCLMVYTDNFQRFDLNSRKIACYYGIAPFGRQSGTSVNSRPQVSPFANRMIKSLLSQAALAAIKFDINVHSYYQRLIERGKHPLLVHNNIKNKMLHILVAMVRDRVKYNPDNVYRTSNEVSLAPQVLNI

SEQ ID NO: 491039 - protein, 392 aa, unidentified
MVVSVGIDVSKDKHDCFIVSSEGEVLADAFIIPNTMDGFHYLLQRIRHCTAPQDKIKVGLEATGHYSYNIRGFLLDNDLPVYVMNPLHTNLYRKSLSLRKTKTDRVDAKTIATMLLSDVDLKSYTDTAYHNEELKSLTRYRFDKVQERAKLKQSVSRLVTILFPELEQLVSSIHGTSIYALLSEYPGAKQISEAHLTRLANILVKTSRGHYRKDKATHIRDAARTSIGSVMPAKSLELKHTIKLIQELTSEINEIEDAIRKIMDELKPPILSIPGMGFHSAAMILAEVGDFSNFNSPDKVLAYAGCSPSTYQSGKLTNCYAHMEKRGSRYLRYALYTATKYVCYWNPVFTEYLTKKQAEGKHYNVALSHATKKLVRLIYALQKSGKAYLAVT

SEQ ID NO: 491040 - protein, 339 aa, unidentified
MEIMRIGLDLAKNVFEVYGVDEQEQPALRKTLKRSQVMKFFAQLNPCIVGIESCGSAHHWARKLRSFGHEVRMMAPQFVAPYRKSDKNDHNDAEAICEAAGRPNMRFVPVKTEEQQAVLMVHRVRSLMVGERTSLVNQIRGLLSEFGIVLPQGRCHVRSQLPSILEDAENDLPAVAREVFANQYERLCELDSKIDEYDRKIEALAKADEDAKRLMALEGIGPITATAIIASVGDITTFKNGRQFAAWLGLVPRQWSTGGRARHGRITKRGDVYLRTLLIHGARAVMRYLMNKDDRKSEWVKAVRERRGFNKAAVALAAKHARILWAMLAKGTEYLPARI

SEQ ID NO: 491041 - protein, 451 aa, unidentified
MAKRRKTKIQKISPTINPSAAAADIGAREIYVAVPVERAETPVRRFGTFTEELQQLVTWLSELKITTVALEATSVYWIPLAELLEDAKIEVCLVNPRHVQNVSGRKSDVMDCQWLQYLHSVGLLRAAFRPAAAVRGVRALWRHREALVRQCGWYIQHMHKALDQMNVQVHHVLTDITGVTGTAIVEAILAGQRDPQVLAAFRDKRVKATEQTLVAALTGDYRREHVFCLRQAYAAFKFTNRQIAEVDQQLGEELAALDPTPAGEAPPVIAARSKNVMKHPPAYPVQARLAGLCGVDLTSIPAVQVLTAQTIWAELGSDLSAFPTAKHFCSWLSLCPDNRTSAGKCLSTKTRASANRVAHALRMAAQSCHKANHEFGEYYRRMRARLGAAEGLVATAHKIARVLYAVMTTRRPYDASVHEHALAQKRTKRVAHLHSAAKKLGFQLVPLVEVS

SEQ ID NO: 491042 - protein, 473 aa, unidentified
MKAVGIDVSKGHSTVSVVDERKRVEVKPFTIHHTKTDFAELISFLNRLPDDTRVIMEHTGVYYRCVAETLSNAGFYVSVVNPVLINQYGNNTLRQVKTDRKDAKKIAKYAIDNWDELREFSPSGALRETLKTTARQFALCQKTLASHKNSLIALLEKVFPGANTFFTSITRPDGRQKWVDFLKEFWHNDCVASLSEKKFAEKYAKFCKKNGYVCRAGDSRAIHAQSLENIAVMPKDDMTKMIVLTAVNQIISTSKNVERLRAQMINIAKRLPEFPCVSGLYGVGETLAALLIAEIGDINRFHNKHSLVAFAGVDPDKNDSGKHVSVSGSISRSGNALLRKAAYQVAECHLKNAPHDEPVFQFLDKKRREGKHFYVYMTAACNKFLRIYYGRVKEYLQSLQSCSLASEPEAKAENLADSATAAQPTLALDKGDSSRYTAVPDGDGIAISCSPSPSPSAKNRKRDESFLSRVAAG

SEQ ID NO: 491043 - protein, 363 aa, unidentified
MEAAGRFVGIDLGKRTYEMCIVDQKGKITRTGGKTDFAGIERLCEKLNGDDAVAIEACNLAFRMERAIRKSVGCKVCIMNAGKLAVIYMSTKKTDKEDSLKLAKLLKNHDEDELPIVTPPSDEEWERRKLLSEYRSLKCQRTKEINKLHAIFEHNGYTQFARKDMSSENNRANILPLLKDYEKGEAERLVERLNLLERQIEQLLQKINAEVENDEKIQKAMTVPGIGPITALAYVAYVGDVKRFDNAHQVSNFIGFVPKVDNSCTICRSGHTTKKGNPLLRSLLVQAAWSSVKSKNGGALRDKYKYMAETRCIGKGKSIVTIARKLGELLYLLLKTDQEYKPQKFIIPEIRISKIAEEALKCS

SEQ ID NO: 491044 - protein, 314 aa, unidentified
MAARKTVFVGIDVAKDQLDVHIRPLGSGFIVSNDAAGYAGLIARLRPLRVKRVVLEATGGYERALWLALTEAGLIAAVVNPRQVREFARASGRLAKTDRLDAAVIAHFAETFEPPRRTSDPVADRLSEHVLYRRSLSEEIVQLENQSRRLTDAALAVRARARLSRLRTELQEIDAAMRTIVASDRAKQALFDCLTALKGVGPVLACTLIANMRELGTLSRRRVAALIGVAPMNDDSGKRRGSRAICGGRRGVRNVLYVATLSAVRYNPEIGAFYRKLRADGKKAKVALVACMRKIVTILNARVRDHLAAASATA

SEQ ID NO: 491045 - protein, 350 aa, unidentified
MLIIGCDYHPSFQQIAFVDTDTGEFQERRLEHREEAEKFYRELADQGGKVRVGMEASGQARWFERVLAELNLELWIGDASEIARKRERKQKTDRQDAQHILRLMLKDDFPQIWVPSGENRDLRQLLWHRHRMVQARTRIMNQLQAVALNEGVCCKKRLWREKGRQQLESFRLAPWASRRRHDLLELLDRLNPTMGALSQAIEQEVEKCPEAQRLRTHPGVGPLTALAFVLIIGKPDRFQCGKQIASYLGLVPLEDSSGNRRRLGHITKQGNSLLRFLLVEAAQVTVRSLPEWRSHYVHLTMRRGRKIAKVAMARKLAVRLYWMMRKEWDYEQLKKFGSHAGQPGHRDGVK

SEQ ID NO: 491046 - protein, 425 aa, unidentified
MSRPRRTPATHQIEGLPTICANAAGIDIGAEEIVVAVPPDRDPEPMRVFCTFTPDLAALAAWLLACRIDTVAMESTGVDWVPIYELLSQHGIVPYLVNGRHVKTVPGRKSDWNDAQWLQKLHALGLLQASFRPDAEIAALRTLVRYRAELIQHRAPHILHMQRALQQMNIQLERVLSDIMGVTGQAIIRAIVAGERDPVTLAKLRNPACKSSEETIAKALTRTWKQELLFVLQQALVIYDVYTAQIAVCDGELEQYLQQMEARSGDPQASLPDLPPSKTDSHFKNGPSFNARAHYARLLGVDLVAVMGLSSSSVQTIISEIGTAMRRFPSVKHFGAWLGLAPRNDISGGKVLRSRTRKVSNRATQAFRQAAQSVSRSDSAVGAYYRSMRARKGPEQATVATAHKIARIVYQRIAVQLPRARHQNV

SEQ ID NO: 491047 - protein, 361 aa, unidentified
MKKPSKHLIAEVPRSVAKVRMTIGIDLGDVWSHYCTLNEDGEVVDRGRFRTTPSGVEKWFTDVPRARVAMETGTHSIWVSEQLREMGHEVIVANVRELRAISHSNRKSDTVDAEKIARYARVDPEILRPVSHRTVAQQEALTLIRARNLIVRLRTAAVNSVRGLAKPCGYRLPASSTLCFAKRCMAVLPPGLAQALGPVLEQIAAMTVKIQQYDRTIKQLTETEYPETQALLQVYGVGQLTALTYVLTLGGKERFKRSRDVGCYLGLRPRRSQSGDRDPQLGITKAGNIYLRSLLVECANHVLGPHGRDSTLRRWGLNLASRGGKQSHNRAIVAVARKLAVLLHRIWITQEPYVPFYAVAA

SEQ ID NO: 491048 - protein, 345 aa, unidentified
MKIVGCDLHTRYQQIAMLDEETGELVERRLEHGNGEAKEFYTHLAGPVRVGIEATGHTRWFEQLLAELGHELWMGDAARIRAAEVRKQKTDARDAALLLDLLLSGRFPRLWRPARQERDLRHLLWHRQKLVWMRNAVGNQLHALAMGEGLCRKKQLFTKKGRCELEALKLDAWASRQRQELLRLLDQLDASLAQFDQAVNEQAAANGDAVRLMTHPGVGPVTSLAFVLIVGPAARFGRSKQLVSYLGLNPSEHSSGGKQKLGAISKQGNPMLRGLLVEAGHTAARMDPELRQDYQRLRLRRGGSVAKVAIARKLAVRMYWMLRREVNYTQLVRTQGSSRATLVQQ

SEQ ID NO: 491049 - protein, 335 aa, unidentified
MQIYGIDLAKEKFDVSFFDLTSKKVSNQPSHKVVKNNFRSIGRFLETLPSDAVLVAEHTGVYGDTLLKCCMDSNVKIAFVGGYVIHRYRATPDRAKTDVLDCALLRDFGERYPDKLKYKTFPEEALYELRQLARHREMLVEQRKQLITADRSEDCRPIRSLAVKRSMDRIKEMLDTEIAETEKEMLKVINGHESIHHNYELVKSVDGVGLITAVELLVKTENFTKITTARQYAAYAGTAPYEKSSGKMDKGAHISKIGNRRSKTLLYICAESARLHNKEIKLYYERRTLIDKKPRHYVLNAIANKLLRIIFTLVEKGEYYDANFIRQDPRVVKYN

SEQ ID NO: 491050 - protein, 375 aa, unidentified
MEHHSEAFVALDTAKLRNAVAIADAGRNGEIRYLGEFDNTEAATRKLVAKLASKHARLTFCYEAGPTGYGLYRLIKSIGHDCIVVAPSLIPSKPGDRVKTNRRDAVNLVKLLRAGELTAVWVPDERHEAMRDLVRARDAAVKDYRIKRQNVSSLLLRLGRHYPGKKTWGRTHINWLTGLKLEHREQRIAFEEMLLAVRQVRERIERLEQAMREAVADWTLAPVIEAVQAMRGIDMVGAIAFLAELGDLSRFENPRQLMAYLGLTPSERSTGESVKRGGITKAGNTRARRLLIEAAWSYRFPPRVSKDMQTRIGAAPRTAREIAWKAQMRLCGRFRTLTRKGKRPTIVVTAIARELSAFIWAINREVGGSQATANQ

SEQ ID NO: 491051 - protein, 388 aa, unidentified
MIQVDDLSRSLIAFEQISTLVIVVELSQSSWLAAGVVPGIERRPLKKLDPDPTALLHLVEGWRDRATKAGRAITRTVLAFESGRDGFWLARWLRVRGVETFVMHSTSVAVSREPRRAKTDRLDTEMLIRVFLGWLRGEPRHCKMVAIPTLEEEDARRPSRERESLVGERTRIINRMKAALVRLGIRGFKPGLLTAPQKLDALRTPEETPIPPNMLDEMRRDMARLAWVREQINAIEQARLERLERAPATGRHAMVRMLARVIGVGVETADMLVQEVLSRNLRDRRAVARYAGLTGSPDESGSKRREQGLSKSGNARVRRGLIQLAWRFLRFQKESALAQWYRGRTEDAAGKRKRTMIVALARKLLIALWRLVTIGEIPVGVALRPAVA

SEQ ID NO: 491052 - protein, 373 aa, unidentified
MQEFNKFIGLDVHKSTIAISIAPEDGGEVRYFGEIKNTKEALTNFVNKISQGSLKLSFCYEAGGCGYEVYRLLRNIGHDCMVVAPSLIPRKAGQRVKTDRRDSLNLARLHRAGELTGVWVPDAMNEALRDLTRAREDMKHLQRQAKQRLIAFLLRHGWTYSGKSNWTKDHFNWLETVKFQHAAQQIVFQEYVDTVKYCGKRVESVTQQIEICSRESACWPVIESLMALKGIDLITAATIMAEIGDLTRFDSAPKLMSYLGLVPSEHSSGSSVRRGGITKTGNSHVRRVLVEAAWTYRFPARKTAHTQKRAKLTSDAVQEISWNEQKRLCQRYKELNANGKIKVQTCTAIARELAGFVWAIGQTVPLKQSANAQ

SEQ ID NO: 491053 - protein, 378 aa, unidentified
MHKDSVYLCILRENGEKIERVYGVLTPQLDSMRDFMAENEVSEVAMESTSVYWIPIWRVLVDSFELKLVNPYFIKQLPGRKSDVKDAQWIAECVMKELIRGSFIPPPLIQQLRLYDRRIFELNAELVRKYSKIDAILQRCNIRLSNYVSNTDCKSYKNVVKRISEGVTSPQELLMLVHKRIINKHGEDTILAALTGVVSEAEIDMLAQYVAESALLEDNKNKCIEKMREICNREFEEQMKNLQTIPGVSERSALTVLAEIGPDVNAFPSAKHLVSWCGFNPRNDESNKKIKSNKITHGNRFIRIASVQCAWAASRTKDCYFSKFYAFHTQVRKKFKLKVVVAVARKILVCIWHILKFNVSYKDFEPQKSVAKDSTQLA

SEQ ID NO: 491054 - protein, 346 aa, unidentified
MGYFAGLDVSLEETAICIVDDAGLIVREARAASEPKALVAFFGASGMAMERVGLEACSLTAWLHQALTEAGIVAICIEARQAKAAMGAMPNKTDRNDARGIAQIMRTGWYRAVHVKTPSCRTWRALLTARRMVVNKRRDVENGVRALLREAGLKVGTPSRKNFAQRVGELVADDPVLAALAKSLLSVIDVMTREVDRLTKRVLDEVRIEPTCRRLMTVQGVGPFTALAFRATIDRPDRFRRSRDVGAHLGLTPRRYQSGETDMQGRISRCGDELARTALYEAAHSMLIRSTKWSALRAWRMNVAKRRGMARARVAVARKLAVILHRIWADGSEFRWGKRAAASVTA

SEQ ID NO: 491055 - protein, 350 aa, unidentified
MIIIGADYHPGFQQIAFVDTDSGEFQERRLQHREEAEKFYRELAAQGMKVRVGMEASGQARWFERLLSELHFELWIGDAAEIRTKRVRKQKTDRQDAQLILKLMLKDDFPQIWVPSWENRDLRQLLWHRHRMVQARTRIMNQLQAVALNEGLRCKKRLWRDAGREQLESFALAPWASRRRRDLLTLLDQLTPTIAELTQAIEQEAEKCPAAKRLQTHPGVGALTALAFVLIIGRADRFQCGKQIASYLGLVPLEDSSGNRRRLGHITKQGNSLLRFLLVEAAQVTVRSDPEWHSKYFHLAMRRGRKIAKVAMARRLAVRLYWMWRKGWNYEQLKKFGSHAGQPGHRDGVH

SEQ ID NO: 491056 - protein, 402 aa, unidentified
MNSIGIDVSKGKSMVAVLCPLGEVVRAPFEVNHTVDGLSSLIKDLKALDGASKVFMECTGSYHLPIANALTKAGFKVHTLNPVLIKNFGNNSIRNVKTDKADALKIANYGLTYWNEVADYSPEDDIRFKLKTYYRQYSQYVKLRTAMKNNFTSLIDLTFPGINTLFSSPARKSDGHQKWIDFSLRFWHRDCVAGLSLNAFTLTYKTWCTMHKYRFSKSKAAQIHSFARQCSCIIPKDEDTKALIAQAIKQLNSFNESINVISKQATQLALQLPEYPIVIQMFGVGEITAFQLMAEIGDIHRFTKKSSLVCYAGLDTEPNDSGKVTTKSRDITKKGSPYLRRTLFLIVSNILMTSPPDDPIYQFIDRKRSEGKHYYTYICAGAAKFLRIYYARVKEYLDNRSD

SEQ ID NO: 491057 - protein, 403 aa, unidentified
MLYLGIDQHRKQLTVCIRDEGGDVILKRQVSTEWQRVRKFFEEVRRSSGAEGYVVIVEVCGFNDWLLKLLEEEGCRKCLLVQPERRSKKKTDRRDANTLSETLWVNRDRLLAGKRVQGVRVVLRASAEEAENRQLTALRKRIAQLRTRTINKVQRILLKHNLQRECPTKGLQTQRARKWLAGLSLGAIDRLELDQLLAQWKLWDEQLEQLDNEIARRVHSDHRAQLLGTIVGGAGYGSLAVASRIGPIERFPRPASLANFWGLTPGCRNSGDATDRLGSITKEGSAIVRFVLGQWVLHVLRRDPWMRAWYTRIKRRRGTKIARVAVMRRLATIIWHMVQYDQPYVIAGPARLKQRVEVSEPPTGQAAAGRSKRRRCVFQGMAGQMNGAGRLRRIKSMLPEKRN

SEQ ID NO: 491058 - protein, 321 aa, unidentified
MAETAGICVGIDVSKAWLDVMVHETGQYWRAKNDETGHTELINQLIKLDPERIVLEATGGYEMIIVAGLAQAHLPVIVVNAKRVRDFARSSGQLAKTDKLDAKIIAHFAAAIQPPVRSPATEGEELLTALLTRRRQIVDMLTVEKNRKHTVRKAMRTDIEEHITWLTEKLAKLDQEIETFIQETDMWKEKDALLQSVPGVGKITSATILAMLPELGKLNRQEIAALVGVAPLNKDSGKKKGRRRVYGGRAAVRSVLFMAALAAKKYNPKINAFYEHLIKQGKEKKVALTACMRKLIVILNSIMRTGIPWRLSSSAPLASTP

SEQ ID NO: 491059 - protein, 410 aa, unidentified
MEVQHDRCCGLDVHKETVVACLRLVIDGKVVKEVRTFATTTASLIALSEWLTQNKCTHVAMEATGVYWKPVWHILSDGDIELVLANAAHVKNVPGRKTDVKDADWVSDLLAHGLIRASFVPDTYTQEMRTLMRTRRQLVREKSSHILRIQKTLEDANIKLESVVTDVMGLSGRKMIQALIAGEKDPAKLARLADPRVNASQETLRQALRGRVTKSHRFLLRLHLGQIDALDAAIAELDREVEASIEPFRTAVEQVSTIPGVKDLSARTILSEIGIDMGQFPSDANLISWACICPRNDESAGKRRSTRIRKGSPWLKTTLVQCAWSAVRTKGTYLQAQFHRIRARRGIKKAIVAVAASILTAIYHMLKDGTMYQDLGPNHFDRRSKEQQKNRLLKRLADLGYVVQLAPSPN

SEQ ID NO: 491060 - protein, 428 aa, unidentified
MSQKNYNKQVQKRQRIKRTTLVIGIDIGRAFNAVAYMDKEGNIVGKYPKVYNSRAGFNFFVKVTEQIKRKHGMKDVLIALEPTGHYWRNIAYFSKEKGYDIQFIRTTSVKHQRELDDSSSAKTDIRDALTIANLTREGKYIDTIIEDGIWRQVRTLVKVRERIRKYNISSKNTLQAALDDYFPELRKIFWAVSTKGIWAILERCPFPEDVLKVNVSELREIIGKASRRRKVAAQKAIKLHEAAKESIGIKEIGQSDRYRVKMCLQEVKRTEGLVKEAEKKIKGLLKQIEYTEYLLSIPGVGPLSVAVVLGELGNPSHFKNARQIIKYAGYDPQENDSGQRIGRKVISKKGRWLLRQCLYFMSLRVVMKTRFFKEFYQRKLEKKNRFGQNLKKKKALCAVIIKLINVIHALLRDKRCFYDTVSCLAKAA

SEQ ID NO: 491061 - protein, 313 aa, unidentified
MSPNNINILYVGLDVAKLSLQLHLAGRFHLLSNDAKGHAQLLKLLRIHTTAHVVCEATGGYEQSIVRALQAAGIPVSIVEAGRVRYFARAQGQRAKTDPIDAAVLSQYGAAFQPAPTPPVSPQQQQLADLAQRRRQIVQLLIHERNHAEHYTDGFRLRQSRRLCKILEQQVAQCDEAIAALIAQDAQLAHKASRLKAIPGVGPVVASTMLAEMPELGTLNRRTAAALAGVAPYNRDSGGQKGSRSIQGGRSAARNALYMATLTAMRYDRILKEFYLRLRAAGKKPLVAMTACMRKLVILMNQLLKNNDFQLAS

SEQ ID NO: 491062 - protein, 410 aa, unidentified
MDTIVERCCGLDVHQATIVACLLVGHASQKPRKEVKTFRAMTQDLLALRDWLLSEGCTHVGMESTGVYWKPVHAVLEGAFQIVVGNARHIRNVPGRKTDVKDSEWIADLLRHGLIASSFVPPKPIRELRDLLRYRRKVVESRAAERNRLLKLLETANIKLASVAANVFGVSGMLMLNAILKDDSSPAQMAQLAKGRMRGKIPELKLALEGSVQEHHRFLLRLQLRRLKRADEDLAELEQRIDERLEPYREQQALLVQIPGIDRIGAAVIIAELGTDMTVFHSAKHLAAWAGVCPGNNESAGKRKNDRVRSGNVHLKTALVEAANAASRKKGSYLKDKFFRLKARRGHKRAAMAIAHKILIAAYHMLSTGSAYKDLGEPYLDRVAKHRVTNQLVHRLERLGYDVQLIQKVA

SEQ ID NO: 491063 - protein, 368 aa, unidentified
MKDVTTYVGIDAHKKDLFIAMLIGNQENPVTWQLANEPNGVRRLVRKLEREASGPVRACYEAGPGGYALQRQMTTARVNCQVIAPALIPRKPGERIKTNRRDARKLAELLRAGLLTAVRPPTLAEEAVRDLCRARDDAREDLQRCRHRLGKLLLRRGLHYGGRNWARAHRRWIQSLEWTQPAERVVVDDYLLAIDHTEARLMELDARLTEIAQREPYRDPVGWLRCFRGIDTLTAILILAELHDFKRFPNARALMAYVGLVPGEDSTGEQHRRGRITRTGNALVRRLLIETAWHYQHRPSVGMALARRRKGQPGRVIAIADHAQQRLCRRFRSLAEHHKPAPKIVVAIARELAGFRWAALQPGPTPAS

SEQ ID NO: 491064 - protein, 483 aa, unidentified
MKSKPEEKAQKTTNHSTPKPWDEMNRKQRRATMQKIQSADLSLEVVHPNAGGIDIGNESHYVAVPPDRDSQPVRRFGCTTAELQAMAQWLSQCGICTVAMQSTGVYWIAVYDILEEAGLEVYLVNARDTKNLPGHKSDVQESQWLMKLHTYGLLRNSFRPTQEIRTMRTYWRQRNDLVQAAARHIQRMQKVLTQMNVQLANVLSDISGVTGQAIIKAILAGERDPHKLAAFRDVRVKASEEQIAQYLEGHWQEDLLFVLQQEKEGFDFCQKQMAACDEQLKQYLQQQEDRSQGAPLPEEKRKSRLKKKKGNMPQFELRAELFRMNGTDLTQIDGIDVLTAATVLSEAGSDMSKWADEAHFVSWLRLCPGNRISGERIIGKRRLPTNNRINVALKMAASSLRTSNTYLGAQFRRLRTRLGAPIAIKAMAAKLARLVYRMLRYGMKYVDQGAAFYELKHRELQVQHLKSKAAKLGYKVTPIPAAA

SEQ ID NO: 491065 - protein, 353 aa, unidentified
MENQEIRTEIILGVDTHLDVHVGVVIDTAGRVLGTLSVGTHNEGYRQLLCWAQAFGMLRRAGVEGTGSYGSALTHVLQSNGVTVIEINRPDRSRRRGRGKSDATDAESAARSVLAGDAKVIPKARNGLAEALRTLNLVRRSAVKAKTQTINQIRALLVSAPQAIRDAVYKADAAKCVAACTALSQGAVSAALASLHTGLRLLAKRWTAFNEELSELDAELTRLTKKAAPRLLGRFGVGPQTACTLLVTAGDNPTRLHSEAALAALCGTSPLQASSGKVQRHRLNRGGDRQANNALWTIAMVRMRSDPRTRDYVVKRTGEGLSKKEIHRCLKRYIVRELYPLILADLKDSASSA

SEQ ID NO: 491066 - protein, 340 aa, unidentified
MSLYGGIDLHANNSVIVLLNEQDEVSYQKRLPNDLTTILGQLAPYRTEIKGLVVESTYNWYWLVDELMAADYRVHLANPAAIQQYNGLKYTDDLSDARWLAHLLRLGVVPEGYIYPKAARAVRDVLRKRAHLVRQHTANVLSVQNIMTRNTGARFSGKRMQELTKQDLTTLLTDETQVCAVTSSLVVLDCLRQQIKTLEKIVHKRLHDTPSYEQLLTVPGIGPILAQTITLETGAISRFPTVGNYASYCRCVDSQKISNGKRKGTGNVKNGNPYLAWASMEAAQFALRFQPAAQRFYQRKLAKSRNNSVLARKAVAHKLARACYYMMRDLVPFEERKAFG

SEQ ID NO: 491067 - protein, 343 aa, unidentified
MQVVTTIGLDIAKSVFQVHGVDAVGQVLIRRQLKRRAVLAFFQKLPVCLVGIEACASSHYWSRELQALGHSVRLMPPAYVKPYVKRQKNDMADAEAICEAVARANMRFVPTKTPEQQSCLMLHRTRHLFIRQQTAVINSIRAHLAEFGIVAPVGRKGVTELLHIVADPSDKRVPEVARACLAALGNQLLSLKEQIVEFDRMIMVWHRSNETSKRLHYIPGVGPMLATALVASVADPRTFRSGRNFSAWIGLVPKQHSSGGKDRLGSISKQGDRYLRSLFVAGALAVIRYAKIHGTKHRPWLTALLARRPTKVAAIALANKLARMAWAMMAKGERYRQPVALAA

SEQ ID NO: 491068 - protein, 422 aa, unidentified
MLTETQDDEQIIARVAALDIGKAELVCCVRVPHEDRPGRRLQEVKTYSTMTRPLLSMADRLACLGVTRVVMEATSDYWKPVFYLLEAHGFEVWLVNARDVKHLPGRPKTDKLDAVWLAKVAERQMIRPSFVPPPEIRQLRDVTRYRADLVAARTAEKQRVEKLLEDAQIKLSVVVSDIFGVSGRQMLAALIGGQRDPKALAQMARGVMRVKITALQEAFTGFFTGHHAFLLAKMLARVDAIDTDIAALDERIGQMIAPHTAAARRLAEIPGINATAACAILAEIGTSMGRFPTAGHLVSWAKFAPGVKESAGKKKGKGTTGHGNRYLARVLGNAAASAGRTDTFLGERYRRIARRRGGKKAIVATGRSMLVIIWHLLSDPEARYTDLGSGFYDTRINPERRKRNHIRQLEALGYKVTLEPAA

SEQ ID NO: 491069 - protein, 370 aa, unidentified
MKTKLSDYELATIAYHRDTLGVNPVAVDVASRVMQVCYYDSDKKLLKNFQLTRSKFFEFVEKAPEPLLFGIEACGSCNYLSRYFESKGHQCRIIPASKVKAFLKLDKNDKIDASGIFKAMLSSVESIPAKSLENQLIMNLLTIRDQLIKQHTQCINAAHGILYEHGIVAGGAGVETSAKITLGFTDAQESFEHDPMASAHFSVIKNAIFNILDNLKEQIDTINQYIQKYGSSNKTCLNLTTIPGIGLQTAVALNTALGDPERFHSARAFSAYVGVAPIITGTGGKITVMGIRKSGIRSIKKSLYMGAMVYLTYAVKNGTQSSWVKDRLKTKKKKVIICAIMNRLARIAYAMVKNGEVFDETKCNMIKNLR

SEQ ID NO: 491070 - protein, 316 aa, unidentified
MGSSEIFVGIDVSKSELEVGVLPEARTWKVSNDEKGITKLAKRLTELGPCLVIMEATGGLERFVHNVLEDAGLSVRVVNPRQSRDFAKALGVLAKTDAVDALVLARYGESIKPEPRSSKDEQTRELEALLARRRQLVQMLVAEKNRLSSAPKSVRPGIEAHIAWLKKCLNEIEKDTNGFIKSMPIWREKDKIIQSVPGAGPVLAAALLALLPELGRLNRRQIAALVGLAPFNRDSGTLRGRRCIWGGRSWVRRILYMGAVAAIRCNPVLKAFYQRLIEAGKQRKVAITACMRKLLTILNTMVRESTMWDPSSRVSA

SEQ ID NO: 491071 - protein, 346 aa, unidentified
MLHVAIDLGSKESQVCVRDAAGAIQREQKHPTRKLGELLRSLPKSRVVLETSSESFRIADAARAAGHEVRVVRSTLAKQLGVGERGIKTDLRDARKLSEVSTRIDLPSVHVPTEEARAMRSIVRTRELVVSTRTRLVNHVRGWMRTQLLRVRRGTPATLPERVRAAAAANLERPLPPHIERTLVLIEAVNVQSLAADREMRQLVRASELCRRLMTVPGVGPVTALAFFAAIDDVSRFEHAYRVQSYLGLTPGEDSSSERERRTGITKAGPTSVRKLLVQAAWAAYRRRPNEPMVRWAQQIAERRGKFIAVVALARKLAGILYALWRDQSSYRASKAAQPTEPSLIN

SEQ ID NO: 491072 - protein, 343 aa, unidentified
MELYVGMDVSLKETSICVIDHEGNTLSEGTVTSEPSAIAAFLRAKATEAKRIGLESGPTATWLWHELRNLGLPVICIDARHAKAALSMQINKSDRNDALGLARIMQCGWYKEVRVKSLDSHELRAVLSGRALLVKIKRDLENQIRGLLKNAGLLIGKVKGAAFAVRVEELVAENPALEIAVVPLLATRESVREAIAVLNRKLLDLARNDPESRRLMTVPGVGPVTALAFRAAIDDPSRFKRSRSVGAYLGLTPRRHASGEIDWNGRISKCGEAMVRSYLFEAAGVLLTRVPRWRRLKAWGLRLSKRVGFKKAKVAVARKLAVILHRMWQDETDFIWSNKEATA

SEQ ID NO: 491073 - protein, 367 aa, unidentified
MKKGSTTLARQSRKNSQQKLTIGLDLGDRNSWYCVLDEAGHIQLEQRVRTTAKALREVFSAMPRSRIALETGTHSPWISRLLRELGHEVIVANARKVRLIGESRKKDDRLDAQTLARLARIDPELLCPVKHRSAKAQADLMMIRARAGLVRVRTGLVNTARGLAKSYGERLRGCNVRNMNAEKAEGLSPELQAALQPLLAALESVSERITEYNERIEKLAQARYPQVAVLKQVKGVGTLIALTFLLTLEDPHRFSKSRDVGGYLGLQPGRRNSGQSEPQMHISKEGDPYLRTLLVQGAQHILGPFGVDCDLRRWGLKLAERGGRNGKKRAIVATARKLAVLLHHLWVSGEVYEPLHNSCRVAVTAAA

SEQ ID NO: 491074 - protein, 422 aa, unidentified
MSYCPVAGIDVSKRFSDMCILSPDNKIFAQEKIYHDETSINRANALLQKAERLFFSKPVIVMESTSHYHLILFQFFSEHGYDVIVVNPLQSNSMKDFSIRKRKTDRVDAFKLAMMYRTKTLRPSQIPQTATRALRQLCRHRAELLNDVSSYKNRLTALLDQTFPGYDKVYSDVGGVTSCAVLVRFPTPTILLVEEESELVEVIAAASKSGYGFAKKKAGLLISAAQKAQTLGIHSCADETLIVCTIQMLRTLSESVLQIETAIDNLLAQIKEMRNNVSLLQSIPGVGSHSAALLLGEIGDILLFKKPKQLAAYFGLDPTERQSGSFRGTKNKLSKRGSPYARAALHMGVVNSICKRGKDSAANPVLLSYYEKKCKNKPAKVAQAASMHKLVFIIFAVLRDQKPFELKTPEQHAVEQGFVKAA

SEQ ID NO: 491075 - protein, 357 aa, unidentified
MLSSNVKYIGLDVHKEAVAIAVLNGAGKLVMESIVETKASTLLDFLHGLRGELHVTLEEGTWAAWLYDVLKPHVAEIVVCNPRRNALLKEGSKSDKIDARRLAELLRSGMLRAVYHGENGLGTLRELARGYLTISKDQARVMSRLKALYRSWGIPCSGMQVYTPRHREQWLSKILQPGVRRRAELLYQQMDGLLLVRHTVRGELLAESRKHPAVKILRQIPLIGPLRAALLLALMQTPHRFRSKRQLWTYSGLGVETHDSAQHRYVDGQLQRSKKPQQIRGLNQNHNHEMKRIFKSTAMSASRCAGPLQDFYAALLAKGMKPEMARLTLARKIAAITLTLWKKGGHFDAEHLKSQAA

SEQ ID NO: 491076 - protein, 411 aa, unidentified
MEVLHRRCAGVDISKRDAKVCVRVAGSGSRKTQETVTTWGSMTNQILALREHLLDQRVTSVVMEATGDYWKPFYYLLEDAGFDLVLVNARHVRNMPGRKSDVSDAAWLAQLGAHGLVRSSFVPPAPVRELRDLTRTRTSIIRERSREILRLEKLLEDAGIKLSSVASDITGVSSRAMLQALVDGQRDPAVLADLAQRRMRSKIPALTEALTGRFSEHHAFLTRMHLDLIDRHTAAIAELTERIEVVIEPFRGFRELICSIPGISTTVADIITAETGGDMSRFPTAAQLASWAGTCPGSHESAGVVKSTRTRPGNSHLKGALGIAAMSASRSRDTYLAARYRRIASRRGPLKAVVAIERTMLTTIWHMANTGALYDDPGPDFYTRLRPDRAKQRAIKQLTSMGYRVTLDDVG

SEQ ID NO: 491077 - protein, 353 aa, unidentified
MMEVFSTINTKREKTMGKITTIGLDLAKNVFHVVCCDKHGKIMRKKMLRRAEVVRYFSNLPACLVGMEACASAHYWARELGALGHQVKLIAPQYVKPYVRGNKNDYNDALGISEAVVHPEMRFVALKSPQQQDIQAVYRLRERQIADRTALCNQLRGLLGEHGLVLPKGVSVLRKRLPALLEDADNGLSDRFRRWLAHSYRALRQLDEHIDFYTRELARESRQNEACQRLQTIPGFGPIVASVFHSVVGTGEAYRRGRDVSASLGLVPRQHNSGGKTLLLSISKRGDRYLRSLLVHGARSVVRRAVDKDDRLSCWINKLRAERGINKATVALANKMARMGWAVLAHKSTYRPA

SEQ ID NO: 491078 - protein, 461 aa, unidentified
MKSDRKKGGKKNGVLPTTLPAIQPKVAGIDVGSMQHWVCGPAREDGKPNVKVFTTTTDQLNQLADWLIEQGVESAAMESTYVYWIPIYELLESRGIRVLLVNARQLQNVPGRKTDVSDCQWLQLLHSCGLLRGSFRPVGSIARLRALQRQLANLVEERTRCVQWMQKALDQMNVQVHRALADITGVTGMAIVRDIVKGERDPAKLAMHRHPRCHKPVEEIAKYLTGTWREEHLFNLASAVRLFDAIEAEIVSYDARLMKELEVLQPAERQQQQTPSHPNPAKEKAIKNRGEQASRTALWRFSGVDLTRIDGISAGAAQVILTEVGFDLNAFPSEHHFISWLRLCPRTPVSGGKPLKKRRNGQGANRIAGVLRMAATALQRSKSALGASFRRIARYKGGAVAVFATARQLARLVFRTLRFGHAYVDIGESAYEQQFHLRRLAALTENAKQLGFSLVSNVAKT

SEQ ID NO: 491079 - protein, 356 aa, unidentified
MSYDVKYIGMDVHKEAIVITVLNESGKLVMESVIETKASSILQFLHGLRGELHVTWEEGTWAAWLYDLLQPQVQHIVVCNPRRNALLKEGSKSDKVDAQKLADLLRTGMLRSVYHGENGLRTLRELGRSYQTISKDLTRVMNRLKALYRGWGIPCAGTQVYAARAREEWLSKIPQAGVRRRAELLYQQLDGLQALRREVRPEFLAESRKHKAAKLLRQIPCIGPIRAARLIALMQTPYRFRSKRQLWTYSGLGIETHDSAQYHFVSGQVQRSKKPQQVRGLNRNHNHEMKEIFKSAATRASCGRGPFHDFYAALLAKGMKPEMARLTLARKIAAITLTLWKKEEGFDVEQLKTQAA

SEQ ID NO: 491080 - protein, 438 aa, unidentified
MEMINTHAAGIDIGSKSHFVCVGQKDEQVKEFGIYTKDHENLIHWLKSEGVTTIAMESTGTYWQTLFASLQESGFEVLLVNARDIKNVKGKKTDVIDCMWIQKLHSLGLLRGSFLPDESTRQLRTFFLHRQRLLEHGAKYVLKMQKAMRLMNIRLDVSIRDITGKTGRAIINAILEGERDPTKLAELADVRIKKTKSELADSLKGEWRNDLLFILKECLELYDYYREKVKSVDKEIENLLLSNLSVEQSENTLSKVKKKKPHKNDPNFDLRKISYKIFEIDLYQINGVSNGLVLALLSTLGNGINKFPSSKHFVSWLRLAPNNKISGGKILSSRTPKGKNKLALALRQAANSIGNSKDHPLRSFFNRIAYKKGRGAAITATARKLAAIIYHMIIRKEDFIPEYCQNKNINRIKKLKSIQKSLNILKLSDSERDYILSS

SEQ ID NO: 491081 - protein, 458 aa, unidentified
MTKRKQESPQKATPLEALKQLNLNAAGLDIGAEEIYVCVPVDRDEQPVRVFPTFTADLHALAAWLKACDIETVAMESTGVYWIPVYEILEARGFHVHLVNARQLKNVPGRKTDVLDCQWIQQLHTYGLLRGSFRPPEEICALRALARHRDNLIRYRSNHIQHMQKALQLMNVKLTQVVSDITGVTGMSIVRAILAGERNPQTLARMRNPGCAKSQEEIAKALHGNYKAEHLFVLKQALAEYDFYQQQIEECDAEMEAMYAALPPSEPGDSASRPPKPTQRKPRKNQAHFDLATSLYRMVGVNLASIDGVDALTAQTILTEIGTDMSCWPTVKHFTSWLCLSPYNDISGGKVLRSRTKKTKNRANTALRLAAQSLSRSQSALGAFYRRMRAKHGPEKANKATAHRLARIVYHMLKYRDAYVDPGETAYIQQQRDRTIRNLKRRATLLGLQLIPAKATVS

SEQ ID NO: 491082 - protein, 342 aa, unidentified
MSEIITVGLDLAKNVFQVHGADGAGRAVLRKKIRRAQVLEFFSQLPSCIVAMEACGGAHFWGREIGKLGHDVRLIPPAYVKPFVKRQKNDAADAEAICEATMRPTMRFVPVKSEETQGAAMVFRVRELLIRQRTQAINALRGHLTEFGQIVPQGASNATRLIAIVEDPESDLPADAIPTLKALIAALMHLEAEIAKLDTEIARRAKENEVARRLMTVPGIGPLIATAIAVLAPPPETFRKARDFAAWLGLVPRQHSTGGKQRLGATTKMGERSLRRLLILGANSVIIKRHVHSSARPGTWLAGMLSRKPPMLVRVALANKMARIVWALMVKGQDYRAPAAAA

SEQ ID NO: 491083 - protein, 387 aa, unidentified
MYYVGIDIAKLNHFASVVSADGEVLVKPFKFTNDNDGFCTLLSALASYERGSLIIGLESTAHYADNLVEFLVSKRYQVCVINPIQTSTMRKNNIRKTKTDKVDTLVVARTLIAQPHRFFSQEDIDLMHLKNLGRFRQKNIKERTRLKIQLTAYVDRVFPELQYFFKSGLHQKTTYALLKEAPTPELVASMHLTHLAHLLEVSSHGHFNKEQAKELRILAQKSVGSSDRALSLQVTQSVEQIELLDRQINDVESEMTKIMLGLDSVIMTIPGIGYINGGMILGEIGDIHRFSKPCQLLAFAGLDPSIYQSGNFNASHTRMSKRGSRILRYALINAAHNVVKNNNTFKAYYDAKMAEGRNHYNALGHCAGKLVRILFKMLTDDVAFNLE

SEQ ID NO: 491084 - protein, 394 aa, unidentified
MAFKIFRKNCCGLDVHKTWIYACMGITDTNGRTEYKQARFSSFTKGLQKLADWLAKYDCNDVCMESTGKFWIPVFNILEKICWVTLAHPKYTKPQKGNKTDRKDAKWICDLYMCDMVNPSFIPPPDIRQLRDLMRYRSKLTNIMTSEKNRALNCLTVSKLKLDDVFSDVFGKSSRSVIRYILEHPGETFQVAPFIDRRCKHPVEEIQAVIDGTISHQQAVKLRECLQHLDELEVHKTNVEKEILCLVRQYPYQLELLQTVPGFSGNIMTAIALISEIGADMSVFPSAKHLVSWAGCCPRNDQSSKKVKSTRISRAGVYLKPLLVQVAIQPFTANADKLSAAGALEIRCQICDGRFLSMWAALFIFLGCPLPPCPKNLHVHNGRIVILASVAWIF

SEQ ID NO: 491085 - protein, 338 aa, unidentified
MAILYVGIDLAKNVFAVHGVDEHGKPALVWPKVTRDKLHERVAALPPCTIGMEACSGAHHWARLFGDLGHTVRLMAPKFVAPYRLSGRRGKNDAADAAAICEAVQRPNMRFVPVKSVDQQARLTLHRTRQGFVEQRTATLNRIRGLLSEFGVVLPLKAATVRREAAAGLEALPGWARLAIGDLLDEVRRLDERVVEYDRHLAHLAREDERARRLMRLSGVGETTATALLATVGNGHDFRCGRQFAAWLGLVPGQYSSGGKTRLGRITKTGDPYLRTLLILGARAVLALAKTKTDPISRWAAVLEQRRGYWKAVVAIAAKNARLAWAVLHHGERFALPA

SEQ ID NO: 491086 - protein, 337 aa, unidentified
MDMHVGLDVSQRTTSICVIDGSGQRTWQGTASTEPAEIVRTLRAHGAGQARVGMETGPLAVWLYHALRKQGVEIDCIHARHVHAALTVQLNKTDRNDAFGIAQLVRSGWYRPTHVRSLECHQVRLMLTVRDKLISLRTTTNNQIRGLLKTFGVVLGAGKNRVFETSVQDADPLRDGTKPVIGILLDTWRHLTTKIRELDRSIQRQVNRDPVCRLLMTVPGVGVITAASFRTAVDDPSRFKHVSDIGPFLGLTPRKYQSGEVDRNGTISKQGNRQTRSMLYEAALALLKRYGKETSLGQWGAKLEHRMGLRKAVVALARKLATVLLSMWRSGEQFRCA

SEQ ID NO: 491087 - protein, 379 aa, unidentified
MIKTRRSTGSKIVVDSNNKTKLPKERPVNETKYIGMDVHMATTVIAVRNSVGKVVAESIVETKASVIVDFLKGQRGALYVTFEEGTQASWLYDLIRPHAAEVVVCDPRQIAGQESKSDKTDAKRLAELLRTNSLKPIYHGEHRVQALKELAHSYGSIIHDGTRVKNRLKALFRGRGIACQGTGVYSKKERDEWLKRLDNGALRLRIQRLWKELDLLTELRQEAEKDLMVEARRHPESKILRSIPGIGPMRAAVILAFAITPYRFRTRKQFWNYCGLGLRSKITSEYELVQGRVRRSKKRPLLRGLNPNYNRALKDAFKGAAVTAALGPWKSQFDAMVEKGMRAPVALVTLARKIAAISLVLWKKGERYNKSKVKFGHAA

SEQ ID NO: 491088 - protein, 358 aa, unidentified
MKRIVIGIDISKEKIDASAIDMQNAHLGVQKLGYQSFENRPMGFRRMLVWARHLIKGVTLDEVLFCCETTGGYDRCLCDYIYAKDLDIWRESALQIKRSMGVRKGKDDKADSLMIAEYAMRHMDKAVIYQTPSSTIRELKALLQYRHKLVQEKTEKKVRMSHLEDTAAKSKSMSFILRDARKSIKALEKSIKLCEQQILELIKGDEELYSSYRHIVSVNGIGIVNATALIAYSNNFKGITTANRMASYYGIAAFRDTSGSSVDKKAYVKCYSNSLLKAYLTQAAEWTIRENGIYHDYYLRLKEKGKPYGIIINNARNKLIHLVFSLVQNDMDYEHDHEAIRTQRIGNGYTTTPLKNIN

SEQ ID NO: 491089 - protein, 350 aa, unidentified
MLIIGCDYHPAFQQIAFVDTETGELQERRLKHREEAEKFYRDLAAQEMKVRVGMEASGHARWFERLLGELQIELWIGDAAEIRTKRVRKQKTDRQDAQLILKLMLKDDFPQIWVASWENRDLRQLLWHRHRMVQARTRIMNQLQAVALNEGLGCKKRLWREAGREQLEAFPLAPWASRRRQDLLELLDRLNPTIADLTQTIEREVEKCPEAQRLRTHPGVGPLTALAFVLIIGRADRFQCGKQIASYLGLVPLEESSGNRRRLGHITKQGNSLLRFLMVEAAQVTVRSIPEWRSKYFHLAMRRGRKIAKVAMARKLAVRLYWMWRQGWDYEQLKKFGPHAGQPENRDGVQ

SEQ ID NO: 491090 - protein, 338 aa, unidentified
MDIIKQVIGIDVSKDTLAVCYGTVDANQNQQISKSVTFDNNLKGFRELMAFVRKNRGQLQAPLHFVMEATGVYYENLAYFLNEKQQKVIVVLPNKTKNFSKTLDIKSKTDKLDAQMITQFGLERQMQLWSVPSPLIKAIKALTREYHSKKDMAAQVKNQLHAKEYSHIPLKESLKRSQSILSVFEKQLREIEKEIKELVKQDDDLNDRINKIDKIEGVGFMTIVSIIAETNGFALIENAKQLSSYAGLDVVYNESGLKKHKTTISKKGNKHLRKAVYMPALSAVKYNPQLKQFYIRLVIKKGIKKVALIAVARKLLILIYTIFKKNEDYVPNYNLAKG

SEQ ID NO: 491091 - protein, 410 aa, unidentified
MEVLYPDCAGLDVHKDTVVACGRHMANGEVRREVRTFKTTTKELLALSDWLADEGCTHIAMEATGVYWKPVWHVLGDGDFTLVLANAAHVKNVPGRKTDVNDATWLADLLAHGLIRGSFVPDEQTQEMRSLLRTRKQLVRERSSHVQRLQKTLEDANIKLDSVISDILGSSGRRMIEALIAGETDPEGLAALAHRRIKATPDELEAALHGRVTRRHRFLLRLHLQQIDAIDAAIDQIDQEVDADVEPFRAAIALLTSIPGVSVLSAEIILAEIGRDMSRFPTAGHLISWAGLCPKNDESAGKRRSTRMRKGAPWLKTTLVQCAWAASRKKASYLQAQFHRLRARRGAKKAIGALAASILTTVYHMLTSGEFYRDLGPDHFDRRANGRQTSRLVARLQNLGYAVQLTPLAA

SEQ ID NO: 491092 - protein, 410 aa, unidentified
MYGKAGPMIYAGIDIAKNDHVVGATDERGREAAKPMKFANSASGFDRCAAYLDGLSESKSDLLVGMEATGHYWLPLFCRLQDEGYAVVVINPMRTDAMRRFKGSSRVKTDMIDCALIAETLRCGGFQPSRLGDEAMIELRQLTRLHQALKESVADLKRQVIVALDQVFPEYDSVFSDTFGESSKAFLKRCPTPEECLAVRADSLARTLERASRGKLGRAKADEIKGIAKASCGIGLATSAFSFQIKLLIDQIDFIEGQVSEVEARMRAGIEEVEPLILTIPGIGYALGAQIVSEIGDVRRFRNASSIVKYAGINPSISQSGKFSSEESHITKQGSPYLRRALYLAAMAQLKLKSPFYDYYAKKRADGKSHREALVAVARKLVHVIYAVLSKQEPYDPNVTKSPELASRSE

SEQ ID NO: 491093 - protein, 355 aa, unidentified
MQKYKVSFKGQNIYVGIDVHLKTWHVTTLTESGCKYSFAQHADAKELFDRLNKKFPEAHFKSAYEAGFCGFSVHYALTDLGFENIVVHPADIPTTGKEKAMKTDAVDSEKIAWALKRGELKGIYVKDKRYMDDTNLMRLRQRLIMDLSRQKSRTKHLLYTQGVTYPERFRTSRSHWSRNFMKWLREEVELLSEQKLSLLLLCEQVENTRKAILKVTREIRRLSTTERYKENYDLLTSVPGFGMIVSMSMLTELDNNIMRFPNERRFVSMLGLIPTCHDSGEKKVSGEKINRGNKHLGPLIVEASWVAIQRDLELGAYYSNCCQSMKPHKAIIKVTRKLACRAYAVLKTKTRYELP

SEQ ID NO: 491094 - protein, 308 aa, unidentified
MTYVGIDVSKDRLDVHVSPAGEAWTVGRDAEGLETLVARLGASAPLCIGLEATGGYETVVAAALGAAGLPVAVINPAQIRHFARAMGKRAKTDPIDAAVIARFVEATRPPPRALADTETRALADLVARRRQIIAMMVSERQRLRRATLLPLRKSIERLLAALQKELSDLERTIDEAVRGSPLWRDQEALLTSIPGVGPTTARTLLAELPELGQLGRRQISALAGVAPWTRQSGQWRGKAMIGGGRPTVRSALFMAALVASRYNPVLQALYQRLVASGKPKKVALIALARRLLTFANAILRSKSPWLAA

SEQ ID NO: 491095 - protein, 283 aa, unidentified
MNNNTKKGLVTVLGIDLAKQSFQLHGVDNAGQVVIKKKLNRTQLSAFVANLPVCLIGIESCGGAHHWTRLFTEMGHTVRMMAPQFVKPYVKSNKNDSADAEAICEAVQRPNMRFIPAKSIEQQDIQSLHRIRSQLVARRTAQANQIRGLLMEYGIVIPQGISYIRKSLPDILEDGENRLSVLFREQLSGLYEEMVHLDERIEALELSLKTISAQNEDCKRLLTIPGVGLMTATALIAAVGDVNIFKSGRELAAWLGLVPRQHSTGGKPTLLGISKRGDSYLRT

SEQ ID NO: 491096 - protein, 467 aa, unidentified
MKHNSKRQHASKKERVSTPLFERIQPDAAGIDCGQNSHFVAVPSERDPQPVREFRTFTADLHRLADWLVQCGVKTVAMESTGVYWIPLYEILEQRGLEVLLVNARDVHNVRGRKSDVSDCEWLQQLHSVGLLRPSFRPAAAIVPLRSFMRQRETLVEEAAARIHRMQKALTEMNLKLHTVFTDLTGQTGLKIVRGILAGERDPELLAAHRDYRCHASHAEIIAALTGNYRAEHLFALRQNFAAYEFLLKQIAECDGEIETLLTTLAAQQPPPSPPLPPARRKRTSKHQPQFDIRGPLHRLTGGADLSQIDSIGPQAALQIIAEIGTDMRRWPSEYHFASWTSLAPNNKISGGRLLSSRTPPSANRVAVILRRCAMSAGKTSSALGAFYRRLAVRIGKAKAITATARKLALLVYRVLSGNLVYNDPGAAAYHQLNRSRELKSLRKHAKLLGFDLVDHSTGEVLLNPVS

SEQ ID NO: 491097 - protein, 356 aa, unidentified
MSEITRVGVDLAKSVIQVYAVDAAGKLLTNRQLSRDKFLTWCAQLPVGCVVAMEGCGGAHHWARKLITLGLNAKIIAAHLVAPYRLQGKGGKNDANDAAAVCEAASRPNMHFVPVKTTVQQGLLCVHRLREGLKEERTACVNRIRGMLTEFGLVVSKSPEKLREKLTDMLEDASNDLSGVARLVIEEAYSHWKEIEERIKWCDQRISAHVKDDAPAKAAKGLMGVGPVTASAVVATVGDFNQFKNGAQLGAWLGLTPRQNSSGGKNSLGGITKRGNMYLRMLLIQGAKSAVMTAHKRDDPISKWLHQLREKSGWQKAAVAMANKNARILWAMMTKGCRFDAQHVSVKPAGLAPAMA

SEQ ID NO: 491098 - protein, 352 aa, unidentified
MKIVGALDVHRRQITFKTLTPASGESSRGRISPAAREPVRQWLERFDGLEGEFVLEGTTGWRFVVEEIERAGHVARLADPAETAARRGRKRRAKTDDADCDLQLRLLLAGELPEAWIPPVQILELRTRVRLRKTLIDQRTAWLQRLQAQLFHQGVPSGLKPRTAAGRDALARVELSPAGREAVELCLRMLDQIDRELVPIDRALRAFARHQPGCRALTEHLYGVGAVTATAILAELGDARRFRSSDDAVRHCGLDVTVWQSDRKRAAGHLSHQGPSLLRWALFEAAQCAARRSSPDHAYYLKVAKRIDHNRACLSVARKLCRRAHHLLRELGDDALAPTNHEPRAKLVDVAA

SEQ ID NO: 491099 - protein, 347 aa, unidentified
MRFYTTQHPFYCGIDLHARMMYVCILAQSGEVLVHRNMKTDPETFLKAIAPYRQGMVVAVECMFTWYWLADLCADEGIPFVLGHALYMKAIHGGKAKNDKIDSQKIAALLRGGMLPQAYVYPAKMRATRDLLRRRMHLAHKRAELLAHVQNTNSQYNLPAIGKKIAYKANREGVAERFADAAVQKSIEVDLALITYYDELLRDVELTIVKTARHHDANTLYLLQTVPGIGKILSLVLLYEIHEIGRFPSVQDFVSYCRLVKCARESAGKRYGTSGAKIGNAHLKWAFSEAAVLFLRDHSAAQTYLARLEKKHDKGKALTMLAQKLARAVYYMLKRQVAFDRETFFQR

SEQ ID NO: 491100 - protein, 360 aa, unidentified
MKIQRTSVGLDVHARSVFGCALDGQTGEVFQRRLSPDHREIQNWVSGLPGPVAVTYEAGPTGFGLARCLLEAGVECLVAAPSKLVRPSSDRVKTDARDAAHLARLLHLGEITAVEIPSVEREAARDLVRAREDCRADLMRARHRVSALLLRHNLLYTGGSAWTLAHEAWLQRQRFDALPAQTAFDTAVQTMLACVDRRDGLDAMIAEMAADSEFSAVVRRLGCLRGVSTLTAFGLAVEIGDWSRLNGRTIGAYLGLVPTEYSSGASRVQGAITRTGNSHARRLLVEAAWHHRRPYRPGVELRRRWQVASKAARRRGQQANQRLHTRWRGFDARAKRPAVANTAIARELAGWCWSLAVLEE

SEQ ID NO: 491101 - protein, 365 aa, unidentified
MDQYIWVGLDVHAESITAAILEGDAQDPEVITLSGDLMKVRRLFRRLAEKGTPRACYEASGAGFVLQRVLTQDGFHCEVIAPSLIPRKPGDRRKTDRLDAVMLARLYRSGHLTPVHVPSGDQEALRRLLRLRFVYQVYCKATKNRISGMLRNHGFVFHEGKSTWTQKHRQWLTQLRLELTGPLQTALAVELEHLEYLETQREAMDSELGRYAQGASYRRYVEALCCLRGIKVLTALTLLGEIDDVRRFQSPKGLMAYFGLVPTESSSGDRERRGPITKAGNIHARRLLIEAAWNNRHKSGATLMLKRQRQGQDPVVVAIALKAQHRLYKKFWRLDARKHRHVAITAVARELCGFVWALLKAVPQS

SEQ ID NO: 491102 - protein, 374 aa, unidentified
MTIAAGGSSSPVEVVLGVDTHLDFHVAVALDQLGRKLGVITVPTTKHGYESLIRWAQQLGYVQRAGLEGTGSYGAGLARHLRAQGVEVLEVERPKRRSRRKGKSDPIDAEAAARAVLAGETASVAKSGDGRVEMIRLLKAARRSAVKAKTQAANQLRAFRLTATEELGCRLSGLSTRALAAAALRFRPGDHPENAEEATRFAMRSVARRYRSLSEEIADLDAQLGRLVAEVAPGLTALCGVGTDNAATLLAMAGDNPERLGSEASFANLCGVAPIPASSGKVLRHRLSRGGNRDANRALHLICVVRMRTDARTREYVARRTAEGKNRREIMRCLKRYIAREIYGVLIPSVARSSPEARGVSEARVAAMADTTLL

SEQ ID NO: 491103 - protein, 356 aa, unidentified
MIPWSSRPFLSEGRHTPLLKQPEQLPGPKEPVSARPGVGDLSMSKKEIFVGIDVSKNSLDVAVLPDVQAWSTANNETDIPLLVERLGQLAPTLIVLEATGGLEVLVASALGAARLPVVIVNPRQARDFAKAMGILAKTDGIDCRVLALFGEKLRPEPRPLKDEQLQELNTLLTRRSQLVVMHTAEKNRLSSSPNSIRKDIQQHIDWLEKRIKDMNNTLGQRIKESPLWREKDLLLRSVPGVGPVLSISLVTGLPELGNLNHKKISVLVGVAPLNCDSGTYKGKRKIWGGRASIRSALYMGTLSAIRHNPVIKAFHARLIAAGKANKVAITACMHKLLTILNAMIKNSTPWNPQMSN

SEQ ID NO: 491104 - protein, 363 aa, unidentified
MKNYIFVGCDSHEKTLVNKIAHNDGPLETKRFSARRAGRQKLIENLRERSRQAGGAQVVVAYEASSHGFILCDELRAAGFLCHVLAPTKIERSIKQKRNKNDDRDAERLLDIVRGHYLAATKMPAVWVADLQTRDDREPVRARQDLSEKQTTVKTQVQMLLKRQGIEKPEGVGTSWTKRYRLWLEALSAEGPAIQSGMRQTLKSLLRQLQFLEHEIEQMDQAMRELANTPRRKPIVDELMKEKGVGLATAMKYVTDIGDFKRFSRGRQIGAFFGLVPSTAESGENNDRKGHITREGSPSARKVLCQATWSRVQHDKQEREVYRRLVARNPKKKKIALVACMRRLAVRLWHIGFQAQLKMEAAG

SEQ ID NO: 491105 - protein, 457 aa, unidentified
MNANNARFQSASKIRISLLLIVLQCPMKGGDFMKNNFLSTLFVGIDVSSKTNVLCALDFQGNKLLNLKALNNQPGAESILESILDCLNSNSLKFVVIALESTSFYSTHIANFLSSNEVLLAYSPMVYCLNPKTTANYRKSFVDMDKTDPLDAYIIADFARCGRIKSQPWRGAQFLALQRLTRHRLHLVEAIAKEKTYMVSNVYLKFSQLTVLEKADRPFSNTYGATSEAVLTEFLSLEDIAYSSIEDLVAFIKDKGKNRFSNPVGTAELLQKAARDSYRLDKVLYEPINIAIASSFNVIKALQIEIKEIDKAIEKNIKGINTTEYQSLISIPGIGPVFASGILAEIGSITSFSSNDALAKYAGLTWRIKESGDYSASETNMTKTGNKYLRYYLIEAANSVKNNIPEFNVYYRKKFNEVPKHQHKRALALTSRKLVRLIFGLLTKNQIYSSSKVGEIQ

SEQ ID NO: 491106 - protein, 411 aa, unidentified
MKLFVGLDVSSFDIKVCFLNGEGDQLNAFTVENDLPGATKLRDEILYAVQDESVSELRIGLESTSVYSFHPSMFLHNDEYIQALNGQVFVMNPKQIANFKKSYSDMDKTDEIDAFVIADYMRFGRLPMSVVKEEQYVALQQLTRARYQIVKQITQEKQRFLQYLSYKCNTFTEDVESSVFGKAMTDLFLESYSLEELSHMPLEDLADYLRIRGRNRFPDVKQVAQSIQKAARSSYRLDKVVEDSIDAILGTSITLIRTFEKQIKALDQSIERIMKGVPQTLQTIPGVGPVFTAGIIAEIGQIERFDNEAKIAKYAGLYWRKHQSGRFTADDTSLSRNGNQYLRYYLVEAANSVRRQIPEYRDYYAKKYQEVPKHQHKRALVLTARKFVRLVDALLRKNQIYTPGRGVPYEA

SEQ ID NO: 491107 - protein, 353 aa, unidentified
MEYIGVDVGKRKCVACVMNQDGDISETYSYPNTTADASEFARCLVKKYGECKAVVESTGNMWMKTYEAFEETGIEVKLANPSKTRVIAEARIKTDKLDCRVLAHLLRADLIAGCYVPTKQLRDTRYTLTHRMNITRDRTKIQNRIHSLLHKYDLQCEYGDIFGTHGMDWLRTLRLPAIRDRQILDSLIRQVEFLNCEEETVNSEIASDAVNNRYVATIMSMTGFDYYGASVLAAYIADISRFPSPSRLVSWVGIWPSVHQTGESLHMGKMKDGNTKLRWIMSQAANVAAKCDPRMKAFYERKLRKHHHNVAITHVANKMLRILWHMLRDNTLYNERKQQLYHRKLITMARTAS

SEQ ID NO: 491108 - protein, 481 aa, unidentified
MPQLQKDSKLKMGRANSVPSPAVKAAKKKSKRSAPDPTRGLSITHPNAAGIDVGGDTHWVALPPDRAPNPVRTFGCFTTELETLADWLIEHRIDTVVMESTGIYWVTLYDLLERRGLRVFLINARLAKKLLSRKTDLLDCQWLQRLHAYGLLNNSFRPPEEIRVLRAYLRLRERSVAAASQSVQHMQKALIEMNVQLSTVISDISGETGLRIIDAILAGERDGDKLAALKDRRIKATEKTLSLALRGHWKDEQLFALEQARLTWGHHQEQIAQCQDRIDQQLKAMNSEAAPKDSDTGTVTSSSEPEPASEKSPAFCLREQLKQLAGVDLVSIDGIGELTAQIVLSEVGTDMSPWPSEKHFSSWLALCPEHEISGGKILKRGRRRKVSQRAAQALRMSAYGLERSDSALGAKYRRLKRRLGAPKAIVALAHQLARLIYRLLKHGQDYVDRGAAWYEARYQAQRLKWLQKQAKELNLKLVPVE

SEQ ID NO: 491109 - protein, 347 aa, unidentified
MLHAGLDLSRRRVDVHVLNEAGKTLVVDAFPPDADGLAHLVRHVASFGEEVHAVIESMNGARFVHDTLELHGWGVEIADALRVKGLAPLACKTDKIDAKVLAELSRRDLVPAIWLPTPSVRAERERARFRLHLVHHRVALKNRIHATLLAFGHPCPVSDLFGESGRALLDRLAIPEPWAGTVSASLRLIDELDDQIDAAERELRRLGANHPYMSLLQTVPGVGWVLAYTIASEVGDIARFESPKKLVGYTGLCPRVYQSGGTDRRGRIAKNGPTYLRWALIEASIHACKNPLYKPAYDRTKARLGRDRGGKVARVELGRKLAEAMWHMLTKGERFAPARSQAAALVA

SEQ ID NO: 491110 - protein, 426 aa, unidentified
MHRGYNMTANEWIEQPCFAGLDWARSHHDLVIIDRHGQVQETLRLAHTAEGWQAVQTLAQRYPQLPVAVETSQGTVVEHLFAAGLRVYPLNPKAAERYRERHAPSGVKDDSRDAWSLADALRLDGHTWRALDPQDPLVAELHLLCRDEIALIEQRTALINQLQQCLHEYYPAALEAFDDWTGPGAWAFVLAFPTPAGLQAAGRRRWEKFLHTHKLWRPATTEKRLAVFARATALSGAAPTVAAKSLLAVTLARLLQALERQLAEYRERITAVFARHPDHDLFGSLPGAGPKLAPRLLGEIGAERARFPTATGLQCVAGTAPVTVQSGRKPGYQRVRHACNDTLRATVHLWADLSRRKCAWAEAYYRRHRQDGQSHACALRCLGQRWLKILWKMWQTHTPYDEARHTRNQTQHGSWILALNPAAQRP

SEQ ID NO: 491111 - protein, 452 aa, unidentified
MAKKKDKTRMMRVHHLDAAGIDIGSNEHWVAVPADRAEKSVMPFGTFTSDLKRLADWLKECGIRTVAMESTGVYWIPVYELLEERGFEVLLVNAAHARNVPGRKSDVLDCQWIQELHTFGLLRASFRPGPRIAELRAYTRHRQTLVEEGARQIQRMQKALDQMNVQIHHVIADITGKTGMTVVRHIVAGNHDPEMLAQYRDPRCRASKEVVIEALRGHYKTEHLFTLQQALSLYDIFSTYIKECDDRIETVLREIAAEFPETDAPPKRAQFPARGNQLAIDVRNPLQRILGGVDVQSLVGIGPLTALNLLSETGHDMTRWPTDKHFTSWLNFAPGTKISGGRRLSSRRRPGKNRAGLILRQAASAIGRTQTALGAFYRRLAARRGKGIAIVATARKLACAYYRLLRHGGEYVERGTDAAEREYQQRRITAMKRQAKLLGFDLTPMQPVAQVT

SEQ ID NO: 491112 - protein, 412 aa, unidentified
MRRVIGIDIHRTFGEVVFWEEGRLRHGGRIDMTRTALEGFGKALLAMDEVVIEATGNCMAVCRVLSPFVKRVVIANPLQVKAIAYARVKTDKVDAGTLASLYAAGYLPEIWVPDGGTERMRRLVARRYQVVRNRTRIKNEIHAILHAHLIAKCPHADLFNGRGRDWLARQPVPDDERLAIERHVRELDRLAEDLAILDRQIAENALDDSAIGRLLTITGVNLTVATGLMAAIGDITRFKSPEKLVSYFGLNPRVRQSGVGAAHHGRISKVGRSHARAMMVEAAWAAAKTPGPLHAFFVRIRARRGHQVAAVALARKLTVLCWHLLSKKEDYLWARPALVANKTRAMELQAGKPPAKGNRRGPAYAYNVKALRDQEMRVAEQAERSYEQFVTHWKPRPSKDRARGPLNPARLE

SEQ ID NO: 491113 - protein, 421 aa, unidentified
MQPEPTSIVAWIGIDWADEEHRICLQAVGSEPLERAVLKQRPEALQEWVRQLRARFPQGQIAIALEQSRGPLIYALMHYDFLLLYPVPGKMLSDYRKAFFGSGAKGDPGDAGLLQEILCCHRQHLRLWAPDDAPTRQLGLLNEQRRKLVDDGTALTNRLGSLLKESFPQALDWLGDLSHPASSEFLAQWPSLAAVQQAPRARLREFYRRHFRLSPEQLQERLVQMREAQPLTTDPAVLEADALIVSLLAAQLQTLLSSIRRLETAIADLFHLHPDRGLWEILPGAGAALAPRLLVAFGTDRQRYQKAGELQTFSGIAPVTASSGKSRWVHWRWACPKFLRQTFHEFAAQSIPRSSWAKAYYLEQIGRGKHHHAAVRALAFKWIRILYRCWQDRTPYNEQQYIQALIRRGSPLAAYLPTTGN

SEQ ID NO: 491114 - protein, 342 aa, unidentified
MQISTIGLDIAKNVFQVHGVDAHGSVVVVRQLRRGRLLAFFETLAPCLVGMEACATAHYWARALARLGHTVRLMPPSYVKAYVKRGKNDAADAAAICEAVTRPSMRFVPVKSAQQQSALMLHRTRDLLIRQRTQLINAMRAHLAELGLVAAQGRDGVHRLMALVAEESDACIPELARFACQSLAVQLAALQGQIDALERRLCVAHGESQVSRRLKTIPGIGVIGATAIAATVTDPKAFRSGREFAAWIGLVPRQSSTGGKVRLAGISKQGDRYLRRLFVIGAMAVVKQARAHPDKHPWLTQLLARRPAKVVAVALANKMARTAWAMLVKGENYRAPALMSAA

SEQ ID NO: 491115 - protein, 344 aa, unidentified
MKYMGIDYHKQYFVATTMDEKGRIISKEKVSTDRNSIKRYFKKAGSEGEMKAVMEACYGWEYFYDEVDELVDELIMAHPLKTRLIAEARIKTDSIDSETLAHLLRADLIPQAYAPSAETRDQKNLLRYRSSLTAMKVRIKNMVHSVLTRNHIEDKGFQELSDKFAKKGIAYMRAITLKGNDTAILHEYLDLLEETEKRIKSAESRIRAVCRQDELCRLLDSIPGIGDILAVTIRYEIDDIERFISSGKLCSYAGLVPSTYSSGNRTYQGKITKQGNKWLRWAMIEAAQRAPLSDMWLSAFFNRVSTKKGRKIARVAVARKLLEIIYRIWTERRAYYKKPVTVAL

SEQ ID NO: 491116 - protein, 368 aa, unidentified
MKQVTTYVGIDAHKKDLFIAMLMGPEAKPVTWQLANESHAVRRLVRKLEREAPGPVRVFYEAGPCGYALQRQVATSRVSCDVVAPALIPRKPGERVKTNRRDARKLAELGRAGLLTAVQPPTPDDEAVRDLARARDDAREDLQRCRHRLGKLLLRRGLHYHGRNWTRGHREWIHRLTWTHAAERTVVDDYLLAIDHTEARLLELDARLSEIAETEPYREPVGWLRCFRGIDTLTAILILAELHDFRRFASAPALMAYLGLVPGEDSSGEKHRRGRITRTGNALVRRLLVETAWHYQHRPSVGVGLTRRRKGQPGRVIAIADKAQQRLCRRFRKLAAENKPAPKIAVAIARELAGFLWCALQPVPVPVK

SEQ ID NO: 491117 - protein, 410 aa, unidentified
MEPILMSCAGMDVHEKKVDVCIAHGAFDKPPKFEIRTFSTMTSDLEELMSWLKKYDVTTIGMESTGIYWKPIFNVMEGQFEIVLANAQRLKAIPRKKTDIMDCKRIANLLRYGLLPNSFIPPKEIRELRDLNRTRRKLVGMMTSEKNRLVKVLESANIKLSSVVTKIYGVSSLALIRSLLEKNKLSREEISKMAKGKLKKKVDLLEKAVNGKLTDHHRFLLEMHLQNIDYLAKQIKKLDDEIEKKMVPFQKESKLIQTIPGISEVNAAAILAEIGVNMSQFPDEAHLSSWAGVCPGNNESAGKKKSGKTQKGNSFLKGSLTEAAWAASKTKNTSYNAFYHNLVRRKGKKKTLVALAHRMLIDIYFVLKTGEPYQDMGAEAVHERTSKRKERSMIRSLEKSGYLVTKAATA

SEQ ID NO: 491118 - protein, 409 aa, unidentified
MRVIYRTCAGMDVHKRTVTVCLVWWDADGQRHQQVRTFRTMTKDLLALREWLCAQGCRIVAMESTGVYWQPVFNLLEDTFEVLLVNPSHIKQVPGRKTDVKDCEWIAELLEHGLLKGSFIPPREIRDLRDLTRQRRRLIQIRASEVNRLHKVLESANIKLASVATDVMGVSGQAMLKALLGGERNAQRLAELSRGRLRKKKADLVAALEGRFRPHHAQLLARLLAHIEFLDESIAECDAQVEALCRPYTLDLERLDGIPGVDRRSAQDLLGEIGVDMRPFPSHKHLCSWAHVSPGNNESAGKRKSGRTGKGNRWLRALLIECAHAAGRSRDTYLGEQYRRAARRRGKKHAAMVVAHSQLEAVYFILRDKVTYHELGAQHFDQINQAQVIRYHVRRLESLGLTVQVTAAA

SEQ ID NO: 491119 - protein, 354 aa, unidentified
MKRAFENSRGIVQRKEVFIGIDVHKVSWHVTARTGGEEVFHGGIPGQYGALRGLLNRFKGCQMKVAYEAGPCGFWLHDKLTEDEIEVIVVPPSLIPVESGNKVKTDKRDSRKLARLLESGLLKRVYVLTEEDRVDRELLRTRRQVLEHRNDVARQIKSKLLFHGMTSPFSTQTWTRGYLRWLKELIFEREALRISFDVLIELYEYLTTELVKLKKRILELSQSGKYRDKVTLLKGIPGIGTLIAMEILVELAEMERFAKADELASYIGLTPSEFSTGEYVRQGRITRCGNKRVRTALVEASWILIQKDPWMRAKYNRLKGMKGGKRAIIAIARNLIIRIRRILLNNEPYVVGVC

SEQ ID NO: 491120 - protein, 341 aa, unidentified
MKNKSFIGIDISKNVIDASIFCERTPIKDFPHDVFNNSRKGFGEMCTWLKKNHVVLSNCLFGMEFTGSYSMELEKFLNARNYQFCMLSTHVVKHYPMGPKDKSDKIDSAKIADFLYRYNGTECVKPYKMPDKTMQRLKALMNERKFLVEQRTCFMNRRQLCTTKEDAQLYDGYIKKLCHDIENIELEEQKLLATDDSLLATYKNLLTIPGVGFVNAINVIVITRNFTAFETARQYASYVGVAPHSHTSGTSVRWRPRPSARCDGQAKADLSMAATVAVQYDAELQSFYNRKLEGKQDSDTKRKALNAVKFKLVLRMFATGKQNRKWEPLDSKSSNEKLAIS

SEQ ID NO: 491121 - protein, 343 aa, unidentified
MQAVTTIGLDIAKSVFQIHGVDAAGNVIVRRRLKRRYVLSFFQKLPPCLVGIEACASSHHWSRELQALGHTVRLMPPTYVRPYVKRQKNDAADAEAICEAVTRANMRFVPTKTLEQQSCLMLHRTRHLFIRQQTAVINAIRAHLAEFGIVAPVGRNGVEQLLDVVADASDKRLPEIARACLLALGAQLRTLKAQILNFDRQIMAWHRSNEASKRLDEIPGVGPALATALVASVADPKAFRSGRNFSAWIGLVPKQHSSGGKDKLGSISKQGDRYLRSLFTAGALAVIRYAKIHGTKHRPWLTALLARRPTKVAAIALANKIARMAWAMMARGDRYKEPVALAA

SEQ ID NO: 491122 - protein, 417 aa, unidentified
MSDFEVLVGIDWGASNHQAALVDPDGQLLGNRSFSHDGAGLAAMADWILARTAAAVDAIGVAIEVPHGPVVEAMMERGFTVHSLNPKQLDRFRDRFSPAGAKDDSRDALTLADALRTDRRFFRRLKSDTAEVVELREWTRIANELTSERTRLVNRLRQQLWRYYPQFLKVASDLSKSWVPELWKLAPTPAKARRLRPATIETFLKNRRVRVVSAQDVLKQFREPAIAVAPGTAEAAVAHIRVIVNRLHLVARELSNAHRQMDRLTAAVAAALENPGTGPGTEPQRDVTILASLPGVGRIVLATLLSEALEPLRRRDYQALRCLCGVAPVTRRSGKSLVVKRRLAAHKRLQDAVYHWAGIAVLRDPICKAKYAALRARGHGHARALRSIGDRLIAVACAMLTSQTEFDRDLSPSSSAA

SEQ ID NO: 491123 - protein, 320 aa, unidentified
MTLSTIGVDISKDKFDVARLSAEGKYKHKKFTNNPEGFAAFLVWLASFGDEEVHIGMEATGAYSIPLAEFLAEKGYAVSVINPARVHAFAKAGMGRAKTDKADAKLIAQFVQEKKPALWTPPPHNIRELQALLRRVEHLLEMRQMEQSRLDTASPTVAGSIKTILELLERELETTRERIRKHINDDPDLRRRGDLLDSIPGIGEATLAHLLVALSDHYGFDNAKQAAAHAGLDPKIKESGKWIGKTTLSKSGDPMLRKALYMPALSAWRHNPAIHAFCERLKANGKNGKAIVCAAMRKLVHIAFGVLKSGKPFDPELNPA

SEQ ID NO: 491124 - protein, 401 aa, unidentified
MKCVLVLDVAKSKSMFMLSSDVGEVLLEPTEYIHNKSDFERIDSYISKLNIKDNLTIIMEATSIYHKAPERFFKENNYHVIVFNPLIGKEITNTIRKTKTDKQDCIKLTNLFWKGSIPDRNYTEDEIYTKLNELSRQYYHLDEGLTRHKNRYKELLHLCFPEFELCFKDGKIYDLTALNFIKEFPHAYIIKDKRVDALAYNMANTNDRHLNYYKRKANIIKEYAINSYPGVSENSKDVDNLKQLANIIIEIAKQKEIIKEQMIELAKQTKNFECINSLFGIGELSASLIIAELKDITRFNNIKQINASCGLDPTIVQSGKSIDYHGPIYKRGNRYARKILFNCSWNIITLSAKCDKENPIYVYYQKKKQEGKHYYAYLTACSTKLIRIIYALCMNNSTQQN

SEQ ID NO: 491125 - protein, 361 aa, unidentified
MQSTTIIAFDHHAATTVAAVLLPGQRTPALRALSSDIPTIQRFVGRLQRQGPVACCYEAGPCGFELQRALTARRIPCDVIAPALIPRRAGDRIKTDRRDAGQLAVLHRAGALTAIHIPTDQEEAARDLLRCREDIRADLLRARHRLSKFLLRHGRRFTATKKAWSKRHDAWLRAQTWSLPALDQTHRAYVRTVDEAGARLAAVDEDLRALLTLEPLRARVVRLRCFRGIDDLTALTIAAELGDPRRFATAPSLMAYVGLVPSEYSSGAKRAQGGITKTGNAHVRRVLVESAWHYRHHPFVSATLRARQRGAPAPVIAHAWAAQQRLHRRYARFAARGKRQQHIVTAIARELTGFLWAALTQ

SEQ ID NO: 491126 - protein, 378 aa, unidentified
MLVSEPERTSRAPRQTVAIEVLETVPQQGSPRSKPRKSRTAARALEPASARLGHEGEPAGRRPSVSDEVVVGIDISKDSLDVCVMPSGDSFQVSRDVRGLKALTKRLGSAPSLVVLEATGGMELSVWSALSEAGLKVAIVNPRQVRDFARAAGQLAKTDRLDAAVLASFAARMQPQATPLPSVEQQELSALMTRRRQLVGMMTAEENRLPQAPRGMQRRISAHVAWLRRELEDVDRDLSERIAKDTTWHRRDELAQGISGVGPVLSRTLLAELPELGTLTNKQAAALVGVAPMAHDSGTHRGRRSVWGGRAQVRATLYMAAMTACRHNPVFAAFYDQLIRRGKPKKLAQVAVMRRLLVILNAMMRHDTPWNPALALPR

SEQ ID NO: 491127 - protein, 304 aa, unidentified
MNGEIVYVGVDVSKDTLEVGWPDRTGQTLPNTRAGGERLLALLPGGGCVVCEATGGYEQLLVEVFLAANRPLARVNPKRVRDYARSQGWLAKTDRLDAKVLAEYGNVTHPRPVAKPSSYQSALRAWVQRRDQLVEGLQAERNRLAQATEPEVKASHRTFIAAIERHLQRVEKQLKQLMAQPSDLAERVACLERVKGVGRTTALAVLAYLPELGTLSRGRVASLAGLAPFNRDSGRFRGQRRISGGRFPLRRHLYMPALVAAHHNPILQPFYQRLRASGKPAKVALTAVMRRLLIALNSTLQSTS

SEQ ID NO: 491128 - protein, 366 aa, unidentified
MSKSSTAVSNRVEIFKDDKLTIGVDLGDRFSHYCILNGAGEVIWEDRLPTTPKGIDEVFSKIPANRVALETGTHSPWVSRQLARLGHEVIVAHARNVRLIGGSSRKDDRLDARTLARLARIDPGLLGPVRHRSAKAQIHLTVIRARAGLVSTRTALVNAARGLTKSYGERLQKCGTQQMNRESAKGLSQELRDALDPLLAEIESLNARIAEYDRRIEQVAKEVYPQVALLKQVKGVGTLIALTYVLTLDDPHRFRRSRDAGCFVGLRPGRRNSGMSQPQLHISKEGDRYLRTMLVQGAHYILGPFGEDSDLRRWGMRLAERGGKNAKKRAVVAVARKLAVLLHKLWVSGEVYEPLRNNHKVVGRVA

SEQ ID NO: 491129 - protein, 370 aa, unidentified
MSTQLFVGMDLHKSTSTFCVKTKEGELVREAKILTDRSQVTQFIRSFEEELSIVLEPVSQWYVYADLLQNLGCDVHLAHPMKVKAIASARIKTDEIDASVLCDLLRGNLLPEAYFSSKEVRSWKEVVRHRASVLNLRRQTKNKVHAILHKQALEHPYSNLFGVSGTRWLKHLTLPEPFATNLTDLLNCVEYLDEKVKAAEKRVQILVEHHPQAELLTTIPGISYVSALTIISEIGDIHRFPNAKKLCGYAGIVPSTYSSGGKTAHGRITKTGSKWLRYVMIEVAQHQQLCKKTPGFGSYYLKLKKRKGTNPATVATARKLLAVIWRMLTDNRPFSVEPPDRHFGKSSPITATASRTLATKLSSPVEVLST

SEQ ID NO: 491130 - protein, 313 aa, unidentified
MKKTICGVDVSKARLDVCIDPLGAFASFDNNTAGIAKLAAFCRHHAVSLVVMEASGGYERRAFLQLWRAGLACALTNPRSVRRYAEAMGVLEKTDRIDAGVIARFAAAKNLSPTPLPSPEQQRLKALVARLRQVTDDLTVQKQRRASLLDNPEMLASIDEVIALLKRQSRSLEGEIASMIDDDPLWSLLAETWRSVKGVAGRTVAWLHAELPEIGTYSNKSIAKLVGLAPLADDSGKHKGKRHIRGGRAGVRSILFLVAATVARYDKSMADFRARLVAAGKEKMVIRIALARKLLVRLNAKAREVRAEYANAT

SEQ ID NO: 491131 - protein, 357 aa, unidentified
MLSSNVKYIGLDVHKEAVAIAVLNGAGKLVMESIVETKASTLLDFLHGLRGELHVTLEEGTWAAWLYDVLKPHVADIVVCNPRRNALLKEGSKSDKIDARRLAELLRSGMLRAVYHGENGLGTLRELARGYLTISKDQARVMSRLKALYRSWGIPCSGRQVYTPRHREQWLSKILQPGVRRRAELLYQQMDGLLLVRHTVRRELLAESRKHPAVKILRQIPLIGPLRATLLLALMQTPYRFRSKRQLWTYSGLGVETHDSAQHRYVDGQLQRSKKPQQIRGLNQNHNHEMKKLFKSTAMSASRCAGPLQDFYAGLLAKGMKPDMARLTLARKIAAITLTLWKKGERFDAEHLKSQAA

SEQ ID NO: 491132 - protein, 344 aa, unidentified
MHIASIGIDLGKTTFHLVALGERSKVLVRKKFSRTQLLAHTANLPPSLIGLEACSGAHFLGAALREQGHEVRLIPAQFVKPYRKSNKNDFLDAEAIAEAVTKQNMRFVPIKTQEQLDVQAIHRVRDRLVQHRTALINEIRGFLLERGITFPAQPIHLRKNLPTVVEDAEQNLSPRLRWLLDRLWQEWKQTEIDIETVTEEIERIGAEDERCRRLRQIPGFGPLVSTATVAAIGNGAAFRRGRDFAAWVGVVPRQYSTGGKQKLFGMSKRGNVYLRRMLIHGARAVLYRIKYDTAGLGQWVHRLSQRAPRNKVVVAIANKLARIAWAVLSSGKDYRHQPVQHAAA

SEQ ID NO: 491133 - protein, 449 aa, unidentified
MKTLPVLNPNAAAIDVGSEQLPLSIAGDAPVVFGTFTDEVYRLRDYLKAQGVTSVAMEATGVYWLYAYAVLEAAGLEVVVVNGRHVRNLPGRKTDMADCQWLATLHAHGLLRGGFVPPAAIRRLQDYQRLRADHIMGAGSQVQKMQQALERMNIKFHDVISDLDGVSGLKVVRAILAGEREPQALLRLCDPQIQKKKGDRVLRSLQGTWAPEHLFALGQGLAAWEFYQKLLGECDQQIEGVLRELAGPEPPAPDPGAPAETPGKKAGKNAPQIQQLHRLLLRLCGGRDVTAIAGIGDYLLLQLLAETGPDLKAWPSEKHFSAWLGLAPGSRQSGKRKGSVKVQRNRAGRLFCAGARSLVQSVDKALGGFYRRLAARKGGLVAMKALARKLAGLYYRVLRYGLAYAEQGLRVYEEKYAESQRRLLAKLAAKQGFKLVSLQLEAHPTGVSV

SEQ ID NO: 491134 - protein, 423 aa, unidentified
MMKLKYSICCGLDVHKNVIVATIVTTNKEGVSEYNQKSFSTINSDIQKFHDWLIGNNCYHVCMESTGKYWIPVFNYLEKDIDVCLTHPKYVKAIKGKKTDKKDSKWIADLYKFDLVRCSFIPPKDFRQLRELARYRFKLVCMKSSEKNRIRNCMTVSNIGIASVLKDPFCKTATEIMSYLLEHTSDTIDEKAVRRLIKKGTKATSNEIIEAIKGYNIETDQAKKLELARNHLNYLEDMITQTEVELYVRIKPYYEFVEFVSTMPGMTQLSTTIVLAETGVDMEIFDDAGHLCSWCGLSPANNESAGKKKSVRIAKAGDYLKPVMVQCALSAVRSRKQPYFAVKYNAIKKRRGHKKAMIAIARMMMVCIYHMISEKKPFAPTDYEELIDSREQKKRVVLNEENALAFLAAQGYDISQLVKCNDN

SEQ ID NO: 491135 - protein, 403 aa, unidentified
MPTTTRLTATPHTPEFTATDGAMLYLALELSQRGWTLAFTTERGQVARIRKIAAGALEALDAEIARARQRFGLPPTAPVVSCYEAGRDAFWVHRALLARGIVNVVVDAASIEVNRRQRRAKTDRLDARKLVAMLVRWHDGERGVWHVIHVPSEADEDRRHLERERQTLVAEQTRLVNRLQELLATQGVTLALAGDVRAQLGTVRRWDGTTLPAGLRTRLEREWARIEAVRTALRALGSERHRRMTTAAPAPADAPVMAKARRLVQLRAIGETLAWVLATELFGWRAFQNRRQVGGFVGLTPTPFQSGGGPREQGITRNGSRELRALVIELAWLWLRYQPQSALSQWYRRTYAGASPRLRRIGIVALARKLLVALWRYVDFGELPAGARLKDAADAGAADAVAA

SEQ ID NO: 491136 - protein, 320 aa, unidentified
MASRESLFIGIDVSKQTLDVAFGADPHAPRETIPSTDEGVQLLVTRLQRLQPTLIVLEATGGLERMVFAQLLQAGLPTARVQPRRVRALAHAEGRQAKTDRLDARLLARFAERVRPPHHQATDEQRASLRDLLVRREQVIQMRTAEINRLTAAAPNLRPGIQQHIDWLDQEIRALEQERDNEAERTDEVRRKRELRESVPGIGAITALNLLLRLPELGTINRKEAAAVVGVAPYANQSGAQHKPRHISGGRRDGRSVLYMATLAATRRRLVRRAFDQRLCQAGKPRKVAIVAAMRKLLTILGAILRQQKPWDPAVHTSAP

SEQ ID NO: 491137 - protein, 436 aa, unidentified
MGNRLVRDGRRWRRCSNSPRTTSRSSRGVAALDIGKAEVMCCIRVPRDAPAGRRRQEVQAYSTMTRSLLVMADRLRELGVTRVVMEATSDYWKPVFYLLEAHGFDPWLVNAKDVKHLPGRPKTDKLDAVWLCKIAERQMIRPSFIPPPPIRQLRDLTRYRVDLVSARTAEKNRAEKLLEDAQIKLSVVATNIFGVSGRDMMAALIAGERDPRVLAQMARVRLRAKMSQLEEAFHGHFTDHHAFLLAKMLARVDAISADIAEIDERIEAQLRPFADAVTRLQQIPGIGPVAAAVIIAEIGTDMGRFPTAGHLASWARFTPTVKQSAGHNKGNGSTGRGNPYLARILGEAVVAAGRTRTFLGERYRRLARRRGKQKAIVAVGRSMLIITWHLLSSPSTQLADLGPSFYDSRIQPDRKKREHIHQLEALGYKVNLEPAA

SEQ ID NO: 491138 - protein, 358 aa, unidentified
MRLLKSQTREPSVNQIIRIGMDTSKHIFQLHGVDAAEQAVLRKRLRRKEVLAFFAKLPPTVIGMEACGAAHYWGRELRKLGHEVKLMAPQHVKAYVKRNKNDGRDAEGTCEAMGRPTMQFVPVKTEEQQAALMLAGVRQQLIARRTQLSNAIRGYAAEFGVTAAKGLDKIEPLLARIAQDESLPALARELFAIEGREYAQVQAELKAIEAKLMAWHRANAASRRLAQIPGVGPIGATALVMKTPDPRAFSSGRHFAAWLGLTPKDHSTAGKTRLGKITRAGDEVLRSLLVAGATAVIQQVRRGRGHPSPWLVALLKRKPPKLAAVALANKIARIAWKLMTTGESYDGARMLGASALAA

SEQ ID NO: 491139 - protein, 386 aa, unidentified
MMLIGVDPHKSTHTATAVEPGTNSEVASIRIEATLGEYRRMLTWAARWPQRRWAIENAEGLGRHLASWLLARGEDVVDVPSTATARVRQLSRGGGRKNDRIDAAAAACVAATQGDYRAMVAEGTADALAVLDEHRVNLAQARVRAVNQLHALLRALLAGGAPTDLTAATASALLGSIRPKGEAERARKAVARDLIAEIRSLDARLKTSCKAIAEQVENSSSSLTQIVGIGPIIAGRIIARTGAPSRFPNSGSYANYVGAAPIEVASADHTRHRLSRTGDRQLNSALHTVAVTQIRMTGSRGNLCYLTKIAEGKTPREARRCLKRRLADHVWRTMTADEHRLAASPGGHPGATLQSSAAGTTPSTSSSDKSLPEPATAQSTRPRPAS

SEQ ID NO: 491140 - protein, 430 aa, unidentified
MNNNRNQRINQVTNSTLILGIDIAKRTHYACAVDDRGRELSKSFSVQQSNQGFQQFYIHLHQLLKKHQKKDLLIGFEPTGHYWMNLAAFLASKGIRYVIVNPLHVKRSKELDDNLQTKNDKKDARVIAKLITNGYFSHIRKLEGIEAELRQGSSIRGSVKKEIAKVKNQIIRWTDRYFPEFHTAFKELGKNACAVLKQTPLPVDLVGREVEELITFYRDKEHLAYPARPKIAKLIKAAEQSIGLKEGVEMARMEIVMLIQKYELYTNQLEIVNQELKEMVENLAEFHYLLSVPGIGEETVIDLLSEVGSLQNYQHPRQLIKLAGLTLRDNSSGEYIGRKSLSKRGRRKLRSLLYRAVLPLIRNNKVFHDLYQYYITRTNNPLKKKEALVILCSKLLKVFHGLSHHKVLFDGERMRQDLSVLQPKLIQGRA

SEQ ID NO: 491141 - protein, 310 aa, unidentified
MAAYVGIDVAKATLVLCLQPEGRTWTRPNTPAGQAQVVAELRAVQPERIALEATGGYERAIWQQLHAAGLVVVRLQPRRVKALARALGRQAKTDPLDAALLAEAARILVVPVAIVPDAATEALRALVDLRRQLVSQRDDNRRRLKQSPAAVAQQVLGRVNAGLQREIRQLDGEMRVQLAVTTSPDLATAPGAGPVLRATLAARLPELGHLDRRQIAALVGIAPYNADSGAHQGKRHIRGGRADLRRVLYMATLASIRARSVLATTYQQLLARGKLKKVAIVACMRKFLTMLNAMARDHTTWAPTTLSVPT

SEQ ID NO: 491142 - protein, 317 aa, unidentified
MAEVTFPQLIQRACGIDVHLKVVVATINGEGLKKETRSFGTFTSSLNELKEWLLSNGITHVAMESTGVYWKPVYKVLEGSIPNVWIVNARHIKNVPGHKTDKMDSEWICKLLLAGLLKPSYIPPKEQRQLRDLTRYRNKLIQQIASEKNRMMRILEDCNIKLSSVVSSTSGVTATALIDMLCEGKQLTLDDIKSVYHGRLAASPEELLEACTGYVEGHHVYLLQMIRKDIDNTQVLIDDLSDRIKTLLSKYDNVLELLKEIPGFNTKVVEDLVAEIGLDMSHFPTEKHLASWAGMAPGNNESAGKKKAQESLTETNK

SEQ ID NO: 491143 - protein, 324 aa, unidentified
MIDGILGIDVCKNTLDVSISSYAKVRTKSFTNSPDGWRHLLDWLIAQKIQRVHACLESTGRYSLGIACALYEADHVVSIINPAQIRDFVRTKLGRNKTDGVDASHIREYCELFKPSPWAPPSEAHRRLGELQTIRSGIIAGLTEWKNRKNSGIVDAEAQALADATISHFTSQLGAVDKAIALTIDNDCDLQSKRDLLLSISGVGETLAGVVLAELPGPDVLRSSAEVVAYAGLNPRRHQSGTCIDRATRISKIGNAVLRAALYMPALSAMRYNSAIVALVTRLKSRGRLKPKQIVVAAMRKLLVLCFGVLKTGRPFDAAIAMGG

SEQ ID NO: 491144 - protein, 339 aa, unidentified
MLKRKFTLGCDVGSSTIVCSVLETLEKMILEPKEFANNFAGFERCISWLKSSDLKAKDVLVCMEHTGVYSESFCYYLYDQKIKVVIESGAKIKKSFKLATHKTDKIDSIAIAEYAIRYADRLIAWEPRQSAVESVKSLLSSRELFVKHRTAQKNALSAYKRKVVQNKLIREEYEKSIQGLNQTIKNLENEIESILKQNEHWIAVIKIIKTVKGVDKLLPYNMFVISNAFSMKLDYKKLAAYLRICPYQHSSGTSIKKKAKSPKYGPKIMRKLLFLAAKDACQYDEYFRAYYARKDNEGKCYFVIMNNVGNKLLKIICAIINSGKPYIPNYRSVNPILVK

SEQ ID NO: 491145 - protein, 345 aa, unidentified
MQTMYYIGLDVHKRTISYCVKDGSGVIHAEGTIPATRLNLDLWMKTLPQPWTAAMEATVFTGWIYDHLQPHAAALKVAHPLMLRAIAAAKKKNDRIDAQKICDCLRCDFLPECYMASTAIRERRRTLRYRSLLVRQMVQMKNKIGMLLMEAGVSYNKQRLHKAGYFRELLATNPDIPEGLRSLLRLCREMVVRLQKTESALVCSLEQDSLLMDRVERLMTIPAVGPITALTWALEVGDAKRFSSIKKAISYCGLCGAEKSSGNTMQRTPLSKQRNKHLQTTLIEAAKMAPRNSPALAMLYDREKQKGNANRATLAVARKLVAYLMAVDRGQRNFQVVERSNSIAA

SEQ ID NO: 491146 - protein, 358 aa, unidentified
MAVIEGVCRIVGGVDTHKDLHVAAIVDEQDRIIGTRSFATTRQGYRQMLAWMRSFGELQRIGIESTGSYGAGLLRFMQQAKVTVLEVTTPDKQDRRRRGKNDDLDAQNAAHAAFAGQRTVTPRSRDGMIESLRVLKACRKTAVSARRIALQMIHNTIVCAPDGLRDQLRSLTRMQLVRTLASWRPDLTAYRDLDSAYRIGLKSLGRRYLELHDEIADLDAMIAAIVDELAPNLVARNSIGHTGAAQLLLTAGDNPERLRSEASFASLCGVSPVPASSGRTVRHRLNRGGDRAANSALHIIAIGRLRTDQRTKDYVARRLAEGHSKLDAIRALKRYLAREVFTLITQRRKEINATRIAA

SEQ ID NO: 491147 - protein, 343 aa, unidentified
MQTVTTIGLDIAKSVFQVHGVDAEGNVVIRRQLKRRYVLAFFQKLPPCLVGIEACASSHHWSRELQALGHTVRLMPPAYVKPYVKRHKNDATDAEAICEAVTRPNMRFVAIKTEEQQSCLTLHRTRHLFIRQQTSVINAIRAHLAEFGIVAPVGRNGVEQLLGVAADASDKRLPEVARVCVAALGAQLRMLKAQILQFDRMITAWHRSSEASRRLDDIPGIGPVLATALVASVADPKVFRSGRDFSAWIGLVPKQNSSAGKDRLGSISKRGDRYLRSLFTTGALAVIRYAKIHGTKHRPWLTALLARRPTKVAAIALANKIARMAWAIMAKGERYKEPAALAA

SEQ ID NO: 491148 - protein, 450 aa, unidentified
MRIFIGIDIGKEYNYASFLNNEGMEIDKRFKFKNNHLGFLSFKDNIDKLTYDCNFNYDDVLIGFESTGHYWINTDWFLTEKLNIKTVMVRNDAVRHTRALNSQGKGKNDSLDSRTIAECLKNGYYFDVQGRKEDYIVLRRLTRERTELEKEIARYKNRYRAWLDVNNQIFLENFSNVFSTGAFSLLKVYPSPLDIIQDSYLEIREKLKEVGYKRTNNTFKIYYEEAKTYKNIINGITYADRLEINEYIEALEMYMKKKESLDEKIEALMNFLEGKVYTSLSEVKGMPKAQVASLIAEIGNVNNFKSARHLISYAGLNVQGEGSGKNKGYSWISKTGNRKIRKELYVITFNLVRHNDYFRGLYCYYKSYKRVNEKSSKEMLIALMCKLLRVIYGMLKYNVEFDLNEMLKNYDFRNINKEKFIDEFLGNSEKKQKIIPQEIEDIFLNNRKSN

SEQ ID NO: 491149 - protein, 428 aa, unidentified
MNIEETIRREQFCQIRSEIRGSDQHLVVGIDVAKDKHHAFMGSATGKSLLRKLVFENNLQGFRKLQERSEAISIQNALSKVVFGMEPTGNYHKPLGAYLIGCGHHVVLVTGKAVKNNRELLDGRWDKNDIKDPANVADLICQGKCIYYDYPSASINQLRELLSLRRRLKKEEHSLRMRIRNNVLAQYFPELDRFYSACESESLAIVRWCLDPSTISCLEFDEFFSMVTTTRRGIAQKLRLQKIHRLAVESVGCPMGAAAEFEATLLVDKLNYVRRQLKEIAELMEDFCMEFSEYSWLLTIPGFGPYVAARVLASISNPWRFDNSNQLLKIAGYDLNAQRSGKKSNDAVPVISKRGNSELRYALYQAAHVASTRNPEFIRYFTRMLRGRERERGIKTKMKVKLAAKMLKIAWTLMKKNQGFDPDYLITE

SEQ ID NO: 491150 - protein, 346 aa, unidentified
MEVVIGVDPHKGTNDVAVLNDRGGLLEYAVFATDRAGLRSLVRWAKRFGERRWAVEGASGLGRPVAQHLVAAGETVVDVPAKLSSRIRLLSVGNERKNDQVDAICVAVAALRGERLTEVGEEEEQATVLRMLSERRKDLTKERTRALNRLHGLLRDLVPGGAPKNLSAHKAALLLRGVRPRVEPVLTRRRLAADLIGDVRRLDRGLSDLERCIREAIEQASTSLIGLFGVGPILAAKIIGEVGTIARFPTKAHFASYTGTAPIEASSADVVRHRLSRAGNRQLNHALHLIAICQIRHDTEGRTYYRRKLAEGKSEKEALRCLKRRISDAVFKKLYADLEGGISNVA

SEQ ID NO: 491151 - protein, 375 aa, unidentified
MAHSPEGLSQLDAYLARLAGLEGREQIACIVETTHGLLIAHLLEVGWPVYPVNPRTVERRRAPSGAKTDTIDAYLLAKTGRADFADLRRLNPDSEQIQEIKTLTRDQDTLVRAQTRLVNQLTACLKAYYPVALELFSKLQQPSTLKFLRAYPTLQAARSASVEDLTTLLKQARYPGAKLAAQQMAAQLQQPCLQANAVTTRTKSRLTVALLDQLEPLMKQIADYDEEIERLFLMHEDHELFQALPRAGTRLAPRMLAEMGDDRARYQSASSLQALAGTSPVLFQSGTYQKAHRRLGCIKPWRNALQQFAWQSTLQEAWAKEYYQRKRAEGKSHTVAVRALANVWARILYAVWKTKEPYQTTTFEQARQAHAPRVA

SEQ ID NO: 491152 - protein, 380 aa, unidentified
MGVGCDSNNQTLKGDQHNITNFIFAGCDLHEETLVNRIAIGQQPSERKTVGNSRAGREKLIAGLKRESDKHGGARIIFGYEASGQGFGLHDQMVEAGIECYVLAPTKMESSVKQKRNKNDDRDAGRILKRLRAHKLAGEELPSVWVPDLQTRDDRETVRARQDLGDKLSSVKVQLRSLLQRHGIEKPTGVGKPRTKSHQQWLEQLSGDSQLGVGVRTALGSLLRQVRHLEQEIQQLDEAVDQLSRKPHRQAVVDALDQETGIGRLTATAYAVEVADFTRFRRGRQIGAYWGMAPSSDESGEVNDRKGHITRQGSPRIRKLLCQATWYRVQKDPQVRAIYQRLVIRNPKKKKIAVVACMRRLAVRLWHIGRQAQLAMKEAK

SEQ ID NO: 491153 - protein, 363 aa, unidentified
MEQDQGTKLDFRGQQIYVGVDTGIKSWKVCIMTEQIEHKTFTQPPRVDVLANYLHRHFPGADYHCVYEAGYSGFWIHDDLRASGIDCIVVNPADVPTKGKEHTHKTNGVDARKLCRNLRSGELDAIYVPARRSLEDRSLIRTRYCFVKKQTRCKNQIKALLAFYGISLPEDIAESHWSRSYIGWLEQESIFKQPSGDQALKTLLEELVFVRQIIVRLTRQIRALAHQEPYSRSVHYLMTVHGISTLSAMTLLTELIDIHRFGTLDHLANYCGLVPGERSTGEEQTMTGISPRRNAMLRGLLMECAWVAVRKDPALLMAFNKLSTRMPKNKAIVRIARKLLNRIRFVLKHQQPYQPCIVQSLSS

SEQ ID NO: 491154 - protein, 412 aa, unidentified
MEGETVIAGVDTHKDVHVLCLLDGLGRKIWSGSFGADPEGYDRLAEAIGDPGSCMVVGVEGTASYGAGLTRRLVELGYNVVEVLRPKRDKARPGEGKSDPLDAERAARKAASGRGCSVPKSQDGWVEAVRQLYVARRLAVATSTSCVACAKSMLTTAPSALRERFRGRERPKDLMPLLARGRKAGDALEESVLASLRSVAAVWKEARSQVESLDERIRALLEANAPALLGVEGCGTTTAAALVVAAGDNPGRLKGEAAFSMMCGASPIPASSGKTDRHRLNRGGNRQANWALYEIAIKRMAYDERTRRYVARRTSEGKSRREAVRCLKRYIAREVYHVLMDPNPDGAAPEGPELAKMRKAMRVTQKKAAAELGLSAATLGHLERGKRRSTKLERRYYELLCELERTLPQTAS

SEQ ID NO: 491155 - protein, 346 aa, unidentified
MEHFAGLDVSVKETSVCIVDETGKIVREVRIASEPDALLEVLKSHAYRFKRIGLEAGPLSQWLFSALAEVGVPVVCVETRHMRAVLKAQINKTDRNDARGIAQMMRAGLYRPVHVKTLRSQKLRMLLTHRKLLQSKAIAIENDLRGTLRNFGLKVGMVGTVKFEARIGELVENVPDLAALVEPLLVVRRAIREQIAILHRQLLAIVRDDEVCRRLMTIPGVGPVVALTYRSTVDVPARFRNSKAVGAVFGLTPAQYQSGEIDRTGAISRCGDEMMRVMLYEAAHIMLVRSTKWSWLKAWAMQIARRRGMKKAIVALARRLAVIMHRIWVDGTEFRWTREQHAAAGA

SEQ ID NO: 491156 - protein, 333 aa, unidentified
MSKFKHFLGIDVSKEYFDVVLIMNGEKEKPIHNQFVNDSKGVKALNQWLKKQRATNLETLVCLEHTGMYGKLIIKYLMLFNYSLWVEMSLKIIRSMGLQRGKNDKIDAERIAIYAMKNLQDAVIYKAPSKTLEKIRSLMSLREKLILTKSTLMRNTKEIKSLDPELSKLSEKFQKKTLIGITSDLKEIEKQLDVLIKGDENLNKIYSLAISVPGVGKVTTLYLICFTNEFKAYSSPRQLACYAGVVPFEYTSGKSIRSKPRVHHMANKKLKKQLHMCALSAVNHDPEMKEYFKRKVAEGKNKMLVINNIRNKLVHRICACIRDNKTFEVRKAA

SEQ ID NO: 491157 - protein, 433 aa, unidentified
MKVLYERVAGIDVHKEMIKVAIRSPGDKPWTRKTEILEYRTFYGVLQQMARELRKRGVTHVVMEASGVYTEPVYYALCEQDFTGVAVINPAHAKALRGHKTDAKDCARLAELFECGLLRGSYIPAPELKEVRDLTRYRMKTVQARTSEIQRLGKALESAGIKLGSVASSITGASATAMIEALIDGERRGGVLADLAKGRMRAAGKLADLSMALTGRFTGHHALLCRLHQDSIAGFDAAVAGLDERIAGKVTRWQREQGLLTSVPGFGDVVSQAWLGEIGPAPHLHFATCEKLASWVTLCPGNNISARKRKHGRTGDAGTYIKPMLVQAAWSAIRVRGRLQARYNRLVRRFGGDKNPAAKKKAITAIAHTLLKIAYQVLKSGTPYQDPGADFYTRRESPEQKQAWLERQLQKLHPGCAITITIGPPEAALTPGA

SEQ ID NO: 491158 - protein, 331 aa, unidentified
MQFSHYIGVDISKSTLDAAIYASEMKKADTKHVTNDAAGLKELMSWAKTNGVKPKTMVVCAEHTGVYGNALQLFCEKKGISLCLESPLQIKRSMGLVRGKNDQIDAIRIAQYAYDHREKLELFHRPSVNITTLSNLLRERRLYVRQKATLTATQGELGQYETSQSRSRRDCLIDKLSSMTKAIEKQMIDIINKDEDLKRTYDLITSVVGIGPITAIDTIVYTNNFQNFSTPRQYASFIGVAPFDHTSGTSVNGRTRVSQFCRKQQKTSITMAARSAIVNDPWMKNYYRRKMKEKGEQRNQHGVVLNAVKFKLILRMFSVVKSGTPYKVMNY

SEQ ID NO: 491159 - protein, 360 aa, unidentified
MKFVGIDLHKKSISLCVRDASGRIVTRKRFSTGDTEKIVAFFKSLAAFRFCVEATAAYEWLVQLLEPMAKGWVLVHPGRMRLIAESTDKSDKVDAEVLSEFLWLGKLPRAYRPTPREREHRTLARYRAKCRQRVTKLRCRIRHVLANYNADRVDLFGPEGREHLASVAVTKADRFVLNELLAEHDEALARLAKAKMELRTFAESGDAAEQQAREIATSVPGIGETIAEVVLAELADVERFGSIASAGKYAGLAPGRRGSADKVIELGITKQGSRLLRWAMVQAAWQAVRHSARWHEVYERIKKRRGSKRAIVAVARKLLVVLTSLLKSGQMYRRNEAEEKEAARKARLRRAKPARRKATA

SEQ ID NO: 491160 - protein, 412 aa, unidentified
MEEVFTCCAGLDVHKESIEACVRRIEPNGRLHQETRHWGTMTGDLLAMAEWMTAQGVTQVAMESTGVFWKPIFNILENRFSVLLVNARHIKQVPGRKSDIRDCQWIAQLLQHGLLKGSFIPPRSQRDLRDLTRYRTQLANEKVRTANRIHKVLEDTNIKLSSVATDILGISGRAMLEALIRGEEDPVKLADLAQRRLRGKIPQLERALQGHLTEHHRFMLQLLWKQLAEQEKLIDELDDKIKKQARPLAAELDRLDAIPGVDRRVAEVVLAEVGANMQPFPSHENLASWAGMSPGNEESAGKRQRRRITPGNRWLKRTLAQAAWAASHVKNSYLASQYRRLASRRGKKRALIAVGHSMLVIVYHMLKAGTTYADLRGDFFDHLEPKRLTHYYITRLERLGYKVTLESYAPAA

SEQ ID NO: 491161 - protein, 348 aa, unidentified
MNLKRIGLDTSKAVFTLHGVGEDERAVLRRDMRRAEMEAFFAKLPPTHVALEACGGSHHWGRRLAAMGHTVQLIPPQYVKPFVRRGKNDRNDAEAISEAAARPDMPSVPVRSAEQQAEAIVLSARELLVRQRTQLVNAVRGHAAEFGIVAAKTISQLPGLLETVAAAETVPATAKEMLAFLGAQVAQLDSQIADLDRRMKQQHKANPVSQLLAEVPGIGPIGALSLALTIDPGRFQSGRHLAAWLGLVPKQHSTGGRQCLGGISRAGNERLRQLLVLGAMAVIRFAKPGSKSASTWLLALLERKPRKVAAVALANKMARIVWAMMATGEAYRGSKKVATPAAGAAAAA

SEQ ID NO: 491162 - protein, 352 aa, unidentified
MNAMTVAVDVAKDVFEIAIAHRSGRVDERKRLTRRQFAQYVDALPAGTSVVMEACGTAHYWGRRCMARDLTVRLLPPQYVRPYVRRNKTDRSDAEGLLEANRCGGIHPVAVKTIEQQTLQALHRVRAQWQATRTARLNAMRGMLREYGVPLATGARTALKRIPLVLADSALGLPNEVTAIIMMLLEDVRSLEARVAAIDQQLACIARQHPIAQRLQQVPGVGLITATAFVGAVGHIHEFRRGREFASWLGLTPRESSTGHRRRLGRISKRGDVYLRCLLTHGSRAMLLGAQRAVRTTPDRATKFQHWAVELMTRRGHNKAAIAIANKLARVIWAVWHRDVNFDAHAPCRAVA

SEQ ID NO: 491163 - protein, 346 aa, unidentified
MSYSTTVGVDLAKNVIQISVVSGRGKELCNRSLTRKKFAEFLCKQKPSLVAFESCATSHYWARAAKRHGHEARIIPAKAVAPFRQGHKTDSNDALAVAEAARRPKIKEAPMKTVEQQGLQAIHRSRELLIQECTALSNHLRGLLMEFGIVIPKGFASLMKAVPEILEDGENELPDLYRPTLHRMYTRLLELREDIEAMTKEVARLARAHPICSKLMALEGIGPIGALLLYATMGSGAAFSSGREFAAYLGLAPKQYSSGGKTNIVGLSKKIGNSRLRSVLILGARAYTYKLKEPKSLKDKWLKANIERNGECRAAIALANKNVRTAWAMVTQGTEYQRRVQLEMAA

SEQ ID NO: 491164 - protein, 382 aa, unidentified
MQASTVDTPTAGHCGTIFVAIELSQKTWLVTLHSPDRDRISRRTLEGGDDAGLLALLEGVQTRVAGKLGTAPKVVTCYEAGYDGFWLHRLLTAAGITNLVFDPASIAVEQRSRRAKTDRIDGELLLRTLMAHLRGEPRVVRIVRVPSVEQEDVRRASRERDRLVKEQTGHTNRIKALLRLMGMAVSNPRRSDWLSWLAQQRDRQSRPVPPHLMFEVAREHARLMLVREQLAALEQAPTAAVAAAPAPMAERRNLLLRLKGLGAVFAATLTNEVFYKDFHNRREVASYCGLTPSPWRSGGIDREQGISKAGNPRARLKAVELAWLWLRHQPDSALSRWFAARTANAGKRARRIAIIALARKLIVALWRYLTTGLVPEQAVMKA

SEQ ID NO: 491165 - protein, 445 aa, unidentified
MSEPMPLAKSEPEWAAFAAIDWADQKHFWRLVPAGSSQQEQGELENTPEAVEAWAAALQQRFGGRPIAVCLEQVRGALVYMLSKYAHLVLFPVHPTMAARYRETFCTSGAKDDPGDTASLLDLLMRHRERLRPLQPDTVETRLMQFLVEERRRTVNEKTRQSNRLTDCLKLYFPQVLRWFDGVDTALVGDLLERWPSLEELRRAHPGTLRKFFHEHNCRSEERNQERIDAIYQAVPASHDAAVLEAGALTARGLVALLRTLRDHIDKLDRRIAELVATHPEGALFASLPGAGSVLVPRLIVAFGTRRERYESAYEMQCYSGIAPVKEASGKTSWVHFRRACPKFLRQTFHEFALHSIGQSEWAKAYYQHLREDKNKSHQAAVRSLAYKWIRIIFRCWKDGKPYDEEVYLNSLRRRGSQLGAALAPATGLGWQTVAGFQKLSENKA

SEQ ID NO: 491166 - protein, 415 aa, unidentified
MGDRQQWYAGVDWGSQSHHVVLTDGDGRKIGERSFKHGGEGLAEMAAWLMAASGAAEPGQILAAIEVPHGPVVETLIERGFKVHAINPKQMDRFRDRFTMAGAKDDSRDAEVMASALRTDPRCFRPLAAADPIIVELREWSRIAEDLGVERNRLVNRLREQLWRYFPALLELEDDLGAEWLLELWEAAPTPDTASRLREATIAKLLKRHRIRRFDAAFVVNTLRRPPVRVAAGTVEAASAHVALLVPRIRLLNRQIKDAHRRIDGLTARLTPAEEAEPGQKKQHDAEILASLPGVGRTVLATLLAEASDALQRRDYAALRSLAGVAPVTKRSGKSCVVVRRQACHDRLANAVYHWARVAVQHDPRSRAKYAELRSRGHSHGRALRSVADRLLNVACAMLKSGAAFNPSSAAQKSA

SEQ ID NO: 491167 - protein, 415 aa, unidentified
MDEGKMKCAGIDWAKDENALCVIDEVGRVLSERRFAHEEDGLAELCGSLVEHGVGRVAIERPEGVLVERVLEAGVVVIPIHPNQLKAARPRFRASGYRAKSDSFDAFCLAELARADNHRFRALTPDSDQTKALRALTRSREDLVGRRVALANRLRVELEAFWPGAAIMFKEIDSAISLAFLKRYPSPKEASKLAEKRLLGFLQRNRYCGRKSASELLGRLRKKAPQGRAGEAEMEARREAVLALVAALETLVGRIKRLEGRIAQAVRAHPDGEVFLSLFLGSKSTLTAACLLAEIGDRRERYPTNEAMAADAGMSPVAIESGKRKVAGFRRACDKRLRKALATLAESTRHHNRWAKDIYRRARERGCDYAHAIRILGRAWVRVIFRMWQDGMPYDPARHGGFKRLRSAEGLPQGV

SEQ ID NO: 491168 - protein, 343 aa, unidentified
MDIHVLGIDLGKNSCSVVGLDPTGRVVLRRRMRRESIVGLAAKLPGCVVAMEACCGAHHLGRLLAAQGHEVRLMSPEYVRPYVKAQKNDDRDAEAIAEAATRPTMRFVALKTEAQLDVQILHRVRDRLVGQRTALMNQVRSILLERGIVVPQGRRKLLDALSVLSSESEGSGVGPRVRLLLDDMLDQWRGLDRRIAALDDEFAEMARNDPAARRLATIPGVGVLNATALVAAIGDGRTFNRGRDLSAWLGLVPRQATTGGKPKLLGITKRGSKYLRKLIIQGARAALPGLSRTATPLGSWLRGLLSRAHGNTVVVALASKLVRIAWALLRDETAFAAGGAAAA

SEQ ID NO: 491169 - protein, 355 aa, unidentified
MDNKKYIGMDVHKESISIAVRNAAGKIVMECVIETKASMILQFVDGLRGDLQVTFEEGTSAAWLYDLLKPHVTKLVVCDPRKNASMREGNQNDKIDARRLSELLRLDHLNPVYHGEHGLRSLKELVRSYLTITKDLGRVMSRVKAIYRSWAIPCTGKQVYAPRHRAEWLGKITEPGVRRRAEFYYQQLDALRVVRQQVRRDLLAESKKHKTWKLLCQIPSIGPIRSAVLLGILQTPHRFRTKRQLWTYSGFGIETHSSADHRKVNGQLERAKKQVSVRGLNRNCNHDLKNLFKGAAIVASNKPGPFQEFYTDLLTKGIRPEMARLTLARKIATIVLIVWKRGACFDAQHLKPQTA

SEQ ID NO: 491170 - protein, 429 aa, unidentified
MYYTQNEKLLQVGEEKIIVGIDVGSEKHYARAFDWRGMEYSKKAYVFTNDAEGFAGFFEWISVILNKSGKETVMPAMEPTGHYWFDLAKFLQDNGMQPVLVNPLHVKRSKELDDHLPSKNDRKDPKTIAKLVIEGRYAYPYMPEGIYAELRNATVLRFQAEAELTRIKNRIQRWFAIYFPEYKDVYGSFSAVSSMMILKKAALPCDIIALGEEKINEIWREAKLRAVGKKRAKTLVETAKRSIGHTEGLETARLEISLLLDDYDRLQDRLEKIMELIETQVSKVPYAKKLMQIKGIGIKTVSGFIAEVGDIGRFKDPKQIQKLAGQAIVANSSGKHKGQSRISKRGRKRLRLLLFEAVLSLTATNPEFKEIHRYYTGRKTNPLKKKQSLMVLSNKLIRVFYAILKSGADYDPEKLLRDIRRPEEQPTAA

SEQ ID NO: 491171 - protein, 418 aa, unidentified
MSMTNQLNIVCGADIHQRFLVATILCRDGRTWADRFLMNLNGLLDFKSWLVSYGCQKVAVESTGRFWIPVHMILEGTIEVIVANAYKIKHIPKKKTDLKDSEWLAELCLNDMIEPSRIFPKEDRELRNLTRTREAYVRDLSKEKNRIHNVLESCSIKLASVISDIFGKSGMHILKGLLSGTSIDEVLKGIPDKRIREKKSEELRDALMGKLEATDIFLIHQSLQIISQFEMRIEELDREIRSRIASRPMDIKILRSIPGIGMVSAYTILAEIGNYLDFKKPEQLAMWAGLVPSVYQSADKLITGGITKQGSKHLRWILVQVAHAIAHAKGGKLKKFFLKIRAKKGYLVAVVALARKVLCLIHHLLVNQEMYEEEGRLSKRDAPIPKNKNQGTLTIEDMIQCIAQAGYVVKRLNSGMHG

SEQ ID NO: 491172 - protein, 338 aa, unidentified
MKLYGGIDLHSNNSVIALLNKQAQVIYRQRLPNDLTLILTELKPYKRGIQGLVVESTYNWYWLVDGLMEAGYRVHLANTTAITQYSGLKYSNDESDASWLAKLLRLGLLPEGYIYPRAERSVRDLMRKRSQLVHQHTSNLQSIQNLLARNCGHSLSANKIRQLTYEAVDQLLPDNELSLAVKSNLAVMHTLDELIDRIEKTALRKVRLREEFKPLLTVSGIGNILGLTIMLETGDIGRFARVGNYASYCRCVGSEYLSNDKRKGRGNTKNGNKYLAWAYVEAANFAVRYNPQIKRYYQRKRARTNGIVAIKTVAHKLTRACYYILRDQVSFDVNKAFV

SEQ ID NO: 491173 - protein, 342 aa, unidentified
MNATTYAVDTAKNVMQLHWVQADTGEIGRKKLSRAKFVEFFAQRQPARVVMEACGGSHHWARSLGALGWKVELLPAGQVRAFVRGNKDDAADARAIWLAAQQGDIRRVPIKSCEQQAVLSLHRARAHWVCVRTATLNALRGLLYEFGVALPQGKNSALQALAQRRAELEVQLPAMMVRLVDEQLRALGDVQRHVEAFEAEIAQAERASPAAQRLRRIGGVGVLGSTALAATLGDGSGWHSARVFAASLGLAPSHSGTGGKVRLGHMSKRGDPYLRTLLINGARSIVKLAHPPEWVAQMLQRRPFNVVVVALAHKIARTAWALVAYARDFDPGWVSLAPERAA

SEQ ID NO: 491174 - protein, 318 aa, unidentified
MSETLFVGIDVSRDTLEVVSTGHSNTSQHANEPDAIEALAAELVAANPSLIVLEATGGYEFEAACALQAAGLAVAVVNPRQARDFARSMGALAKTDHLDARMLAEFARVLHQHPERDRFVKPLADAELQRLQALVLRRRQLVGMLTSERQRLRMAHASARPSIENTIEFLKAQVQDLERDCAAHIEAHHAQLASALRSVKGIGPATMATLIAELPELGRLGRRKIAALVGVAPLNRDSGQMRGQRSIWGGRADVRRALYMATLVAVRRNTVFQQFYQRLVIAGKPKKVALVAAMRKLLTVLNAIAKTGQHWNAALHHT

SEQ ID NO: 491175 - protein, 346 aa, unidentified
MHTDRDVILTVDYHLEHLEVRWLNCATGQEQRRNITTDRRSIERLVAAALAEATPAGGKVIWIMESTTGWARVKELIGSRVEFVLANVLQMPLPPKAYRRKSDKIDTGRIQREFLNGSLPQSYQPSSWWRQVRRLVDSRQDLIVRQTAIKNWIRHFLYHETWTQRQSLWTQEGLRWLKRLSLSESDRLVLNLKLKDLEGIGALLSAVEARMQQVYDQWPEAQRIDAIRGIGMVTAVSILAHIGAIERFRDAEALISYAGLAPGHRQSDGTSHSGRIGGGGTDNHMRYLIIETMQWVCQIPRYRPAFERAQAKHGTNVARIIVARQLLRSIYKMLRDQVPFNQMLVA

SEQ ID NO: 491176 - protein, 347 aa, unidentified
MLHAGLDLSRKKLDVCLLSDRGEHLDQLATPPDANALRTLARRIEETHREPVCAVIESMTGARLVHDTLEQEGWDVEIADAQKVKGLAPLACKTDKIDSQVLAVLSHRDLVPAIWLPDPRIREERELARFRLHLVKHKSALKNRVHSTLINFGKPCPVTDLFGVEGRALLARLQVPEPWRANITAALKLIDGLEEQIAEINTRLQEGHADHPYIPLLLSAPGIGWVLAFTIAAEIGEIERFASPEKLTGYTGLCPRVNQSGDKDRRGPLSKHGPTYLRWAMLEATMHALKHPPYSERYQRNKRRLGKQRGAKVAQVDIARRLTHAIWHMLSRNQEFAPRGAAFRLAA

SEQ ID NO: 491177 - protein, 487 aa, unidentified
MHTNESTPAQRDRRIRPAKSLPILQPHAAGIDLGNAEHYVCVPSDSVAPGQNPVRSFGVFNPQLDEMVEWLKRCGVKTVALESTGVMWIPVYQKLEAAGMEVVLVNTKGLKHVPGRKSDVLDCQWLQQLHSYGLLSGSFRPADLICKVRTLMRQRENLVQSMGRETQHMQKAMQEMGVHLHVVLSDVCGETGLRIIDAILDGQRDPRALVELRDWRVKRSTPAEMEAALVGNWREELLFVLGQSRRIYQFFQTEILRLDKEILALLQAVPPAPLPHLADQAPKAPDPVETGSPAPAKKGRKRMSASGHPLPVDIRGQLHQIMGVDLTLIPGLNDVGVLIILSEIGNDLRRWRDGGAFSAWLGLAPGSKISGGKVLSSKTPHVMNRVAVLLRLAALAVGRTESCLGLFYRRIKVKHGPAKAMTATARKLAELIYHLMTKREEFVVMDITKYEERVLKQKFIRLSREAKKIGFELVRMETPSPQTANPV

SEQ ID NO: 491178 - protein, 460 aa, unidentified
MNRKRSKSRIDRTLPMMHPNAAAIDVGATIHMAAVRADRAPQPVRSFGTFTTDLHRLVDWFTECGVETVVMESTSVYWIPIFELLDARRFTVFLVNARDAKHVPGRKTDVSDAQWLQRLHSYGLLRASFRPKGQIAELRAYVRQRERLLEYAASHIQHMQKALTEMNLQLHHVVADITGSTGLRIIRAILAGERDPEVLACLRHYSCHSSAETIAKALTGSYRTEHLFALEQALALYDAYHEKASACDVRIEAVLKELSIHRGRDVGSVPPASRRQHRTDQANALAFDVRAALFALLGKDITRIDGLGPYLSLKLIAECGDDLSSWPSAKHFTSWLGLAPSNKISGGKMLLSRTRRSGGRAAALLRLAAVTVGRTDTALGAFYRRLSSRIGKAKAVTATARKVAVLFYNAVRHGMEYVDPGASSYETRYRTRVVNNLHRRAKAFGFVLQPLEAKAHAVVS

SEQ ID NO: 491179 - protein, 413 aa, unidentified
MKKDFIEFDQVVERGAGMDVHKEIIVVTIRGKGIKTQTKSFKTFTSSLKKLREWLKKYGITHLAMESTGVYWKPVFNVLGDDFTIILVNARHVRNVPGHKTDKKDSKWLAKLLLSGLLKGSFIPEKEIRDLRDLVRTKTQLTGEISSAKNRFIKFMESANIKLSTVLTNVFCVSGQKIIAEILEGDYKPERLLYHVHGRVKAPRQDIIEALRGNLDDHYRFMMKTMLEHIANIEGVIAKIDEQIQQKTEKHKELLDLLETIPGVGRDGAVCIIAELGTDMDAFASHKHLASWAGMCPGNNESAGKNKSGRITYGNAFLRAFLVQMAWGAARTKNTYLSSKYKSLVGRRGKKRAVIAVGHKILIAAYFIIKNRVGYNELGEDYLSNFRKDKLVEYYKKQLEKLEPNVDFDSEAA

SEQ ID NO: 491180 - protein, 413 aa, unidentified
MEVKENMNRQYLGVDWADEAHQVWVSDHEGNKVAEMTVAQSPEGMSEFSRWLHERSAQGIELWAAIEKPEGRIVDFLLDHGVVVYPINPKAVDRTRDRFRVSGAKSDSFDAYVLSESLRTDHGRLKALRPNSEQAQELKMLTRDYQRLITQRTRVLNQLVATLKEYYPRPLDLFDDLSTNKALAFIKQCPTPEAATALSRKQWNRFAQAHRFSQDQTQELWKTLKAPQLPIPPHVVRAKAKLVAVLVEELEVMVKATSHYAAEVQRFFASTPAAKLVSGLPGAKTGTTLATLWAELGDAAGRWQSFRHLQAQAGSVPLTKESGKCRIVQFRFSCNKRLRHAVYWLAFTSLNQSEWAKAYYREQRSKGHTHHEALRALGAKWLKIIFVLWKDHKPYDENYHLANITRQRMRQAA

SEQ ID NO: 491181 - protein, 315 aa, unidentified
MTFLKTIPSCVVGIDVSKATLAVCEHGKQQVHVIANNCRSIRQFLSHQKPGLFVVLEPTGGYEALLVHELCAAGIACHRADTVKVKAFARSFGRLGKTDEMDARALAAYGSDRWQGLPVYELSDQHQSDLAALVARRQDLVSIQVAEKNRVQAPGCASVKHSCKIVLACIRRQLERLDQQIESLIQVSAGLSERMATYQSLPGVGPRTAIALMATMPELGTLTRRQAASLAGLAPHPNDSGTLRGYRKMRGGRPEVRKNLFMAALCASRLKGPLRDFYQRLIANGKKPIVAISALMRKIIVILNARMRDKISAMS

SEQ ID NO: 491182 - protein, 397 aa, unidentified
MFYVGIDIAKRSHEAVVLDEGGNVIQKAFSFSNSCTGFNTLLDYLRRITRTKPQFVFGMESTSHYWLPLFTRLKKEGYAVHVINPIQSHALRGLYIRKLKTDDRDSKIIADLIRFGRYSETQVPQEKRFALREMCRNRFYLVDSASDLKRKATALIDQVFPEYNTLFSGVFLVSSVELLLKYPTPDIIGRAHLDTITSLLLRSSGGHFGKGKAMEIKEATKNTFGVPDSCGAYAELIRVFLAQIRFIQKQVAALDEKIDAIMAELNTQITSIAGVGSVLGAAILSEIGDISRFKSSDKLAAFAGIDPSVRQSGDFSSTKNHMSKRGSPYLRRAIWMASTVAVKYDPIFKAYYDKKAAEGMKYMKIIGHCTKKMASVIFAVLRDDKAYTPVLNLPISA

SEQ ID NO: 491183 - protein, 401 aa, unidentified
MYSSFVGIDIGKWNHQAAFLEVSGKETARSLAFQNTSEGFQSLLDSLAPFDKGQTVIGLEATGHYWLALFSFLVDNGWTVKVINPMQSDALRKMNIRKAKTDRKDCVVIADVLRFGRYTETVLPDEDLLQLRELSRCRVAHVELLGDLKRRVLGILDRIFPEFASCFSTVFGAAPTELLQECTDPEELADYDVDKLIKLLEKESRGRHSREKAEELKAKASRSVGTRFGRDALKFELKMLLEQLDFIKGQVKEFDKFLKKLMKNHELIYTIPGISVTLGSAILGEIGDVKRFGTPQQLQAFAGMDPSVTQSGNFQGTQGKMSKRGSPYLRRAVYLAANAARRFDPVFKEFYDRMIARGKHPKQALAAVGTKLLRVIHAVMTSQKPYNPQKLLPPSARISPN

SEQ ID NO: 491184 - protein, 401 aa, unidentified
MEPAAATVWAGIDVGKTHHWVEVVDACGATLLSRRVRNDQVEIDAMLAAVVPLAETVLWAVDIVGSPSALLLALLADAGQQVRYASGRVVSVMSSAFTGEGKTDAKDAHVIAETARLRRDLPLIDQSTDLARNLAVLTAHRADMVADRVRGINRLRDLMTSVFPALEREFDYASCKGALVLVSGYATPDRLRRVGRARLAAWLRARHVRSYAQLADRAVTAAGAQHVVLPGQDISAGIVSELAASVLALDVRIKAVDTQIAATFELHPQAAVILSMPGFGPFLGASLLAAAGDLHAFPTAGHLAAAAGLVPVPNDSGRRSGNLHKPRRYSRPLRHVFYLSAQTATMRPGPNRDYYLKKREHGRTHTQAVIALARRRIDVLWALLRDNRTFTEQPPAAAIAA

SEQ ID NO: 491185 - protein, 404 aa, unidentified
MAPRAHNFSAPEAPTQKRITDPSNVEMDSSWMAVRHRCAKLSLCSSANTYQKESEMNATTVAVDLAKNVFELAVADAEWHIVQRHRLNRVRFSRFFVHRPPCRVVMEACGSAHHWARRLVAEGHAVRLLPAHYVKPYVGRSKTDRADAAALIEAARSSRIRAVPIKTLEQQQLQSLHRLRSQWMSTRQRYLSTLRGILREFGIMIPLGPSVAKVHVGLALAQADSDIPEGLRPALAEMLREIAPLEEKILSVERQLTSLTRADERAQQLREIPGVGLLTSTALLSTVGDIQRFPSGRHFACWLGLTPSERSSAERRRLGKISKQGDVYCRTLLVHGARSALLAAHRAQRAGKPLDRLRHWALNCERERGHNKATVALANRLARIVWATWKYQRAFDGNWGNQTA

SEQ ID NO: 491186 - protein, 379 aa, unidentified
MVDAEGKVLLSVKVANDEAAIVALLATAGSLARQLIWAVDIIGAPSAMLLALLARAGQSVRYASGRVVAAMSAAYAGEGKTDAKDAYVIAETARLRRDLSEVDTGTDLVRKLAVLTGHRADLIADRVRMINRLRDLMTSVFPSLERAFDYSSHKGALVLLTGYATPDRIRRIGHTRLTGWLRNRNVRGSADVAARATAAAKAQTVVLPGQDLTASIITELANGILALDDRLKALDAQIEATFAEHPQAAIIQSMPGFGPFLGASLLVGANDLRAFPSAGYLAAAAGLVPVPNDSGRRTGNLHRPLRYSRPLRHVFYLSAQTSMMRAGPNRGYYLKKRAQGATHSQAVISLARRRIDVLWALLRENRTWTATPPPLAQAA

SEQ ID NO: 491187 - protein, 366 aa, unidentified
MKTSVTYVGLDVHKDTVVVAMARGRQPAVLVGTIFNDWLTLAKVLDELGSQPRLRVCYEAGPTGYGLARRLNKSGICCMVVAPSLIPVQSGRRVKTDRRDARQLADLLRARLLTEVKIPAAETEAMRDLERARDDAKNAERTVRHQLDKFLLRHGRSWSRTKWTRLHWSWIRQQAFPAEASCRVVADSIRAVEEATARVERLEKDIEELVETWSLAPLVRALQALRGVRLITAVILAAEIGDFARFATPRQLMAYLGQVPSEDSSGQRRRQGRITRTGNGHARRILTEAAWNYRFYPRPSRAIRKRRESLPRQIVAIAEKAEQRLSHRYRHLVNKGKSSPKAVTAVARELAGFVWAIAREVRSQAA

SEQ ID NO: 491188 - protein, 421 aa, unidentified
MKELTKQQRMNMIFVGVDIHKDTHTAYIADCFGERLECITFDNNSKGFKRFTTSLNKHTKDGKTSVIALEDTTNFGKALCNFLLKDNKYHVKYVEPVLTKNERKSTPIAHKTDEYDSLCIVRILITRLNTLPDARMDDNYWTISQLVKRRDGVIKFNTALKNQLHAQLQYHYVRYNKFFGYMACKTALNFWKTYPCPTYLLNADVEDITSFIKKVSHNNVGRAKVEEIIKMVKEDGKIDIEYEEERIFLIKSIANQLLYNMEEIKNIDDNLRSFMKKLDYKLDTMPGLDLVSASSIVAEIGDINRFKNSKSLARYAGICPITMASGKTSTDFYNRYGNRKLYGVVYYMAIRAIAPCRKQATYKIIQAYYNKKIKDGKTKKQAVICICRRLINIIYHMMKNKTEYVHPVIETKEEDTLNIDN

SEQ ID NO: 491189 - protein, 341 aa, unidentified
MYWIGVDHHKRNTYVTCLDETGKGVFRGNLSAKAEDLKAFFAGHPRPFTVGVEATYAWEYVADVVEELGETICVGHPLLLKAFARRHKKNDKVDSALSAHLLWRGDFPAIVHPPKRARQQRDLYRQRMELVVRRTSAANRAKALADRLGFQVGMNLSTLKGIGEWAALPFPQESVHVAESHVKYLTFLYGAIKELEEAIAQVADQTPETQWLRSVPGIGNYLALLIASEVFDVGRFANARRFAAYAGVAPGSWASAEKVYASHLCPNANKYLRWAFTETVVHYIRACAWARAKYERLKRSKGWKTARLAIARHVAIVVYHLLKEQRPYQETPPGGPAKVDG

SEQ ID NO: 491190 - protein, 333 aa, unidentified
MVEGTEGSHHKEGSTKMSKHTMVCAGIDTGKRKLDVAVVEGSHQLQVANSPDGHTVLSAWLRQRRVKRVGIEATGGYEQVVVTTLRRDGFVVIVFQPAQVRAYAKFHLQRAKNDKIDAALIALCTADAPKIHAPPDPRLAPFAEHLTLIEQLTEDIAHVKTRRESCRDHRIRHHWNDEIARLKRLLRIELKALVAAIRQHNDLATRLDLIASVGGIGLKTAVAILVRMREIGRITREQAAALAGLAPYDDDSADHVGVRHIEGGRERLRKSLYTAALPAAFHWNPHLNVIYRRLIAAGKPHKVALVACARKLLIYANTVVERGTPWTERPAAI

SEQ ID NO: 491191 - protein, 482 aa, unidentified
MKKRNIYQNQSQELLSLFEQAANNAKVMCVPIDYAKKDHVVMFCNGYGDILRKPFSVKNSPAGVDFLTDQVIRSCRQRAISEKHVFFGGEEVGSFADNFVSTLRCQGWLVAGVNAHEAKTQRENLQASNDRLDLMGIAKTLLNRRANCSPAQSGIYLNMRTVVRHRRKLVDITTEVRNRIHAVVDRLFPGFLNESNSGISPFSKSSLWLMQERFSAPQIRRRRRSTLIEALRRLGTRKPECTADTLQQYATQVLKPPQEYVHMLQLSLAQHVKHFCCLQESIGQLEKEIAVNLAQTQGAFLTSVRGIGIVLAAGVSAEIGNPYEQKPLNNLVSYCGIIPRVKQTGGPQGETKTGKVAKRCNRILKDYAVQSASHLGLHGPADLMTDYKRRDASGQHADFGMTRRYLRMAMCLMRTSQIYLPSRLRKAQVQIEQRADYYLMNWPQLRDKWQKLGALETAFKADHPLGQWRKIVQQFYGIKLTL

SEQ ID NO: 491192 - protein, 367 aa, unidentified
MPTRKLQNLPDFRGQKFYVGIDVHKNSWSVSIDSIHLSLEYFSQPPSAKMLINHLHQRYPGGEYYSVYEAGFCGTGIHEELCKAGVHNIIVNPADVPMTDKQNKNKSDLHDSRSLAFHLEKGNLHGIYIMPREQQELRSLFRLRQSKARDLTRTTNRLKSFLSYCGIRFSQDFDGREYISAKVMTWLSQVEMASEAGKITLHKYMDDLAYHRGQLLKITKALRKQIQTKYHEPYECLLTVPGIGAITAIALLAEIGDFNRFDNHAQYCSFLGLVPWENSSGDRVHIKGMQPRCNKHLRPLIVEASWVAIKKEPYLLKYYRPHAIKNSKRAIIKVARKLALIAKSVVQNLQQYQSDHYLRTEKMKLMI

SEQ ID NO: 491193 - protein, 350 aa, unidentified
MNARSVSFAEKRIYIGLDVHRSFFVATCLCEGAVVKRCRMPARSEAVISLISKYFPESKVKTCYEAGYSGFWLHRDLESAGISNIVVHAASIEVAANDRVKTDKRDSLKMATQLEAGRLKGIRVPSVEEEYRRLLTRTREQLMRARKRIQVQIRMRLHQFGLFPEEIKGVMRLKDVEKILTTLEGELKLAIELLYGQWVYIAGDIQQIDKKLSEQAQADSLEEIYRSVPGIGPLTARVLSNELGDMSQFLNVRALYSFTGLTPSEYSSGDKVHRGHISRAGSSRLRHMMVEAAWKAVRADEPLHDFYWQLAKRAGKKRAIVAVARKLIGRVRAAIRDKGRYEIRTHKKAA

SEQ ID NO: 491194 - protein, 389 aa, unidentified
MHYVGIDIAKRKHVVFTLDGEGEPVGKTLRVTNDREGFDALLAHLSSLQTPVTVGLEATGHYWLALYSVLTEAEYEVIVLNPLQVQAYRKSGIRKRKNDRYDALWIADYIRISRRLQASPEVQPDLVQLRELTRFRASLSQQIGDCKRRIIGILDRVFPEYETLFSNVFIQTSRQLLAEALTPEEFADFDLSELSQLLQQTSRGRHGRAKAEEIQALAERSVGVGFLGDALRVQLTCLLQQLALLEQQLKELDVQIEALMDRLPQYITTIPGVGPVTGATILAEIGDVQRFPAPEKLVAFAGVDPVVYQTGQFEARNTRMSKRGSPYLRHALWQAAFAASRFDPQLRDYYQRKRAEGKAHGTVLGAVCRKLLHRVYIILKEERPYVIRD

SEQ ID NO: 491195 - protein, 348 aa, unidentified
MTLVGCDLHARDQQVAVLDTATGEIQERHLVHDGDSVEQFYTSLPGPVTVGIESTGYALWFHALLHRLGHEVIVGDAAKIRAMVVRKTKTDRRDAAHLLDLLRHDRFPTVWLPDPAVRDQRTLVAHRMRLVRMRTMVKNGVHAIALNYRLALGPSLFTRAGVAQLQALSLPPHTSCRRSESLELLRWLDTHIKGLDDQIEEAAHAHPEAQRLMTHPGVGPLSALATVLVLGSVIRFPTSKHVVSYVGLAPAIESSAGKHRLGRITKQGNALLRYVLGQAGQAAIKRDPDLRRLYYAVLHRRGRSRAKIAVARKLLVRLYVMLRDQIDYQTFLDRAPAAARRKEMTPTS

SEQ ID NO: 491196 - protein, 347 aa, unidentified
MATYYIGADVHCNNTELAVEKGGKIVARYSVPTTIPGISTVLSSLEGKKIFAMEEGPMAGWLYRNLQQEVETFVVSEPRRNKLITCEGDKDDMIDSGKLALLLRGGFLKPVHHTSDNHRAHFKHWINLYHDRVRDAVRQINKIRACCRMHGISIPRKYLRSNVHRHEWLTGLDNRVLKAQLQMLLIGYDATKQQAVLAKKQFSSYARKYPIIRYWCKLPGVGLIRAATIFAYIDTPWRFKNRAKLHKYCGVGLVRASSGKDKKGRPKPPRLKLPWAVNRRIKNAVIGAATSAIGHGDNVFKRYYERMLSHGMTPANAKHSVARKMVSTMSAMWKKDSKFDEKLSVSI

SEQ ID NO: 491197 - protein, 355 aa, unidentified
MMNDKQVKVYGGIDTHADTHHLAVIDQAGRRLADAQIPTTATGYQAALRFLGSWPGLVSVGIECTGSYGAAVTRAVREAGITVFEVNRPNRFDRRLHGKSDPFDAYSAAEAVLGGRASAAPKGGDGLVESLRVLRTSRSSALQARTATINQIKGMLITAPEDLRTRYKGLSTPKLIAALAASRPTPTPVTAAEATAYSLRLLARRWQALTGQIEDLAGHLQRLLDDHAPDLMRVFGCGQDTIAQLLITAGDNPDRLRSEAAFAALAGVCPIPASSGKTKRHRLNRAGDRQANSALYHIVMVRLRYNQETRDYVARRTAEGKTKMEIIRCLKRYLVRQLYPLIVETLHPRKEVAAA

SEQ ID NO: 491198 - protein, 361 aa, unidentified
MKNPAQHLIAEVPRRQAKVEITIGIDLGDVWSHYCTLNQDGEVVDRGRFRTTPKAIEKWFTDVPSARVAMEAGTHSIWISAQLQELGHEVIVANVRELRAISHSDRKSDQVDAEKLARYARLDPNILRPIAHRTVAQQEALTLIRARALLVRLRTAAVNAVRGLTKSCGYRMPASATTCFAQRCLAVMPPGLAQALGPVLQQIAEITVKIKQYDRQIQQLGQTEYPETQALLKVHGVGHLTALTFVLTLGSKERFGRSRDVGCYLGLRPRRSQSGDHDPQLGITHAGNAYLRSLLIECSNHILRPHGRDSALRQWGLHLAGRGGKQAKSKAVVAVARKLAVLLHHLWSTQATYMPFYEQAA

SEQ ID NO: 491199 - protein, 551 aa, unidentified
MRFAVEGVGDEAGPLPDLDPVWKIVCSSPQADPRSGVSTVTITRAMKHSASSFAGKRQARNLNQLARQTKPKGSTPSGAAKPLDELTPVHRRAAGIDVGSAENYVAIPASGLAQGEESVRVFGVFSAEQDALVEWLHKHQITTVAMEATGYYWWTLHDKLEQRGIEVYVVDPHSVRTVPGRKSDWLDCQWLQKLHTYGLLSKAFRPDLPIRRLRTLTRQRTELVINGAAHQQHMGKALVAMNLQLGLVVSDLIGETGLRIIEAILAGQRDPEELVKLRDPRCKKSTIEEMKAALRGTYNDEDLFVLEQSLAGWRFYQQQMVACDQRIAKALAAIPQAPPATKASPAKPLTPAANPRPKAKRIDVGNNSPTINFTEALVRICGMNLMKVCGLNLLSVLMLIGEIGTDMSRWRSSRAFCSWLGLCPGAKISGGKVLSRRTRNVKNRASTILRLAAWAVSRTDTWIGSFYRRIQRRRGTAKAVTATARKLACVIYHLLKYREEFLLFDTVAYGTSLELQRLTRLRTQAREMGYELKERQELHKLVKDELAIIPG

SEQ ID NO: 491200 - protein, 315 aa, unidentified
MAMPVATTQSIVGVDVAKDELVIYHVESDRLETISNTKTAIKKWLKTVAKPVAIAIEATNIYHQEFAELAHADGCRIYMVGGYELSHYRKGVNVRAKTDALDARLLARYLTNEGDHLRPWTPPSPLYCRLISLFRRRAALVQARVSLKQSWENESLLKTAFKNQISAMQRLETLLEKTILTQIEEAGLGAQLKRCMKVEGIGTLTGARLLASFQRGDFRNADAFIAFLGMDLRIADSGKKKGRRCLTKRGDPEARRLLHNAAMAASRTSAWKGFYEAMRGRGLSTTQALVALARKLARVVFALLKNQSEYSPKGV

SEQ ID NO: 491201 - protein, 291 aa, unidentified
MPNTERGFAQLVDMFTAHHVQRVGIEGSGSFGRAVAVHLALCWQSGQPVAVVEVPTLMTSRERHGQLGKGKTDPVDALAIARITTREQQLPPVRLTVGAAADLRALLDYREDLVRERGALVNRAHAELGGLRPGYQQQIPIMTTRARVRAAVDLLGDDSSIRATLCRRRLERVLAIDAETAELKQQITRLVAAADTTLTDLYGVGPLVAARFLAEVVDIRRYPNRNAFAAANGTAPLPASSGRTVRHRFNPGGNRQLNRSLYTIALTQIRGDTEGRAYYERKRAAGSPTST

SEQ ID NO: 491202 - protein, 349 aa, unidentified
METAYDGRQVVGMDLHRRRSVLVRMTEDGRRLGMTRIVNSPAELCKAIAAAGRNPRVVLEATYGWYWAADVLQAAGAEVHLAHPLGVKAFSYRRVKNDERDAADLADLLRMGRLPEAWIAPAEIRELRELTRYRLKLVQRRSGCKDQVHAVLAKLGIPVTCSDLFGVWGSTWLDGLALPQPYKGKVASLRTLIAGLGTEITLLDAVIADLLAHHDGYHALQALPGIGPVLAAVIVAEIGDIHRFASPARLCCWAGLTPRHRESDTKIARGHITKQGSPVLRWAVVEAIQRQPAASPIRGVKDRIIARRGKEARNIAKTAAARHLLTAVFYAMRDGHARCLARPPATQAA

SEQ ID NO: 491203 - protein, 424 aa, unidentified
MKVTFQTCCGVDVHKSFLVATIIKTSSGIEPSYQKRRFSTFNNSILEFKKWLLENECLYVCMESTGKYWIPVFNLLEDEINVTIANPKWVKSVKGNKDDTKDSKWIGDLFRLGLVRGSYIPCKKIRILREFTRYRYKLVSCRSSEKNRYQNALTVCNVALDSVVSDIFGKSSTSIIDYLLEQSGTSIDHEVIASKLLKRLKAKEDAVIESIEGYQMTDSQKYRMHLVRAHMDYVTAATNDVDSEIESLIAFDPDYENAVELLCTIPGVKYDSAITIISEIGIDMSQFCSSKRLCCWAGLTPGSNESAGKKKSVRITRAGVYLKPALVQCAHAAVKSDKSPYYKKKYESLVKRRGKKRAIIAIARMILTAIFQMLTTGETWNPCDLYKIDMPEALLEKQKQKAIKQAQKLLIREGLLPPTEPIAS

SEQ ID NO: 491204 - protein, 430 aa, unidentified
MHNKNYISVGIDVGSAFSFMTILAPDETVILKPFKITHNNKDSLERAVSEIKKAEELYSLESRTFLESTGIYHFPLFCYLVDCGFNASIINPIITHSTKNGNIRKVKNDKIDSKGIAKLGLSKDIPVSQFPAKLVLELRSLTRKYYDLTDERSAHINKLKGDLHTVFPQYLDVFCDVTGKTSTMILRQYGTPDKILRGHKKTMIEKISKASRKGLAKASERYEKLCAAANAAKTFGCQIDSIYFNIFLTLDLVEKLDSALDSILNRIRQLITFNKNEKFIQQIKLLNTIPGVGFLTAVTIMCEIGDFSAFRNPKQLFAYFGLDPEVNESGKFVGTQLHMSKRGSRIARRAIFAVALASIRTKRNGEGINPYLRKYYELKSGQKPKMVAIGAVMHKICNIVFAVLRDEKAFELRSPEEHCKQYQRPALAAA

SEQ ID NO: 491205 - protein, 345 aa, unidentified
MKKSITIGMDLGDKKHQVCILDKAGKIITVEGIDNNRATVTKFFKRYRGAVVAMETGTHSRWVSQIAETEGLEALVGNARKLRLIWESRQKSDPRDAVMLARIARFDRELLCPIRHRGEQVQMDLEIIRARDLLVGTRTGMINHVRGVVKSMGERLAASSTASFGHKAKIPEALNEALQPMLETIRELTKKIHAYNLMIKKAADNQYPETKQLRQVGGVGPLTALAYVLTLEEPARFAKSRMVGAYLGLVPRLDQSGQIDKQLRITKHGDGYLRRLLVGSAHYILGPFGPDCDLRTFGLKLMQRGGKNAKKRAVVAVARKLAVLLHALWRSGQQYEPKRRQQAAA

SEQ ID NO: 491206 - protein, 425 aa, unidentified
MTRISAGVDVSKNRSTVCIIDQDGKVIMRPFLVWHSTEELDFLADTLKRLNGEVRVIMESTSIYQYPIALHLKEKGIFISIVNAYKVKKFANTDFRGGKTDKKDSRTIASYGISYWYKLVEWQIPKDTYFNLDLLNRTYMNAKKHRQIILQELQHYIDCAMPGMDKELHSLNLNTKKDFMLDFVEKFWHRDEIVNMTEAEFTEVFTAWAKKKGYRPVEGKAAKIYAIAKSCIPYYPANPTVKTILQCIVDKLSGVNRTLVTIVTQMIEEAKKLPEYQIVREMPGVGDPLAARFFGSAGDIRRFKNSKALVAYAGIDSPPDESGDFSSTHRHITKKGSKVFRDTGYEIMMALRAQKRTWEKVRKNPEVYDYMLKKEAEGKPRKVAKIAALNKFLRIVYARIKELCDNMALAERAKTKTRAKTKVTA

SEQ ID NO: 491207 - protein, 331 aa, unidentified
MSYFIGIDVSKEKLDCASLRNKEQKKARIMECYNNALGFKLLVEWSENTTSLSIKELSFLIEPTSIYHERLVAYLYALDATVFMANTGRVRKFAEGIGVLSKNDIIDANVLARYGLMATKLIAWKPVPKEIAELQSLINRLSTLEKELQREKNRQEKMNECNDAHPIEKRSITKSIKRLEKEIKSFQIHIRNHVNETESIKKDFDLMVSIPGVGEKTAWIVLLILRSRNFQSASEVASYVGLNPIEKRSGKSEYRKPRLSKAGNSDWRKALYFPAMVAVRKNPDVQALYDRLLAAGKTKMCALGAAMRKLIHICFGVLKHQQPYQVQLQST

SEQ ID NO: 491208 - protein, 347 aa, unidentified
MEYFAGLDVSLEETAICIIDDNGQIVREARIASEPEALVGFFRASGMAMKRVGLEACSLTAWLHQALIEAGIAAICIETRQAKAAMGAMPNKTDRNDARGIAQIMRTGWFRAVHVKDPCCRSWRALLTARRMVLNKRRDLENGIRALLREAGLKVGTPSRRNFAARVIELVADDPVLAALTRSLLSVIAVITEEIDRLTKRVLDEVRIEPTCRRLMTVQGVGPFTALAFRATIDRPDRFRKSRDVGAHLGLTPRRYQSGETDVQGRISRCGDELARTALYEAAHSLLIRSTKWSALRAWGMNVAKRRGMARARVAVARKLAVILHRIWADGTEFRWTKQAAASVPAA

SEQ ID NO: 491209 - protein, 348 aa, unidentified
MFLIGCDFHPSSQQVCWLDRTTGETEEKKLIHAPGEAERFYRQFPAPTLIGMESTGNCQWFVEMVTALGHEVWIGDAAKIRASDSRQQKHDRRDAQLLLRLLAEGRFPRIWTPSSGQKDLRQLLIHRYKMVRLRAQAKNGLQHLAMNQGLQKKRHLWSKKGQKLLRELPLRPWASRRREDLLSVMKMLDQQIESLDLAVIEAAEKDPNARLLMTQPGVGPITSLAFVLTMGDVSRFQRGKQVASYLGLVPREYSSGGHQRLGSISKQGNRFLRMLLVEAAQVAVRCDPQMRQEYLHRCHEKPKGVAKVAAARKLAIRLYWMLRTQKQYPEIVSIESSSRVPLVVRHGG

SEQ ID NO: 491210 - protein, 345 aa, unidentified
MAIVEVTCPVTGGVDTHLDTHVAAVLDGTGGVLGVESFPTTPAGFTELHDWMIRFGDIERVGVEGTGAYGAGLARFLRGCGLEVIEVDRPNRQARRQAGKSDPADAVEAARAVLSGRATGIAKTGDGAVEAMRALLIAKRSGREARISCLNQLRHLGFCGPDDLREAFRGVPRTALGARAAALRPRVGGDDVAHATKIALRTLGRRVLALDADNDELDALLAGLVHTTAPDLLGVYGVGVDTAAILLVAAGDNADRIRSEAAWAHLCGVAPLPASSGKITRHRLNRGGNRQANHALWRIVFTRLRSEPRTRDYLERRLAAGLSKREIIRILKRYVAREVYRHLPR

SEQ ID NO: 491211 - protein, 340 aa, unidentified
MINNFLGIDVSKDRFDVFLSFISKKGKRETRKRSFKNDDHGFQGLLSFLQKHNVEQVKACMEATGCYSEALAEFLHNTGHFVSVVNPYCIKSYARSKLTRQKNDQTDAEIIADCCQRQEPTRWTPPSPELKKLKHLYRCSVALKDELILVNNHLEKKERLPKEVANAWEDLAMNIAQKIETIKNSVRELLKQHKELLENFQLLLTIPGIGEESAVAILAEVPDIEVFRNARQLAAYAGVIPRNITSGSSVYAKPRLSKSGSQPLRKALFFPAIVAKNHNPIIMSFCQRLKEKGKHNMAIVGSAMRKLLHMIFGILRSKKAFDPDHIKNYRARRLTEGLVL

SEQ ID NO: 491212 - protein, 388 aa, unidentified
MIPLQRQEITGSTTGPRRIFAAIELSKSTWVVALQLPTIDKVSLFRVAGGDIEGLFALLDRARFRVGEPVEVCTCYEASYDGFWIHRALGARGIENTVLDSASIQVSRRGRRVKTDRTDAESLIRVLTALYRGEHQVAKTVHVPSPEEEDDKRLLRGRDKLLRERIRHTNRIRGLLNLQGVHHINPNLGGWTEALKKLRTGDGRPFPRQLMREIRREAKLLAMIKRMLADVEAEIAGMIRDSRKRRHPAQRGQSHPIAIRLAAIRGIGAQAAGVLATEVFYRKFNNRREVASYLGLTPTPYNSGSVTRDQGISKAGNRRARTAAIELAWIWLRNQPDSALSRWFHARVGDANGRVRRIAIVALARKLVVALWRFLEDGLIPEDAVMKA

SEQ ID NO: 491213 - protein, 418 aa, unidentified
MANEEVIYERCAGIDVHKRMIIVCLRIGRKTQIREFGTLTHELREMTAWLKENGCQMAAMESTGSYWKPLYNIFEIEELPAMVVNAQHMKSVPGRKTDVKDAEWIAKLLSQGLLKPSFIPDREQRELRELTRFRKSQIEERARNLNRLQKMLEGANIKLASFVSDIDGKSATEFLELVIGKPDFTMEDVDSRRHGRLKASSEELFKSLEGIVTPIQRELFRHIMKVIREQTVQIEETDNLIKGYMTQAYRDATAALTTIPGIGQISAQQIIAEIGYDMSRFPSAAHLCNWAGICPGNNKSAGKQKSGKTNYANKTLKSTLVQCAQAVKRNKKSFFSAQYQRLVVRRGKNRATVAVAHSMLIAIYCVLQGEKFHDLGADYYTQFNREKKINSYIKQLEKLGVSIPDDVLQAATAEGPLK

SEQ ID NO: 491214 - protein, 356 aa, unidentified
MTSNAKYIGMDVHKESISIAVRNSAGKIVMECVIETKASMILQFIDGLRGDLQVTFEEGTSAAWLYDLLKPHVTKLVVCDPRKNKSMREGNQNDKIDARRLAELLRLNHLTPVYHGEHGLRTLKELVRSYLTVTKDLARVMTRVKAIYRSWAIPCTGKQVYARCHRAEWLGKITEPGVRRGAEFYYLQLDALRVLRQDARRDLLAESKKHKACKRLCAIPAIGPIRAAVLLGILQTPHRFRSKRPLWNYGGLAIEMHSSADHRCVDGHLQRAKKQVLVRGLNRNCNHDLKNLFKGAAAVASSKPGPFQEFYTALLAKGMRPEMARLTLARKIATIVLIVWKKGVCFDAQHLKPQTA

SEQ ID NO: 491215 - protein, 315 aa, unidentified
MAEVIYAGVDVSKETLDVALHPSGEYWQEKNDEAGRTRLIARLENVSPELVVLEATGGFERSAAIALTVAALPVVVINPRQVREFARATGELSKTDRIDARILALFGERIRPEVRAMPDEAALELEAFIVRRRQLINMQTAEKNRLSRVQSPVLKKSIETHIRWLDKELKGVDDEIDKRIKENPLWRAKEQLLISVPGVGPVTSRTLIAELPELGTLGRREIAKLVGVAPLARDSGRMHGRRSVWGGRAQVRTALYMAAISASRSNPEIRRFYLRLREAGKPAKVALVACMRKLLTILNAMLRSGQRWNPQPMVS

SEQ ID NO: 491216 - protein, 414 aa, unidentified
MEVVYRCCAGVDVHKKSLTVNVLRRGIEGKEDLDEVRSFGTMSKDLFGLAAWLKDIGCTHMAMESTGVYWKPIYNIMSAEGFDVMLVNAAHIKTVPGRKTDVKDCQWIAQLLQHGLLKGSFIPPEPIRELRDLTRQRKKLVGQRASCVQRIQKVLEDANIKLSSVATDVVGASGWEMLRKLISGETDAQKLAALARGRLKSKKEQLADALEGRLTEHHRFLLRQHMREIKFLEEMIGEYDERIEQQVRPFFEYLPLLDSIPGINGTAAAGIVAEIGADMNQFPDHAHLGSWAGMCPGNNESAGKHRSGTTRHGNKWLRALLVEVAWAASRKKGSYFRTQYKRLSARRGKKRALVAVGHSILTIVYHVMKYKIAYEELGEDFFDKLNGDRLRKHYTKRLESLGYQVDLRPMSVVA

SEQ ID NO: 491217 - protein, 443 aa, unidentified
MTGYLEAAAAAARRPPVEDATPASWVAIDIAKDIHVVLADSAQGRRHFRLANRLEEVHAFIAFLRELPVPVRIGFEPTGVYHRPLAFQLVSAGFDVVLIASLACARYREAMFTSWDKNDPKDTQVLLELLKQGVTMRYVDPLIAGWHDIQEVSKTYWHVTLARTRVQHSLLTHYLPLYWPEFARFWRTTRSEGFCHMLHAYPTPASITATDCDTFVATAALPAGRKVNKRAWLTEVYELARRSIALPIALDSPAVATFRLRIDRFLALSAERMRLERWASELLADNADYQLLQTMPGIGPIFALTILAEAGDLRRFAHHRQFLKFCGLDLAKSQSGMSRGREQLSKRGNARLRCAFWFAGRTAVRLRESSIRDKYERYMALNPKSPDQRRKAYTAIAAKMARIAYAVVKTARPYRSYFEHELPGGSIPLSGAVEATRRPALTS

SEQ ID NO: 491218 - protein, 263 aa, unidentified
MNEVSQVSQVSLGLDVAKAKFAVALLNAGKVTQRTFPMDAQGFTALRAWISKQEVQQVPACLEATGAYGAALALSLYEAGHLVSIVNPARIAAYAKSRLVRTKTDKADAALIAHFCHTQQPLPWAPPAAEVRELQALVRRVAMRQEMAHQEGNRQQSGIPSPAVRASIDATLAFLREEIAKMQRQVQEQVERSAELRGQQLLLCSIPGVGSWTAARVLAEIDEVRRAVDARQRAAYAGLTPRERTSGSSVHRPPRLAKTGNSR

SEQ ID NO: 491219 - protein, 449 aa, unidentified
MHGAHIGGQRAAAFFKLVADLDPRRVLLVGIDVAKATWFVVVSDLTGVVVADGVRLVADRAGLAELERVIAELRWQLAAELVVVGIEAAGHQHQSLTAHLADRDGLHVRLLNPGAVAAIRKQQGNRRRKTDWLDAAAVCELLARGEGTLVHLDASMAASLRPLWSGRKDLVDTRSRLRQQAGALVDCLWPGFSAADKQAGVSPVLCDLFKTKAGRVIAGLLAEGWTPARFTAAPTTQLQAIFAARGCRLTRPLASRLRARAAGALPAHPAATAGKAAALAGMLGVLDGIDAEVERLEARMAPLLAATEGAKLTQIRGVGVVTASGFVAFVGRTDRWAEWSKVWRAAGLDPARSQSGAKDARLGISREGSAWGRRALLDLAAAVCRQPGRWGDGFRARTTQGRKPAKVALAATGNSIGRTCFALMRSGADYDPAWETKRTRSSKVGDQAA

SEQ ID NO: 491220 - protein, 377 aa, unidentified
MTRSALAATAEPTLHAALELSKNTWLLAIQVPGRDNPSLHPIKGGDADGLVAKLDAARQRLAKVSGRVPKVILCYEAGYDGFWLARLLEHRGIECLVMEPASLQVNRRARRVKTDRIDVENILHTLIAWCRGERHVCSMVVIPSVEEEDLRRSHRERGRLVRERTAHINRIKGLLFGQGIRGINVMKNYKTLAPAELVTGDGRPLPKRLGREITREIERLAQVQAQLVEVERERDLAPTPCEATERKRHELLRLKGIGPTFSAVLSREVYYRRFANRRQVASYIGLAPSPYDSGDGRRSQGISKAGNSLVRYTMIQAAWLWIRHQPNSALTQWFRRRTEGESKRMRCIMIVALARKLAIALWRYVETGLIPEGAVVK

SEQ ID NO: 491221 - protein, 472 aa, unidentified
MSNKKNQEAYLMKKDTKKNTNEQGLSVINEATAGIDIGASSVHVCARGRVREYSTFTNDLRAMSKWLKELKITSVAMESTGVYWIPVYDILEQDGFKALLVNAHHLKTVSGRKTDVKDCQWIQKLHSFGLLNGSFRPEGDYLVLRNYVRHRSKLFQLASAQVQLMHKALTQMNIRLGLVVSDITGQTGINIIRAIIAGERNPNTLAKMRSNQNKSTEEEIVKALEGNYREELIFELKQSLEAYDFFHTQILKCEQAIKTVIDKLERCDVQQPNVENDDNFPKKGKNGRGLQKKTNYNKSPYHFDMVSDLQEILGVDLTKIPGLGVNIILKLISEIGTDMSRWPTAKHFVSWLGLCPGNKISGGKILSSKTKPTANKAAQAFRLAAQTLYKSSTALGAFFRKMRGKFGGPKAITATAHKIARILYAMLKNRVPFEEMDQAEYERQREKRAFEFLKRKASDLGFALIEKTALPA

SEQ ID NO: 491222 - protein, 400 aa, unidentified
MMTPDDIDVWVGLDVGKSAHHAHALDHDGNTLYDKPLKQDEKAIRTMLGKLSKHGRVLLVVDQPNTIGSLPLTVARNMGIAVAYLPGTAMRRTAQLLPGDAKTDRRDAHVIAWAALKLPETLRDAGPDDETLAALKLLAGHDEDLAHESTRHVNRLRSLLLQTHPAFERALKGERITRDATLALLEHYGGPAGMKTTGIEEVRAWAKANGLRAGAIIDDMFKAIGEQTVTVPGTLMAETIIPSIAHDIKAIRDRRREVGRQVEALLEGHPLLTVPASMPGIGVRTASSILLGIGGDIANFKSSAHLAAYAGISPVTSQSGTSIKGERPSRRGNKRLKNALWQTAFVASTKHPPSVAYYKRKREQGKHHNAAIICLARRRCDVIYSMLKNGTLYQEPALVA

SEQ ID NO: 491223 - protein, 345 aa, unidentified
MKYIGIDYHKQYFVATTMDERGKVISKERVSTDRDSIRHYFSKVEKTETKAVMEACYGWEYFYDEVDDLIEELIMAHPLKTRLIAEARIKTDSIDSETLAHLLRADLIPEAYAPSVETRDKKNLLRYRSSLTAIKVRIKNMIYSVLARNHIEDKSFTSLSDKFGKKGLAYLRSVMLRGSDTMILNQYLDLLGETEAKIKAAESQIRVVCRQDEICKLLSSVPGIGDILAVTIRYEIDKIERFVSDGKLCSYAGLVPSTYSSGNRTYQGKITKQGNKWLRWAMIEAAQRAPINDMWLRDFYNRISKKGKKVARVAVERKLLEIIYRIWIDRKPYYKKPVTVALPVV

SEQ ID NO: 491224 - protein, 410 aa, unidentified
MIRLGDGRRGWLYRGKLYAHLRGEPFPRRDGSGSGWLLRDTQHYVAVFELSKESWLVAGIIPGVERQPLKKLLADEDQLLKLLERWRTEAEKAGHKINRIAVAFETGRDGFWLARWLRARGIEAYVIHAASVAVSREHRRAKTDRLDTAGLKRAFLGWLRGEREHCKMAAIPTLTEEDAKRPHREREMLVGEQTTIINRLKATLARLGIRNFNPKLKKAPERLEHVRTPEGEPIPPNTLAELMRDLERKRLVHEQILNIEKARLEQLKRAPKVGPNLMVLLLVRVIGIGIDTADMLVKEVLSRNLRDRRAVARYGGLTGSPDESGKKRREKGLARSGNARVRRGMIQLAWRFLKFQKDSALAKWFRVRTENAHRLRKKMIVALARKLLIALWHLVRDGVVPEGVVLRSAH

SEQ ID NO: 491225 - protein, 396 aa, unidentified
MLKHSRHTGRLATDTPAAAGEHATMYVAFELGVKKWKLGIVRPDRQRLSRYPIAGGDIEAAWRLICRERAKAEKQLGGPVRIVSCYEAGYDGLWLHRWLEEHGVENRVLDPASLPVNRRQRRAKTDRLDLEQLIVAVIRHEQGDRLACRVVHAPTVAQEDERCLWRERDRLRKERTAHVNRIKGLLHGQGVRGAQPRRKGFCTWLQTVRTGDGHDLPPHLLAELAREHARLMLVQQQMAQIEAQAAAARKAAVPGSMAARVEQLIQLDSVGPDSGHTLVGEVFWRDFKNRRQVGSYFGLTGTPYDSGESVREQGISKAGNPRARTTAIQLAWLWLQHQPDSALSRGFKQRVADQKGVIKRIAIVALARKLMVALWRFLTLGVVPEGATLRTAAAHR

SEQ ID NO: 491226 - protein, 387 aa, unidentified
MYYCGIDVAKRGHVVSVIDDTGKVLNHGVPISNDRIGFQQLADLLEPYRGGIRIGLEATGHYWLALYDYLCHLEYDLSVINPLQVKAFRKMDIRKRKTDRLDSVAISEFMRFANPGSTPADLPVIIQLKELTRFRFHLVQQIGDYKRKIISILDRVFPEYEQLFSNVFLVSSRQLLHHAVTADEFAAFDLNELAQILHTASRHRLGIDKARQIHLKASQSVGVSFLTDAIHTEIQCLLQLIELLEQQRSQVDAKVEQLMNSIPHHIITIPGIGQVTGAMLLAEIGNINRFPALEQLVAYAGIDASVFKTGQFEGDEAHMSKRGSHYLRYALWQAATASLLHNPELKQYYDKKRAEGKQHSVAMGAVCHKLLSRIFVIMKEQRPYVTH

SEQ ID NO: 491227 - protein, 343 aa, unidentified
MQTITTIGLDIAKSVFQVHGVDAGGQAIVRRQLKRRYVLTFFQKLSPCLVGIEACASAHHWSRELQALGHTVRLMPPTYVKPYVKRQKNDATDAEAICEAVTRANMRFVPTKTPEQQSGLVLHRTRHLFIRQQTSVINAIRAHLAEFGIVAPVGRRGVEELLNVVADPNDRRVPEIARACLSALEAQLRRMKEQILEFHRLIRAWHRSNEMCMRLEEAPGVGPVLATALVAAVADPKSFRSGRNFSAWIGMVPKQHSSGGKNRLGNISKQGDRYLRGLFVAGALSVIRYAKIHGTKHRPWLTALLARRPTKVVAIALANKIARMVWAMMARGERYKEPVALAR

SEQ ID NO: 491228 - protein, 320 aa, unidentified
MSDHLAVGIDADSKTLVVACHDTKGSARITNSASVITKWLSTLPVGSRIGVEATNRYHELVVQAAQKAGHVVFVLNPRDIKHYAKGVACRGKTDSGDAQVIARYIAKEADNLHEHVARSPAQEQLHVLLQQRDSLVRSKAKLNLSLGAGASESAIFGRIFDGLKEAIAMLDQQIQQLCRSGEQRDLYRRIMTIPGVGPTVAAFVTHHITRWPLTSSDAWIACTGLDPRPNESGARIGRRRLSKRGNASLRQILYMAAMGLTRSKNGKPLYNAIRERGHSSTASFNILARKLARIAWGVFKSGRDFDPAMLKVGQTCFQQA

SEQ ID NO: 491229 - protein, 325 aa, unidentified
MKEILLAGVDVSKLTLDIFVKPCGLSLQISNDRKGFMLWWREMKKILKPDTRVMVVMEHTGLYSRKFEEFLRTSGVDYCKIPALEIKRSLGMTRGKNDRIDAERIAGYGWLRREILHADPQLDKSIEQLKHLLGLRLKMVRDRAGYINRMKEMKAAGYHQELKLEVEIVAYLAKQIKKAEASIRELIAANPLLQTTCELLRSIKGIGPIIAAYMIGNTNNFTRFSNARKFNCYAGIAPFNYQSGTSIKGKSRVSHLANKDTKTLLNLAATCAIRCDEELKTYYLRKVGEGKNKMSCINAIRAKLVARMFAVVKRQSPYQPLAAAA

SEQ ID NO: 491230 - protein, 387 aa, unidentified
MKNTCSNVACGGMDVHYKFSNVTFRDKDGRVVRRERLMHPLRDQLRQRLSRWPRGTPIVLEASFGWGWLSDLLSEMGLEPQLSNCYKLEQMRKARGWVKTNKKDADMLSLLPFETTAWWEVWLAPPQVRNRREQMRFRGDLVAVQTAVKSRIHAIFHRHGLFHEFSDLFGGKGRRFLAELCIGGSEYLSPQALQALRGQVKLLDHLRGQLADIERILHRQLAKTPLISWLKKIDGFGLILSHVLAAEIGKIERFRNHKALASYSLLAPRSKDTGQDDPDHSPLGRHLGTCGNRTLKWAFIEAAHGAVRSGGRWRAMFDRVTCGGRKDRNRGYIKVARELVKVVYVVWSKGLDYQPDPPARPGSDKNKKRSRSGTGQLLHPMVHALRA

SEQ ID NO: 491231 - protein, 346 aa, unidentified
MLYAGLDLSRKRLDFHLLDTEGATVEVGAAPPDADGLRGLSERLARYGEAVRAAIESMNGARFVHDRLELAGWQVEIADAQKVKGLAPLACKTDRIDAWVLAELSRRELVPAIWLPDPLVRAERERARWRLHLVRHRSSLKQRVHAVLLTHGKPCPVSDLFGVRGRQLLARLGLPEPWQGTLEASLRLIDELDREIGECERELRRLGADHRYVPLLCTVPGISWVLAYTIAAELGDIDRFPTARKLTGYSGLCPRVYQSGERDLRGPLAKQGPRYLRWALVEAATHACTHPSYRDRYQHTKARIGKQRGAKVAQIDLARRLAEAIWHMLTRNQPFAPKGATDPLAA

SEQ ID NO: 491232 - protein, 378 aa, unidentified
MKVMYERVAGIDVHKKMIKVAIRSPGARPWTRKTEILTFRTFYGVLREVARELRRRGVTHVVMEASGIYTEPVYHALCEEDGLEVLVVNPAHVKAVKGHKTDARDCARLAELLECGLLQGSYIPPRELKEVRDLVRYRIKKVQARTSEIQRLDKTLESAGIKLGSVVSDVTGKGPTAMTGALIDGERRGKVLADLALGRARSAGKLADLTMALEGRFTGHHAAMCRLVLDQVRLLDAAVADLDERIAAAAAPWQREIALLKTIPGFGDVVAWAWIAEIGPDPRRWFASGGKLASWAGLAPGNHVSAGKRRYGRTGDAGTYIKPVLVQAAWAAIRVKGRLQARYHKLVRRMGGPKNPAAVKKAIVAIAHPAQDRLLRAQ

SEQ ID NO: 491233 - protein, 415 aa, unidentified
MKKHSNSPKKNEPTSKRAKSRGPVQRNPKEVLAELLGKLREKLDSKVVAASAGEEDQRRELRPNLDRLTVGVDLGDQWSHYCILGLEGGTLAEGQLRTTQQDIADFFEGLNAARVVVEVGTHSAWVREVICSYGHEVVVANPRLMEGSKRRKRKNDRIDANKLARLGRVDPQSLHPMQHRSSEVRQDLVILRARDALVAARTELINATRGLVKSMGARLPKCSSPSFAQKVEEAVPAEIQEALLPLVRMTAALSDSIQGYDEKIEKLGREKYGHTALLRQVKGVGPITALAYVLTLENPERFAKSRDVGPYLGLVPKQEDSGESPPQLGISKAGDTMVRRLLVGSAQYILGPFGPDTDLRRYGLRLCERGGKNAKKRAAVAVARKLAVLLHRLWVTGEVYEPLRHAMSVPIAAAA

SEQ ID NO: 491234 - protein, 333 aa, unidentified
MASPESLVGVDVSAQCLDVSRERAGEVKAAQFANCAAGHRQLGRWLTKGGGQARVVLEATGTYSVDVVLALHAHKRVAVMVANPRAVKQFRDACLQRAHTDASSADILRRFAQRMEFVPWTPPSAGALELRALARRLTTLVTLQTEERQRLHAARATRQTPVAVLRDFRTHLRQLAEHVQRLTAQALALIAATPELQRARTHLLSVKGIGDTSVIYLLGELATLAPGLDVRQWVASAGLDPRPIRSGTSVHPPVHISKMGNVYLRRALYMPALVAQRWNPVVRAYAQKLLAKGKPKLVVVVAVMRKLLHAIYGMLKTDTDFRPEKFYVTPQTA

SEQ ID NO: 491235 - protein, 365 aa, unidentified
MNFIGADLHKKSITLCVMDERLKILARKTVPCGQPDQIVESFRQFLPFKVVVEATASYLWFVELLEPLAEEIVLANPKKLRVIAESTKKTDRLDAQVLAEFLARDMIPRAYMPTPRQRQHRALVRHRQYLRGRMTSVRCKIRHVLADYNADRKDLFSARCGKSYFKQVALSDADGFVLKQLWSEWEDHQARLLAVTEKIKAFIAKAPAREKEARAILKSAPGVGFVTAEVVLSEIGDVSRFGNAKKICAYAGLVPAVRQTGGKRSKDLHITKQGSGLLRWALVESAWRLVKSSPKWSALYSRLRKRCGSKRAIVAVARKLLCVLYAMLKTSTPYKIIPAATPAEPPEPTRKRLVRVSTAAQAVTP

SEQ ID NO: 491236 - protein, 393 aa, unidentified
MSLDHHFAEPTAIRSNLGAIFVSLELSRSTWLITSLSPGGGEKMSKHGLSAGNIAALLARLSELKQKAFARTGQSFQVIVIQEAGLDGFWIHRVLQSEGVESHVVDAASIAISRRRRRAKTDRVDGEALVRALLAYKRGEPRVCAMVRTPTPEEEDRRRLCRERKTLTNERVQHVNRIKGLLFCQGISDYEPLRRNRRQRLDELKTGGGRPLPPHLKAQITRELDRLELLLGQIEAVEIERDALLSAMKPDGMNADAVRSPPAMLINLNGIGPEIAAVLWSEGLYRSFANRKQVAAYAGLAPTPWQSGSVVREQGVSKAGNPRLRTTLLQLAWLWLRHQPQSALARWFHERVRRNGGRLRKSTIVALARKLLVALWKYVTAGVVIDGAVARAA

SEQ ID NO: 491237 - protein, 381 aa, unidentified
MQVLGVDPHKGSHTAAAVAPDGTVLGRTRVVSSRRQVQRLIAWAVPWPERVWAVEGATGVGRLLAQQLVAAGESVLDVPAALATRVRVLSGQSGRKTDAHDAVAVATAAIHHPRLRAVQAEDHNAVLRLLSVRRSQLIASRTQAVSRLHGLLTELIPGGAPRNLAADRAAALLRSTRPVTAVDATRKALARDLVEDVRRLDRKLDANETDIAEAVKASGTTLTEIQGIAEITAAKILGQTGRITRFEDRAHYASYAGVAPIEASSGAVSRHRLSRRGNRQLNSAMHGIAITQATHPGRGREFYLRKRDEGKTEGEARRALKRHIIDLVFATITADTERAQRSPGRQVGATRESSAAGQSPTANTSEWSVPGLRKQATPRVA

SEQ ID NO: 491238 - protein, 386 aa, unidentified
MRKSNDLSRCLAALEQDSTLIAVIEMGKSSWLVAGVVPGIERRPLKKLAANEGALLALLYRWRDEAKKAGHPIKRICVAYEAGRDGFWLARWLRKRKIEAYVIHSTSVCVSREHRRAKTDRLDTEHLMRAFIGWLRGETDHCRMCAIPTLEEEDGKRPSREHEHLVGERTRIINRLKSCLARLGIRDFNPASCKAPERLAKVRTPEGTPIPPNSLDELKHDMAHLRFISDQIDEVEKARLARLQKAPKKGPHAMVRLLASIHGLGIETADTLVHEVFSKNFRDRRGAPRYAGLTGSPDESGERRREKGLARAGNTRVRRSMIQLAWRFLQFQKESALVQWYYKRTADGRKDTRKTMIVALARKLMIALWRFVTTGEIPAGVQLRVA

SEQ ID NO: 491239 - protein, 372 aa, unidentified
MQQDSAAFVGLDTSKMKISVALAEEGRQGDVRFLGDVDHTPEAVRRLVTKLAGKYGRLLFCYEAGPTGYGLQRQISTLGHDCAVIAPSLIPKRPGERVKTNRRDALTLARLHRAGELTRIWVPDPGHEAVRELVRAREAAMADLRTKRQHLQSFLLRHGRIYSGSRPWTQVHARWLSNLSFEHPAQYLVLREYRQAIDDAETRLERLTQHVAEVVCSWSMAPVVEAYQALRGVAFVTAVTFVAEIGDVRRFETPRQLMAYLGLTPSEHSTGDRVRRGSITKAGNPRARRVLIEGAWTYRYPARLSRALQVRQESLPTVVRAIAWKAQLRLCARYRRLMAAGKRQTVVTTAIAREMAAFLWAIGHAVDPRPAA

SEQ ID NO: 491240 - protein, 357 aa, unidentified
MVETLSEAQSSECGVTYPYHRTEHCDKIHGYRCDKEVGVLGIDVSKDYLITSRGRVRKYENNLKGYEEILEMKPCTIVLEPTGVYSIKPSQYFKEKGIRVLQVSPNVLSREKDFREKKTDFYDAEKLENMVDKAKEYEYNPLRELVTLYLFLKDIETKYKNRLKRALFLVSDNDKISKERLEKLAMGDFTQEELYQLEYTPLVLEEIKILAKNLLETQERLKEVRRMIEGQVPQDHVLLTIPGVGRLAAGVIIGVVGDVRRFPKPESFVAYCGLDPVVERSGRAVISKGIPKRGNRYLRSLFYFLAEMNYSRNPTLLKFYESHKDKLRGKKLYTALARKLARIVWSVWYNNKPYEAK

SEQ ID NO: 491241 - protein, 331 aa, unidentified
MFPVGIDVSKNTLDLCMLYDGIKGRIKTRNIQNNRHSVENILRWLRLQHCGPEDVHVVMEATGVYHERLATELHDAGFYVSLANPHRSREFARGMGIMTKTDKVDAYMLACYAFLKNPHRWEPPAPEIRYLGALLRRRDVLLGDALREENRLEKYLSTDTPADIISSCRRMAQLLREEVSNIERQIKAHIKASPALRRDYTLLTSIKSVGPQLGMHMLVVLRSHDFSSAEQAAAFLGVVPIEKRSGTSVRSRPRMSKIGPPQLRAKLYMSALCGKIYNKRMRNIYDEMCLRGKPKMVAIGALMRKLVHWCYGVLKTGIVFNDEGLKQVLST

SEQ ID NO: 491242 - protein, 323 aa, unidentified
MNKDIKYFGIDISHLIFDVTDSDGNYYQFKNKLSGFKKFIKLLSSNSHCVMEATGYYHYQLAYYLFENEKKVSVENPLAVKRFIQMRLSKIKTDKSDSKLICAYAMQVELKLWQGSSKEVQECLQITRTLSVYTKQCTMLKNKIHGESVLGNPSKAVVRSLNRSLKQLDKEIVYLESKLLFLVKQAHKDLFTRIKTIPGIGRKTSIMLIVLTGGFERFSSASELCSYAGLTPVIRQSGSSVKGRPRISKMGNQKLRNLLFMCSFTACKYNKACRDLYERIVAKGKSKKLALIAVCNKLLKQAFAIAKSGLIFDNEYKSTLVKN

SEQ ID NO: 491243 - protein, 384 aa, unidentified
MSSKNANVAASTIYLGLDVHKDSITIAVLPEHARAPERVERLPNDLAKVRRWFSRMAQRGAVRACYEASGAGYVLHRALREWGYRCDVIAPSLIPKRPGVQRKHDKRDAVELARLYRAGELTPVRIPTEAEERVRDLVRCRETFQRELLKSRHYILKFLARRGFVYRDGAHWSRGHMTWLHAFAARDTVLQAEDAIAFREYFALLEYKLARRTELDTRIEALALTPAFATPTAWLQCFRGVKAHSAMVLTTEIVDWRRFESPRQLMAYLGFVPREHSSGDRERRGGITKAGNSHCRHVLLQAAWSYRHPPQIGTSLKARQRGQPAAVIAHAWKAQHRLYKRYQQIAYRRPPQVAVVAVARELVGFLWAVMRELDIPQSRCPAAA

SEQ ID NO: 491244 - protein, 355 aa, unidentified
MNSEKYIGLDVHQATISAAVMDSQGKVIIECILETKASTILEFLSGLRGSLWVTFEEGTWAAWLYDLLKPHVAQLVVCNPRTNALLKHGNKSDKIDARKLADRLRLNDLKPVYHGETGVRMLRELARSYLTIVKDLSRVMNRLKALYRSWAIPCAGRDVYYTRHRSQWLGKIPEAGTRRRAEQLYQQLDLLQHLRQQARRELLAESRKHAITAKLRQIPSLGPIRAALAVALIQTPHRFRTKRQLWSYSGLGLETRDSGEYRFIQGQPRRRKQQVTIRGLNKDHNHDLKGLFKGAATRASVKPGPFQDFYQRSLAKGIKPTMARLTLARKIAAITLTLWKKGANFDAEKLKSQAA

SEQ ID NO: 491245 - protein, 340 aa, unidentified
MEQISRIGMDTLKHIFQLHGAERSGRAVHRSRVGRGALIETVQKLRPRVVAMEACTSAHHWARRFLHMGIEVRLISPQYVTPFVKTNKNDRNDAEAIAEAASRPSMRFVSVKSVEQEDIQAVHRMRAILVRQRTAVINQIRGLLAERGLIVARSVQAFKRAIPALLSNEGSELTTFCQALLTDMLQHLQALEARIHWLEVAIKDFVKNSALCRKITAVEGVGPLTASAVVGAIGDAKQFSNGRHLAAWLGLVPRQYSSGGKARLQGISKRGDTYLRTLLIHGARTVLQYASGKADKRSRWLQQLIARRGYNCAAVALANKNARILQVLLSTEASYKPAAT

SEQ ID NO: 491246 - protein, 355 aa, unidentified
MNSEKYIGLDVHQATISVAVLDSTGKLVMESILETKAATILEFFAGLRGTLSVTFEEGTWAAWLYDLLKPHVAKLVVCNPRKNALLKDGNKSDRIDAHKLAELLYLNKLSSVYHGETGVRMLRELARSYLTIVKDLTRVMCRLKAVYRSWAIPCAGRDVYYTRHRAEWLGKIKEAGVRRRAERLYQQLDMLQYLRQQARRELLAESRKHAITVKLRQIPSLGPIRSALAVALIQTPHRFRTKRQLWAYSGLALETRTSAEYCYVKGGLRRSKKQISIRGLNKDHNHDLKGLFKGAATRASVLPGPFQDFYQRSLAKGIKPTMARLTLARKIAAITLTLWKKGENFDADKLKSQAA

SEQ ID NO: 491247 - protein, 338 aa, unidentified
MTLYGGIDLHSNNAMISIIDSQDHLVFEKRLANNLSSIQSHLDPYRSRLDGLVVESTYNWYWLVDGLAEQGYDVHLANTAAIQQYSGIKYTDDASDARYLAQLLRLGILPEGYIYPPEQRSIRDLFRRRLLLVRQRTMQHHSLQGLIARHSGIRLGAQQVKQLKSGDLKAYFRYPASLETARLLHRQMAQLSQAIDQIEKRVGAQCQASADYDLITSMPGVGSILGKTILLETGPIERFPAVGNYVSYARCTPTARISNGKQKGQGNRKNGNRYLAMAFVEAAHYAAIWDQTIKRFYQRRQRRVHTMVAKKTVANKLARACYHMLKRQERFDVKRAFS

SEQ ID NO: 491248 - protein, 335 aa, unidentified
MTAISSVFSGFFDFITASPVCRKLPPCLVAMEACGGAHFRGRELAKLGHGIKLIPPAYVKPFIKRQRNDAADAEAICEAVQRPNMRFVPVKSEETQGAASIFRVRELLIRQRTQAINALRGHLTEYGWAVPQGAANARRLAALAADEDAGLPASARASLTVLTATLAQPDAQIETLDAGNDRRAKTDEVARRLMTIPGIGPLIATAIATLAPPPEAFRKGRDFTAWLGLTPRQHSTGRKQRPGATTALPGHCVPQCPAGQWMGERSLRPLLIIGANSVIIKRHCHASARPGAWLAGMLERKPAMLVRAALASKMARIVWALMKSGEIYRAPAMAA

SEQ ID NO: 491249 - protein, 341 aa, unidentified
MKNKSFIGIDISKNVIDVSIFCEETPIKDFSHDVFDNSRKGFGEMCTWLKKNHVVLSNCLFGMEFTGSYSMELEKFLNARNYQFCMLSTHVVKHYPMGPKDKSDKIDSAKIADFLYRYNGTECVKPYNMPDKTMQRLKALMNERKFLVEQRTCFMNRRQLCITKEDAQLYDGYIKKFSRDIENIELEEQKLLATDDSLLFTYKNLLTIPGIGFVNAINVIVITRNFTAFETARQYASYVGVAPHFRTSGTSVKWRPRPSARCDGQAKADLSMAATVVVQYDAELQSFYNRKLGGKQDSDTKRKALNAVKFKLVLRMFAIGKQNRKWEPLDSKSSNEKLAIS

SEQ ID NO: 491250 - protein, 355 aa, unidentified
MDSEKYIGLDVHQATIVVAVTDSTGRLVMESILETEAATILQFFAGLRGTLSVTFEEGTWSAWLYDLLNPHVDQLVVCNPRKNALLKDGNKSDRIDARKLAELLRGNQLKPVYPGETGVRMLRELSRSYLTIVKDLSRVMNGLKAVYRSWAIPCAGRDVYYSRNRAQWLAKIREAGVRRRAERLYEQMDMLQHLRQQARRELLAESRKHAITAKLRQIPYLGPIRSALAVALIQTPHRFRTKRQLWAYSGLALETRISAEYRLVEGQVRRSKKLLSIRGLNKDHNHDLKGLFKGAATMASVRPGPFQDFYQAALAKGMKPTMARLTLARKIAAITLTLWKKGENFDAEKLKSQAA

SEQ ID NO: 491251 - protein, 408 aa, unidentified
MLFVGDDWAEDHHDVEVQDEHGRAVRTARLPEGVAGMARFHELIAAFLPEQGDPAQVLVCIETDRGPWVRALVAAGYRVFGVNPKQAARHRELLSVSGAKSDKADAHTLADMVRTRRHQLRQVAADSEDAAAVKVVARAHQTLIWERTRHMLRLRAALREYFPAALEAYKPLTLTGADTLELLAKAPTPAAARRLTLAQISATLKRARRRDIPAKTAAISEALRTEHLGQADVVADAYAATVRASVALLQTLNAQIRTLEGQVEAHFGRHPDAEIYLSQPGLGAVLGARVLAEFGDAKGRYTDAKSRKNYAGTAPITRQSGKTKTVHARFIHNDRLLDALHMQAGAAILHDHAVRAYYDELRGRNIGHNAALRQVGNRLVGILHGCLKTHTPYNQTTAWSHRTQHTAA

SEQ ID NO: 491252 - protein, 387 aa, unidentified
MQPAHIQDFTLDDQTLTASLELASKNWKMALQDGMHRSPSEHKAEQEGAADRLEEAIGLIETTRREWGLPPSCRVVIVYEAGQDGFWISRALQKRGYEVVIVDPASIPVERQARRAKTDRLDAIRLLCCLRGWLRGERDRLHAVRVPEVEAEEMRHLMRDRGLLQKEVGQHRDRIRKLLRTVGCWVRVGPPFAGQLERGEVVCHDGAALPPCLRQRLMRECERLDLVTRQLKELEAALPEQLPEATAQSVATLQRLRGVGQIGAHRLVLELFWRRFDNARQVGSCVGLVPQPYDSGQSRVDQGISKQGNRRVRALLIEMAWMWLRYQPDSALTHWFARRTTTGAGDPSAGKRGKRVAIVAVARKLVIALWRYLKDGVIPDGAELKYG

SEQ ID NO: 491253 - protein, 355 aa, unidentified
MNSEKYIGLDVHQATISVAVMDSRGKVVMESILETKAATLLEFLAGLRGTLSVTFEEGTWAAWLYDLLKPHVQKLVVCNPRKTALLKHGNKSDRIDARKLADLLRLNDLEPVYHGETGVRMLRELARSYLTLVKDLTRVMNRLKAMYRSWAIPCAGRDVYYKRHRAEWLSKIPEAGVRRRAERLYQQLDMLQHLRQQARRELLAESRKHAITAKLRQIPSLGPIRAALAVALIQTPHRFRTKRQLWAYSGLALETRTSGEYCYVRGQLRRSQKQISIRGLNKDHNHDLKGLFKAAATRASVQPGPFQDFYQRSLAKGIKPTMVRLTLARKIAAITLTLWKKGENFDVEKLKSQAA

SEQ ID NO: 491254 - protein, 449 aa, unidentified
MSVQKLASEKDKNIYTRRSSTMNYNQNDKIAQITSHTLIVGVDIAKFKHVARAQDFRGIEFGSACHFENTKDHFELFLDWIKNLLEKHGMDNVIIGMEPTGHYWLNLAHFLREEEIKFVVVNPMHVKKSKELDDNSPTKNDVKDAKVIAQLVKDGRYAEPNIPQGVYAELRVARKIRDFLSVDLQAVQGQIHNWLDRYFPEFLTVFKDWEGKSALQLLKLNSLPHELEKVTEQEILVHLRKAVKRAVGLSKIQELKRVAKDSIGIREGSRMAKLELRTLLDKYELINEKFEELESDIDGLLERIPGVQQMLAITGIGKDTVAGFFSEVGNLSYYSHPRQIIKLAGLSLKENTSGKHKGQTKITKRGRKTLRALLFRVAMPLVAKNTAFKALHEYFTTRKNNPLKKMQSLIAICNKLIRILFVIGTKQCEFSEERMLKDIPHLAPLQNAA

SEQ ID NO: 491255 - protein, 456 aa, unidentified
MKIPQSTIRLLTGRLVKILLNREVSTMKSNTQNAKIEAITEKTLVLGIDVGSETHYARAFDYRGIEYSKKPFKFSNTEAGFVTFKEWILDIKERHEKDKVVLGMEPTGHYWFNLGKFLQDNEMKPVLVNPHHVKKSKELDDNNPTKNDRKDPKVIAGLVREGRYMIPYLPDGVYADLRTASNIRFQLQAELTRIQNRISRWFNIYFPEYKTVYGKPDAKSGILILKEAPLPEDILTLGIDGVNQIWRDAKLRAVGKARAKTLIEAAEHSVGSKEGAVSARMEIRMLLEDYESRNIRLQEVMGLIEGLVNQIPMAEKLLEIKGVGIKTVSGFLAEVGDIRRFNDPKELQKLAGLALVENSSGKHKGKTTISRRGRKRLRYLLFEVAMSLVAKNPEFRELHNYYTTRRLNPLKKMQSLMAIAAKLLRVFYAILTKGVGYDPKKMVNDIRRPAAYAQAA

SEQ ID NO: 491256 - protein, 474 aa, unidentified
MQATREDAGRARGHAGQRRSRKNKGMCGPDRPLLEANAAGVDVGAREMFVAVPPDRDRQPVRSFGTFTADLEELVNWLQQCGITTVAMESTGVYWIPLYEMLEQRGIQPCLVNARNMKNVPGRRTDWQDCQWLQYLHSVGLLRAAFRPNEQVCAARTILRYRGELVQMASQHVLHMHKALTQMNIQIHHVISDLTGVTGLAIVDAIVAGERDPAKLAQLRDRRIQADEHTIRKSLRGNWKTEHLFTLQQSRKLYRECLEHIAQCDQQIESLLKNIEPPENPGDPSLPADEAPSQKTKRRAGDFHFDVRGEIRKLFGVDVMRIPGIGTQALSLLSEIGNDLSRFPTAGHFASWLGLCPDNDITGGKVLWRGVRRIQNRAGQMFRMAAYSLHRSKTRLGDFLRRMKYRLGPKAATTATAHKIAVIFYTLVKNQVEYDDSLWAAQDAAHQQRAENKLKQLAQRLGYEIIKSQPTTTP

SEQ ID NO: 491257 - protein, 422 aa, unidentified
MLEETPDDGVIIERVAALDVGKAEVVCCVRVPSPGGGGRRAQEVRTWTTMTRSLSAMGDWLRGLGVTRVVMEATSDYWKPPFYLLEASGFEVWLVNARDVKHLPGRPKTDKLDAVWLCKVAERQMLRPSFVPPEPIRRLRDLTRYRVDLVAERGREKNRVEKLLEDAGIKVSVVASDIFGISGRAMMAALVAGERDPLVLAGMARTAMRKKIPELRQAFEGRFSDHHAFLLSRMLARVDAIDTDIAAVDSRIEELIAPFADAAARLDDIPGVGPVAARMLIAEIGVDMTRFPTAAHLASWAKFSPGVKESAGRTLGNGSTGHGNHYLARVLGEAAVAASRTDTFLGERYRRLARRRGKKKAIVAVGRSILVIIWHLLNDPAAEFVDLGPDYYDQRRGTQRAVRSHIRQLQALGYQVTLQPAA

SEQ ID NO: 491258 - protein, 341 aa, unidentified
MKKNSFFIGLDIAEADFAASIYKTPDQPIVTKEAIPNNPEGFDLLLLWLKDHHIDKTNSHICMEATGVYSQAIAYYLLLAGFPVSVEPPLKVKRAFDPIGHKTDPVDSKQIAEYAYRFQDELTSWQPRDEILEKIRQLLSVREQFTKQKVALKNAMHAYSRQRVQVALIKKVHQETLAQIEKQIVRIDKELAKLIKQNPQILQKADYLKSIPGYGMLLAAHLLVITENFTKIQNSKRLASFVGIVPYQHQSGTSVFKRAKIRHFGPGPSRKLLRLAAQSVATHDVTFRRYYLRKLAQGKAKSLVLNNIANKLLKVACAMIRNNTRYIKEHRSIHPMYLKSA

SEQ ID NO: 491259 - protein, 354 aa, unidentified
MKKLSRMSSTLTIGLDLADVWSDWVAIDADGVVAARERVRTSEPQLRRVFGHLSASVIALEVGTHSAWVSRLLESCGHTVIVANARRVALIHRNKRKNNRIDAELLARLARADRKLLFPITHRSKRSQTDLSLLRTRDVLVRTRTLLINHVRGASKSFGVALPKCSSESFATRARASVPKVAAALAMVLDQISTLTEQVRELDRSIDAMLKRHPAARRLTQITGVGALTALAYVLTIEDPARIVRSRSAGAFFGLVPGSADSGEKHEPMKITKEGDGFCRRLLVNAAHYIVGHFGPDSDLRRHGEAIAARGGKNARKRAVVAVARKLAVLMHHLWSTGADYIALYHSAHQPAAA

SEQ ID NO: 491260 - protein, 313 aa, unidentified
MTEDTIGIDISKSCLDVFRLQDQATERFDNSPRGFRALIKWLGTTRVARIVFEPTGPYHRAFENALSGKCPLVKVNPLQARRFAEACGTRAKTDAVDARTLARMGAALALEPDTPVSEKLLELRDLQIARTSLVKERTRLRNRGHVQRNAVLKRQTKTRLALVERQIAELDAEIAKRIAEDQPTARKREILCSVPGLGPIAAALILTFLPEIGTLDRKQVGSLAGLVPHSRESGQWKGKSFISGGRKPLRDALYMPALVAMRFNPDLKAKYNALREAGKPAKVAIVAIMRKLLETANALVKNDRLWVKNAPCA

SEQ ID NO: 491261 - protein, 346 aa, unidentified
MEHYAGIDVSLELSSVCVVDTQGKIVKEAKVASEPETLVAFFKALSIAVKRIGLEAGPLSQWLHAGLKRAGFETVLLETRHVKAALSAMTVKTDRKDARGLAQLIRMGWFRPVHAKSMGSQEVRALLVARKQLLGRLIDVELSIRGILRGFGLKVGQVTRKAFEARIRELVTGQPTLERIAGAMLSARASLKVEYEKLHKAVLAIVREDAVCRRLMTVPGVGPLVAITFKSAVDDPSRIAKSKSVGALFGLTPRKYQSGEKDVTGGITRVGDEMVRTTLYEAANVLLSRITRFSKLKRWGMDVAKRRGSKRAKVALARKIGVILHRMWVDGTTYRWAAAEPIAAQT

SEQ ID NO: 491262 - protein, 319 aa, unidentified
MSQVTVGVDIAKHKFDVARLENGKYKHKKFDNTPEGFAALIVWLTAFGGVKPSVCMEATGAYSIPLAECLAQSGYPVSVVNPAKIKGFAKSELSRIKTDKADAKLIARYAQEKKPPLWTPPPANIRELQALLRRIEDLLEMQQMEKNRLDTADPTIAESIRAVLAHLEQELKTTRERVQRLIDQDSDLRHRRALLETIPGIGEASSAHLMVALSDHYGFTTAKQAVAFAGLNPALNESGKWKGKTRISKMGDPMLRAKLYMPAVVAGKHNPAIRLFRERLAARGKNGMAIACASMRKLVHIAFAILKSNKPFDPHFALA

SEQ ID NO: 491263 - protein, 404 aa, unidentified
MYAFFVGIDVGKWNHQAAFLDVFGKEIARSLAFQNTSEGFQKLSESLQSFDKEQTVIGLEATGHYWLALFSFLTENGWLVKVINPMQSDALRNMNIRKAKTDRKDCVVIADVLRFGRYTETILPDEDLLQIRELSRCRVTNVELIGNLKRRILGILDRIFPEFASCFSTVFGTTPTELLQEYADPEELANCDVEKLVKLLEKQSRGRHSKAKAEELKSKAAKSVGTRLGLDALKFELKMLLQQMEFIKSQVKDFDKFLKELMKKYKLIYTIPGISVTLGAAIIGEIGDVNRFGTPQQLQAFAGMDPSVTQSGNFQGTQGKMSKRGSPYLRRAVYLAANAARRHDPVFKEHYERMIARGKHTKQALAAVATKLLRVIHAVMTSQKPYDPQKLVLPSVRESQSSSI

SEQ ID NO: 491264 - protein, 369 aa, unidentified
MGKQIENSAALLRYCAGIDVSKDSLQICLSTIDINGKTTVKGTSKIANKVSSFDGLLTWVAKHCKEKQLPVRYLMESTGVYHEQIAWYLFQNDLSVSVVLPNKSKNYLKSLGHKSKNDKIDARGLAQMGLEQTPTLWKPLSKNIYSLRMLTRQHQRLQELKNQSENQKHAILHSQISDKFIIKQLDKLIKLYDQQIDQIAQQMQNLFSKDLVLKNKIDQLCKIKGLGLLSVATLVAETNGFEGFENLRQLVSFAGYDVVENQSGLRSGKTRISKKGNSRIRRILFLPAFNAVRFSEPACQALFERVFVKTRIKMKGYVAVQKKLLTLCYALWKKDVNYDPLYHSQHVKELEYQDKKIVLTSRTTQDVTA

SEQ ID NO: 491265 - protein, 350 aa, unidentified
MLIIGCDYHPGFQQIAFVNTEIGELGERRLGHREEAEQFYRELKQQGLPVRVGMEASGHARWFERLLRDLQFELWIGDAAEIRTKRVRKQKTDRQDAQLLLRLIIEERFPQIWVADAENRDLRQLLWHRHRLVQMRTRVMNQLHVVALNEGLRRKKALWRPAGRSELQSLVLAPWASRRRQDLLDLLDQLTPKIQALTAALEEEVEKRPVTRQLMTHPGVGPLTALAFELVIGTPTRFHCGKQIASYVGLVPAEESSGDRRRLGHITKQGSSLLRYLLVEAAQVTVRSQPEWRSKFFHLAMRRGRKIAKVAMARKLAVHLYWMWRQGSDYEHFKKFGSHAGVPGNRHGGQ

SEQ ID NO: 491266 - protein, 371 aa, unidentified
MNSIVYVGMDVHKESYTVCCYSFDTDEVLYKQKISADYKLILKYLEQLRKRFADEIEFVCGYEAGCLGYSLYHQLTEHGVKCIILAPTTMAITNTNRVKTDKRDAGNIARCLAFHTYSEVHVPTDEDNSIKEYIRMRDDQKINLKKTKQQILAMVLRLGKKFEGGKTYWTIAHMKWLKSLKLGGVFQETLDEYLITYEYFTEKIERLDQRIEELASGEQYQEKAKKLGCLIGVKTHTALSMIVEVGDFERFAKPEKFTAFLGLVPSEETSDEKQNRYGITKAGNSHLRRLLVEAAQAYTRGNIGHKSVALKKRQQGNTPQVIAYADKANERLRRRFYKMTLNKRLNRNVATTAIARELACFIWGLMTDNVA

SEQ ID NO: 491267 - protein, 269 aa, unidentified
MTFRPHALHLKAELFVKSSRVHVRDDGFTRCNFHLKFFIMVYRGIDISKSSFVAAYPSTNGNPTKTFPNTTARMRELIGTLAVAEHHCVMEATSNYGCCCTCYIRTVLPSVLPPPKKQIKHFSRMMMPVTKTDEKDAYMIAMYGEKMNPPIYKMPSQATIRILTTEGFTYFDNAKQLSRFIGICPTYQQSRTSVNIREHINRNDDERLRSLLYIAFWTALRYNSRECYIRLKANEKPFKVALIAVTNKLVRPVLTITTINSIYRWICPG

SEQ ID NO: 491268 - protein, 340 aa, unidentified
MEITIGVDLHERVTQIAVLGPGEQVQQYRVPSEEEAIAAVLARVPRGTRVAVEATRAWWWFVDQAEAAGHPVVLSHPKQTKAIAAARLKTDRVDAAMLARLLRADLLPTVWIPGPHERQWRELVTHRARLGRTRRTIINELYAVYAKRHVRLPGRVWLRAEPVAPRVNDLSGAAPGLVERDVTVLRLLNTQIADVDAELARHAQADPGARRLLSIPGVGPMTALAVRSWVGDVRRFAQAKQLASYFGLAPRVRQSAAHTHRGPISKEGSRVVRWLVVQAALSGIRFAKGPTRRHYLNVVRRRGRPIARIAAARKLVGIMFHLLRHEMDYDAFVSWGRHAQ

SEQ ID NO: 491269 - protein, 343 aa, unidentified
MKDTIYNHYIAIDWSIENMAIARMTKKSNKISLIDVPSDIGEIKVYLKKLKGSKILMVEETTTSQWLYTELKDYVDRMVICDPYRNKLLNDGPKTDKIDAAKLVHLLKAGLIKEVYHSTDKFLYLRRFVSGYEDLVKAGVRLKNQRYSFLRTCGKRGFECAGTKLDSEGDQFVLDCMDRQIEAHKQEKEGYEIEFSRLAKDYPEISHQKSLPGIGPIHAVKIVARVVTPYRFADKGHYLSYTGLIKLDKISGGRSYGRKNSRYCRQLKSVYKTSTWAAIGGNNPINDYYEYLIQEKKYPEHNARHKACRKLAILSLGVFKSAKKYQPYRRDHVKGCQENKPGL

SEQ ID NO: 491270 - protein, 466 aa, unidentified
MRAAKMREERTGKVSPGVELEGLPVIRPRVAGLDLASEVHWGCAPGVDGTGREVEKFGATTPELERMAEWLKARNVESVAMESTGVYWIAPFEVLERHGLEVVLVNTRDLARVPGRKKTDRVDCLWIQRLHSCGLLTGSFRPSEAVVMLRTMVRDRANLVAGSGDWLRRMQKSLDQMNVRVHRAVSDIDGATGMAIMRAIAGGERDPGKLAKFRDSRCKRSEEEIAEQLTGHWREDHLFSLRQALKVYDSLQAAVADYDGEILRILAEMEKEELRGQQAPPLNNVNKAKHIKARGEESLRQALYRMSGVDATTIDALGVRAVEAVLSEYGPDLSRFPTEKQFVQHATLAPHKPTSGGKALKKKRRSGASTRVASALRMSATSMRNSKTALGAYYRQTARRLGPDVAVFATARKLATLVYRLLRWGQPYVDEGAEAYERRYQEGRVKRLTATAKSLGFQLMPNTARA

SEQ ID NO: 491271 - protein, 366 aa, unidentified
MKKTSTIRVNGNMIFKGHKLTIGLDLGDRWSFYCVLDEAGQIILEQKLPTTPEAMKQTFGKIPRSLMALETGTHSPWVSRLLRELGYEVLVAHAQKVQLISKSNRKDDRHDARTLARLARIDPELLGPVRHRSAKAQIHLTVIRARAELVSARTALVNAARGLAKSYGERLRKCGTQQVSRELAAELSVELREVLEPLLQEVESLNEHIKEYDARMEKIARESYPQVELLKQVKGVGTQIALTFVLTLEDPHRFPKSREVGCFLGLRPGRRDSGGSQPQMHISKEGDPYLRTMLVQGAHYILGPFGQDSDLRRWGLKLAARGGKNAKKRAVIAVARKLAVLLHRLWVGGEVYEPLRNNHQAMRAVA

SEQ ID NO: 491272 - protein, 316 aa, unidentified
MESSAEVHVGIDISKASLDVGVHQTGAFCSLRNDPAGIRSLVARLRRLQPQLVLLEASGGYERRLLDALAAAGLPVALVNPRQLRDFARATGILAKTDKIDALVLARFAATVRPELRRLSDARERELSALQARRRQLIEMLTAEKNRLEKASPKVAREIRGHIRWLERRLEALDKELQELVRSSPDWRVKEQLLRGVPGIGPVLASTLLADLPELGTLNRRQIAALVGVAPLNRDSGVLRGKRSVWGGRSHVRAALFMNALVASRFNPVIKVFYQRLCAMGKPKKVALVACMRKLLTILNSMLRNQTSWNPAYAYP

SEQ ID NO: 491273 - protein, 406 aa, unidentified
MELTTIYKSVIGLDVHQAQITACAIIQEPDGTTRVEQRQFGAFKRDRRELAEWAASLKPDQVVMESTGIYWKSPYAALEAAGIQALVVNARHVKNVPGRKTDVGDAQWLATLARAGLLRGSFVPPVKLRELRLVTRQRQKLVGQLSAEKNRLHKLLTDSGIRLGVVVSDIHGQSARAMIKAIIAGQQPHEVLHLASRRLKATREELFDALQGELTDNHRFVLNEIMRHIEEIEARIARFDARLLEELKDEHNKLALLQTLPGVDLIGAAMLLVEIGTDMNAFGSADRLSSWVGICPGNNESAGKRKSGRVRKGNLYVRRLLCEFAHAASRTKSVFHSKFQALLVRRGYKRSIIAIAHKLLRTIYFMLSRGEHYRDSATDYEALSVQRNASRWIKKLKEFGFIPKPA

SEQ ID NO: 491274 - protein, 570 aa, unidentified
MIKNKNPYRGVWGDAGRHLRVFFIRAILYLATTLVAWEKSIMGNRRTRRKRKQHINKVQGQRLAAEFKGQDLSRVLVVAIDGAKKSHKALLADGFGEIITDTFGFPNDLAGAKMFAGSVRKAAVDINAFKIIVGLEPTGHYAENLVAYLLEQGFDVRQVNSFAVSREREAGLTWSKTDEIDLCAIGQLIINGKSSPLGHTEAIYDNMKYAARARRSTIQRTVLLESQIHAYMDRLFPGFLDRDLFSDPFGLTSMAFMARYSSANAACRAGATRIERWLSSRCGVSNPHEITQAVVELAQGALRRPADHEEALIEALRFRLREHDLLEEQIGNLNIRLAEYLVETPGIWLLAIDRVSVVSAAEYLGELGQISRYDGANQIIARAGMVPRETQSGMIAYSGGITKLGHPKLRYILGVIGHNLLTSNRYFQAFYNRLVDRGGKNERLAKTAVAGKFVRVSWAMMNLKGAFEAPTWCEDDLKKDIRTKMERFLKQFGASQIYRNSIGPRLDKVLVSGGQPSTSNSITGSHQLPSASGTHEEHDRASTKPIHIGSLIPVVLGQMAAEQDVEAHMA

SEQ ID NO: 491275 - protein, 351 aa, unidentified
MATSKRSIIGGVDTHTATHHAAAIDINGRLIADAGFPATPAGYVSMLTWMRGKGKLTQVGVEGTGAYGAGLARYLHDQGIEVLEVPRPDRRIRRQRGKSDPIDAEAAARTVLAGKASGAPKLADGPVEAIRMLRVARSGAVKARTAALNTLRSMVITAPEPLRSQLRTMSSAQLVTACARLRPDLTDLAEPVQAAKHALPLIALRVQHLNVETRSLRKQLDDLTQAAAPATSAVFGLGPDTVSALLLTVGDNPDRLRSEAAFAHLCGVAPIPASSGKTNRHRLHRGGDRAGNSALHIAAVVGLRYDPRSRAYADRRTAEGMSMPEIIRCQKRYLAREIFGALRADYAKLST

SEQ ID NO: 491276 - protein, 402 aa, unidentified
MNAVGIDVSKGKSMVAIMRPFGEIVSAPFEIKHTASDIHSLVELINSVEGESRIVMEHTGRYYEVLAHQLSKANLFVSAINPKLIKDFDNDSLRKVKSDKADAVKIARYALDKWQNLKQYNVMDELRNQLKTMNRQFGFYMKHKTAMKNNLIGILDQTYPGVNTYFDSPARSDGSQKWVDFASTYWHVDCVRKMSLNAFIDHYQNWCKRKKYNFSQSKAEEIYGKAKELVPVLPKDAITKLIIKQAVYQLNSASTTVESLRTLMNETASKLPEYPVVMAMKGVGTSLGPQLMAEIGNVSRFTHKSAITAFAGVDPGVNESGSYEQKSVPTSKRGSSDLRKTLFQVMDVLIKTHPQDDPVYQFLDKKRAQGKPYYVYMTAGANKFLRIYYGRVKEYLSSLPES

SEQ ID NO: 491277 - protein, 356 aa, unidentified
MSYDVKYIGMDVHKEAIVIAVLNGSGKLVMETILETKASSILQFIHGLRGELHVTWEEGTWAAWLYDLLQPQVQQVLVCNPRRNALLKEGSKSDKVDARKLAELLRTGMLRPVYHGENGLRTLRELGRSYQTISKDLTRVMNRVKAVYRGWGIPCAGTQVYVPRYREEWLSKIPQSGVRRRAELLYQQLDGLQALRREVRGEFLAESRKHKAAKLLRQIPCIGPIRAAGLIALMQTPHRFRSKRQLWTYSGLGIETHDSAQYRYVNGQLQRSKKPQQLRGLNRNHNHEMKEIFKSTATSASCGRGPFHDFYAALLDKGMEPEMARLTLARKIAAVTLTLWKKEERFDAEQLKTQAA

SEQ ID NO: 491278 - protein, 414 aa, unidentified
MTKFSVYIGIDWANDKHDVCVQVANSSARKFEVIKHSPKSINEWITSLHKQYKGQIAVAIELSKGPIVYSLQKFDFVTIHPVNTSMLAQYRKAFSPSGAKDYPTDAELALDLMLRYPNKIKALKMESESVRKLTYLVEQRRKLVDDKRRFSNRLIITLKEYYPHLLDWFSHRGSGIFCDFITRWPNLQKLKRARADTLKKFFGSYPGRTAAYSVKRIQSISEAEPLTLDNAVIESHQLLAVALANQLLVAVKVIKVFDKEISELFNALPDAELYKSLPGTGPCLAPRLLVAIGENRSRFNSASEIQMYAGVAPVTVRSGQKSWIHWRYQCSKFTRQSFIEWAAKSIRQSYWAEIYYQQQREKGNTHQAAVRSLAFKWIRIVYRCWKTKEPYNEAKYLKALSDRNSPLLFKEKAC

SEQ ID NO: 491279 - protein, 346 aa, unidentified
MEHYVGLDVSLKLTAICIVDRTGKIQREGVVHSDPEAIAAFIKSNAPHVARIGLETGATSTWLWTELNKLGLPVICIDARHAKAALKMQINKSDRNDAVGIARIMQCGWYKEVRVKDLDSHAVKALLVSRALLVKIKRDLENQVRGLLKNLGLVIGPAKMNVFALRAAELTKDRPELAVAVTPLLTARVAIEQQVADLDRKVMKLARNNAQARQFMTAPGIGPITALCFLATIDDPRRFKRSRSVGAYVGLTTRRFASGEIDWTGRISKCGDKMLRSYLYEAANVLLTRVAKWSALKAWGIRLAKRSGLRKAKVAVARKLAVILHRMWVDGTDFKWSSKETAKQAA

SEQ ID NO: 491280 - protein, 309 aa, unidentified
MNYYAALDVSLRSVHLCMIDDQGELIAETKLSSEVTDIIAYLDSLDLDVSIIGLEAGTLAQYLTYGLQSAGYEVVCMEARQVKAALSAMRNKTDKNDARGIAQLLRSGWYSPVHIKSMASHRIRLLLSSRKAVLTKCIDLENEIRGLLKVFGIKLPPKLGHGSFDPAVRDIIETDVVSQRLMSAPGVGFVTALTYKAGVDDPTRFKHSRTVAAHFGLTPRRFQSGEIDIEGHISRCGDRDVRSTLYTAANALMTRSSKWSSLKAWGMQVAKTRGHRRAVIAVARKLAIILHRIWVDDTQFQWGSEGARS

SEQ ID NO: 491281 - protein, 353 aa, unidentified
MNITTVGIDLAKDVITVYAQDAQGRCVMSRNFKFRELAEWLVQLPADCLVGMEACSTAHHWGRRMQAMCLQPRLMAAEFVQAFRKSKSTKNDHNDVEAIAIAVRQPTMRFVAIKNETQQSRLAWHRVREGWKEERTALINRCRGLLLEFGYPIARSSTAFGRGLKTCQHEETLPGNLRRLLAQIEAQLQQLDHQLALCDREIAQSARDDEAAKRLQAVVGVGMITADAVSASIGNAHDFKNGRQFAAWIGLTPRQYSSGGKTKLGRITRRGDSYLRSLLVQGARSTLQAALKKPPEQLNRLQQWIIRLYGRVGYHKTLVAIANKHARQLWAMLAKGETYDLNAWQKHAIGEMS

SEQ ID NO: 491282 - protein, 315 aa, unidentified
MTQIYCGVDVSKAWLDSYVPTGASAGAFKRFENTAEGIGALRCFASQHGADVIVMEASGGVERLAYSLLWEAGQACALTNPRNVRDYAKSMGFFEKTDRIDARVIAEYAQAKKLVPTSPPSPAQRRLKALYARLQQVTSDIVTQKLRLHTADENFAREGIHELLGVLKRQSQKLCGEIASMIDDDPLWQALAQAFSQYKGVADRTVAVLMANLPEIGLISNRAISKLVGVAPLADDSGKRTGKRSIRGGRASIRNVLFLIAGHLAKHEPDFTAFHARLTQKGKPKMQIRIALAHKLIVRLNAKARDIRVEMQITA

SEQ ID NO: 491283 - protein, 362 aa, unidentified
MKHVIAFDVSMGKSYMVIYNALKHCVFEGEINHYRTEFEELKKKIDDLTEGYGEQPEIVFEATGVYSRVLERFMNENYYTYCLLNPLEAKLQCDSLRIHKTDKSDAHRLALTHFTIDRRKKEGSNDLLQQLKSLSRYYSELDDELSIVRSRMHKVIQLTFPELEKIFTSKSELFLNMVQLFPHPEFFQGLSKTVIKNKVRKNTNKNISLAVAERKALDLFEAAKHSYPAVSSTDVLCEQLRSYARRYQELLREKEQCIKNMIPLAETRKEYKIILSFPGIGPNTAVRLIAEIGDIHRFDNPKQLNAFAGIDIRRFQSGKTFFKDKINKRGNKHLRKLLFLIIQNMIRLRRFGQKHLSSIMIN

SEQ ID NO: 491284 - protein, 336 aa, unidentified
MDSSTAIVGIDVGKKKLDVALLVNGKIKSKVIDNSAAGHQVLLEWLDKTKLPKAALRVCMEATGVYFEEVATTLHDAGLAVSVVNPGCIKGFGQSENLRNKTDKADAALIARYCAAMAPATWAPAPLEQRQLRAWSQRILALKDMRQQERNRLESYEASGMGEVAEHARLLIAWFDTEIKQLEDDVDDHIDRHPGLKHDAQLITSIPGIGNTTAARILGQLGDIRRFGNAKALAAFLGVTPRQRSSGTSLRGRTTISRKGSTSMRAALYMPGMVASRHNPLLHQFAQRLANNGMAKKAVIGAVMHKLVHLIYGVIRTGKPFDANYLSKGLAIQDGI

SEQ ID NO: 491285 - protein, 352 aa, unidentified
MNDTRSSKRFIGIDLAKDHCDVACYDWRGKCVQEWARISYPELFEKLAQLPPALVLMEACNGAHDKARRIADLGHDSRLVNAADVKALRHGRHKNDLRDARYIAQLAFLPDVRFVRVKTSDQQDRQLAMNEYKQIQSVRIQIGNQIHSALEQYGIPSRESMDRLVGHLVDYLDERAEKITPTLREFVLRQLERWKRMKQEENEAKARIEENTKQDEVSKRLMTIPGIGCIIANLLIVHFGDPHRFRNSGQAAASIGLVPRQYSTGGRDTLLHISKRGPSLLRRSLAQGANTLYIWAEKLKGNLGIWVRKLKASGKKFGVIICAIAAKLARICWRIMRDGTEYNPNWSIEHRN

SEQ ID NO: 491286 - protein, 410 aa, unidentified
MSKIFVGIDVDLRKNTIHCMAPSGDTLKKFKVPNTFDGALALVDNIVELSARHSMQEVVLGLEATSNYGYHLAAFFKNSEKLAPLSPKIHILNAKAVHNFKKSYSDLPKNDDVDAWVIADKLRFGRLPQEVFMDERFLALQRLTRTRFHLVNTIKREKTYFLNNLFLKFSSLRQEKIFSNNFGATAMAVVEEFLSPDEIAAMPLEELVSFLEQKSKNRLVDAEGMAKALQKAARSSYRLSKSLADPVNACLASSISVVKALQSEVKKLDKLIEEHMKAIPQTLTSVKGIGPVYSAGILAEVGDVMRFKNHKSLAKFAGLVWNEQQSGEWKAEDIKRVRSGNKYLRYYLVEAANLIRVHDREYAEFYRAKYDEAHTHKHKRALVLTARKLVRLVYALLRTNQLYTPRKRGD

SEQ ID NO: 491287 - protein, 406 aa, unidentified
MNRFFAGLDWAAQAHALCVIDEHGAVRDRFEVTHDAAGLRELLGKLRGIARDAAQLAIAIERPSGVLVDTLVEAGYPVVPIHPNVVKATRPRYRSHGAKSDASDAYLLADLLRTDGARFEPLKPQSDAIRALRALVRGRDDLVATRLQLANQLRSLLESFWPGAAVIFADIDSPIALAFIQRYPTPQAASHLGEKRLAAFLAQQRYSGRRTPAELLERLRAAPGAHSGELELEAKGELVRALARTLEPLVAQIAELSARIEHTIVELPDGHIVMSLPRAGRLCAAQILAELGDVRERYPTDDQLAAEAGVCPVTYESGKHRSVTFRWACNHRLRRAVTCLADNSRHACPWAASRYAAARRRGCDHPHAVRILARAWVRVLWRLWTDRCVYDPAQHRAALAFNALRG

SEQ ID NO: 491288 - protein, 362 aa, unidentified
MTAQPIVAHCHPFVVGVDTHSRNHVYAIIDSSNGALLDTQSFPVTSSGINRAISWVARRTEGNADTLWIIEGAATYGAILAGTVAAHGFPVSEAPRMSKKQNRGVGKTDVLDAHRMAMASLPLPVDKLRHPRLNEGIRQGLRILVTARSSMAKDRTRSVNALNALIRSNGLGIDARKKLIGSQIAEISRWRDREEELSLRIARSEAVRLAKHVLDLDQQLAANEQQLDELVKVSVAAPLLDEVGFKAITVAKCFVAWSHDGRVRNEAAFACLAGVNPIPASSGNTTRYRLNRGGDRSLNAALHIAAVTRMAHDEETRVYVEKRQAEGKTDREIRRCIKRYLARRIFRIFSASKMIEEVPVAA

SEQ ID NO: 491289 - protein, 333 aa, unidentified
MHARRSVICRIDDAGKELSCKQVDNDPKVLVREVRRAGRGVPVAIEATYGWYWAVDALQAAGCQVHLAHPYGMTAMRKRKRVKTDAKDAYELANLLRLGSLPEAYIARPELRELRELVRHRQRLTQANTAVKAGIRGVLAKHNIHLPVSDLESALGTRLLDQVSLMPAYAHRLDSQRRQMLLLEAEIGATEVELDKRLKHQPGYRNLQKIKGIGPVLAAVLFAEIGDVTRFDGPDQLACWAGLTPRHYASDRTTRRGHISKEGSALVRWAVVEAVQRPCEPSVRALRERILARRGPGGRNIAKVAAAHRMLDIVSYTLRDGTSRAFQDTRNAA

SEQ ID NO: 491290 - protein, 430 aa, unidentified
MKSNTQNAKIEAITEKTLVLGIDVGSETHYARAFDYRGIEYSKKPFKFSNTEAGFVTFKEWILDLKERHEKDKVVPGMEPTGHYWFNLGKFLQDNEMKPVLVNPHHVKKSKELDDNNPTKNDRKDPKVIAGLVREGRYMIPYLPDGVYADLRTASNIRFQLQAELTRIQNRISRWFNIYFPEYKTVYGKPDAKSGMLILKAAPLPEDILTLGIDGVNQIWRDAKLRAVGRARAKTLIEAAEHSVGSKEGAMSARMEIRMLLEDYESRNTRLQEVMVLIEELVRKIPMAEKLLEIKGVGIRTVSGFLAEVGDISRFNNPKELQKLAGLALVENSSGKHKGETTISRRGRKRLRYLLFEVAMSLVSKNQEFRELHNYYTTRRLNPLKKMQSLMAIAAKLIRVFYAMLTKGVDYDPKKMVSDIKRPAVYLQAA

SEQ ID NO: 491291 - protein, 387 aa, unidentified
MARKRTLSTLDTSIAYEAVGLDLAKEDTAIAAFGPDHEGPYLIDRMPYDKLYELLADMAPTLVAMEPCSGAHQIAEQIQELGHEVIMISGRHVQAWVKDHCNGQKTDLNDAFAILNLAYDRWLTPIRGKTREECRLLALQASYRQLKGQRTKTMVHVKATLHAWGFPIRAGSFNQKVLHELIDANREAFGDEVAETLHLMINRVRDLDHDIATVLKLLTEATKRDPRASLLRSIPGFGVLTTSRWCAVIGDIARFDSPKQTMAFIGLVPNNRITGHHTETSSGREARGQGRMSKRGDKMLRSLCIMGAGSLCLMVRNDRLPDCPFVASIKERLASPRPWFKVLVYVAAKLVRIATALLKYGETFSYEKAGISKAVLKQWELEQAKAA

SEQ ID NO: 491292 - protein, 413 aa, unidentified
MDNETIDFEQVVAKGCGLDVHKETVVATVSGTGIKRETRTFSTFTRSLKELKEWILSLGITHVAMESTGIYWKPVFNILEDSGLTILIVNARHIKYVPGHKTDKKDSAWISKLLLAGLLKGSFVPPVEIRQLRDMTRYRRKLQGAITAEKNRMIKMLEDSNMKLSTVLSKVHGVSGTRIVDALLEGQTDPEYLASLCHGKVKAEQEDIILALEGNLTEHHKFMIRIIRQDIRQTESLIKELDVEIEKQLLPYAQEIALLSQIPGVGEQTAGELISEIGVDMEVFATEKHISSWAGVSPGNNESAGKKKSGRTTHGNKQVKAILTESAWAASRTKDTFLSSKYKKLVGKRGKKRAVVAVAHAILVIAYHLIKEKTNFIELGANHVDEKKREAQLKYYQKRIEELGAEKPETQST

SEQ ID NO: 491293 - protein, 333 aa, unidentified
MKFHKQCVGIDISKDKFDCCLSVSDENGLIRILGEKHFKNNLDGFNQLIDWITQKQVSAIEVVIVMEATGVYYENLSYFLCDHTQFKVCVLLPMRAKYYFKSLELKTKTDKVDAKMLSQLGLERVIKRWQPMSSKMKTIKSLSREYRDNKKEINRLKNQLHAKLHSYKISPQIIKRLKQKIDLVEDHCLAIELELKALVRQDAYLGDKIEKLVSIPGIRFMSVIAIIAETNGFILIRNAKQLTSYAGLDIVHNNSGNKTGKSRISKRGNKYIRQALYMPALSASQHINHLNKFYQRINEKNKCKKIGLVGVSRKLLILVYTLWKNDEYYRITA

SEQ ID NO: 491294 - protein, 360 aa, unidentified
MTVVGIDAHKNWHTLVAVDDVGKRIAVLTVEARAEGHRKIVSWLEQFDDVQVAVEDCRHLTRRLEADLLDAGHKVVRVHTRLMAGMRRSGREPGKSDPIDAEAVARVALREDDLPTAELPGPAREIKLLSDHRRSLVARRTAMQSKVRWFLHEIDPDLHVPSRGLRRYQLLDDLIGVLENHAGAVAEIARDLLEDIRSLTRRINEIESRLTRLVRARHPRLLEVPGLGVLGAAMIVGETAGARRFKSKDAFARFNGTAPIPVWSGNNVRVRLSRGGNRRINTALHMAAVTQLRLGAEGAAYYDKLIAAGKTRTEALRLLRRRISDRVFAAMRSDEPQASLAPEATSSTSSNEITGLRAAA

SEQ ID NO: 491295 - protein, 453 aa, unidentified
MAKPKKRKYRKLNRSLPTMRPNAGGIDIGATEIFVAVPVDSDTESVRSFPTFTQDLHALADWLQQCRVDTVAMESTSVYWIPLFQILEARGIDVHLVNAQHVHHVPGRKSDVLDCQWLQYLHSVGLLKASFRPEHAVCEIRSLMRHRENLVQMACVHVQHMHKSLDQMNLQIQHVISDITGVTGLAILDAIVAGNTNPKELAKLRDYRIKAPIETIIKSLVGDYRREHIFTLKQSLTAYRHYQQFIADCDQEVQHRVQTFKTKDDGPSATADSADSSDASTPAVSGFDLHSHLERIFGVDLTPLPGFDVLRIQTIFSELGANLSQFRSDHSFCCWLNLCPKDGSSAGRRIRGPKVKTKNRVTHAFRMAAQSLHNNKSYLGDYYRSQRARHGAPKAIKNAAHKLARIFYHLVTTRQPYDETVFAKLEARNQKRRLIKLQSQARQMGYSLVEVRA

SEQ ID NO: 491296 - protein, 341 aa, unidentified
MSNYSYFCGIDLAKNHFSLHAVDQNGKVILHKSVTRSKLLTTIANMPVMRIGVEACGGAHYWARTLNKLGHDARIMAVKYVVPYRTKGKNDLNDAAAICEAVQRPSTRFVPVKSPEQQAILSIHRMREHWVRERTALMNRMRALLSEFGLIIPVGRSSLMKQVPLMLEDAENELPHLARTVIADAYHHLDELNQRIADTEQVFDSFAKVSTNVQRVMKVRGIGPQTATAILASIGNGTQFDKSRDFSAWLGLVPKQYSTGGKPRLGRITKHGDKYLRTLLVHGARTVIANLGDKQDKLSQWCRGVLERRGMNRAIVALAAKNARIIWSLLHNQTEYENYAA

SEQ ID NO: 491297 - protein, 387 aa, unidentified
MIAHYIDEKFQKEFTIQNNKNGYNYLLNYLNRVNQPKLIFESTGIYSRAMVRFCRVNQINYIKLNPLEAKFKTSSLRSWKTDQSDAHKLAQIAPFLNDSDSLNNTNDDIYFELRERARFHLEFENEQNRLKVEIIEILHQTFPGLEKLFKNRYSMIALNIAEIFTHPDFVQQNDMESIISTILKSTDKGLSQRKAESYGETLFKLANDSYPNVNSSSFLVKKAQLLIQKLKKSIGQLSQLDKEMIQLAQELDCFEIIYSIPGIGDLTAAMIIGELGDISRFKSNKQLNAFVGIDIKRYQSGGTHYRDTINKRGNKKARRLLFLVIMNIIRGQHRYNNHIVDYYYKLRKQPNEKSHKTAVVACINRLLKTFHYLIMKHKLYDYEMSPH

SEQ ID NO: 491298 - protein, 476 aa, unidentified
MLVATSTTADENGLAPVGDQMSYVIGAPSPSRNLTPATFRHHGLSPHMSGSTRTNIFEAWVACQPVVSLGGDAMEVVYERCCGLDVHKKTVVACVMTPDAQETRTFGTMTKDLLMLADWLAEHGVTHVAMESTGVYWQPVYNLLEEDFTLLVVNAYHIKAVPGRKTDVKDAAWIADLLRHGLMHGSYIPDRPQRESRELLRYRRNLIRQRAQVVNRIQKVLEGANIKLSSVASNVVGVSGRAMLEAMVEGSEDPQGLAAMAKGSLRNKRPALEEALRGLMGSHQRMMLQSQLRHLDFLDAEIATLNEEVISRMRPFGEAVQRLDGIPGVGLRTAEDVLAEIGVDMTRFPTAAHLSSWAKMCPGNNESGGKRKSGRAGRGNPWLRAALVQAAWAAVATKDTYFRAQYHRLAPRRGSKRAIFAVAHSMLVTIYFMLRDGTSYQDLGGNYFDERSRHITVRRAAQRIERLGYKVTLEAA

SEQ ID NO: 491299 - protein, 436 aa, unidentified
MKKHLPILDVKAAFVDVGSEHMHVSVGGDEPKVFGSVTSQLHALRDWLLAQDVRSVAMEATGVYWLPLYGVLEAAGLDVRMVNGRQTRNAPGRKTDMQDAQWGATLHMHGLLRAGFVPTADIRRLQDYLRLRADHVGQAGSCVQLMQKALERMNVKLHDAISSLAGASGMAVMRAIVAGERDPAVLLALCDVQIRRAKAELVKETLRGTWSAEHIFALEQALQSWDHYQRLIAECDLRIQAVLPAHDPTLPPLAGPAKRGGANAPEIAMLREILAKMCSGRDLTRLPAHTPYGVLQIIGETGTDLSKWATEKHFTAWCGLAPGSNDSGKRHGRVKRSRNRVGRLFCMLASSLARSKTIALGAFYRRLAGRRGKAVANKALARKLAAWFWRVMVKGDDYVEKGIADYEAQVRKGKERALRRLAGELGQRLMPAESSA

SEQ ID NO: 491300 - protein, 361 aa, unidentified
MFTERTSVGLDVHARSVVAAAIDGVTGEVFRARLTPNNEQVVGWVRSLPGPSVATYEAGPTGFGLARAMAAAQIRCVVAAPSKIRRSAGDRVKTDARDAMLLARLLRMDEIVAVTVPSVEQEDARDLVRAREDVRGDLMRSRHRVSKLLLRQGIVYCGGHAWTGAHLVWLRAQHFDTPGLALAFDAEYEAVLAAEARRDRLDEAIAAMAADSQFTPVVHRLGCLRGISTLTSFGLAVEIGDWDRLTGASIGAYVGLVPTESSSGQSRSQGSITKTGNTHARRLLVEAAWHHHKAYRTPGATMRARWELAPAAARARGHAGNRRLHERWLQFTERKKRPVVANVAIARELAGWCWSLAVMDP

SEQ ID NO: 491301 - protein, 459 aa, unidentified
MRKKTSNPKERKKKVSVNQAWPLINAHAAGIDLGSREHWVAVPEECAEPNVRCFGTFTTDLAALADWLKKCGVTSVAMEATGVYWIPLFQLLERRGFAVLLVNARQIKNVSGRKSDVLDCQWIQRLHAYGLLGASFRPADPYCVVRAYLRYRDELVAARSTQTQHMQKALQQMNLQLTQVLSDINGESGLAIIEAVIHGERNPLKLAALANRRVHASRDQIAKALVGDYRVEYLFQLQTAFELYHTYEAKISRCDEELGRQMEQLPDRVDLKVKPLPAKKSGKNLDENLRQVLYLKLGVDLTAIEGIGALVALTVLTEVGPDLSRFKTEKHFTSWLGLCPDNRISGGKVLSCRTRRVVNRLSDALRLSATTLERSPTALGAYYRRMKAKLGAAEGVTAMAHKLARILYRLLKHGEEYVRQGLEEYEQKHRERKLKQLQKSAESFGFQLIRKETLPEVVS

SEQ ID NO: 491302 - protein, 391 aa, unidentified
MYVVGIDCSKYKHDCFIATEAGEVIRDTFTFDNSGTGFTQFFSILEALNCPKSEIKVGFESTSHYMVPLMKHLSVKGYEFILLNPVIVSRFRKSTTLRRIKTDKIDAKTIAQVLASSDYESYHMQVYHFPELKSLTRLRDRLIKQRSYYLVMLTNVLDEVFPEFKEFFDGSLKSKTAFYLLDTYKIPSRIANMNSNSFDNLKKVSHGHFSYAKFIKIKELAKNTIGSSSEADELEISSLLNIYKTINDEICRVESKIEEIMTILDSPTVSIPGVGLMSAASIIAEFGDLSRFANADKMLAYAGLDCGRSQSGTADYKGKMVKHGSSYLRQALMNVTEMMMIHAPVFYDFYHKKRDEGKPHRVALSHLARKLVRLIYKLETSHTRFDLTNSK

SEQ ID NO: 491303 - protein, 353 aa, unidentified
MSQVTTIGLDIAKSIFQVHGVDAAGRSVLRQRLSRRRVLEFFGKLPRCLVGLEACASSHYWARELMALGHEVKLMPAQYVKPYVKRGKNDVADAEAICEAVTRPTMRFVAVKTPEQQSIMMLHRVRLILMRQRTQLSNALRSHLAEFGIVSPIGREGLDRLLTIVADTDDGRVPAEARASLEMLAVQLAGVKAQILANDRRVIASARATEVGRRLLEVPGIGPVLASAFVASVADPAIFKSGRDLAAWIGLVPRQNSSGGKERLGRITKAGNRYLRQMLMVGAIAVIRYAQRNSARRPWLVQLMGRRPTKVAAIALANKTARTVWALMSSGERYRDPQAIQAAVLANGIETPH

SEQ ID NO: 491304 - protein, 349 aa, unidentified
MLIIGCDYHPGFQQVAIFDKQTGEIRQRRLAHPQEAIEFYRGLPAEVLVGIESTGFSGWFERLLGELGHQVWMGDATQIRASMTRQQKTDKRDAEHIVKLLVEGRFPRIWVPSAADRDARQLLVNRHKLVQWQTQVKNQLQFLALNQGLQLKWRLWTRSGRQKLEALPLGPYAGQRRATLLELLDQLEQQIAGLDTAVLGEAQARPEAVRLMTHPGVGPVISLAFVVTLGPVERFAGARQVASYFGLIPRERSSGGKQRLGGISKQGNSFVRYLLVQGGHSAARLDPELKRFYGHCKHSHAHAGVAKVAVARKLAVRLYCMLRDGIDYAELRHRRRSHAGEPESYCGRK

SEQ ID NO: 491305 - protein, 371 aa, unidentified
MASNGITWVGLDAHQKSIHVAALIPGRREALVWQEANEDGSVRRLARRLNRETPGEVRACYEAGPLGYGLQRELEAQGVVCEVIAPSLIPSRPGDRVKTDRRDALKLAELLSAGLLTAVQPPNEADEALRDVCRGRECVRQDLARSRQRMGTFLLRRGYRYRETQRHWGVRHMKWLRTLRFEAAAAQATFDHYLLSLDHHEERLRQMDGHLEIFGAQEPYHEPVAWLRCFRGIDTVTAVRLVAELHDFRRFRSARALMAYLGLVPSERSSGEQRHRGAITRAGNSHVRRLLVEAAWHHRLRPVLSQPLRRRRAGQPVEVIAVADRAQERLHARFVRMTRRGIHHNKIVVARARELVGFLWVALYPRAAARL

SEQ ID NO: 491306 - protein, 362 aa, unidentified
MEWFCGLDVGMDESAICVVDDKGAVALQTTAVTDPEAIKAALRPYLARLRRLGHEAGSLSPWLHPELLKLGLPAVCLETLHVRAALNAQRNKTDKTDALGIAHIMRTGWFRKAHIKSEACYRLRLLLTHRRNLKRKFLDLENAIRHSLKAFGIRLNRVGRGGFAQAVRDAVAQDALVSELIDAMLNARAALWKEYCRLHNLVVKLVAGHALCRRFMQIPGVGPIAALSFMTAIDDPSRFRRSRDVAAYFGLTSRRWQSGASIDIQGRISKAGDADVRRTLYEAASALLTRYKKKDKVRSWGLALAKRTSHRKATVAVARKLAVIMHAMWVDGTFYCGDPDAAKADVSARAAVKERRLLATLA

SEQ ID NO: 491307 - protein, 373 aa, unidentified
MDEDTIFVGLDVHSASISVAIAEPGRGEVRTLGMIPNTSDAVVKLIKRLGPAPRLSFCYEAGPCGYGLHRHLTRLGAACMVVAPSLVPQKPGERIKTDRRDALNLARSLRRGDLTAVWVPDEAHEALRDLSRARSDARIDLLRHRNQLSKFLLRQTILPTKRLRRWGKMHRAWLQTLHLPHANHQVVLQDYLQTVEHAENRLANLEAELALAADQSPLAPLIAALQAFRGIALTTAIILIAELGDLRRFPSPRHLMGYTGLVSTEDSSGDRRHRGQITKTGNAYVRHVLVEAAWQYTRPPKVWGALKKRQLGLPPATLAISWKAQQRLYRRFRRLTHRGKLRHVAVVAIARELAGFLWAAARAVPVPVQKVAA

SEQ ID NO: 491308 - protein, 340 aa, unidentified
MAEVNTIGLDIAKQAFQAHGSDALGNVMFRKKIVRAKVMAFFASQPRCVVALEACGGAHFWGREIGKLGHTVRLIPPIYVKPFVKRQKNDAADAEAICEAAQRPSMRFVAVKDEAQQASGVVFRARDVLVRQQTQCINALRGHLTEYGYVASKGPTHVATLIDQIEDPNCGLPESALAVFKVLIATLRSLEENIAVLDVEIKRRSKENAIARRLMTIPGVGPITATAVLALAPAAETFKTGRDFAAWLGLTPLQRSTGGKQRLGATSKRGERTIRRLLILGGSAVVRHACAKGAAAGSWLAQMLARKPRMLVTVALANKTARIIWALLVKGERYRAPVVA

SEQ ID NO: 491309 - protein, 402 aa, unidentified
MKHTVGLDWAKEVHAVCVVDARGEVVDRLEARHDRQGLAELIRRLKRYGEPAKLPIAIERPSGLLVDTLVEAGFVIVPIHPNIVKACRSRYSTVRAKSDPGDAYLLADLLRTDGHRFEPLRPASDEVRALRTMVRGRDDLVAERVALANQLRALLDDYWPGAVAIFTDIDSPIALEFIERYPTPESAQRLDARGLGRFLTKHRYSGRRSPAELLSRLREAPEGRVGAAEAQAKSFVALRLVRALRALVTGLKDLTKAVEHAVAELPAGRVIMSFPRAGRVNAAQILAELGDDPARFPEEEGLAAQAGVAPATYASGKKRGVAFRWAANKRLRHAVTTFADNSRHSSDWARGVYRSARDRGCEHPHAVRILARAWIRVLWRCWTDGVPYDPEKHLSAKALAAA

SEQ ID NO: 491310 - protein, 310 aa, unidentified
MQDTVGIDISKPILDGFRLATGEHRQFPNDKAGCAALIRWIGKTPIRIVFEPTGPYHRLLEQSLTKAGIAIIKVNPRYARRFAEATGELAKTDRIDAMLLARMAAVLDLQARPARSELQHDLRELSVARKALIKDRIAARNRDQVAQNAIIRRQLKARLVQIDRQIGEIETAMATIVEGNETFRRRREILASIPGIGPVTAMAIIVEMPELGDLDGKQVASLAGLAPITRESGSWKGRSRIQGGRASLRCGLYMPALVALRINPDLRRKYRALKEAGKPSKVAIAAIMRKLIVLANALIRDNRKWSPNAT

SEQ ID NO: 491311 - protein, 341 aa, unidentified
MKSKFPTDRYFRQCVGIDVSKSKFTACMCMLSWGCPAQFTGSVEFPNTKTGFNQLVRWARREAEDGHPLLFLMEPTGTYHEDLAYHLHKLSFTVHVIPSGRVHAFFKEEGIKTKTDSVDAGGLALMGSSKPCLKEWNPPCPAYRELRQLTRLQFHFKDIRTMLANHREALSHQHAPSTDAISQIDALIKSVDLRIEKNKASIEELAGNNREISEKLAYIQSIKGLGLLAAITILAETDGFANISGRSQLASFAGLDVVARDSGKNTPARHISKAGNTHLRRIVYVCSLSATVYNPQMRALYLRISQRNPSRVARVAVMRKLLLLAYTLCKSKQMYDPEKLK

SEQ ID NO: 491312 - protein, 326 aa, unidentified
MTLSFSLDNRFIGIDVGGASLDVAWHRGDSAHYANRPDAIAALVRRLRTQPEITRIVVEPTGGYEKTLVKALRQAQLPVEIIHTSRFTAYRALVGVKAKSDTSDARLLASYAAAPDEVRGRKAGHVELPEDAIREALSELASRRDQLKHMIHAETCRLGTVRMAELRQAITTHLETLKAEDKQVHQMMLALVRQRLDLRRDQCLLKTIKGIGPKSALAFLASVPELGRIDNKAAAALIGVAPFVRKSGTMSAPARIHGGRAAVRSILYMAAVTASRHNPVLRPFYERLIANGKPPKLALIAVLRRLVVFANVVLRSGQPWRGASAT

SEQ ID NO: 491313 - protein, 371 aa, unidentified
MTEAVKYVGLDVHKETIAVAVADGERGGEVRFVGTVANEDDAIRKLVKRLTGPGVTLNVCYEAGPCGYGLHRLLTKLGQNCIVIAPSMMPRRPGDHVKTDRRDAMTLARLLRAGELTAIWIPDEAHEAVRDLIRARRSAQDDAIGAKQTVRSFLLRHDRRFGGKAAWTKMYWRWLSEQRFDFPHQQLAFEEMQKRVLEAQARVARLEAALAEAVDAWCFAPLVRNLQVLRGIRLVSAATLVAEVGDLTRFDNPKQLMAYVGLVPSEHSSGAKTKRGRITRAGNAQARTMLIEAGWSYRLSAREERRYRERVIDLPEDIQAIGWKAQVRLCQRYRRLAATGKPQPKVTTAIARELVGYAWDIARRVSPAIAG

SEQ ID NO: 491314 - protein, 425 aa, unidentified
MPTSTLFVGIDVSERSNQVCAINFNQDKFFNKSFPNSPAGCESIIQKLTDIMKSHDDLKKIAICLESTGVFHFHVANFLAKDDRLLKFSCKTYPMNAKSIAVYKESYIELEKHDPGDAFICADFVRVGRCKNSQSARDYQKFALQRLTRQRKTVAELIANEKKRALNNLFLKYSDLVVNSTDESYFNNTFSHTLMHVLTDYLTTEDIVNADYDELIDKICSYSRNRISDSEAVAKAIKKMARDSYRLDKVAADALNVTLASQFRLIETYKAEMRILDKEIERLIKGFKDNYFKILMSIPGFGIVCSAGIIAEIEDISLFKDDAHLAAYCGHRWKRKQSGDKESEHTRQPGASNTYLRYYITEATAHLVKYNHDYAAFFHKKYNEVPKNQYKRALVLTTRKCIRLVFGLLRRNQLFDSNHLDSRSV

SEQ ID NO: 491315 - protein, 405 aa, unidentified
MDIIVERGAGFDVHKHSVVTCIMGTGIKKEIRTYSTMTNDLLRLKAWLKEKEITHVAMESTGVYWKPIFNILEDAFEVILVNARHVKNVPGRKTDVQDSEWLCKLLRSGLMRGSFIPPKPVRELRDLTRYKRKLIQTITAEKQRVEKILEDANIKLSSIASDTFGKSGARIIQELLKGELRPDQMAELSKGKLRRRKEELKEALVGNVEEHHKRMIRTSLEHIDAMEEILLRVEQKIQEKIELHFKEAFELLKTIPPIKDAASVIIAEMGVNMDLFPTEGHLSSWAGMSPGNNESAGKKKSGATTHGNLYLKTILTEFAWIASRMKGTYLWSKYQSLIGRKGKKKALVAVGHKILISCYQVLKYKVPYKELGANYLTERKRDRIARSYIKRLSNLGYAVTLKEVA

SEQ ID NO: 491316 - protein, 343 aa, unidentified
MKLIRVGIDLAKNVFQVHGLDRNEKAVWRRKLTRENWLKVLLETVEPGCEIGMESCGGAHHWARRLQAHGFKVRMIAPQFVKPYVKSNKNDANDAEAICEAMSRRHMRFVAVKTVEQQDIQAVHRVRAELTKQRTAKANQIRGLVAEYGLVAPKELEHLRRALPCWLEDVENGLSERFRRLLNGLWGDLRTLDARMAELDREIAVIAQSDPVTKRLQQLRGVGPITATALVAAVGNGEQFANGRQMSAAFGLTPSQHSSGGKERLLGISKRGDAYLRVLLIHGARSVIRTSKDKDDRLSQWVTRLAARSHPNIAAAALANKTTRMAWAMLKNGTDYQPAIATS

SEQ ID NO: 491317 - protein, 353 aa, unidentified
MMAADVPLQVYGGVDTHKDVHVAAVTDHAGRVLGTASFPVTPDGYAGLLDWLNGHGELARAGVEGTGSYGAGLARYLAARGVRVLEVNRPDRQRRRRHGKSDPVDAVAAAMTALRDDGDAGTPKTQDGPAAALQALRAARRGAVKARTQAMNQLKALIITAPDQVRARLGGQRRKPLAAACAALAGQDAPGPDAGTVTALASIGRRWLDLDAETARLEDAMTPLVTAAAPGLPEDTLGAGPQSAAALIITAGDNPGRVRRESGFAAMCGVSPVDCSSGKQQRHRLNRGGDRQANSALWRIAQSRIQHDPRTQAYLDKRTAEGKTRKEAVRCLKRYIARQYWKAHIRPAITTTG

SEQ ID NO: 491318 - protein, 343 aa, unidentified
MTKITTVGLDLAKLVFQVHGADEDGRPVVRKKLRRGQVLGFFAELSPCLIGLEACASAHYWARELQALGHEVRLIPPHYVKPFVKTNKNDASDAEAICEALIRPTMRFASIKSAEQQSVLMLHRARELLVRQRTMLINALRGHCGELGIVVAQGASRVAELIAIIEDQEDDRIPALAREALGYLVGQLRMVQAQVLGLEKKLKTWHRANEASRRLETFPGIGVITATALVATIGDASQFRSGRQLAAWLGLVPRQHSSGGKERLGRISKRGDGYLRKLLVHGARTVLLWSRRKKETRSLWLEALLARRPTNVVLVAMANKTARVVWALLSRGEAFRPVPQLAA

SEQ ID NO: 491319 - protein, 423 aa, unidentified
MPYRIAGIDVHKKKLAVVMADVEVEDEFQFERRWFGSNPEQLRQLSEWLAGQQVEEAVMESTAQYWKPVWGALERYWKPACQSREGAGPKSGILHLAQALSNRGRRGRKNDFRDAERLVKRLLSQELILSFVPDAEQRLWRTLTRTRYQRTRDRVRLQNQLESLLEEAHIKLSSLVSDMLGVSARRMLQALADGETDPAALAALAHQRLRATPEQLQDALGACTELNPVYCRLMKMALADLKFIEEQISQLDREIAALLGEYQDAVRRLAEIPGLGVESAQQIMAEVGAKAATFAAAKNLVSWVGACPGEEESAGVNRSKRSPKGNRHMRRILNQCANAAVRHKGSIFEILYRRLVPRLGHNKTIGAIVHRLCNLIWLILHRGLRYEEHGPAVSEQSRRTRTQRMIRTLRNLGYRVEPLEVPA

SEQ ID NO: 491320 - protein, 409 aa, unidentified
MQIIGLDIHRTFAEAVAWDDGKLKRLGRVDMRRHLLEAFAKKLTKEDVVVVEATGNASSVAAVIAPHVKKVVIANPKQVRIIAHAKIKTDTIDAGVLAQLYASGFLPEVWIPDEPTQALRRQVTRRNQIVRQRSRLKNIIQSILHSHLIPSCPHADLCGASGRAWLFHQVLPEDERLAVERHLREFDRLGEDLKVIERDLARSALGDEGVKRLMTIPGVDMVVALATVAAIGAVTRFDRPQKLVSYLGLNPSVRQSGPGPAYHGRITKQGRGHARGMLVEAAWAAARASGPLRAFFLRVRARRGQHVAAVATARKLAVIIWHLLSKGESYAWARPSLHAKKLRDLELKAGYKAERGHKGAARAYNIKSHRDQERQWVEQAETAYARFVAGWNPRGPKRARTGAATEVRR

SEQ ID NO: 491321 - protein, 354 aa, unidentified
MKKLSRMSSMLTIGLDLADVWSDWVAVDADGVVAARERVRTSEPQLRRVFGHLSASVIALEVGTHSAWVSRLLESCGHTVIVANARRVALIHRNKRKNNRIDAELLARLARADRKLLFPITHRSKRSQTDLSLLRTRDVLVRTRTKLINHVRGASKSFGVALPKCSSESFATRARASVPKVAAALAMVLDQISTLTEQVRELDRSIDAMLKRHPAARRLTQITGVGALTALAYVLTIEDPARIVRSRSAGAFFGLVPGSADSGEKHEPMKITKEGDGFCRRLLVNAAHYIVGHFGPDSDLRRHGEAIAARGGKNARKRAVVAVARKLAVLMHHLWSTGADYIALYHSADQPAAA

SEQ ID NO: 491322 - protein, 281 aa, unidentified
MGTGEDEKEARRCMSPRLPTFAKNKGAKVGQPAILDFIQGLRGTLHLTFEEGTHSAWLYDLLARRVARVVVCNPRQNALLKAGNKSDRSDARKLAELLRAGLLSPVYHGESSTRTLQELVRSYAALTEDTTRVMGRVKALYRSQAIACAGKKPYGRRHRPEWLSKLSQPGLHRRAERLYEELDALQGLRRAAKRELVMESRKHAAAKLLRTVPLLGAIRAAWLIGRVQTPHRFRTKRQFWAYCGLALETRSSADYRFQDGQLVRAKKPVFIRDSTATTITI

SEQ ID NO: 491323 - protein, 400 aa, unidentified
MTESLIVGIDPGRYGHGVVVLRPDGEEALRERVANEAAAIEVLVDRVVELAGGPGRALWVIEADGGDGAVLIGELLARDELVATLTPTEVAVRRKGRRQIHKSDLIDAELCARIGREEQATLRRLVAVPEAVAEVRVLARYQEGLIRDRTRLINRLRFLLSQYWPEFLAARAFAALDGDAVTALLAELPTPSAVRSKTPLELARFLAAQRYRRRPLERAEQILAAAQVGTRPQEAVYGRLVAEVAHELRALKLRIEALDVEIRDRFLLQPEAPIILSLPGMSHRTGPRFLAEVGALARFGSPDALAAYAGLTPTLWQSGRSSGTHFLSRRCNLHLRQACWSAALGSLKTPASRRFYDRKRSEGKSHHQAVIALARTQLRVLWTMLRAGTLFSAERALEAA

SEQ ID NO: 491324 - protein, 422 aa, unidentified
MFKVAVRSPGDKPWTRKTEILTFRTFYGVLRAMARELRRRGVTHVVMEASGVYTEPVYYALCEEDFTEVAVVNPAHAKALKGHKTDAKDCARLAELFECGLLQGSYIPAAGLKEMRDLSRYRMKTVQARTSEIQRLAKALESAGIKLGSVASEITGKGPVAMIEALISGERRGAVMADLAKGRARTAGKLADLSMALEGRFTDHHALMCRLHLDRITALDAAVADLEARIAATAADWQREIDLLKTIPGFGDIVAWAWIAEIGPAPHQWFASHHKLASWVSLAPGNNVSAGKRKYGRTGDAGTYIKPMLIQAAWAATQVRGRLQARYNRLVRRMGGPKNPAAKKKAIVAIAHTLLKIAYTVLKTGTGYQEPGADFYTRRESPGHRQAWLERQIQKLHPGCTVTITISPSPDPAPEAALPLGA

SEQ ID NO: 491325 - protein, 408 aa, unidentified
MTVVGIDVSKGKSMVAAMKPGGELVAAPYEVRHSDIELSHLALDVLCMEPDTRVVMEATGRYHEPVAALLHSEGIFVSILNPLLIKQSGAGSLRKVKSDPKDALKIAKYGLDNWSTLREYTPMEAIRQQLKLCARQCDLYNKNIVMLTNNLISLSDKTFPRVNELFSSPEKADGHLKWVDFYRSFWHCDCINRMSPDTFEERYKKWCKRKGYHFSTDAADALYAASCGSYTTLPRDNNAKLLVTVAADQLIALRENQSKLEAEMLNLCKQLPEYETVMAMYGVGKSTGPHLMAELGDVRRFPHRSSIVAFAGVDPGVVGSGKMQLSSVTTSKRGSPQLRKALFQVVSTYVKCKPENEAVYHFYSKKRDEGKPFFVCTTAAANKFLRIYYARVKECLNAVESATQVEEG

SEQ ID NO: 491326 - protein, 351 aa, unidentified
MAASKRSVIGGVDTHTATHHAAVIDLNGRLIDDAEFRATPSGYTAMLTWMRGKGKLTQVGVEGTGAYGAGLARYLHDQGVEVLEVPRPDRRIRRQRGKSDPIDAEAAARTVLAGRASGAPKLADGPIEAIRMLRVARNGAVKARTAALNTLRSMVITAPEPLRSQLRTLSSAQLVAACARLRPDLSNLAEPVQAAKHALRSIAVRVQQLGTETRSLREQLDELTHAAAPATSAVFGLGPDTVSALLTTIGDNPDRLRSEAAFAHLCGVAPIPASSGKTNRHRLHRGGDRAGNSALHIAAVVRLRYDPRSRAYADRRTAEGMSMPEIIRCQKRYLAREIFSALRADYAKLST

SEQ ID NO: 491327 - protein, 375 aa, unidentified
MKKNTSRIGTESARGRAVTAAREKEKFAYYMGVDLGDKNCEVCVFNQDGEHQESFGLPMKAADLQRYFLTVERSRVAIEAGGQSRWVAEVIERCGHQVFVSNSRKVAYIHDSDDKDDPGDAYKLAELVHFKPRLLHPIQHRSQAAQVDLTWIRAREVLIESRTQLVNAVRGISKAFGHRLAKCSTEAFTARLAEQIPQTIRGAVAPLLETIDHLNEQIRYYDQMEAHIARERYERYSLLTQVEGVGVHTALSFMLTIGEAERFAKSRTVGAFLGMRPRKKDSGESRPQLGITKAGDEYMRKTLVNCAHYILGPHGPDSDLRRCGQRICERGGKNAKKRAVIAVARKLAVLLHRLWITGEVYEPLRNSRRAAAVAA

SEQ ID NO: 491328 - protein, 391 aa, unidentified
MIYAGVDIAKVDHVIGAVDETGAEAARPMKFKNSEAGFERCIAWLESVAESEDDVFVGMEATGHYWKACFAYLMAAGYRVCVVNPMQVHAMRKLKSLSGVKNDRIDSWLIAETLRQGDYDETRLATDEVQALKQLTRYHQGLKQELAAVKTQAICVLDAYFPEYAALFSDMFGAASLKVLAECPTPSEVARKRASSIAKLLSEGSRGRLGDAKAAEVKAAAKSSVGIRLGEEAASFQIRTMVSQVEFLNATIAKVEKEVASLLGKVEPNITTIPGVSTTTGAQIVAEIGDVKRFRNAASIVKYAGLNSGVDESGKYSAEGVPITKHGSPYLRRSLWLAANRARQYDPRLKEYYDKLRRKGKPHRVAVTAVARKLCHVVYAVMRDGKPYDPA

SEQ ID NO: 491329 - protein, 373 aa, unidentified
MLHSNKTLFVGLDVHKDTIVVAVADAGRNPARVVATVPYQWKPLTKVLEKLGPKSAVSCCYEAGPTGYGLARSLRAADWDCDVIAPSLIPRKSSERIKTDRRDAVRLAQNQRGGELVAVAIPDEACEAIRDLERARDDAKRAERVARHQLSKFLLRQGRRYPGKTTWNKTHRAWIAAQEFAEPAQQHVLADGLATVETATLRVDQLTQRLRELAESWDRMPLVKALQALRGVEFVTAVTVVAEVGDFRRFPTAGDFMSYVGLIPTEQTSGDTRRRGPITKTGNAHVRRLLVESAWHYRRQPRIGKALRERSVGIAPGVCAIAWKAQKRLHHRLTRLIGRGKHATEAVTAVARELAGFIWAIGQEEVVLAASKG

SEQ ID NO: 491330 - protein, 403 aa, unidentified
MNSVGIDISKGRSTIAVMRPFGEVVISPFEVRHTGSELSKLARQLKSLDGETRVVMEATGNYHASVAKLLHDAGLYVSVVNAKLVHDYGNNELRRVKTDRKDAVKLANYGLDRWLTLPRYIPEEDTRLLLRNCYRQYRQYSKVQTVLKNNLISLLDTVFPNANRLFSSPIRGDGSEKWVDFVAEFWHCRCVSEKSEKAFANKYQRWCKKHGYNFSVAKAHTIHAEASGHIGVMPKSETTKLLVEQAVAQLRATSVALTALKREMLTLAAQLPEYPVVMGMFGVGPTLGPQLIAEIGDVRRFYSKKALVAYAGLDAPPNDSGDVTGKHKSMSKIGASSLRRTLFLVMSVYLRSAPLDESVYQFMDRKRAEGKPYHVYMMASANKFLRIYYATVKAYLESLEHTT

SEQ ID NO: 491331 - protein, 346 aa, unidentified
MTIVEDACAITGGVDTHADAHVAAALDSIGGLLGVREFPATAAGYCGLLDWLGGFGPVALVGIEGTGSYGAGLARHLAAAGIRVVEVDRADRQDRHRAGKSDPLDAVSAARAAQSGRAAGAPKGRDGAVEAIRALMVAKRSAGHERTQAINQARALIVTGPEELRARFARHTPAQLVAELAALRPRPGDVTGYATRVALRELGRRARFLDAQIDQLDELIVPLVTARAPGLLALHGVGPDTAARLLIAAGDHPARLRSEAAWAHLCGAAPIPASSGKVTRWRLNRGGNRDANHALWRIVICRMASHPATRAYVARRSKEGLSKKEIIRCLKRYVAREVYPHLRPAR

SEQ ID NO: 491332 - protein, 343 aa, unidentified
MQTITTIGLDIAKSVFQVHGVDAEGNVIFRRQLKRRYVLAFFEKLPRCLVGIEACASSHHWSREIQALGHTVRLMPPAYVKPYVKRHKNDATDAEAICEAVARPNMRFVATKTSEQQSCLTLHRTRHLFIRQQTSVINAIRAHLAEFGIVAPVGRHGVEQLLGIAADANDKRLPDVARACVAALGTQLQTLKAQILEFDRMITAWHRSNEASRRLDDIPGVGPVLATALVASIADPKVFRSGRDFSAWIGLVPKQNSSGGRDRLGNISKRGDRYLRSLFTTGALAVIRYAKIHGTRHRPWLTALLARRPTKVAAIALANKIARMAWAMMARGERYKEPAALAA

SEQ ID NO: 491333 - protein, 531 aa, unidentified
MKETLLVISLSSSVRQAMTDIPMEPRARRRAWSQDSGWFIGEAAHDWNHAPLSRLEDCLSSAILGPKPEQIAMSKKAQTHKHRKNKISVNQDWPLINAHAAGIDLGSKEHWVAVPEGRDNCPVRCFGTFTSDLEKLAEWLRNCGITSVAMEATGVYWIPLFQLLERRGLEVLLVNARQIKNVSGRKSDVSDCQWIQRLHTYGLLGGSFRPADSYCVVRSYLRYRDELVGARSTQTQHMQKALQQMNIQLTQVLSDINGLSGLAIIGAIIQGERDPLKLAAMVDRRVKATQNQIAKALIGDYRAEHLFQLKIAFELYHIYEAKILACDEAMALELQKLPTRVDPKTQPLPAKSSSKRIDETLRLALYCKLGVDLTAVESIGTLVGLVVLTEVGPDLSRFKTEKHFTSWLGLCPDNRITGGKVISSRTRRVVNRLSDALRLAATTLERSQTALGAYYRRMKAKLGAAAAITATAHKLARIIYRMLKYGEEYVRVGMEAYEKTFQARRLNALQKTAKSLGFQLIENETIAIPVS

SEQ ID NO: 491334 - protein, 480 aa, unidentified
MNIKAKKAKVQPLSKKSVINVLSQDEIKKKVQVIEQELKASTWRELETKGKFEKNDKLSFISEEMLIVGCDIGSETNYIRAIDTRGRELSKGAFEFSNSSEGFASAKAWVLKLAAKNDKKQIVLGLEPTGHYWFAIAAWMVSNGISVVQVNPYAVKQSKEIEDNSQLKDDRKDPKIIANLVKDGNYVMPYLPEDIYADMRRLSMFRDQLTEDRIRNINRLHREMKIYFPEYMDAFGKIDGAFTLEILKVAPIPSDIVELDEEGLKSLWHEAKLRGRGYSRARVIVDYAKKSVGLTGGTDAGRESIKWFVEQIIQLDEQLAEIENVLHQKCMEIPHAENILEINGVGENILAGILAEMGDISRFDDVKEIQKLSGMGLVACSSGKHKGQTKISHRGRKRLRYWLFQAAKSAVAHAVEFKQLHAYYTTRSMNPLKKMQSLVVIACKILRVIYTILNTGMKYDPERMLRDIRYPQGNTVQAAA

SEQ ID NO: 491335 - protein, 410 aa, unidentified
MRRIRNRVAGLDVHRDSVTGCVECFDGVDVEVTTQKFSTTARGIRELADWLATFEVELVVMEATGVYWKPVYYGLEDLFDEVWLVNAHHVKNVPGRKTDMSDAQWLADVAAHGMVRPSMVPPPEIRALRELTRYRRTQVAARGVEIQRLEKLLQDAGIKLTSVASKVWSKSSRAMIEMLISGHADPAALAELAKGRMRSKIPALTEAMESRWQPHHTVVARRIMAHIDFLDSTIVELSDEIVERLHPFDTLVQLWTTIPGVSTLTAQIMVAEIGADMARFPTAGHLASWAGVAPASYESAGKRRPAGTRHGSRHLRQALIEAARAASRTKGTFLSARYSRITRRRGPNKAAVAIAHTILTSAWHMATTGETYTDLGDDFYTKRRDPARRVNHHIQQLETAGYTVTLTPAA

SEQ ID NO: 491336 - protein, 458 aa, unidentified
MVQTKRPRSRREMPAVHPDAAAIDVGATMHVVAVPPDRDPEPVRTFGTFTADLHRLADWLRACRIKSVVMESTGVYWIPIFEILEQKGFDVQLVNARDAKHVPGRKTDVSDAEWLQRLHEHGLLRGSFQPKGEVKALRSYLRQRERLLDSAATYIQHMQKALTQMNVQLHHVVSDITGVTGMRIVRAIVSGERDAATLAAFRDSRCKEPVETIREALIGNYREEHVFALTQALELYDIHQKKVAECDKRIETVLEQLKATRPTPAKPLPAPRHKTKQSNAPNFAARDALYAVLGIDLTQIHGLGPYLALKLVGECGTDLSAWPSAKHFTSWLSLAPRNKISGGKILSSATRRSNNRAASLLRLAAVTVGRTETALGAFFRRLSARIGKAKAITATARKIAVLFYNALRHGMKYTDPGAAYYEERYRQRVLSNLQRRAKAFGYVLQAAAPQAPQAVGVS

SEQ ID NO: 491337 - protein, 340 aa, unidentified
MKKVSTIGLDLAKNVFQAHGADASGAVIFRKKPRRAQVLEFFATQPACAVAMEACGGSHFWGREIGNYGHRVRLIPPAYVKPFVKRQKNDAADAEAICEAAQRPTMRFVAVKSEAAQGAAVVFRTRDMLVRQRTQIINALRGHLAEFGLIVAQGPAHVAKLIMAVQDPKQPLPEAARPILCILVDMLDLLDQRIKLLDIAIARRAKEDEVARRLMSIPGVGPVITTAVAALAPPAETFKRGRDFAAWLGLTPLQHSTGGKQRLGATSKMGERTLRRLLIIGASSVVRWAARKGAPAGSWLASMIARKPAMLVRVALANKMARVIWALMAKGGTYRAPVVA

SEQ ID NO: 491338 - protein, 347 aa, unidentified
MTNIVKQVVGIDVAQNELVVSLGRMNHDTGTDIFAFKTFPNNAVGFKDLLAWVNKLSAKEISVRYVMEATGVYHEKLAYYLSDQGQEVSIVLPNKISNYFRTLEVKTITDKTASQAICQFGLERKLEAWKKPKKIFKDLKQLTRERDQLIAERTALKNQLHAEKAEAFPNDSSIKRVIKRIQLNDKQELEIKAEIAAIVKQDSELVEKINTITTIPGVGKLTAVIVLAETNGFELIKNKKQLVSYSGLDVRLKDSGTSVKSKPKISKKGNRHLRKAMYMPALAAMRFNDQHKALFVRLVSKHGIKMKAAVAVQRKILELIYTIYKTDKAFDKNYTNTNIQTETAYNS

SEQ ID NO: 491339 - protein, 415 aa, unidentified
MKNHSELTHFAGLDWAKDHHDANVMDRQGQVVARFRFAHTGPGWEQWREKIREYPALGVAIETSQGAAVEQLLASGVTVYPVHPKAAKAYRQRQAPSGTKDDELDAWSLGDALRVDGAHWRALSPQDAVIEELRLLCRDEEELICQRTALVNQLQAALQEYYPAALEAFDDWTAPYTWAFVKAFPTPQQLVKSTVHRRKVFFHVHKLWRPGTAERRLEIFARADQFCGGAAVTRAKSRLALALCHSLEALQRQLDDYRVAIEKLFAEHPDHDVFGSLPGVGAKLGPRLLSGVGADREQYPDVQGLQCVAGTAPVSFNSGQIQRAKIRWHCDRFLRHTVHLWAGCSLKRCAWAAAYYAAKRKDGKSHACALRCLAQRWLKILWKMWQTHTPYDPEHHARNQQRHGSWVLQLNPKTA

SEQ ID NO: 491340 - protein, 350 aa, unidentified
MTYYAGLDVSLEETAICVVDAAGRIVKEVRAASEPDALVEALQALKLPLERVGLEACSLTAWLHDGLCQAGLRAICIETRQANAAMKTMPNKTDRNDARALAQIMRTGWFRQVHVKSRQCRLWRSLLVARRTVLNEMRTIENVVRAILREAGLKVGTPSRAAFDGRVRELAAGNGTLMPMVDPMLTILATMLRELARLTKQVLTIVRDEKVCRRLMSVPGVGPITALAFRATIDRPDRFGHSRDVGAHLGLTPSRYQSGETDIQGKVSRCGDELARTALYEAAHSLLTRSKKWSSLRVWGMKIAKHRGMARARVAVARKLAVILHRMWSDETEFRFGKEPDAKPMTPATA

SEQ ID NO: 491341 - protein, 343 aa, unidentified
MEYYVGLDVSLKQTSICVVDRTGSVVREGVVDSDPEAISVYVRSKAPDAVRIGLETGPTSTWLWTELKRLGLPVICIDARHAKAVLKMQINKSDRNDAIGIARIMQTGWFKEVHVKDIDSHSVRALLASRALLVKIKRDLENHVRGLLKNLGLVIGRAKFNVFAVRAEELIEGRPELIAAIRPLLEARNAVGQQVSELDRKVMKLARHDAQVRRFMTAPGVGPITALAFKATIDDPARFARSRSVGAYVGLTSRRHASGEVDWTGRISKCGDAMLRSYLFEAAGVLLTRVPKWSAVKAWGVRLAKRNGLRKAKVAVARKLAVILHRMWIDGTEFNWSKKEIAA

SEQ ID NO: 491342 - protein, 364 aa, unidentified
MHSINNTELSSLEETRCQFNGGRCAIKLGIDVHQEFYVVVMQEGGANPKPPQRFQKEAFLQWAGRLKQKSGAEVYAVYEACGFGFSLQRNLSGLSIHCYVICPQKLDEQNRRVKTDGLDAKALCLKLDRFVQGNRAALAIVRVPSEAEERSRAIHRQREQLVGARKRLEAQERSLMVNHGFEPVQNWWKPRPFAALEVPQWMRELLSNSQPILVALQQKIAALSVQLQCAAAPEQPRGLGKMTSVVLDREIGDWNRFSNRRQIASYTGLCPGEYSSGNTRLQSCVTKHGNPRLRAALVELAWRLVRFQPNYKPVLKWRAILAKGALATGAARKKAIVAVARQLAVDLWRIKTGRLRPEELGLIN

SEQ ID NO: 491343 - protein, 355 aa, unidentified
MYYSGIDLHKDNVTITTVDSGGNILNQKKLPNEEYTILNYFFSIGKQHKAVVECTSNWYWLSDLLNDHGIDLTLAHAKYLKAISYAKVKTDKVDSKTLAHLLRVDMVPAAHQISPSLRGLRDLMRARLKMVQKNTSCQNSIHRLLAKYNLAVPDGRKLHDLPTLDLLDDLPLQSQPRLQLEMLIEQIRLLRSQIAQMQTAIYPQLIPNSDIQRILWIPGIGKILAFTIYLEIDGIERFPDIKRFWSYSRLVPGADNSNKKNRHKSANKDGNKYLKMAFTEAAVRAVQYNKEIKEFFNAKERKKHPGIARILVAQELAKICYYVLKNKTDFNNTFKGKILSRRKAMQWPRLASPDA

SEQ ID NO: 491344 - protein, 368 aa, unidentified
MLYLAIDQHSKQLTVNLRNEAGQIVMRRQVSTRGEVPRQFLEDVRQRSLAEGGYVTIVEVCGFNDWLLELLPRCGCRETVLVQANRRSKRKTDRRDANKLGELLWVNRHRLSAGQPISHLRRVRILSRQEREDRRVTQMRRNIGRELTRTINSIKTILRRENLEQHCPTKGIQTQAAERWLKKLTLAPLDRMELDQLLARRQLLRDQKQQIEEEIARRAAAHPDVPLAQTLPGAAAYAALALAACVGPIERFPRPRSLANYWGLTPACRNSGQTTDRLGSITKEGSSLARFILGQLVLHALRRDPVMRAWYQRIKRRRGSKIARVAVMRRLTTILWHMLKKREPYRLGGPPRKKLKRHQPAQVETNTA

SEQ ID NO: 491345 - protein, 333 aa, unidentified
MKQQTKSSNITVGLDLGDRRHRFCALDERGEVVEQDSICNDRVSLRKLAGRYHGALGVMEAGAHSPWISRFLEALGWRVVVSNPRKVRAIYQHERKSDQRDALMLARIGRMDLALLYPVRHGTAEGQQDLLRIKLRDSLVRARVAVINSVRFTLKSLGYTVRTPSSERFHKVVMEEVPESVREMITPSVQALAELTARIKMLELEINTLAQMKYPQSAQLQQIPGVGPITALYFVLKIEDPNRFAHVRDVGAYAGLCPRRDQSGESDPQLRISKRGDAYLRRLLVSAAHYILGPLRPAKCLARLWPDAGGRWNGAGQEAGDGSGGAKTCRAAT

SEQ ID NO: 491346 - protein, 387 aa, unidentified
MKKLYSKVACSGMDVHYEFSKVTFRDKAGRVVRRERLDPRDRERLRERVSQWPKGLPVVLEASFGWGWLSDLLEEAGLEPHLSNCYKVEQMRKARGWVKTNEKDADLVSLLPFETSSWWEVWRAPPEVRDQREQMRFRADLVALQTCVKNRIHAVFHRHGIFHDFSDLFGGQGRAFLSELCLHNPTGLPPQAWLALRGQVRLLDHVRHQLADIERNLHRQWTTTPLVRRLKTIQGIGLVLAHVLSAEVGRIERFGNHKRLASYSLLAPRANDTGQADPTTAPLGRHLGTRGNRTLKWAFIEAAHGAVRSGGRWRAMFDRVTEGGRKDRNRGYIKVARELVKVVYVVWAKGVPYSSTPPARPGRGKNQKPSRSGTGQLCHPMVHALPA

SEQ ID NO: 491347 - protein, 354 aa, unidentified
MVTPSFLVLCRGQAFIRRTIIENIALIGIDLGKNSFHIHCQDRRGKAVYRKKFTRSKLIEFLATCPATTIAMEACGGSHFMARKLEELGHFPKLISPQFVRPFVKSNKNDFVDAEAICEAASRPSMRFVQPRTESQQAMRALHRVRESLVQDKVKTTNQMHAFLLEFGISVPRGSAVISRLSTILEDNNLPLYLSQLLLKLQQHYHYLVEQIKELESQLKRKLDEDEVGQRLLSIPCVGTLTASTISTEIGDGKQYASSRDFAAATGLVPRQYSTGGRTTLLGISKRGNKKIRTLLVQCARVFIQKLEHQSGRLADWVRELLCRKSNFVVTCALANKLARIAWALTTRQQTYEA

SEQ ID NO: 491348 - protein, 367 aa, unidentified
MKKVSTAAVKTTKNCSQPKLTIGLDLGDRNSWYCVLDESGQIQLEQRVRTNAKALQEVFAAMPHSRIALEIGTHSPWISRLLSELGHAVIVANARKVRLIGESRKKDDRMDAQTLARLARIDPQLLYPVKHRSAQAQADLMMIRARAGLVRARTGLVNTARGLAKSYGERLRGCNVRNMNPEKAEGLSPELQTALEPLLNAIESLSERIVEYNERIEKLAQESYPQVALLKQIKGVGTLIALTFLLTLEDPHRFRQSRDVGCYLGLQPGRRNSGQSEPQLHISKEGDPYLRTLLVQGAQHILGPFGIDCDLRRWGLKLAERGGRNGKKRAIVATARKLAVLLHHLWVSGEVYEPLHNSNRTTVAAAA

SEQ ID NO: 491349 - protein, 393 aa, unidentified
MICVGIDVAKDKHDCVILNSEGKILAGVFTIPNNADGFDTLLQKIRSCTSSDDKIKVGLEATGHYSYNILGFLINQGLPTYVINPLHTNLYRKSMSLRKTKTDRVDAKTIATMLMSNVDLKSYTDTAYHNEELKSLTSNRFDKVRERAKQKQSVSRLVTILFPELEKLVSTLHMASVYALLSEFPGGKQVSEAHLTHLKAVLYDASKGRYGSDMATTLRDAARCSVGSVMSAKSLELRHTIRLIHELDAEIEDIEAAIQSMMGEIQSPITTIPGMGVRMGAMILAEIGDFSRFDSPDKILAYAGMSPSTYQSGQLSLSGAYSHMEKRGSRYLRYALYNATKYVCLWNPTFAAYLAKKRAEGKHYNVALSHATKKLVRLIYALEKSKWPYSTAA

SEQ ID NO: 491350 - protein, 455 aa, unidentified
MEGSYAGVDWASDKHDVLVADAAGEKLLAATFAHDEKGLRSLCRQLVRLKVQLVAVERPDGLLVERLLDAGLAVLALHPNQVAAARDRFRVSGGKSDGFDAFVLCELARTDHHRFRVLEPDSDATKAIRALTRGREDLVGARTGLVNQLRAELERFWPGPLHLFSELHSQISLAFLERYPSPTDARGLGETRLAGFLARQRYSGRQKPAQLLAKLRAAPVGRVGERELATRRGLVRGLVAMIKQLNEQIAELERQIATAIREHPDGRIFTSLFKGAVITAAELLAEMGDCRGRYPTRDTLAGDAGQAAVAIESGKRKAACFRWGCNKRLRNAFHTLADSSRHHNPWAQDLYAQACERGHDHPRALRTVGRAWSRIVWQCWQDGVPYDPARHRALQRHVTVTIPPSSGPVPDIAATQRMAGAAVTRRAARRGEREALDGKPASAKPVARPAKRRRA

SEQ ID NO: 491351 - protein, 341 aa, unidentified
MERTVIAIDIAKKVFQLHWVDPETGHIERLQLKRAQMLPWFANRDCAQIVMEACGGAHEWRRALCQLGHDVRLLSPRKVRPFVQRNKTDAADAQAIWTASRQPGMRFVPIKTETQQIVLSLHRLRAQLMKTRIMQTNELRGLLDEFGIVLPEGHAALLKALPAALADAKSRLPAMLMDSLDDQLRRVNQLQADIGAIERRLAQQMREIPACKAAAEIPGVGLLTATAVVASMGTPTAFKDAREFAAWIGLVPRQTGTGGRIRQLGISKRGDAYLRTLLMHGARAIVAKTKDAPTWPWLAALLQRRPYSVAVAAVANKLARTIWAVLARGQAWRPQAWQAAH

SEQ ID NO: 491352 - protein, 371 aa, unidentified
MNSILYVGMDVHKENYTLCCYSFDEDKLQYKQTVAPDSKMVLKYLEQIRKRYSDEVEFVCGYEAGCLGYTLYHQLTDHGVKCVILAPTTMAITNNNRVKTDKRDAGNIARCLAYRTFSEVYVPTAEDEAVKEYIRMRADQKKALKIIKQQILSLVLRQGYRFAGGKSYWTAIHVKWLKSLDLGGVLQETLDEYIVTYDYLTNKIERLDRRIEEFAGGERYRESVKKLTCLLGVKTLTALAVIVEIGDFVRFAEAEKLAAFIGLVPGEDSSGEKRRRGPITKAGNAHVRRLLVESAQSYTRGKIGHKSKELKRRQSGNTSQVIAYADKANERLRRKFYRMTLKNGTNRNVAATAIARELACFMWGLMTGNVA

SEQ ID NO: 491353 - protein, 348 aa, unidentified
MLILYQRCAAIDIGKDVIAVAVRLPGDGAEHRQTIKQTFKTFYGVLKHAARWLTEQQVTHVAMEATGIYSMPVYHALIEHGQFEKVLVCNAGHVRNVPGRKTDLSDAEWLVHLLECGLLRGSFIPPAQIKAARDVIRYRTKLTESRTSELQRLGNVLQDAGIKVDSVASTITTQSVRAMVEALIDGERRPLLLAELAKGKMRAKIPDLQRALEGRFDDHHALMCRLHLDHLDHLDEMIARLDTQIEDMMQPFRSQRELLTSIPGIGPFAAAAVISEAGADIAETFPSAGQFASWIGVCPGNHESAGKRHSGKPRKGNQHLQHVLVECAWAASRTPGYLQSRAPGWPRP

SEQ ID NO: 491354 - protein, 440 aa, unidentified
MEKVTVFETVYEHAAGIDIGAEKIFVSVDVREVESFDTFTSGYYQCIEYLHQKGITDVAMEATGVYWVALYTMLESCGFRVCLVNPKETRQVKGRKTDVKDCQWIQKLFSANILRQSFIPEINYMEVRQLVRERLDIIEMGSTYVNKMQKCLELMNIKLKEVISQIHGASGIKIIKAIIKGHRDGQYLLSLCDKRIREKKAALVLKALEGNYNDTYLFMLEQNLHMWEIHQQQVTVIDKRIEELLQKMTKEKQAAELKGSPKPIRHHAPQIEGLHGMLIQLYGVSMSSISGINDYTLLRLMGETGTDMSRFPSEDHFVSWCSLSPKHHQSGRVKKRVKGTKCNKAGQIFKEVAQALLNSKHIAIGSFMRKLRAKKDSAIAIKAGARKLAIAYYNALTKGIEYVEQGTKKYEEQIKQREKASLFKLAKKHNFELVEKQAVA

SEQ ID NO: 491355 - protein, 351 aa, unidentified
MKVTTIGIDLAKDVFGLHGVDGEGRVTFKRRLVRSRLLEFLSQLPRCLVGLEACSSAHYWAREIERLGHRVRLMSPRFVKPYRKSDKNDANDAEAICEAVTRASMRFVPIKSEAQHEVQALHRVREQLLKSRTALVNQVRDLLAEHGVVAPHGIARARRLLLGILADPERHGLSGLFRETLQEMAERLRFFDERVGAYDDRIERVFKEDERCRRLAKVEGVGPLVATAVVAAVGNASEFKSGRELSAWLGLVPRQHSSGNRSQLLGISKRGDRYLRTILIHGARAALRRADHKRDQRSRWAMRIKLARGYNKAAVALANKNARIIWALLTRGENYRPAAISVASAGSVESV

SEQ ID NO: 491356 - protein, 338 aa, unidentified
MIVIGVDVHKQTVTAVAVDEAGRMLDEKTIPAGSEELVGWAAGLAGERLWAVEDCRQLTRWLERQLLAIGEELVRVPPKLMAPERRAGRARGKSDPIDALAVARAALREPGLSRPRPDEQAFRDLKLLVDHRDDLVDERRRAQQRLRWHLHQLDPTFAVPLRMLGRPSHLERVSRWLARREQELQVRLARELVTRCRSLTRAITELDRELEQRTAETAPALLELAGCAAVTAAKLLAEIGPIDRFKSDAQLARHAGVAPLEASSGRVQRHRLDRGGNRQLNAALYRVAITQARYHPAARAYLERKQAEGKSRREAIRCLKRLLVRVVFNTLKASPALT

SEQ ID NO: 491357 - protein, 339 aa, unidentified
MNATPVGIDIAKSVFQVHYVAPETGEIVNKQIKRSQFLEYFANRAPCMIGMEACGSAYHWARQLMQMGHQVKLMPAKFVKAFNVGNKNDAMDAQAIWLAVQQPRKAVAVKSEMQQAVLMMHRQREQLVKFRTMQINGLRGMLAEFGEVMGKGRTAMIKAVQDALARAEARLPKLLIDTLREQWARVNKLDEEIATIERRLREWKKDDKAVQAVIEIPGVGLLTATAAVAMMGDPKAFKSGREFAAWAGLVPKQTGTGGKVSLHGISKRGDTYLRTLLIHGARSVLTNAKEPGPWVEGMKKRRPSNVVVVALANKMARTIWTVLAHDRSYRKDHVSVKSA

SEQ ID NO: 491358 - protein, 428 aa, unidentified
MKYTQNEKILQVTERTLVVGVDIAKERHVGRAFDFRGVELGKRIEFENRKEGMEKFLDWANKIMKANGKDNMIVGIEPTGHYWLCFEQYLRENGIKVVLVNPFHVKRSKELDDSTQTKSDIKDPKTIAMLVKDGRYTEPNIPEGIYAEMRVAMNIYERLQKQLNVLKNQIINWLDMYFPEFLEVFSDWEGKTAIETLKEVPLPCDVVENEVEGIIEYWRDKVDRRAISRRRAMDLVETAKRSIGKKEGRKLARQEIKYLLSQYELLKKQIEEIEAEMAELLREVPNGEELLKIKGVGVKTAVGFISEVGDIKRYEDARQIQKLAGLNIVENSSGKYKGQTCISKRGRGRLRSSLFKAMITIVAKNEEFKQLHRYYTTRENNPLKKKQSLIALCCKLIRVFYAILKKGVKYDGNKMLSDIKREALARTA

SEQ ID NO: 491359 - protein, 405 aa, unidentified
MTRFVGIDVGAETHMVAVVDESGTVLRKSTAFGEDAAGYRRLRELLGDPDGQMVAMEATGIYWRNLFAALVTDGFSVALVNPLRTNRFAEEELARTKTDAIDALGIARFAAQKRPALTELPDDATQDLRELVRLRTQVLLHQGDCVRRLHRVLHLTFPEFTNHVRTLQSELATAVLSRYPTAHAFKTARAKALARLCFDGHRHVGDCLAAALIQAAQDSVGHYYSEPYQLQIKYLCKDIALSRERLTALERDIESRLDAHEVGKLLTTIDGIGRQTAARLVAELGDPARFRSSAALASYVGVIPRVRQSGKRKFSGGPKVPLGHVLLRRALWMPTLTAVRTNPWLRAHYQRLLIAGKSPKSALVAVMRKLLTAVYSVAKNRRPFVPQLPAVISPPLGGAAVNTAT

SEQ ID NO: 491360 - protein, 354 aa, unidentified
MIIIGVDFHPEFQQIASVDTDTGEFQEKRLAHCEEAEKFYRAAAACGQKVRVGMEASGHARWFERLLAELQIELWIGDAAEIRAKRVRKQKTDRQDAQLILRLLLEDRFPQIWVPSWENRDLRQLLWHRHRMVQARTRIMNQLQAVALNEGLRCKKRLWRERGRQQLESFPLAWWASRRRRDLLELLDRLNPTIAELSQAIEQEVEKCPAAQRLMTHPGVGPLTALAFVLIIGEADRFQCGKQVASYLGLVPLEDSSGNRRRLGHITKQGSSMLRFLLVEAAQVTARSLPEWRSKYLHLMMRRGRKTAKVAMARKLAVRLYWMMRQRWDYQQWIKFGSHAGQPGNRDGVQQNIE

SEQ ID NO: 491361 - protein, 453 aa, unidentified
MTARKKTISFKPGKNREALTITHPNAAGIDIGSATHFVAVPPDRDDEPVRAFPSFTADLYAIADWLKSCKVDIVAMESTGVYWIPLFEILEARGFKVFLVNARHVKNVSGRKSDVLDCQWIQQLMTYGLLGAAFRPTEEVCVLRALWRQRGMLLKSQARSIQHMQKALTQMNIQLANVISDIAGETGLKILRAILAGERDGRVLAAMRNSRIQASAEEIAKSLQGNWRTEHLFALKQALASFDFLGTQLAEVDQELEKQLQVLKTKEGDPAKGKQRGRTRNAPKFDLRAQLFKMCGVDLTRIDGIDVTTALGVISETGTDMTRFPKVGNFTSWMGLCPGTKITGGKVMSGKTKRCANRAAQALRLAAAALRTSESALGAYFRRMCARMDKPKAIAAAAHKLARLIYTMLTKGEEYTDRGQDYYEKRYREQVVKTLSQRAAKLGMMMVPLEQAI

SEQ ID NO: 491362 - protein, 461 aa, unidentified
MTSTKQGNRKNETPLPTSLPAIRPRVAGLDVGSSQHWVCGPARADGKPNVRVFGTTTDQLTELADWLSEQGVESVAMESTSVYWIPIYELLEARGIEVRLVNARQLHNVPGRKTDVSDCQWLQLLHSCGLLRGSFRPGEAITRLRALHRQLANLVAERTRCVQWMQKALDHMNVQVHRAVTDLTGVTGMAIVRAIVGGERDPARLAMHRDRRCRKSANEIARYLTGTWRAEHLFNLASALRLFDALDTEIASYEAQLLQEVESLQPPERQEEPVPPHPNPAKEKALKARGEQPARTTLWRFAGVDLTRVDGISAGAAQVVLTEVGPNLAAFPSEDHFVSWLRLCPRTPISGGKPLKKRRNGLGANRIAGVLRMAATSLQRSKTALGASFRRIARHKGGAVAVFATARQLARLIYRMLRYGHDYVDIGDKAYDRQFQIRRLAALTETAKHLGYTLVPNVAAG

SEQ ID NO: 491363 - protein, 343 aa, unidentified
MQITTIGLDLAKSVFQVHGIDATGQVVVRKSLRRSQMLPFFAKLPSSLVGMEACGTSHYWARELIKLGHEVRLMPPAYVKPYVKRGKTDAADAEAVCEAVTRPTMRFVPVKSPEQQAALSIHRTRDLLVKQRTQLINMIRGLLAEFGVDIPKGLERALLMARRIVDGKAPDVPIEAAKIVGTLSQQALDTHVRLREIDRDLAIWLRGNDVARRLMTIPGIGPIGATALAASVTDPHQFRSGRQFAAWLGLTPLQKSSGGKERLGRITKMGDKYLRKLLVVGMTALVRRARKNPEGDPRLADLLARKPTRVATVAMANKTARIIWAIMTRGETYHAGHRPALAA

SEQ ID NO: 491364 - protein, 343 aa, unidentified
MQVSTIGVDLAKNVFQVHGVDSAGKVVITRQLRRKQVIDFFSKIPACLVGMEACGTAHHWAREVSKLGHTVRLMPPSYVKGYVKRSKNDAADAAAICEAVTRPSMRFVPIKSADQQALLMLHRTRDLLIRQRTQLINALRAHLAEFGLVAETGREGLAQLAAIITDESNREALPSAMKQALQAIVDQLAALELQIGTLDRAIHAHHRANDMSCRLETVPGIGVIGATAIASTVTDPSDFKSGRDFAAWIGLVPRQHSTGGKERLGGISKQGDRYLRRLLVIGATAVVRHARQCPQKHPWVMKLLGKKPAKLVAVAVANKMARIAWAIMAKGGYYRAPELAAAA

SEQ ID NO: 491365 - protein, 365 aa, unidentified
MAEITRSAVARVGVDLSKRVFQVHAVDRGGRVLVAKPMSPERFFVWCAELPAGCLVAMEACGGAHHVARRLRLLGLDARLIAGHFVTPYRMAGRSGKNDANDAAAICEAAGRPHMRFVPVKTAAQQGQLAVHRLREGFKEERTALINRIRGLLTEFGLVFPQSPEALRKVLAEVIEDGANELPGVARLALQRAHLHWIDIDLQMAWCDERIASHVRSDDRAKAAATLQGIGPVTASALVASVGDFSQFDNARQFGAWLGLVPSQNSTGGKACLGRITKRGDDYLRTLLIQGAKSAVMSAGKRTDRISLWLVQLKERVGWQKAVVALANKNARILWAVLTRGVAFNPDHIPEPPAARCCLRPQPAA

SEQ ID NO: 491366 - protein, 349 aa, unidentified
MLADELDYVIGVDTHRDEHVLAVLTAAAGAVVAGEAFPANARGYRETLRFIERYAPGRRAWAIEGTGSYGAGLARYLAARGESVLEVSRTPRAERRLRGKDDTLDAARTARAALASDTLALPRSGERREALRLLLVARRSAVDVRREALTQLRAVIVTAPDRLREELRGLPTGKLLDRCSRLRRSSAASVDELATKLVLRSLARRIEAATLEADELERDLLGHVRTLAPALLDEPGVGPIVAAQLIVAWSHRGRLRSEACFARLAGVAPIPASSGQTIRHRLSRGGDRQLNRAFHTIVLHRRLHDAATKDYIARRVAEGKTHRDATRLLKRYLARHLYRALNNQATLMA

SEQ ID NO: 491367 - protein, 347 aa, unidentified
MDHIGMDVHKKESQLCILTEAGELIERRVRSEPERFAVVLGDRPRARILLEASTDSEWVARCLEALGHEVIVADPNFAPMYATRTRKVKTDRRDARALADACLLGAYRPAHRLSDPQRHVRGRLLIRDALVRTRTRYISLIRALLRQQGYRVPSGSAEAFPRRVRAVALPGRLLSTIAPLLAVMRHLNTQLAYADQAIEQVTAHDERVQRLRTVPSVGPVTAAAFVATIDDVRRFRHAHQVQAYLGLVPRELSSGESQRRGHITKAGPPRMRWLLIQAAVSILRRRPPEAEALRAWALRIAARRGKLIAVVALARRLAGILYALLRDGSVFTPHRAPHPGAVATVPA

SEQ ID NO: 491368 - protein, 351 aa, unidentified
MDATTIGVDLAKSVFELALASAAWRIIGRRRLTRPQFERFLASEPTAHLVMEACGTAHYWARIARTHGHRVSLLPAQYVRPYVRRNKTDRTDAEALLEAVRSGGINPVPVKTAAQQELQALHRVRAEWMATRTARLNAMRGFLQEHGVTIPRGARTAIATIPRLLADAEAPIPARLRALLMHLLEDVRALDINLVALERDLATIADTDPVVSRLMTIPGIGLITGTALVATVGHIHGFRTARRFASWLGLTPSERSSAHRRRLGAISKMGDVYLRCLLTHGARSVLLTAHRAQARRGRVLTRLQQWGLSIETRRGHNKATIAIANKLARVVWAVWSREVAYEHRPALPAAA

SEQ ID NO: 491369 - protein, 362 aa, unidentified
MNYVGVDIHKKYSVLCAVDERGRKLREARVEGNAPFGFAQFFSGLRGPSKAVVEACWNWGLIHDELEELEGIEEVVLAHPYKTRLIADAQIKTDRLDAYALSTLLRGNLVARAHVPRRETRMRKNLLRQRLYWARLRTMLRNRIHALLDRQRSLELPQCSDIFGVRGLSFLRRLELSETDAALLREQLALHDLIAQQMKAQEKRIGLEFGSEAMHRQLMSVPGIGPTLAAVIACEVDSIERFSSAEKLCAYAGVVPTTHSSGGKTRHGQLLPFCNKWLRWALIEASWVAIGCSPYFGALYKQHRARGKKANSAVLIVARRMCRIIWQLLHEKRDFEKRPLRPNFSFPGCSVVRLTAGTAARP

SEQ ID NO: 491370 - protein, 393 aa, unidentified
MKETTTYVGVDAHKKDLFIAMLIGNERTPVTWTVPNEPNAVRRLVRKLEREAPGPVRMCYEAGPCGYALQRQVATARVSCQVIAPSLVPRKPGERIKTNRRDAKKLAELFRAGLLTEVRPPTPEDEAVRDLCRARDDAREDLQRSRHRLGKLLLRRGLHYSAGRNWTQGHRRWIASLQWAHPSERVVVDDYLLAIDHLEARLIELDARLVEIADTEPYRERVGWLRCFRGIDTLTAILMLAELHDFQRFPSAPALMAYVGLVPGEDSSGEKQRRGRITRMGNALVRRLLVETAWHYQHRPGTGVALTRRRKGQPNRVIAIADKAQQRLCRRFRRLAEHDKPAPKIAVNYWNLKPEATMRDLLLAVRADEANHRDVNHTFSSMHRDADNPHSRH

SEQ ID NO: 491371 - protein, 323 aa, unidentified
MFNVSGNAIGIDVSKDTIDVCLLIQDEPYYHKFKNNEIGFENLLTIYHNFHAKSLAFESTGNYHKKLERYLVDNGVKPYILNPLTISNFTKSLKIHGKTDKTDSYAIALFLKKGDLTEYLSFPIRDIFKPIVSSICNLDKQITQTKNLIHSIALCPDTSCVVNDLSLLLKNLESTKTKIKKDGIALLYKYCPESKEIKEEIKGVGDSLLLHLIPSIYDHFDKFTLKQINAFFGFNPISYQSGTSVYKKDKMSKHGDKRVRTALYLSMISAIRTNDILKEKYNRMKEKGKKPKIAQMAIMSHLLRAVVIKLSNKTGRFHKSLKK

SEQ ID NO: 491372 - protein, 385 aa, unidentified
MSAAHGDSPNAIRTDLGAIFVSLELSRSKWVITSLSPGAGEKLSRREMPAGSAGALLDCFAELQRKAQARCGEEFAIIAIQEAGLDGFWLHRALEREGIESHVVDAASIAVPRRKRRAKTDRIDGEALLRVLLAYKRGEPRVCAMVRPPTPEEEDRRRVTRERQVLIKERVEQVNRIKGLLFAQGIASYQPLRRDRRVRLEELRTGDGRPLPEHLKTQIARALDRLELILEQIKEVEAARDAMLAAERQASVGLDLLCGLKSIGNDFAANLWTEGFSRHFDNRRQLGSYAGFASSPWQSGRINHDQGISKAGNPRLRKMLVQLAWLWTRHQPDSELTKWFNERMRQNNGRFKKRLIVALARKLLVALWKYTTQGVVIEGAVLKPR

SEQ ID NO: 491373 - protein, 368 aa, unidentified
MPSTARSQKGDGITTIAQLQRPRVTVGVDTHLDVHVAHAKDALGRRLATVSIPTTPAGYRDLLAWARGLGEVDAWGVEGTGCYGAALARFLRDHGQVVLEVNRPDRQARRRRGKSDPVDAEAAARAVQAGEVTAVPKASSGYVEMLRSLRVARATAVKARTQAINALKALVVTAPQNLREQLRGRSATMLVREAAALRPGPLDDPTAAAKLALRTLARRHQALSAEITTLDTELDRLTAKAAPRLVALFGIGPDSAGALLVAAGDNPDRLRSDAAFSMLCGSSPIQASSGKTIRHRLNRGGDRQANAALHRIVVVRLRWHQPTKDYMARRLTEGKSKKEIIRCLKRYVAREVFAVLNQMDQDALTPAA

SEQ ID NO: 491374 - protein, 356 aa, unidentified
MLNDKKYIGMDVHKESISIAVRNGAGKIVMECVIETKASMILQFINGLRGDLHVTFEEGTSASWLYDLLKPHVTKLVVCDPRKNASMREGNQNDKIDARRLAELLRLDHLSPVYHGEHGLRSLKELVRSYLTITKDLGRVMSRVKAIYRSWAIPCTGKQVYAPRHRVEWLGKISEAGVRRRAEFYYQQLDALRSLRREVRRELLEESKKHQAWKQLCQIPSIGPIRAAVLLGILQTPHRFRTKRQLWTYSGFGIETQSSADHRSVDGQLERVKKPSSIRGLNRNCNHDLKNLFKGAAIVASSKPGPFQEFYTALLTKGIRPEMARLTLARKIATIALIVWKRGVNFDAQHLKPQTA

SEQ ID NO: 491375 - protein, 364 aa, unidentified
MEPNRTSVGLDVHARSVVACGLDGQTGELFERRLTPDHTEIVGWVRSLPAPVAVTYEAGPTGFGLARFLTAEGIDCLVAAPSKLQRPSGDRVKTDVRDARHLARLLHLGEIVAVTVPSVEQEAARDLVRAREDVRGDLMSARHRLSKLLLRQGIVYSGGALWTGPHDRWLRDQRRRPVFDMAGLGTAFDVAYDTVLATTARRGRLDAAIARMAAGSSYTPVVTRLGCLRGVATLTAFGLAAEIGDWHRLTGRSIGAYLGLVPTESSSGASRSQGSITKTGNGHARRLLIEAAWHHRPPNRVGADLRRRQDAADPAARHRGQQANHRLHQRWVHFDTRRKRTVVANTAIARELAGWCWSLAVLDS

SEQ ID NO: 491376 - protein, 346 aa, unidentified
MVTIGIDTHKATLAVSAIDPTGRELGAKTFPNDRHGHVRLQRWATEQGPERQFGIEGSGSYGAALARLLVTAGELVVEVPAVLTDRERRHLHRSGKSDPGDALAIARITLRETGLGPVSMPGLSEDLKLLVDARDQRIIERTRVTNRLHAHLVILAPGYNREIPELTTPAHLAATRRLLAHMPGVRGELARAELKRLAELRAEATALEAEIRSLVRLSGSSLPTIRGVAAITAGKLLGEVGDPRRLHSPAAFAAMSGTAPIPASSGQTSRHRLNRGGNRQLNRALHTVALVQARSDPRAKAYMAKRMAEGKSRLEALRCLKRHLANVVIRTMVADATRPIEAISPA

SEQ ID NO: 491377 - protein, 435 aa, unidentified
MSRKAYRATRVNDVNWEQIARGKEGLGATLGVDVGKFDVLVVCRWADGRFERPWRIKNPWEIATLVALVRQVKADRKLVVAMESSGTYGDALRQALGDSGIEVRRVNGKAAHDYAEVFDGVPSQHDGKDAAVVAELAALGKAKPWAYQAADSWEEELTYWVEEMVAQRQMVTLWQGRLEGLLARHWPEASQVLKLSSGTLLRILKRYGSPQALAEDAGAAKQLARWGRSLLSPEKIEALLAGARSSVGVRVGPWQQRQIQEYAEKALAARQQSDRAQRRLGQLAEGQTVLQAQGKVVGVPTACVLWVSTGDPRSFDSAAAYRKAMGLNLVERSSGTYQGLLRISKRGSARTRQWLYFASMRLVQKCGVRPWYEAKKARDEGDARRVLVAVMRKLAVALYHVGVRNEEFQPRRLFGRIDRRGGRSAGRPVSSAEPA

SEQ ID NO: 491378 - protein, 407 aa, unidentified
MLFVGDDWSEENHDVELMGHDGRVLARARLSEGAAGMTRLHAMIGEHAGDGEPVVRVGIETDRGLWVMALAAAGYEVFAINPLQTSRYRDRHAVSGSKSDTGDAHVLADMVRTDSHQLRQIAADSPAAQAVKVVTRAHKTLIWERTRQVNRLRHQLRDFFPAALEAFDDLDAPDALELLAKAPDPASAARLSTAQVSAVLKRARRRDIAGRTAVIRAAFRGPQLAQPPQVTAACASVVRALTAVLAALNEQITVMEAQVNAHFLQHPDAEIILSQPGLGPILGARVLAEFGDDPARYASAKARKNYAATSPITRKSGKKKIVLARYVHNDRLIDALDSQAFSALSISPGARAYYDRQKERGISHHAALRQLANRLTGILHGCLKSRTLYNEATAWPQTASHQISSAA

SEQ ID NO: 491379 - protein, 321 aa, unidentified
MHSYHLGIDVAKAKLDCALRLPDGKYRNKVVNNNASGFKTLLEWLQKHGAASAHVCMEATGVYWEEVAAYLAQRGLPVSVVNPAQIKAFGASHLVRTKTDRVDAQLIATFCFERSPALWQAPSATEQALRAMVLRLDALQNMRTQESNRLDVARDAVKAGIASHIAWLDKEIDKLARQIRQHMDNDPDLKGKQELLDSIPGLGERTIASLLAFYGDLQRFDNARQAVAFAGLDPRQHESGSSVRGKPRLSKVGHSFLRKALYMPAMVALHRTAWGAVFRQRLAAAGKPPMLIIGAMMRKLIHVAFGVLKSRQAFDPSLHGA

SEQ ID NO: 491380 - protein, 368 aa, unidentified
MGLGRIVVYKLNFMNKYSVGIDISKNDFHACFSGIDSNQKVKVLRSGTFKNNNNGFVELAKWVKDTASEKNIPVVIIMEATGVYFENCALSLFKNGFNVSVILPNKAKKYIAALGIKTKNDKADAKALSRMGAEQALQLWQPMDDYFYELRALTRLYQTFQENITATKNQLEAAELGMYPSKTIIRSLKKIISETEKQLLLIRDTIYKHLASNKSIAAKVKCIAEIKGVAALTIAVLAAETNGFLLFENASQLVSYAGYDVVESQSGLRVGKTKISKKGNSRIRRALHMPALNVVRYKVKKFQVFFERNLERHGIKMKSYVAVQKKLLTTIYALWKKGEIFDPEYDSKNTTRDADAVQSSRPNFAEVG

SEQ ID NO: 491381 - protein, 355 aa, unidentified
MITKHAKSRSMNNRELTDAVSYVGVDIHERESQIAIFDPSGSLLQEKRLRTRDLQRFIDSLPGEKHVAVESVGFIYPVYDKLSQIANCQVAVANPKSVSLIAKSKLKHDKADAKVLGELLRTNYLPLSYLPDEKTREERFLINDRVKYGLRRAELKGTIKWLLKRKGITGVDAGRGEKAFGPEGQKKLRALSLREIDIRLDELELVESIIQRLDEQITRTVAMDEKAKLLDTLPGVAAYTALFLSSHIGDVNRFPDSKHLCADLGLAPSLHQTGDIRFTGHITKQGNKWLRRNMIECARAGIKKDPHLKEFYLKLRHKRGEKKALIAVARKLVSYAYWMLKRNITYEELNPWQMA

SEQ ID NO: 491382 - protein, 343 aa, unidentified
MRAVFGIDVSKVNSEVAILVNGEKVHGYTMPNDAIGFTWLLGDLKTVHNPEIVFEATGVYSRRLQSFLDEHGYAYTRLNPLEAKKQLDSLRVRKTDQIDAEKLAQSQFVLNRKPTYVQEEVYQNLRDLSRFYQNLTEDIVRAKNRLHKVLQVTFPELETILSTPSGEQYWNLVIAFPCKDFVLDLSKDELSESIRQSTSKRISDKRVAYLAEKLIALANQSYCAVKKTSPILEEVRYYGKELLRLSEQRQTVLDQMVELAQPLPEYDILLSIPGIAETTATSIIGELGDIRRFQSANQINAFIGIDLRHYESGNFLAKEHITKRGLTRKRSSCFLASKGLSLV

SEQ ID NO: 491383 - protein, 350 aa, unidentified
MRIESKQLLPTWNGLDVAKETFDSALYMPVEPGQAPRDIMSLPKKTFARTLEGVKEFHDWSFQVRDKAGLEGGNMRIVMEATGRYSKELAGWLNAEMAFTRPVIEDPRAVKDFVKSLKLRNKTDRIDAGALARYGAERMPEPSEDMPEEYQYLRKLTRQREALKDQLTAARARLTEMGEFKKMIKIQQAVIKSMEQAVAKMELEIKRCINDSEELRKSLKYAVTVPGVALIVSATVLGECGPLYRHTSRQLGSYSGIAPQIRQSGTSVCGSRISKRGSGNLRRVLYMASIAAIDHNPEMKMFYNRLIAKGKKPLQARCAVMRKLLILIRAVVVNETEYDKNFAKKSILKT

SEQ ID NO: 491384 - protein, 385 aa, unidentified
MDQTSSSTLCANILHCALELSKKSWLLAIQFPDREQPSLYSIEGGNTEKLMAKLIVARDCWAKTSGALPVITLCYEVGYDAFWLARFLKTRGIECLVIDPGSLQVNRRGRRVKTDRVDVKMLLRTLIAWCRGERHVWSLVRIPSVDEEDLRRSHRERSRLVRERTAHINRIKGLLFAQGIRGINIKSQYKTLAVDKLVTGDGHRLPPRLSCEVAREIQRLAMVQEQIAEIERERDTAPTPCEATERKRHLLLRLKSIGPAISALLSREVYYRQFANRRQVGSFLGLTPSPYNSGEQEHCQGISRAGSGHVRAVMIETAWLWIRHQPKSALTRWFVERTAGQSKRMRKIMIVAVARKLAIALWRYVELGLVPQGAILNPPMTGSAR

SEQ ID NO: 491385 - protein, 352 aa, unidentified
MRTSQKTAGIITTIGIDLGKNTFHLIGFDQRGAIILQQKVSRGQLERRLTNIPRCLIGMEACSGSHHIGRQLQAAGHDVRLIPAQYVKPFLKGHKNDYRDAEAIAEAVQRPTMHFVAIKTPEQMDLLALHRVRSRLVSQRTGVINQIRGFLIERGIIVRQGVVPLRKALPEILSSQTGPLSPRMIGVIADLTQDWRRLDERIGGVSAEIEALAEQDDGCQRLMTVPGVGPIISSAVVAAIGNGAGFKQGRDFGAWLGLVPKQESTGDRTILGKISKRGNKYLRTLFVQAAHVVLVRRPRAAMRGLWPWIEQASKRLHRNMLAIALANKLARIAWAVLARGRAYQPRTAADAA

SEQ ID NO: 491386 - protein, 353 aa, unidentified
MLIIGCDFHPGFQQIAIFDNQTGAYEERRLSHRAEAEQFYGALAGQEVRVGMEACGHYPWFERLLAELGFELWLGDAAKIRASVVRQQKTDRRDAAHLQRLMREDRFPRIWVPSLEERDVRQLLVHRHKQVQARTRTKNQLHALALSQGVQKKWKLWTAAGRAELESLELLPYAAQRRRQLLHRLDALEAEIAALNRQVEEEVKGRPAAGKLMTHPGVGPVTALAMVLTLGPAERFRDGRKVGSYFGLIPSEYSSGGRQRLGHISKQGSSFVRFLLVEAGQSAARKDAELGRFYRRLGARKHRALAKVAVARKLAVRLYLMLREDWTYAQLCRAVVQASPSHSVAASQNRPLE

SEQ ID NO: 491387 - protein, 423 aa, unidentified
MEVMHERCAGLDVHKKVIVACVRLAIGRKVERECRTFDTTTTGLLALRSWLSASGCTHVAMEATGVYWKPIWNILSDGPFELVVANAAHIKNVPGRKTDMNDAMWIADLVACGLIKASFVPDQPTQELRSLLRTRKQMTREQTSHVQRLQKTLEEANIKLDSVISDIVGVSGRCMIEALIAGETNPVRLADLADRRIRAPRQALREALHGRVTNHHRFLLQLHLGQYDALAAAITEIDHQVGVLIERVDERVEGGQATFRALIRLLCSIPGVSTLAAVVILSEIGRDMSRFPTAGHLLAWAGLCPSQNESAGKRRSSRLRKGAPWLKTLLIQCAWAASRKQDSYYKAQLNRLKSRRGPKTAICAVAASMLTAIYHMLKDGTEHRDLGTNHFDRRSVDTKAKRLVNQLTKLGFQVRLEPLTQAA

SEQ ID NO: 491388 - protein, 354 aa, unidentified
MKGELRNRNVVVKGKDVFIGVDVHKVSWHITARAGGEEVFNGGIPGQYLALRGILDRFKGCPMKLAYEAGPCGFWLHDKLAKDGIEVIVVPPSLIPIESGNKVKTDKRDSRKLARLLESQMLKRVYVLTEEDRADRELLRTRRQVLEHRSDVARQIKSKLLFHGIASPFSTKTWTQGYLRWLKDLTFEREVLRISFNFLIELYDYLTAQLIQLRKKIVELSRSDKYHHKLNLLKSVPGIGTLIAMELLVELSDIERFARADELASYIGLTPSEFSTGEYVRQGRITRCGNKRVRTCLVESSWLLIQKDPWMRSKYDRLKRIKGGKRAIIAIARNLIIRIRRILLNNEPYVVGVC

SEQ ID NO: 491389 - protein, 360 aa, unidentified
MVARRSARLAGSGEGSDVFVGMDSHKDTLAVSIVDGAGCQLQAQSFPNTRHGHRRLLVWLQAQPGLVRVGIEGAGGYGRVVAMSLLQAGLVVVEVTPSLTVRERRRLRQRGKADPTDALAIARVVAREQDLPPVRRQDLTEDLKLLVDYREQLLGERTRIANRVHADLVALEPGYQQQLPELRSQRAAGLVRRLLRDQVSVRAELVRRRLDQLDRLDAEIRQLKQRIGDLVQATGTSLVQVHGVGPLVAARILGEVGDVRRFADRHKFAAANGTAPIPASSGRIQRHRLNRGGNRRLNRALYVVAITQARSDHPGRTYLARKQHQGKTRREALRCLKRRISDAIYRQLLADLQPDPNPAP

SEQ ID NO: 491390 - protein, 427 aa, unidentified
MRVLYDRVAAIDVHKDMVKVAVRVPGQRRGTRKTDVLEFRTFYGVLQEMARELRRRGVTHVVMEASGVYTEPVYYALTELDFEEVMVINPAHAKALKGHKTDAKDAVRLLDLYECGALLRGSYIPAPDLREVRDLARYRMKTVQARTSEIQRLQKTLESAGIKLSSVVSEVTGTSATAMIEGLISGERRGAVLAENAHIRMRNAGKMADLSMALAGRFTGHHALMCRLHLDRIKIFDQAVAGLDGHIAPKVAAYPREAALLDSLPGFGDVVVAGWLGAIGPAPHQHFATVDRLASWATLCPGNYKSAAKSKGGRTGDGGAYIKPLLIQAAWAAVRMPGRLQARFRRLVRKFGGPRNKGAQKRAITAIAHTLLKIAYSVLKTGKPYQDLGDDFYSRREDPAARQDYLMRQLRKLNPGCVITITPTEAA

SEQ ID NO: 491391 - protein, 392 aa, unidentified
MKTNAIKEGTVEGAEQGRKTHQLIKLGVDVHWHEYVVVRQIDGSSPQSAQRFSPEGFVAWAARQTQLAEQVWCCYEAGPFGFVLHKQLERLGVRNVVVRPRNWDEYGAKVKTDRRDALALCSSLDRYLAGNTQALAVVRVPTDEQEHSRSQTRQREQLVSERKRLGAQGLCAARYYGYDLPDQWWRPRRFAALQSQTPDFLLELLARWQRLLLAIDEELDSLGGLIESAQQQMLPTGLGALTAQILDREIGEWNRFKNRRQIASYTGLVPSEHSSGQTQVRGSITKHGNPRVRHILIEAGWRLRQFQPEYRAVKQRQAAFDSAKQKGNSPARKRLGVALSRQFIVDWWRIKTGRTTPAQLGLQMSWPTCPHLPSKSKPSSETSAQPPTQPIG

SEQ ID NO: 491392 - protein, 346 aa, unidentified
MVYAGLDLSRKRLDFHLLDGAGATVEVGAAPPDADGLLGLTRRLDRHREPIRAAIESMNGARFVHDRLELQGWQVEIADAQKVKGLAPLACKTDRIDAWVLAELTRRDLVPAIWLPDPMVRAERERARWRLHLVRHRSSLKQRVHAVLLTHGKPCPVTDLFGVGGRQLLASLGLPQPWQATIEASLRLIDELDREITDCERELRRLGADHRYVPLLLTVPGIGWVLAYTIAAEIGDINRFPSPRKLAGYTGLCPRVYQSGERDLRGPLAKQGPKYLRWALVEAATHACTHPAYRDRYQQTKARIGKQRGAKVAQIDLARRLAEAIWHMLSRNQPFAPKGATDPLAA

SEQ ID NO: 491393 - protein, 349 aa, unidentified
MPLIPRTRSSDAELCRTLQLIMVAKMSDFILGIDVSKETLDAYCARGRRKQGRTFANSPDGWKLVRVWLKAMGSKQAHVCMEATGRHSLGVALALHEAGHVVSVVNPAQIRDFARTKLGRNKTDKVDAALICEYAELFKPEPWTPPSPAMRRLCDLQTMRSGIIRSRAEWKNRIGSGLGDSTATKLAAATIDHFTSQLEAIDRAIGETIKQDAELRGRCDLLLSVIGVGETLAASLMAEMPEPGVLRRSGEMVAYAGLNPSHHRSGTSIDRPTRISKIGNATLRSSLYMPALSAMRFNPAVAILVARLKSAGRLKPKQIVVAAMRKLLVLCFGVLKTGKRFDLAIAMPA

SEQ ID NO: 491394 - protein, 387 aa, unidentified
MTTHANDMSRSLAAFDEHSTLVIVVEMGQKSWLVAGLIPGVERHPKKKMDPDPEKLLSLLERWRGEAVKAGRPITRIAVAYEAGRDGFWLARWLESRSIETHVIHSTSVAVSREKRRAKTDRVDAEMLLRVFLGWLRGERDHCSMVAVPTIEAEDDRRPGREREALVAERTRITHRMKADMARLGVRGFKPYLRSAPKKLAAVQTPEGVAVPPNTKAELERDMARLAVLREQIAAIEKTRLKRIEAAPDKGPHAMIRLLARVVGIGIETADMLVNEVMTRRLRDRRAVARYAGITGSPEESGKRRREKGLSKSGNARVRRGMIQLAWRWLTLQKESSLTVWFNARTEGAPGLRKKMAVALARKLLIALWRMTTTGEIPQGILLRPAA

SEQ ID NO: 491395 - protein, 358 aa, unidentified
MAEHRAETHVIGGVDTHKDLHVAAVVDHRDRVLGTESFPTTRHGYRLMLAWMRSFGDLQRVGIECSGSYGAGLLRYMQTAGVEILEVTAPDKLDRRRRGKNDNFDAESAAHAAFARRHTVTPRSRDGMVESLRILRVCRKTAIQARRIALQMIQMTIVCAPDKIRDPLRSMTRMQLIRTLAAGRPDLTAYRQVEEAYRISLKSLARRYLELHDEIADLDDMIEAIVKDLAPELLAQTAIGVNSAAQLLLTAGDNSDRLKSEASFAALCGVSPVPASSGKTVRHRLNRGGDRAANSAIHIIAIGRLRLDARTQDYVARRIAAGKSKLEAIRCLKRYIAREVFAIIMRRHREINQSQIAA

SEQ ID NO: 491396 - protein, 391 aa, unidentified
MIFVGIDVAKDTHYAAVSDDSGAVLVKPFAFQNNAEGFCLLLKKLSEFDRSKLLIGLESTGIYSENLICFLYESGFRLAVINPIQTATLRKTAIRKTKTDKVDTMLIIKSLMVNSYRLYSQRDADSLKLRTLCRFRQNLKKSKARLKIQLAGYVNLVFPEFGKFFKSGIHIAASYALLKKYSSPKEIAALRTSTLCTLLSKASHGRFGKDTAEALKSLALSSVGVKNPYISIQIAQTIARIELLEQQIKDLNSAIEEAMESINSVLMTVPGIGAVNAACILGEIGDIKRFSKPCKLLAYAGLDPTVRQSGQFTAKSTRMSKRGSALLRYVLINSAWQLTLNDTTFKAYYDLKRSQGLNHYGALGHVAHKLTRVIFKLLTSDTPFNPAKLVA

SEQ ID NO: 491397 - protein, 412 aa, unidentified
MFKIFRNNCCGLDVHKTWIYACIGITDPNGRTEYKQARFSSFSNGLRELAAWLAKYSCTEVCMESTGKYWIPVFNILEKSCSVTLAHPKYTKPQKGNKTDRKDAKWICDLFMCDMIKPSFIPSPEIRQLRDLVRYRVKLTNMLTGEKNRAQNCLTVSNLKLDDVFSDVFGKSARSITNYILEHPGETFDVSPFVDPRCKTPVSEIQAAIEGAISPEQAVKLRQCLAHIDELEAHRKEIESEILQIAEPFSAVLDLLYTLPGLDKNPMTAIAILSEIGPDMSVFPSSKHLVSWAGCCPRNDQSNQKVKSRRISRAGSYLKPLLVQVANALIKSKKHPEFKERYHRIKSRRGHKKAVIAVCKMLLTAIWNMLSKLEPYNPEGFLEHRPVRQEKTLTVSQALELLRLRGYTITNQ

SEQ ID NO: 491398 - protein, 405 aa, unidentified
MNAVGIDVSKGKSMVTILRPFGEIVSSPHEIRHTSDQIDILIQEIRSLDGDTRIVMEYTGRYHEPVARWLSDAGLFVSAVNPKLIKDFDNDSLRKVKTDKADSVKIARYTLDKWNNLKQYGFMDELRNQLKTMNRQFGYYTKLKTAMKNNLISLLDQTFPRANTFFDSPARSDGSQKWVDFVDTYWHVDRIRSMSLSAFTEHYQKWCKRKGYNFQPDKPAEIYESIRNIIPVLPKDEVTKFLVRQAVTQVNTASVAVEELRARMNDIASQLPEYPIVLAMKGVGTSLGPQLMAEIGDVTRFNHKGALTAFAGVDPGKNESGSYAQKSVHTSKRGSAPLRKTLFQVMDSLIKTMPQDDPVYTFMDKKRSQGKPYYVYMTAGMNKFLRIYYGRVKEYLAELSETEEN

SEQ ID NO: 491399 - protein, 412 aa, unidentified
MRVLHNVCCGIDVHKKTVTACLMWGPADREPQFQIRRFGTMTRDLQKLAEWLEHAGCEVATMESTGSYWKPVWNVLEGRLKLILANAKHVRALPGEKTDPKDGKRLAELTRHGQIRASFIPPRAIAELRDLTRYRSKLLAAGASERHRIQKVLETANIKLGSVLSDVFGVSGQRMLQALINEDTVDIEKVAQLAHWRLKPKIDAIRQALEGKLTAHHRFLIDMSLNHMRALEEQLVRLDEEIQRRLQPFQQEYALLQTIPGIKQIGAARILSEIGADMSAFGDSDHLCSWGGVCPGNNESAGKKFESKIRKGNQHLLAALTECSLAATHQKNSHFRSKYYRLKARRGPQRALVAVSHTMLKSIFVVLDQRQPYQEPKPASLTPAQKSRKASSLCRQLRELGYEVTLKTPQDV

SEQ ID NO: 491400 - protein, 347 aa, unidentified
MTYNHPHRFYCGVDLHARTMFLHVLDHKGKTLFEQDLLADPAAFLRAIKPFRKDLVVGVECMFAWYWLADLCEDHGIPFALGHALAMKHIHQGKSKSDQIDAGKLAAMLRGGLFPLAYAYPRAKRQTRDLLRRRSFYVRQRAQLIAHVVNTNTQFNLPPLSKKLTYAANRTPELLDRFTDPSTRLMVAADLAMIDSSDGQIAELERHLVKHARVDDPVTFGLLRTVPGIGPILGLTLLYEIDDIRRFPEAGNFLSYSRLVRCEHSSAGKVKGSGPKKMGNAHLKWAFSEAACLMIRAMPAVKGWMQRQQKKRGKRKALSVLEAKIGRTVYHLWRKQVPFDVKRFLKG

SEQ ID NO: 491401 - protein, 371 aa, unidentified
MGAYYVGLDVHSRETVFVIQDPTGAVIGRGALPTTPEALAHLCHQYQLPAGTPVALETGTSAFYVARALSALDLKPIVIDAHEVRLKAHRPGQKSDRRDAFELCDGLRRDLYRSIVHIPSPAISALRTALSRRRHFVRIQTAEVNATKRLLRGAGWLGGNRGSLRNASGWERLIDALAREPALQTHTRFHYAVWQQAGEQVRAIDLLLAELGHGFGDEVRRLETVPGVGPIVALTAVAVFADVERFGSAKHVASYAGLVPSTYQSADRDCHGHITKRGSAELRTMLCEAAQHARRPSHPLHPYFLKLCARRGYKSAVVAVAHRLCRVLYALLRDGTDFQPSRLGIEEGPFTQTVTRRFRLTPKSPGRLALV

SEQ ID NO: 491402 - protein, 390 aa, unidentified
MDVLYQSCAGIDVHQANIVVCILHGPLTSTRPKREMATFDTTTKGLRACHDFLSQFHVEAVGMESTGVYWRPVWHALCDDFELILAQPAHMKAIPGQKTDKKDAHWIAKLTRIGLLPRSFVPDETIQELRELTRQRKHYVESRNRETNRIHKILQSGGIKLTTYIEDIMGLSGRNLLQLLVDGTPITPRIVHQSVYTSLKKKVRRLLEALDGYFSDHHRFMLKQSLEIYDFYQKQIELLEERMNVYLSQYENHVEILDSIPGIDVITASVIISEVGVDMSQFPTSGHLASWAGLCPGNNESAGKKRSTKIRHGNSYLKKCLCQAAFAIKNQKGSPLADRFYQIQSRRGSQKATIALAHQLLKIAYILLKEQITYPEFLAQKKTTRDELVA

SEQ ID NO: 491403 - protein, 312 aa, unidentified
MAMLSFCGIDVSKDRLDVVVLPEGWFFSVSNDTAGWAELVVRLRPLAVSAVGLEPSGGYERGIIRALLAAGLSVRRINPNKLRQFARARGVLAKNDRLDARLIAEYVAIMPTRVVQRDAAVERLAEIVTMRRQLCDEHVAAENQAAHLEDAMLRRLSKRRQTRLEADIRLLDKRLAEMVAANVALAQRYELLTSMPGVGPVLAFTLIALLPELGKMTRKQIAALVGLAPYDFDSGKLKGHRSIYGGRMPVRNVLYMAALSASRYSPALKAFHNRLADADKKSKVIIVAVMRKMITTLNAMLRDSAAWQPRSA

SEQ ID NO: 491404 - protein, 345 aa, unidentified
MLPASTRPPYLLLVGIDVAATPSPPFPPLRGRPSSVPARLPQPPEGFAALLDQLRASRVAPAQTLIVVEATGSYWVALAVTLHETDYVVSVVNPAQAYRYAQSLPRRAKTDLLDAPVLAQLTAERKPAPWTPPPQVYHELHQPLIARDGLLTMRQQGRNQLHALLQWPVVIESVRVQLDGLIADLDRRLADLEAEIAQVLADGAWAESAALLLSITGIGLITTAWLLVGTMNFQVCSSACSASVYVGPVPVARESGSSVRGHAQIGHAGHACLRTALYLATLTAARFNPAIKAHYECLRAAGKPAKVARCAAARKLLYLAWAIVTKRQSFDPAYSSRSVAERLVG

SEQ ID NO: 491405 - protein, 414 aa, unidentified
MLKIVYRVCCGMDVHKSFVVACIASTNEYGVTTYKSKRFSTFTKDLRRCADWLSENNCKDVCMESTGKYWIPIYNILEPTCNVVLAHPKYVKAIRGKKTDKRDAKWIADIFKHDLVAGSFIPPADIRQLRDLVRYRWKLTNVTTGEKNRAQNCLTVSNFKLDDVFSDVFGKAASAITTRILQDPTEKITDVSGFRTKGMKATNEQVLAAVDGEMCEEQAEKLRIIRSHMDSLELCKLNLESLILSTAEQYLPQLNLVMTVPGIQSFAAIGIISEIGVDMSVFPTSKHLCSWAGLTPQNNESAGKKKTTRISRAGAYIKPLLVQCALCAIRAKQFPELRNRYLALKKRRGHKKAIIAIARMLLTAIYNMLKKNETYNPEIYRKGDRPPAHREVSVEEAIFILQRQGYLVTAPPTS

SEQ ID NO: 491406 - protein, 339 aa, unidentified
MVEVYAGLDISDKSTHLCVVDGSGVVIWSGACATDPEVIARTLRTRAPGLVRVVLETGPLSAFLYHGLVERGVPVICVCARHAKGVLSARVNKSDPHDAEGLAQMARTGWFKAVRIKAEATHMDRARLKIREQLIVSRRAMAGQLRGLLKLFGLRLGQVTTPGKRRERLAALFAIKPELEPILAPLIESLEALEVQIARSSRQLAAQAAADPVAARLMTTPGVGPITALVFKTSIEDPGRFDRGEDAGAFAGLAPRRNQSGERDYKGRISKAGDPMLRSALYEAANVLLVRVKRPCALQTWGRRLAETKGPKRARVAVARKLAILLHRLWQSETEFRWA

SEQ ID NO: 491407 - protein, 343 aa, unidentified
MDHFAGLDVSVKETSVCIVDDTGRIVREVKVASEPEALLAVLTNPACHFTRIGLEAGPLSQWLFSALAEAGLPVICVETRHMRAVLKAQINKTDRNDARGIAQMMRVGLYRPVHVKTLRSQKLRMLLTHRKLMQSKAIAIENDLRATLRNFGLKVGVVGTVKFEARIKELVENLPDLAVLVEPLLIVRRVLREQIGILHRRLLAIVRDDDVCRRLMTVPGVGPVVALTYRATVDVPCRFRNSKAVGAAFGLTPSKHQSGESNRTGGISRCGDEMMRMMLYEAAHIMLVRSAKWSWLKAWAMKIARQRGLKKAIVALARRLAVIMHRIWVDGTEFRWTREVAAA

SEQ ID NO: 491408 - protein, 424 aa, unidentified
MKVTYQTCCGVDVHKSFLVATIVKTTGGIEPSYQKKRFSTFNNSILEFKQWLLDNDCHDVCMESTGKYWVPVFNLLEDEINVVIANPKWVKAVKGNKDDAKDSKWIGDLFRLGLVKGSYIPCKKVRILREYTRYRYKLVSCRSSEKNRYQNALTVCNVALDSVVSDIFGKSSTSIIDYLLEHSGISINHEEIASKLLRSLKSKEDAVIESIEGYQMTDAQKYRMRLVRAHMDYITAEINDVDKMIENAISSDPDFENAVQFLCTIPGVKRDSAITIISEIGTDMTQFSSSKRLCCWAGLTPGSNESAGKKKSVRITRAGVYLKPALVQCAHAAVKSDKSPYYKKKYDSLVKRRGKKRAIIAIARMILTAIYQMLSTGELWNPSDLYKIDMPVALVEKQKAKAIKQAKKLLQQEGLLPPDEPLAS

SEQ ID NO: 491409 - protein, 416 aa, unidentified
MTDQRQWYAGVDWASESHHVFLTDGDGRKKGERVFKHSGEGLAEMAAWLMATSGAVGGSKIQVAIEVPHGPVVETLIERGFKVHAINPKQMDRFRDRFTLAGAKDDSRDAEVMASALRTDPRCFRLLAVADPVVIELREWSRIAEDLGAERNRLTNRLREQLWRYFPAILELENDLGAEWLLDLWETVPTPDKAARIHETTIAKLLKRNRIRRFDAAHVLDVLRKPPVQVAAGTTEAASAHITTLIARVRLVNRQLKDAHHRLDALTARLIPTEEAEPGQRKQHDVEILASLPGVGRIVLATLLAEAFDALQRRDYAALRSLAGVAPVTKRSGKSCIVVRRQACHDRLANAMYHWARVAVQHDAKSRAKYTALRSRGHSHGRALRSVADRLLNVTCAMLKAGTTFNPSLAPQESSC

SEQ ID NO: 491410 - protein, 435 aa, unidentified
MEEVEDEPLFCDRVAGIDIGKATVMVTIRVPSEARAKGRQQETREFGTTRRELLALADWLRGWQVERAGMEATSDYWKPVLFTLEQEGFDCLLYQASQVKALPGRPKTDKLDSVWLARITEQGSLAGSFVPPEEIRRLRTHTRYRRKLVQMRTAQKERCEKLLEDAHLKLSSVISDIHGVSGRDMLRAIAAGERNPKVLAQMARGVMRSKIARLEQALDCSFFTGEHAFILTMMLDSIDSLTAQAGVLDARIADMCQPYQRQLEQLDEIPGFGTTTAQDLIAEIGTDMNVFPTAGHLASYARQAPRVKESAGKRKGKNATGRGNPYIGGALGEASISAGRTQTFIGEKYRRLTRRMPKRKAQVAIMRSQLVIAHALLSDPDARYQDLGPDYYERKADIRRRARNHARALERLGYKVTLEAIDPGTGELHLLATAG

SEQ ID NO: 491411 - protein, 415 aa, unidentified
MLFVGDDWAEDHHDMEVLDEAGRRLGRARLPEGVAGIDRFHALVGRFADPDDESGAGQVLVGIETDRGPWVAALVAAGYRVFAVNPAQAARFRERHAISGAKSDTGDAHVLADMVRTDAHQLREVAGDSALGEGVKLLAGAHQSLIWERTRHLLRLRAGLVEYFPGVLAALAAGGLDLGDRDALELLATAPDPDTAAGLPAEQITDLLSRGARRGDLPARAEAITAALGAPQLTQPPVLAGAYAIVTRSLVAVLTSLAEQVTELESQVGAYFGQHPDAEIYRSQPGLGVILGARELGEFGDDPHRYTSAKARKNYAGSSPITRASGRKSVVLARHVRNRRLADALHAQAFSALRASPGARAYYDALRARGIGHHAALRQLSNRLVGILHGCLKTRTLYDETTAWAHHQQDQPSAA

SEQ ID NO: 491412 - protein, 357 aa, unidentified
MTQTSITTAGIDTSKAKLDIAVHGRTERWQLANTLSGWRRLAANLAEIGVARIGIEATGGYERGVVEVLRAAGFTVLVLQPIQVKAFARVHLRRAKNDALDAVLIAACAAAMDPPRIAPDPRMSDLAGYLTFLEQIEEDIARFKTRLEHIDEPGLRRIINSDIARLKARRVAQIRDIANRLRGHDDLAVRLDLVLSIPGIGERTALALIIRMPELGQISREEASALAGLAPFDDDSGKHKGQRHIAGGRGRLRRSLYAAALPAAFRWNKALSSLYARLIACGKAHKAALIACARKLLIYANTVVQRGTPWIERVPNVSKSSVLPLRGFTPRAFQNARPIIPTRAKSAKSWVSQMGIG

SEQ ID NO: 491413 - protein, 413 aa, unidentified
MTEESFAWFAGVDWGSEKHQACIVDAQGNVAGEREFPHSGAGLAELGDWLLSIAGAVSSVAIAIEVPHGPVVDTLIDRGFVVHAINPKQLDRLRDRFSVAGAKDDSRDAYVLADGVRTDRRLFRRLHVADPQLIALRAWSRLAEELQEERVRLSNRVYHQLWRYYPQMAKLTDDLAAPWFLELWTIAPAPAKARHVRQSTVEQLLKQHRIRRIDAETVLRTLREPAIRVADGVAEAAGIHMRSLVARLRVVNRELREAEGQLDKLCTAIGETEPTSGDCLRRQDVMILKSMPGIGRINLATLLCEGSGPLSRRDYPALRTLCGVAPVTKRSGKSHIVVMRHAAHVRLRNTVYHWARVATQHDPKSHSRYVALRRRGHSHGRALRGVADRLLGLACVLLQRQTPFDPQFGQPAT

SEQ ID NO: 491414 - protein, 402 aa, unidentified
MWFAGIDWTDTHHDALVIDETGRQVGSLRVAHTKAGIEELKRFLLALVKTPDQFACIVETSQGLLITALLEAGFTVYPVNPKTVDRRRNAAGVKTDAVDAYLLAKTGRADLADLRKLQPDTPLVAELKLLTRDQDGLIQSQTRLVNQLTACLKTYYPVALTLFSKLHQRSTLGFLQTYPTPEAAMAASASEIETLLRKEHHPHPKAGAHQIVELLHQPHLVADAVTTRAKSRLMLALVSQLVPLVAQIAHYDKEIARLFLSHEDNEVFSSLPPAGKRLAPRLLAEIGEDRTRYADAASLQALAGTAPVAFQSGNYAKAHKRYACLKPLRNALYQFAWQSTLKEPWALAYYQRKRAEGKSHTVAVRALANVWVRIIHAMWLNHTCYDPATFEAAQRAHAKVAA

SEQ ID NO: 491415 - protein, 488 aa, unidentified
MKNNTTTLHDCTLEGIRFGGCGNSEAMVWKLGLDIELRAVAVAIQCGRGVIGPAVKWSREQLLQWVKEKRARGEAVHTVYESCGFGYTLHEQLSAAGANSLVTTPMRLNLERKRKNDRIDARELCVRLSRYLDGQSYELRPIRIPSRCEQQRRELGRQREFWKREVRRLENHGRALRIEHEHETLEAGWAGPRKWKRLAPQCSQFVREQLTPVVAQIRSAKAQLDRLSEQIESLVKKEQIPVGLGALTVSLIEGEVCQWERFAHRKAVGSYTGCCPSEHSSGPIQRFGAIDRHGNKHLRVLLVEAVWRLLRWQPHWHARQKYLLKLRHGSKKKIAVALARQLAIDLWRWRTGRASAQELGWSLPTLPLPEQPKPALVFTKPHQPRQSVPQGGTLLDAAADPKGSSLRMGAFHPQALPQVQARHHGRRSPLATARIGAGDREKPPHVNGKPPIAEQTDPWEKPQKQRSKPKATPSPRLTTLIGAAAAVH

SEQ ID NO: 491416 - protein, 387 aa, unidentified
MSQVDDLSRSLAAFDQNTTLTVVVELSEASWLVAGLVPAVDRQPLKKQEPDPRALLRLLERWRAEAAKTGRMIERIVLAFEAGRDGFWLARWLRARGIEVYVIHSTSVAVSREHRRAKTDRLDTGMLMRVLLGWLRGERGHCRMVAIPTLEEEDAKRPSRERESLVGERTRIINRMKSALARLGIRGFKPALRKAPQRLEALRTPEDTPIPPNMLDEVRRDMIRLAVVREQIDAIERARLVRLEQAPARGSHPMVRLLARVIGVGIETADMLVQEVLSRKLRDRRAVARYVGLTGSPDESGKRRREKGLAKAGNARVRRGLIQLAWRFLRFQKDSALAQWYRARTEGPKGVRKTTMIVALARKLLIALWRLVMTGEIPVGVVLRAAA

SEQ ID NO: 491417 - protein, 353 aa, unidentified
MTSLTDLREVVDVVIGVDTHVHTHSAAVVDAATGGVLGEITVAATAAGYAELVEFANNYPMLRAWAVEGTGGHGAGLSRHLLESSELVVELDRPKRAARRNGAKSDPLDAIRAAREAMARPRLGTPRSGGERQALSVLLAARRSAINASTEAQLQMFSLVVAAPEPVRVRFRGQKLAAMLNTAAKLRVHSAWDVETTSTVVALRTLARRAHAMLKEARELQKAILAIIRGWRPDLLEEFGVGPIVAATVLCAWSHPGRIHSEAAFAMLAGVAPIPANSGQVTTRYRLNRYGDRHLNTALHTVVQIRIQYQPATRDYVARRTAEGKTSREIKRCLARYVARDLYRLLESGAAAA

SEQ ID NO: 491418 - protein, 372 aa, unidentified
MFTLTELGPKEAEVRIIGCDLHARQQTLAMLETATGEVVKTTLKHEGNSVWEFYSSLPRPVRVGIEATGSMQWFVNLMEELGIDCLVGHPAEIRAAEPRKQKHDRRDADLLLSLLVEERFPKIWLPTKELLDLRALLRHRHQWVGLRVKIQNALQAIALANGLRRGSSLWTQAGQQAIATLPLSPHAAYRRNELQAMYVKFETEIEKLNQRVEQQARERLGARLLMTHPGVGPITALATEVFLGDPSRFAGSKELASYVGIIPGEHSSGKRQRLGGLSKQGNPLLRFLWSEAAIHAVRRDPELKQFYRRKLIQKGLGKARAAVARKLGIRMWIMLRDGIEYNEFCRRGQRQEKSGDACAGMPQRRYGAKVAG

SEQ ID NO: 491419 - protein, 339 aa, unidentified
MKLYVGIDLHSNNSVMVILDEKDRVMHERRLPNDLRLILGALAPHRKNVEAVAVESTYNWYWLVDGLMEAGYEVRLVNTAAVKIYEGLKYTGDEHDARHLAHLLRLGILPTGHIYPKAERSIRDLLRKRAQLVHCRTAQALSIQNLVSRNSGKGISMNEIRPLSDKAIEHLCQGDTARMLAIESNRVVLRCLDEQIKVIERKVLAEAKMKPAFENLLTVTGIGKILGMTIMYETGAIERFSKVGCFASYARCVNSERFSNGKKKGEGNRKNGNKYLAWAFVEAAHFAVRYSERVRRFYQRKKAKSNGAVAVKAVAHKLARACYHILKERTSFDVERAFA

SEQ ID NO: 491420 - protein, 354 aa, unidentified
MNKCKYVGMDVHKAITVIVVLNAAGQQESSTKIRTQSTALRDFFQRMSGTVHVAFEEGTQSAWLYQLLKPLVASVTVFDARTIQRRHNGHKSDEADAENIARLLRTNDLVPIYKGEPAQQQLKELCRTYENLVTDTTCTKNRLKAMYRARGIACPGREIYRADKREEYLAKLTDEAARFRANSLIEQWATLQKLRKQAKQRFVKQMRQHADYPYLAQLPGFGAVRVGQLLAIVGTPQRFRTKRQLWTYAGLGVVTQATAEYQEQGGQIIRSKKKVATRGLNWNHNPRLKQVFKGAARSALSYAEVRAYYDRQIEQGTSAALARVSVARKLASITLTIWQRREDYDSTQVSVEKS

SEQ ID NO: 491421 - protein, 386 aa, unidentified
MRGKTFVPQDYDVFAGLDVDKKTIAATFSSQQGFIRSLQMPYNVDHLLNHVRKHFGDQKIAFVYEAGPTGYGLYDGLAAQGYKCLIAAPSMIPRAPGQRVKTNRLDSRGLSESLRGGQLKSIHVPSQIYRELRHLTQLRDTMVREAAAHKQRIKAMLLLEGIDFPPAPAGRQWSLRVKEKLRKLVCSRTVRFKLDQLLDSLEFCEKQVVNSTKEIRRFCKEDAELSQSIQYLMSIPGIGWIVASQLLARIGDWRQIDNVRQLGSFLGLVPTENSTGDTVDRGSITRVGDGRLRSKLIQAAWSAIRQDAELREFYRSVCQRNPRGKGPRIAIVAVARKLSTRIYAVLKNQRPYIVRQQVHSVPLTQEETSPQGTTRRCAEPGETDAS

SEQ ID NO: 491422 - protein, 439 aa, unidentified
MSNLNKPNQESECAAHIGIDWADRKHFWAMRTADGKLQRGELDNTPEAIQIWAAELAQRFGGQPMAVALEQSRGAVIAMLSKYAHLVLFPIHPNTVSNYRKALYPSGAKSDPRDSDLILELLLTHPDKFRRFDPDTVETRKLQFLTEERRKLVNQHTSEWQRLLAWLKQMFPQILRWFEDPSCAMVGALLLRWPTLQALQKASPKVLRKFFTQHNCRSEEAIQERLQQIPLAVVATTDAALVESASMCIQNSVRLLEIMREGIAAFDRAILETYRNHPDRALMESFPGAGPALEPRLIAAVGSRRERFESATSMACFSGIAPVKEASGNALWIHWRWACPKFIRQTFHEWAGCSIRTCGWAREFYNGQRAKGKGHHAAVRALAFKWIRIFFRCWRDRVPYSEERYLQALQTHAPKPAPAAVEIGWKSCAGFSKLSVLSS

SEQ ID NO: 491423 - protein, 412 aa, unidentified
MKDLLEISCGLDVHKEKIVACILSGPLGKPTHSEIREFSTLIPDMIALRDWIVSQNCHHVAMESTGIYWLPIYEILEDSFSGDITLLVVNARHMKNVPGKKTDMRDSEWISTLLRAGLLSGSFIPEKRIREFRDLNRYRKSLIRDITSQKNRIEKFLQSSGFRLSSFISDIFGTSGRNIILHLIEHGQIDRTALDSCLKTKTRSRIDEILMAVNGTLSEHQKAFLRILMNHYDSLKEHLNQIEKDLEQDMEPFILQVEQLNSIYGISTTASCAIIAEIGVDMKPFKTAEHICSWAGLCPGNNESAGKRKSTSVTKGNPYIKSMLCEIAWVIAGKRNSYLSAWYWRIKQKKGAKKAIVALARKLLVIIYTMLKQGILFNEACFEVRRKNCEQKQISRYIRELEKHGYHVEAQG

SEQ ID NO: 491424 - protein, 348 aa, unidentified
MKIVGCDLHARQQSIAMLDRETGELTEKVIRHEGNAVREFYASLGKPVVVGIEATGAMQWFLELLEELGIESRVGDPAKIRAAETRKQKHDRRDALLILDLLERDRFPAIWMPTSEQRDLRSLLRDRHQWVKMRARLQHTLQAIALNHALRKGSSLWSGTGQEALAKLPLPAYTCQRRNELMSLYAQLQRRIQQLDKQVEEQAQHRPQARRLMTHAGVGPVTALATDVFLGDPSRFTTANEVASYIGMIPSEHTSGKRQRLGKMSKQGNSLLRYLWTEAGMHASGKDPELKRFYRRKLIQKGMGKSRIAAARKLGIRLWIMMRDEIDYEEFCRRGKLRQIGESPCRSA

SEQ ID NO: 491425 - protein, 364 aa, unidentified
MKKISTAKIKSQAGSKKVTIGMDLGDRTSRYCLLDEEGVVIGEASTPTTKAGIAKVFGAMARCRIALEVGGHSPWVSRQLEACGHEVIVANPRNVRLIGESTRKDDRLDARTLARLARIDPMLLSPVRHRGAEAQADLAVVRARRALVRARTMLINAARGLTKSFGERLRKCGAGQAGPTLAAELSLEIRAAVVPVLAEVEALNKRIAAYDHQIEQLVKEHYPEVGRLKQVKGVGTLIALTFVLTVDDPTRFQRSRDVGCYMGLRPGRRNSGKSEPQLHISKEGDCYMRSLLVQGAHYILGPFGIDCDLRRWGLKMSERGGKKAKKRAVVAVARKLAVLLHKLWISGEDYDPFRNSRQLVARAA

SEQ ID NO: 491426 - protein, 393 aa, unidentified
MQSVLAIDVAKGKSMVSLISSCGEVLIEPYEINHSINDFTNLLNKINKQKLDNVSVIMESTGIYHRPVERFFIKNNFKVFVINALYSKMYKRNLRKTKTDKLDCISLSELFFNTDFREYIKPDDIYLNMNALSRQYHALDELCVNLKNRYKNLVYLCFPEYELIFKKKTIYSDLALSFIEKYPHADIISNTRIDTLQNFFKKYGFRHWKKKPATIKEYAINSYPSVSKDDEITSSLSQLARLINTYQKEIETIKYKIIFLGKKTKYFESINSIFGIGEFTASLIIAEIGDINRFKNIKELTAYCGLDPSIKQSGKSINIKGPISKSGNKYLRKILFVSILNILSVTRVCHIENDIETYYRKKRNEGKHHYVATIACTTKLLRQIFVLCKQLDK

SEQ ID NO: 491427 - protein, 349 aa, unidentified
MVADWVDYVVGVDTHLEEHVLAVVAAPSGAVLARRAVRANARGYAEALRFAGEAAGGARVWAIEGTGSYGAGLARYLAGRGETVLEISRTPLPERRLRGKDDSLDAARTARAALASETLALPRSGERREALRLLLIARRSAVDVRREALGQLRGVIVTAPDRLREQLRGLPVGKLLERCSRLRQSSSASADEVATRLVLRSLARRIQAATVEAAELEQEILGHVRALAPRLLDEPGVGPIVAAQLIVAWSHRGRLRSEAAFARLAGVAPIPASSGQTTRHRLSRGGDRQLNRALHTVVLHRRQHDPATQAYIERRVAEGKSRRDATRLLKRYLARNLYRLLQNQEPLLT

SEQ ID NO: 491428 - protein, 338 aa, unidentified
MPLYGGIDLHANNSVVVLLNEQDQVIYQRRLANHLPTILEPLAPYQADITGVVVESTYNWYWLVDGLMEAGYRVHLANPAAMQQYSGLTYTNDPSDARWLAHVLRLGILPEGYIYPKAERAVRDLLRKRAHLVRQHTAQVLSVQNLMVRNTGVRFGAKRIDEFTPSELARMLPNAEQVLAVTSSLAVVHCLGQQIKTLEKAVQKRLKHTPAYAQLQTVDGIGTILAQTIVLETGDVGRFSTVGNYASYCRCVGSTKISNGKRKGQGNVKNGNPYLEWAYMEAAQFAIRFSPTVQRFYQRKQAKSHLMIARKAVAHKLARACYYIMRDLIPFDVHKAFG

SEQ ID NO: 491429 - protein, 440 aa, unidentified
MNEPNAIELVACIGLDWADRRHVICLQATGCPEAESLQLEQKPDALHEWIAQQRVRFQGGKVGIAIEQTRGAVIHALMMYDFLELYPINPKALARFREAFRVSGAKDDPSDAELLMDMLRLHRNRLRAWLPDTVETRRLQILAEYRRKFVNNRIRHTNRITSLLKMYFPQALDWAGELGTMQSCDFLQKWPTLTAIQQTRPAQLRKFYLDHHSRNLALIEERLAQIRTARSLTDDPAIVETLSLAVQAEAAQLRPVIEWIPRYDHIIAQQFALHPEHELFESFPGAGPVYAPRLLIALGTDRSRWASAADLQSHSGIAPVTEQSGNSCWVHRRLACSNFIRQTFHEFAAQSIQWSSWARAYYDQMRDRGLRQPASVRALAVKLIRIIYRCWKDRQPYQEEIHLKALRDKRSPLGRQTRLTDQLRCPCRPCQSRTALYTGR

SEQ ID NO: 491430 - protein, 344 aa, unidentified
MGYYAGLDVSLEETAVCVVDERGQVVKEARVASEPEALVDFFAKLELTMERVGLEACSLAAWLHDGLMAAGLPAICLETRQAKAAMGSMPVKTDRNDARALAQIVRTGWFRQVHVKSVTCRSWRALLMGRRMVLNKVRDLENGVRAVLRESGIKLGTPGRQRFAERVRELAGDDPVLIALVEPLLTIIITMVRELARLTKQVLDIARDEPVCRRLMTVPGVGPLTALAFRATIDRPERFQRSRDVGAHLGLTPRRYQSGETDVTGRISRCGDELTRTALYEAANTLLVRSKKWSSLRAWGMKVAKNRGMARARVAVARKLAVILHRMWRDNSEFIWGKNDPAKA

SEQ ID NO: 491431 - protein, 407 aa, unidentified
MQVFLGIDWSHTHHDACWLDERGHVLSRLTVPHTAGGLAQLETGREQLGVSRDECWVGLETAHTLLIDFLWDQGYPHVFVIPPGAIKGARRRYRQTNAHTDQTDAWVIADVLRTDPQTLHPWRPDGLIVRQLRAKVSLLHFLTKEVRRLSNRLGAVLARYYPAALQVFHDPASPIALLFLQAFPTPEAAAALTRQTFGQFARAHRYRQPDLVLSAAYARLQAAYPTAGTLTVAAYREEAVWLAQHLLATIEHKKCEIARLQELFQQHPDHELFASLPGTGDFLAPALLAKFGDDRERFPQPGSVQCLAGTCPVTEQSGKNRRVFFRQACDHEFRQIAQQWAKASISQSSWAATYWGDVRKHSRSTSHAYRCLANRWLAITWKCWQSRQPYDEAVHLQNRARRLATRA

SEQ ID NO: 491432 - protein, 403 aa, unidentified
MNSVGIDISKGRSTIAVMRPFGEVVISPFEIRHTGSELSKLAKQLKSLDGETRVVMEATGNYHASVAKLLHNAGLYVSVINAKLVHGYGNNELRRVKTDRKDAVKLANYGLDRWLTLPRYIPEEDTRLLLKNCYRQYRQYSKVQTVLKNNLISLLDTVFPNANRLFSSPIRGDGSEKWVDFVAEFWHCRCVSEKSERAFTSKYLRWCRKHGYNFREAKAHTIYAEASGHIGVMPKFETTKLLVEQAVAQLRATSTALAALKHEMQSLASQLPEYPVVMDLFGVGPTLGPQLIAEIGDVRRFYSKKALVAYAGLDAPPNDSGDVTGRHKSMSKIGASSLRRTLFLVMSVYLQTAPLDEPVCQFMDRKRAEGKLYRVYMMASANKFLRIYYATVKAYLESLEHTA

SEQ ID NO: 491433 - protein, 336 aa, unidentified
MIEAVIERCAGIDVGKKFLVACVMTGPLESEPKSEIRKFGTIVAELELLRDWLIREGCSHAVMESTGSYWKPIFNILEDSVEVVLANAYDVQNRRGHKTDPNDSRWLAHLLRHGMIRPSFIPERAIRELRDLTRRRRQLVGERARERNRIQKILEDANVKLGDVLSDVLGLSGRLMINALLEGVLQAEEIAQFAQRKAKQKIPDLIAALRRNRLTDHHRFLLRHALRHLDFLGVEIETLNLEIRSRLSTEQFRKPHALLQSIPGIKEESSAAILAEVGPNMAQFPSGAHLASWAGLCPETTKAPGVLKPRQPTNHRIGRRRSIDSAGVREHDLTGT

SEQ ID NO: 491434 - protein, 341 aa, unidentified
MSNANIYIGADLHKKTCYVTVMNHLGTIKKQVEISTDKDKVSMFFKKYADVPVAVESTMNWIPFYENLESLGCKVLLSNPLQTKAIASARIKNDKVDSKVLADLLRTNLLPTSYIQPRDIRDLKEVVRERANFVEMRTKIKNKIHSVLFKTDNKHCFTDLYGKAGMEWLKELELRSVYKQELNRYLETLKHLNEQIDEISKIIEETAKEDYDCKLLMTIPGISFYSALMIKSEIGDILRFPNANKLCSYAGLIPSTYASADKVRHGRITKRGSKWLRKTLVDAITSGSRNPNRISVFYQKLKKNKGTGKAKVAAARKLCSVIFAMLTDKQPFREFTPIKQR

SEQ ID NO: 491435 - protein, 353 aa, unidentified
MKCDKYMGMDVHQAMTVVVVLDADGKVILETMVATEAAPIIRLVQSLSGPLHVTFEETTQAAWLHDVIRHFVTEVVVCDPRRNKLLAEGSKTDKVDARKLADLLRTGMLRSVYHGHEVTRKLKELVRAYETLSGDSRRTMTRIKAIFRGRGIRTAGRGVYQPKQREQWLEMLTEPGIQQRAAWLYEQLDQLRVLRRKAKQVMLEESRKHRAVGLLKTIPELGCIRAAFIVATVDTPHRFRTKRQFWSYVGLAVVTHMSSEYEMKAGQVVRRRKPLATRGLNHNCNHRLKEVFIGAATSASQHKSYESVRERLNHNGMRAEMARLTLARKIAAIALMVWKKGVEFDPKKLNATT

SEQ ID NO: 491436 - protein, 354 aa, unidentified
MPSKVTKPYTSAQPKLMSIGIDIGKDVFHIVGFDHNGKVVLRRKFRRLELDAVFEKLPRCVVGMEACLSAHFVSRRLRALGFEPRIIPAIYVKPFLKGQKNDYNDAEAIAEAALRPNLKLVKEKTQEQLDLQACHRVRSRLVSRRTATINQIRAFLIEHGIAIRTGANSLRRSLPEILLQRADELSPRMRVLIEELHGDWLRLDARIEALNEEIEEISRQEKSCQNLMTIPGVGPLISTATVAAIGNGEAFERGRDFGAWLGLVPRQYSTGGRPILGRISKRGSKYLRTLFIQAANVILMRPQNWPRYSFGAWLVTAATRLHRNKLATALANKLARIAWSVLRYNERFDDAQTI

SEQ ID NO: 491437 - protein, 349 aa, unidentified
MKIIGCDFHPGYQQIAMWDKVSGEMVERSLSHERKEEVRAFYAGLEGPVRVGIEASGQSQWFERLLVELGHEVWIGDAAKIRASCERKQKTDRRDAQLLVKLLEENRFPQIWVPTPEERDARQLLWHRAKLVRIRSQVKNQLQALALNQGVQRKRKLWSATGRKQLENLPLLPWASRRRTELLALHDQLDASISKLDHAVMEQAYQQPAARRLLTHPGVGPITALAFVLTLGPTGRFRRGKQVASYFGLIPAEHSSGGGGQRLGHISKQGSSFLRGLLVEAAQSAVRHEPGMRREYQRLAQRKCRALAKVALARKLAVRLYWMLRLEVDYAQLLQGSHAGQLESFRGRS

SEQ ID NO: 491438 - protein, 331 aa, unidentified
MKQIYGIDLSKEKFDVNFTDSKDFLRKMEINNNYSAICKFLSEIQKDAILCIEHTGIYGDLLVFLANCFKITICAIPGYEIKHSLGIQKGKSDPIDASRIREYGQRFRDKLVETRFCSEELHELKELHSLRSMLVKQHKMLQTHGKEKDRAPYCSVKVKLVSQEVLRTLSTQIKEVESQIQEIIDNDQVLAENSRLIQSIKGVGAITANELIIKTHNFKKINTARKASSFAGVCPFPNSSGKMVKKSKVSPMSDKKLKSLLFLCASSAIQYNKDMKHYYERKIAEGKPSFLALNNVANKLLRTVYAIIESRQMWDPMYICMDPREHEKKVA

SEQ ID NO: 491439 - protein, 383 aa, unidentified
MKKTQETLPLKDTIKAAILYIAFELSSSKWKLAFSDGSKVRYKTITAGNLAQLQVEIDLAKRKFKMDEDVKVVSCYEAGRDGFWIHHYLEGQGIENLVVDSASLEVNRRKRRAKTDRIDVAKLLRMLLRYWGGEKKVWSVVRVPSEEDEDARHLHRSLEGLKKERTMHRNRIKGLLIQQGIKVSNPSQKKFLDVLEKLRTWNGQAVPPGLKSQVFREYERLQVVEDQIKALEKEKTERLKNPDTDSLEKVAKLALLYGIGSVSSWTFVMEFFGWRQFQNRKQVGALAGLTPTPYDSGKSLREQGISKAGNQRIRALAVEIAWAWLRFQPQSKLSQWYMKRYANGGKRMRRIGIVAVARRLLIDLWRYLEYDKIPEGARLKSLA

SEQ ID NO: 491440 - protein, 355 aa, unidentified
MAIRKQSIGIDISKLTFTACLCQQAEDGKLTFSKVLDFSNDNKGFNQLLRWTKGLIVSGCELVFLMEATGVYYENLAHHLHKIRKKVHVVLPNTSKHYFSSLNVKTKTDAVDARILSQFGVERVHKLWSPPPGALLQLRNLTRYYVQLQEQKTALGNIKHSKDCSYDIQIFITKSNKKLISEIDKEIEKCLKEIKKTILEDKVLKERIRKVLTIKGVGLITAATIIAETMGFDQFHSSKQLVSYSGYDVVQRESGTSIKGKTRISKKGNRYIRNALYFPAMVACRHNETLKETYIRINRNNKTSKMIGQVAIQRKLLVLIYTLWKNDTEFIENYQRGSLDPKTETTQDSSVAELL

SEQ ID NO: 491441 - protein, 347 aa, unidentified
MRFYTKQHKAYCGIDRHARSMYVCILSQDGEILLHRNMKTSPEMFLKAIAPYREDLVVAVECIFTWSWLADLCAREALPFVLGHALYMKAIHGGKAKNDKIDAQKIAVLLRGGMLPQAYVYPAEMRAPRDLLRRRLHLTRKRAALLAHIQHTNSQDNLPEIGKKIAYKANREGVAERFPDPAVHKSVAIDLALIDFYDQLLRDVELTIVQTAKQHDAQTLYRLQSVPGIGKILSLVLLYEIHDITRFPRVQDFVSYCRLVKCAKESAGKRYGTSGAKIGNSSRKWACSEAAVLFLRKNPAGQKYLARLEKKHGQGKALTILAHKLARAVYYMLKRDTAFDMHKFLNG

SEQ ID NO: 491442 - protein, 371 aa, unidentified
MSNDAIGFSRLLGDLKTVHKPEIIFEATGVYSRRLQTFLDDNGYAYTRLNPLEAKKQLDSLRVRKTDQIDAEKLAQSQFVLNRKTTYVQEEVYQNLRDLSRFYQNLTEDIVRAKNRLHKALQITFPELENILSTPTGEQYWNLVIAFPCKDFVLDLSKNELSKSIRQSTSKRISDKRVAYLAEKLTALANQSYCAVKKTSPILEEVHYYAKELLRLSEQRQAVLDQMVELAQPLPEYDILLSIPGIAETTATSIIGELGDIRRFQSANQINAFIGIDLRHYESGNFLAKEHITKRGNPYARKILFKCIHNIASASHTNPCHIADFYEKRKRQSQMTSTKSHTIASIHRLIRTMYYLIMHNKLYDYASTQNR

SEQ ID NO: 491443 - protein, 366 aa, unidentified
MASVSHPAPIHLGLDVHRDTISVGILEPDQQVPEVDRIPHDEPSVRRLVGRLGDTRRLRACYEAGPTGFELARLLEGMGVRCQVIAPSLIPKAPGDKVKTDKRDCRRLARLHRAGELVAIRIPTVGEEAVRDLCRTRADMVADRTRARHRLGKFLLRHGRVWRGGATAWTQAHERWLLAQQFDEPALRATYAHYRVVLQSRDAHLDAVEADLAGWYDRPPFAEQVARLGAYRGVTRLGALTLAAEVCDWRRFAKASQFMGFCGLVPSEYSSGQRTVRGHLTKAGNAHLRAQLVESAWSYQHRPGVGTQIAGRQQGLDPQVIARAWAAQLRLCGRFRRLAARKTSKNVVVAAIARELAGFLWAEMTA

SEQ ID NO: 491444 - protein, 353 aa, unidentified
MHTHQRSANPIATIGLDIGKNTFHLVGLDKRGAIAMRFKVSRSQLIRRLVNLPPCLIGLEAGSGSHHIARQIQPLGHDVRLIPAQYVKPFLMGHKNDYRDAEAIAEAVQRPTMHFVAIKTPEQSDLLSLHRVRSRLVRQRTAIINQIRGFLIERGITVRQGPRPLRKVLPELLSSPPQALSPRILRLIAELDYDWRHLDERIEVVSAEIESLSQNDAACQRLMTVPGIGPIISSAVVAAIGTGSGFKQGRDFAAWLGLVPKQESTGDRTKLGRISKRGNKYLRTLFVQAAHVVIERRPAAAMRALWPWIHQASKRLAHRNLLAIALANKLARIAWAVLARGRDYEPRITPNAA

SEQ ID NO: 491445 - protein, 390 aa, unidentified
MLSAGDDWSEDHHDVEVQDASGRVLGRARLGEGVAGVTRFHELIGRFADPDAGPDQVVIGIETDRGPWVAALIAAGYVVYAVNPRQAARYRERQSTSGAKSDAGDAHMLADMVRTDSHQLRAVAGDSGEAQAVKVVARAHQALIWERTRHVLRLRSALREFFPAALEAFDDLTAPDALELLARAADPASAARLSAAQKAAQIQAVLRGQQLGQPQVVAAAYAATVRAAVAVISVLNEQGAVMEAQVESHFGRHPDAEIIVSQPGLGMVLGARVLAEFGDDPDRYAGARARKNYAGTSPITRASGKKKAVLARYVRNRHLADALHQQAFCALTASPGARAYYDQIRARGTSHHAALRQLASRLVAILHGCLKTGTTYNEATAWQHRLDDAA

SEQ ID NO: 491446 - protein, 340 aa, unidentified
MRALYAGCDLHGNNNLIGVIDGEGKRVFKKKLSNDLTLVRDTLKPFQEELVGIAVESTYNWYWIVDGLMEEGYEVHLANPSAIQQYSGLKHADDQHDAFWLAEMLRLGILPEGYIYPKEERPVRDLLRKRGHLVRLRTSLVNSLQNILSRNLGRKVNVNDVKALKEDRITLLLEMSEDLALAGRVSKEAIDHLTRQIYKIEWAVQKKIALKEEYRYLLTLHGVGKVLSLTIMLETGPISRFATVGDYVSYCRKVPSQWTSNGKRKGSGNRKNGNKYLAWAYSEASEFARRLYPEPRAYYQRKMQKTNAAVAHSALANKLSRAGYYVMRDQVPFQPEKLFG

SEQ ID NO: 491447 - protein, 459 aa, unidentified
MQNSCQNGPGSQRPIEGLPVVRRNVAGIDLGSEQHWVCAPTVDGAGREIAHFGATTPELIRMGKWLQERQVESVAMESTGVYWIAPHEVLEGMGLEILLVDTRQLARVPGRDKKSDPTDCEWIQRLHSCGLLRGSFRPREEVCMLRTLVRDKANLVAEAGDWVRRMQKSLDQMNVRVHRAVSDVDGVTGMAILRAIVEGERDARKLAQLRDPRCRKSEEEIAEQLSGHWREDHLFSLRESLKMYDAIQQGIANYDREIMRQLGAMQQEEFGGQPAPPVKNPQKAKAIKQRGQEPMRQALYRMSGADMTSIDAIGVETVQVVLSEYGPDLSRFPTEKEFVSHVTLAPHRPTSGGKPVKKKRRNSASTRVAGALRMAALSLRHSQTALGAYYRKLARRKGGDVAVFATARKLATLIYRLLRWGQHYVDEGAEAYEKRYQQFRITALKAKARELGYELVQHA

SEQ ID NO: 491448 - protein, 370 aa, unidentified
MKQRLLYVGLDVHKKTTDVAIASGRSNGKVRSYGKIPSTLDALNKLIKKLQDGDKELRFVYEAGPCGYQIYRHLDAKGIHCSVVAPSMIPRRSGDRIKTDRRDAINLVRLFRAGELTSIYVPTVEDEAIRDLVRCRDDMKRFERKARQRLLSFLLRHGYQYSGKRNWTKGFYTWLATVRFSHPAQQVTLQEYIDMTNECSERIQRITQQIQIHIEEWSRAPFVKAYQALRGVSIIVASTVVAEIGDMNRFQNPKHLMAYLGLIPSEHSSGKTVRRGPITKTGNTHVRRVLIEAAWTYKMQARVSNILLKRQKGLPKSVCEISWKAQTRLCARYRRLYARGKSRQTVVTAIARELSAFIWAIDKEVQLTVL

SEQ ID NO: 491449 - protein, 330 aa, unidentified
MQDTQQHDAVYVFVGVDVGKGQHHAVALDRNGKRLYNKALPNDEAKLCALIAELKTHGRPPFADQPSTISALPVAVARAEGVLVAYLPGLAMRRIADLHAGEAKTDARDAAIIAEAARSMPHTLRSLRLADEQLAELTMFCGFDDDLAAQVTQTSNRIRGLLTQIHPALERVLGPRLDHPAGLDPSPSALAAASEKTLANCLTKPTPRMGKSLATEIVQALIEQAAIVPDTQAATIVMPRLAQQFAALRKQRDEDAAEVEQLSLTHPLWPVLTSMPGVGARTAARLLTEVAHKVFALTARVAAYAGLASVTRAQARLSEANIHPDAATRC

SEQ ID NO: 491450 - protein, 373 aa, unidentified
MPKYSTAFGMDVHLRSTTVCALDADTGEAVTRRFPGNPWGEIAGWMDGFPGPSLAAYESGYLGFAPQRELAGVGVECVVAAVSKIPRSAADSASKNDRNDAARMAKAILAHDISPVWIPSPEVEGIRDLAGAYDGATARLATAKQRLLAFLARRGFVYGGTTPAGNPRKYWTYDFLRWLDKVRPEDDGGVRTLAALRNEVEAAAEARADLLSEYRAAVDASPIAAEAAALQSIKGCAFALAAAFSAEVGDFTRFRSGRQVTAYFGLAPSQRSSGDSVRLGGISGAGNALVRKLAVEGSWCYAAARHQPKLMPRDTGVPLEIRMHGRKGSERLLRRREEMLARGVPAAKANAATAAELVRWLWALGMMCREGAE

SEQ ID NO: 491451 - protein, 339 aa, unidentified
MKNKKYFIGLDVHKKKTTHVVRDRIGNIVLEGETATLYSELYERLKPYLKSSVIGLESCTSYYTLYQNFLKNNYNIKVANTIQLRQLIAKNDKLDAKRLAEMLRLGTFPCSYIPDEKIQRLRNLLQVRHSLVEEKTRCNNRIQAFLDRNGIVMPNQDAFGKKWRQVLLQYIGSGEVSLELRYEYDHFVYLEKQSEHLGQEISGYAMKHWKKEYLLLQSITGFGPVLSCYVIANILPISRFSSNRKLRRYAGVVPAFQESGCKKSKGHIPKTSSRKLLRWALIQAANSAGRTNTKLGYYYRKKKKQKNNASIAHVAVASSMIDIIYKVLTTKKPYSPKIC

SEQ ID NO: 491452 - protein, 375 aa, unidentified
MPATTRPEMSVSNAVVYVAFELAKREWKLALTVSFGVAPLLRTVASGDWAGVDRAVAAARGRWGVPTTASVVSCYEAGRDGFWVHRALTARGIKNRVVDSASIEVNRRAKRAKTDRLDAVKLVTMLVRAVAGEPTVWREVHVPSEAAEAARHRSRDRAALVKDRTALINQMRGWLATVGTTLPKRARAEWWTTVTDAAGAALPSELQARLARAAARLALLATQIAALDAEVRAAVREAAPQTAVARLVQLKGIGAGGASVLLDEGLEWREFENRRQVGGVLGFTPMPFASGGRAFEQGISRAGNARLQATMTQLAWQWIRWQPDSPITQWFHARFGSGARARKIGIVAVARKLLIVLWRWATKGIAPMGARYQAA

SEQ ID NO: 491453 - protein, 388 aa, unidentified
MQIITDRPQAPTAIRTDLGAIFVSLELSRSTWLITSLSPGGGEKMSKHTVRSGDVAGLWARFSQLKDKVQVRTGQVVPIIVIQEAGLDGFWIHRLLQDEGVESHVVDPASIATSRRRRRAKTDKIDGEALVRALLAYKRGEPRVCAMVRAPTPQEEDRRRICRERKTLTAERVEHVNRIKGLLFAQGISDYEPLLRKRRERLEELRTGDGRLLPEHLKAQIVRELDRLELTLQQIKSVETERDAMLSPSDEGTPAPGAMLKNLKGIGSEFAGVLWSEGLFRSFSNRRQVAAYAGLAPTPWRSGSVAHEQGVSKAGNPRLRTTMIQLAWLWVRHQPRSILTLWFHQRVQLNGGRVRKVLIVALARKLLIAFWKYVTAGVVLEGAETTAA

SEQ ID NO: 491454 - protein, 479 aa, unidentified
MTPYKDAFPEPCPPAPTIPEPTVLLPSSALHIHNPHAAGIDIGEAEHWVAVPPDRAPQPVRRFGTFTADLDTLADWLLDCGITTVAMESTGVYWIPLFELLEARGVQVFLIDPRQAKRAPGRPKTDRLDCQWLQRLHAYGLLAAAFRPDDQVCVLRAYLRHRQMLLTYGAHHIQHMHKALQQMNLKLSQVVSDLTGATGMAILKAIIAGERDPLTLAKLRNPHCQHSEDEIAKALQGTWRAEHLFALQQAVELYQFYHQQLTVCDQQLQAHLGTFADKSAGQPLPPKPRRHKKANEPRFDARTPLYRLAGVDLTTIEGIEEGTALVILAEIGTDMSRWPSVKHFCSWLGLSPQHKISGGKVLSRRVRPGAHRVAVALRLAARTVQQARTALGAFYRRLRSRLGAPKAVTATAHKLARLVYSLLKHGSAYVKQGLDDYESQYRERTVKAMARQAKALGYTLVELTVPATPRNDAVAPATP

SEQ ID NO: 491455 - protein, 406 aa, unidentified
MGGDAMSGLKVSFDCFVGIDVSKDKFDACGITGSEAKLFQFSTTMDRKGFEKLKGYLVAFSISSILIGMESTASYHVNLFSYLVSEGYKVLLINPLLISNYVKMQLRKTKTDKKDAVVIAQFLLTNGDTLLQRASPSLISDLRDLSRQRESLVDEMTSRKIEIKQLLNITFPELEHMTGIFTKAILKLLQQYPSAFALRDVDLGQLSQMLIADSYGHKREAFAAELIKTAHSSIGSKSTAKEMILKQKIALLLHIEDALQEITVMLIEMSRKLMEEEINIMTSIKGIGEKSAANFLIEMGGDINQYERSGKIIAMAGLDPAVYQSGKHDGKGRITKRGNRHLRRIIWLMTTSVIQYSDVFKVYYLKRRKEGLPYKMAVLATAHKLVRVIYAMLTHRTTFCSQVENS

SEQ ID NO: 491456 - protein, 291 aa, unidentified
MKRIKFVGLDVHAETITVAVAEQEGEVRALGVIPNRVESIRKLVKKLGPVGQLRFCYEAGPTGYAVYWQLTALGAKCEVIAPTLVPVKTGDRVKTDRRDSLKLARNYRAGELTSVWVPDAAHEALRDLVRAREAAKKDQLRARHRLIKFLLRHGRRPPTGVKPWTLNYLSWVKHEVHFEPMAQEATLLDYLNEVEHAELRIARLNLAIEEAVKLTPPKMRAVIAALQALRGVAQVTAVTIVAEVGEVSRFTGARQLMGYGGIVASEHSSGESTWRGGITKTGNAHLRRVVV

SEQ ID NO: 491457 - protein, 412 aa, unidentified
MKVVHEICAGIDVHAKMLVACLLLANGEKEIRTFSTMTDELLRLRDWLVAARCTHVAIESTGVYWKPVFNILEDALTVILINPEHAHALRGRKTDVKDAEWLADLLRHGLLKASFIPPPEIRELRELTRYRESLVREQSAVANRIQKLIESGNIKLAQVASDALGVSGRTILWALARGETDPVKLAALAQRQLKEKRVQLERALHGRLTVNQRFVLRELLGRWEDLEAADRRVTKEIDHYLQDRPKLARARHNLDTIPGLGPRAAEIIIAEIGVEMNANFASDAHLASWAGICPGNKATGGKRLSGRTRKGNTYLRSALVQAAWGASLKKNCYLSSQFFRLVKRLGRKKALVAVAHSLLVIIFHVLQNDQTYTELGGDYFDRQHVEQQRDYYLRRLQMLGLKVTVEELSVAA

SEQ ID NO: 491458 - protein, 381 aa, unidentified
MRTTATPNEHDTTTERVLFLAFELSEKTWKLGFTTGPGQKPRERAVAARHQARLLQEIAQAKRRFGLPDTAPVISCYEAGREGFWLHRFLQAQGITNQVVDSSAIEVNRRKRRAKSDGLDVRKLVSMLMRYEQGEREVWRVVHVPSVEAEDQRHLHRDLETLKQERASTTTRIKGLLSSQGIRLTSLSKFPEQLDALRLWDGSEIPSGLRRRLLRVWAHHQFLSAQIAALEAERRALLQSSQEAPIDKVRQLMQLKGIGINGAWLLVMEFFAWRALKNRREVGGLAGLTPTPYQSGASAREQGITKSGNRHVRWMTTELAWSWLRYQPESALSCWFRERFGSGGKRLRRIGIVAVARKLLIALWRFLNTGVLPEGAELKAA

SEQ ID NO: 491459 - protein, 348 aa, unidentified
MTLVGCDLHSRKQQVAVLDTTTGEVLEQELAHEGDAVERFYRALRPPVTIGIETTGYTQWFHALMHRLGHTVLVGEAGKIRAMVVRKTKTDRRDARHLLDLLKHDRFPTVWMPDPDTRDLRALVAHRVRLVRMRTMVKNGLQAIALNQRLALRSALWTQRGLGQLRSRALPPHTGRRRDDSLELLAWITRRIDQLDEQLTAAVDADARARRLLTHPGVGPLTALTTVLVLGPVDRFPDSKHVVSYVGLAPAINASADKHHLGKITKQGNALLRWVLGQAAPLAARADDDLRRRYFAVLPRRGRPKAKVALARKLLVRLYVMLRDQVDYEEFRRRGRAARAQHAAVTVT

SEQ ID NO: 491460 - protein, 343 aa, unidentified
MKITTIGLDIAKSVFQVHGVDEDGVSVVMKRLHRKQMLPFFSKLPSCLIGIEACATAHHWARELVSLGHEVKLMPPAYVKAYLKRGKSDVLDAEAICEAVQRPTMRFVPVKSPEQQAILMVHRTRSLVVRQRTMAANAMRAHLAEFGLVANPGVRNLMKLIQNTFDETEPDRQLPDMARTALAVLVRRLCELEEELQALDRTLLDWHRQNAASQRLAAIPGIGVITATAIVATVSDPGSFRSGRQFAAWLGLTPKQNSSGGKERHGGISKQGDRYLRRLLVVGATAVIRHSKTKNTPLAGWLRSLLEKKPVRLVSVALANKTARVVWALLKHDRTYHPYHQRA

SEQ ID NO: 491461 - protein, 347 aa, unidentified
MRFYTQQHQFYCGIDLHARTMYLCILNQDGEILLHRNMPTGPEPFLKAIAPYREDLVVCVECIFTWYWLADLCAREGIPFVLGHALYMKAIHGGKAKNDKIDAQKIAVLLRGGMLPQAYAYPAEMRATRDLLRRRMHLVRKRAELLTHVQQTNSQYNLPEIGKKIAYKANRDGVAERFPDPAVQKSIEVDLALIDYYDQLLRELELAIVTTAKQHDANTLYLLQTVPGIGKILSLVLLYEMHDIARFPRVQDFVSYCRLVKCAKESAGKRYGTSGTKIGNAYLKWAFSEAAVLFLRNNPAGQKYLARLEKKHGKGKALTILAHKLARAVYYMLKRGVVFDPDTFLQS

SEQ ID NO: 491462 - protein, 413 aa, unidentified
MLKIVYPICCGMDVHKSFVYACIASTNEQGVTTYKSRRFSTFTKDLRLCAEWLAANNCKDVCMKSTGKYWIPVYNILEQSCNVVLAHPKYVKAIKGKKTDKKDAKWIADIFKHDLVSGSFIPPADIRQLRDLVRYRLKLTNFVVGEKNRAQNCLTVSNIKLDDVFSDVFGKASSNIISQLLENPSDKITDVAEFRTKGMKATNEELLAAVDGEFCPEQAEKLRIIRSHMDSLELCKLNVESLILTVAEKYLPQFDLVSTVPGIQTFAAIGIISEIGVDLSVFPTSKHLCSWAGLTPQNNESAGKKKTTRIGRAGDYIKPLLVQCALCAIRKKSNPEIRNRYLSIKKRRGHKKAIIAIARMLLTAIYNILKKNEPYNPDLYTRSNNPPTHRTVSVDEAIFILQPQGYLVTPATS

SEQ ID NO: 491463 - protein, 353 aa, unidentified
MKRTSKYVALDVHQATTVTSVRVQSGRVVARSILPTEPSALVEYFGGMRGSIRVVFEEGTQAQWLHDLLAPIVAEVVVCDRRGEPRGHKADQRDADQLSRRLLSGDLRTVYHGRGDRRSLQELTRTYLNLVEDSTRTMLRLKSLFRARAIRVPGKRIYGTKERALWLARLPDRGARFRAETLYAELDVLRELRPKAKALMAIEARRDPAAAVLRSIPFVGPVRVALLLATMKTPWRFRTKRNLWAYAGLAVVTESSADHVFIAGHPVRRRRKPLTRGLNKNHNRVLKSVFKGLATASIGKPGPFQDLYRGMLDRGMREDMARVTLARKFAALTLRLWKTGESYDPTKLTMRVT

SEQ ID NO: 491464 - protein, 349 aa, unidentified
MKIIGCDFHPGYQLTMVLDSETGEIIEKALSHERKEEVRAFYAALEGLVRVGIEACGQSQWFERMLAELGHQLWIGDATKIRASAERKQKTDRKDAELLLQLLVENRFPRIWVPTAENRDARQLLLHRSKLVQMRTRVKNQLQALALNQGVQRKAKLWSTAGRVQLESLPLLPWASRRRAELLRLLDELGASIRELDQAVGQQAYARVEARRLMTHPGVGAVTALAFVLTIGPPSRFPRGKQVASYVGLIPTEYSSGGRGQRLGHISKQGSSFLRGLLVEAATTAVRYDAEMRRAYQRLAQRKSRGRAKVAMARKLAVRLYWMLRLEVDYAQLIQGSHAGQPESFCGRS

SEQ ID NO: 491465 - protein, 344 aa, unidentified
MQITTIGLDLAKSVFQVHGIDTTGQVVVRRSLRRSQMLAFFAKLPSCLVGMEACGTSHYWARELIKLGHEVRLMPPAYVKPYVKRGKTDAADAEAVCEAVTRPTMRFVPVKSPEQQAALSMHRTRDLLVKQRTQSINMIRGLLAEFGIDIPKGLERALLMARQIVDGKTPEVPIEAAKIIGTLSQQALDTHVRLHEIDRDLAVWLRGNDVARRLMTIPGIGPVGATALAASVTDPHQFRSGRQFAAWVGLTPLQKSSGGKERLGRISKMGDKYLRKLLIVGMTSLVRRARHNRATIDPRLADLLARKPTRVATVAMANKTARIIWAIMTRGETYRAGHRPALAA

SEQ ID NO: 491466 - protein, 408 aa, unidentified
MPVYVGVDFHVKTQTVCWMDTADGEMHQRTLDHQREDVAAFYHQWTPPVTVGVEASGYAQWFHRLVQERGHRLLVGDAHAIRQFARRRQKNDRRDAELILDLLLHGDFPAVHLPPPASREALDLLHHRQRLVRMRTMLKNSLQAVALHHWVARGPSLFTARGRAALSALPLSVAEDWQRHEGFDLLDDLDRRIAALNEELERRATADPRVERRRTHPGVGRLTALAVVHTLEPAARFTDSRQVAAYCGLDPQERSRGETVRYAGISKQGNRLLRTLLVEAAWSTIRPGQDAELRRFYFHLLRHKPAGVAIVAVARKLGLRLYRMLREGIDYDEFRRRGRDAWCARGMTEAAKACHVDWATRLSRPRAGTERSRHHEPECSHRCVIATRSGRRQEYFLFKKNVKTRTHT

SEQ ID NO: 491467 - protein, 440 aa, unidentified
MEKAVKFEEIHANGAGIDIGSREIFVSIDGEQVVKFGTFTSDYHSCCRYLKEHGIESVAMEATGVYWMSLYAMLEQYGIKVCLVHPREVQQVKGRKTDVKDSQWIQKLYTAGLLRESIVAEGLLKELRILIRERLDLIEMGSAYVNKMQKYLELMNIKLRNVISQIHGASGLRIIRAIIDGERDPLNLVILCHEHIQRKKRADILKSLEGNYHESYILLLKENLRLWDEHQDSIRSIEHQISELLEKMNHNKHIEVISPSKPARHHNPQIKDLHKTMVQLYDGVNLTTVTGINDCTMLRLAGEIGFDMSRFPTVKQFVSWLGLSPKNKQSGKMKKRIKSDANKAGLILRQSAQSLMNRKDSAIGVFIRRLKGRKGSPVAIKAGARKLAVALYNALTKGIDYVEQGVEKYAVQIKQREFRLLQQLALKHKFHLVDCEGVIT

SEQ ID NO: 491468 - protein, 426 aa, unidentified
MNCTQNYKIDQVTEQTLVVGIDIAKRTHYACFVDDRGRVLRKSFPIFQSKEGFQQLYEAIQGAMQASGKSQVIVAVEPTGHYWLNLAYFLEENGIPLVMVNPAHVCRSKELDDNLPTKHDAKDALVIARLAKDGRFLVPRLLHEIEADLRVGSTLKEKLRKEQTAVKNAIVRWTDRYFPEFWSVFRDLGKTALSVLEWTPLPADMAGRTVEELLEVYRQSEGVKCPPKAKIQALINTAKDSIGVTEGTAMARFEIAALVRRYRQWEAEIAALDAELKALVQTTMEYQWLKTVDGLGDATIIDLLAEIGSFAHYRDPRQLVKLAGLTLKENSSGQRKGQKHISKRGRKRLRSVLFRAMIPLIRHNEAFRELHEYYTTRPVNPLTGKQSIVALCRKLLNVLFAICTKKQAFDAERMKQDVLSQVQRAA

SEQ ID NO: 491469 - protein, 454 aa, unidentified
MRQRKASTKVDVESGFPLLRPNAASIDIGSREHYVAVPEGRGTPSVRSFGCTTAQLKEMAAWLHSCGVDTVAMEATGVYWVPVHEVLEDAGLKPFLFDGRQTRHVSGRKSDVLDCQWSQKLHSYGLLTQAFRPAKDIASLRSYWRQREGIVDSCSRQVLLMHKALEQMNVQLHKAVTDVTGQTGMRILRAIVAGERDVHALARLRDRRVKATEEDVARALEGTYREEHMFALTQALEAFDFFQQQLMACDQALERYLAQLPSAPDPTSVPPPPQKRRKNQPHFDLRKELVRIAGVDVCQIEGIQALTAQTLISECGTDMTPFPTEKNFTSWLGLCPNNRKTGGRIRSRRTRRVNNRAASALRVAAQALHHSNSALGSYARQMKARLGAGKAITATAHKLARLYYRLMKHGEAYFTQTQAQYEALRRERDLHALRRRASHFGLQLLNTTTGELIG

SEQ ID NO: 491470 - protein, 361 aa, unidentified
MKRVQSNTLDFSGQNIYVGIDVHLKSWSVAILSEHSVLKRFSQSPEPEALHKYLASNYPGANYFSVYEAGFCGFWIHEKLTDLGINNIVVNPADVPTMSKEKLRKTDAVDCNKLARELRSGSLEGIYVPGAETLEMRSLIRLRNLIVKDSTRAKNRIKSLLRFHGVEIPEEFTRCSIGCWSKRFLNWLHNLELSTEYGKKTLELHLEQFIRLRNMLLQETRAIREISRKEPYQKPIRLLTSVPGIGITTAATLMVEIDDIMRFRNADHLASFIGLVPMCHSSGDKDAVGGITVRRHFMLRCLLVEAAWIAIRKDPAMTLAYNEYRKRMNPQKSIVKIARRLVNRVYFVLKHEKEYVPCVVK

SEQ ID NO: 491471 - protein, 460 aa, unidentified
MTLLERLGSPLPCRYYLGVDVGYKEHVAVVISLQTFARGDGRWKRARCIHFPSTQAGLRKLQRYLDRFSTDPSEFLGLCEPTGGYYGATVFQYLLDQEYDMNLVENATTRHVREKIFPGVPKTDEMETRVMARIAYLHEAVGEEFTLRPLALPDPDDADLLALCRDSWKLSTMVTRARNQFTQLMAAIFPELKTFFTSSVSTIVPVSLVAAYPTPALLAEAPGEEVRQVLKKARGYQHAHRVTELQALARDSSGLLPDPGRVWRLEWLTNFLLSNFRYQAALNQRIEELVEQRDGYELIIKVPYSGPATLGVILALTGDVSRFPNYRKYVAYSGYFAGLEKSQTIDRTKMSRRGNRDLKRAFFQIAAPLVWFDKGDNDYKDLFQHKKAEGREWYEAMPFVCAALARHIYHCLKFKDPYDPEKAFRGSSSTLASEQELADLRADLDEKFEVMDAYLRQIEG

SEQ ID NO: 491472 - protein, 344 aa, unidentified
MEHYAGLDVSIKETSVCIIDGTGRVVREVKVPTEPEAILAVLSDEDFNIKRIGLEAGPLSQWLYGELAEAGLPMICVETRHMRAALSAQVNKSDRNDARGIAHMMRVGLYRPVHVKTPASQKRRMLLTSRQLLQAKARDIENDLRGTLRNFGLKVGIVGAIKFEARIRELVANHPDLATIVDSLLVARRVLREQLSVLHRHLLAVVRDDEVCRRLMTMPGVGPVVALTFRATVDVPARFTNSKTVGAIFGLTPRRHQSGEIDRMGGISKCGDAMMRTVLFEAAQAMLTRTIKWSWLKAWGMKIARHRGMKRAVVAVARRMAVVMHRMWMDGTDFQWKREEVAAA

SEQ ID NO: 491473 - protein, 411 aa, unidentified
MRVHHTICCGIDVHKKSVTACLMWGPADQEPQFEIRRFGTMTSELKVLAEWLKQAHCQIAAMESTGAYWKPVWNVLEGETRLILANAKHVRALPGEKTDNKDGKRLASYLRHGLIRASFVPPRDIRELRDLTRYRKKLLANGAAEQNRIQKVLEDANIKMGSVLSDVFGVSGQRMLHALVENPSVDVEAVAGLAHWRLEPKIEELKKALEGRITAHHRFMIELSLGHMQYIEQQILRLDQEISRHIAPYQKQSELLQTIPGIAKNAAATVLAEIGPDMSPFDDDGKLTSWSGICPGNNESAGKKFSTNTRKGNPHLVSALVESGWAATHTKNSHFKARYHRIKARRGSQRAIVAVAHTLLRTIYVVLKTGQPYHEPVRPPLTETQRTRKAQRLSRELQNLGFEVTLKTKAA

SEQ ID NO: 491474 - protein, 416 aa, unidentified
MFNPLLALSKWKDDYVQKNAYFQIHSLFVILSLWSDWMEVFIERCAGLDVHSETIVACVLIGSKDDELIKETETFPTLTKDLFRLLKWLEDHDVTHIAMESTGVYWKPVFNILEDFFDITLANAQRIKNVPGRKTDVSDAEWIAKLLRHGLIEKSFVPPVDIRELRDLTRLRKKWIGHVTSEKNRIQKVLEASNVKLSTVISDVFGVSGRKLLNRLIEKGYVDVKDVEERIHGKMASKKQQIADSLFGTINEHQLFLIRQSWQHIEYLESLITEIEQRIDVLLQKYQEELQLLLTIPGIKKDTAAVIIAEMGVDMSQFPTSQHLASWAGVCPGNKESAGKRYSTRTVKGNPPIKSAMCEAAWAVSRCRNRWLAAKYWSLAARRGKKKALVATSHRMLRIIYSMLINKEAFKEKQIN

SEQ ID NO: 491475 - protein, 412 aa, unidentified
MLFIGDDWAEGHHDVVAQDDAGKTLARRRLPEGTDGIARFHELVASCLGEDAEPDPARVIVVIETDRGPWVKALAAAGYRVYPANPKQAARHKETIANSGKKDDFFDAGALADMGRTRRHQLRELAADSDIAEAVKIAARAHQKLVWERTRHLLRMRSALREYFPAALEAYADLTLTGPDALELLGRAPDPDSAARLTVTQITAALKRAGRRGDLPQRARDIQAALRAPHLPQPAVIAEAYAASVQAGAAVIRALNEQCKILEAKVSELFRRHPDAGLYLSQPGIGDITGARILGEFGDAPGRYATAKARKNYAGTSPLTIQSGKKKTVHARYIRNRHLIDALHAQALSALTASRGARAYYDELRAHDAGHDDALRRVASRLVGILHGCVKTGCEYDETTAWSHRAESPQAA

SEQ ID NO: 491476 - protein, 323 aa, unidentified
MMSTQHNYAGIDIAKRNFVIAVSSLSKTKTETNNPKGIAHTIEYLKKHNVALVVMESTGGLEIPAAKAIHRSGIAVIIANPRQTHQFAQSQSLTKTDAKDAKMLAFFAQMTAQKEGWQTMLYQPPTEAEEVLEALVNRRNQLVDMRTAEKNRLHQVHETQVESVKQLIAHFDRLIDELDKQIDDHTHTHFDGKAKVAKQIKGIGSTTTATLMAMLPELGRLSHKRLASLVGIAPHPRESGETKFKSRCFGGRSAVRKALYMATVVATRFEPLIRDFYQRLLSKGKPYKVAVTACMRKLLTILNARMRDYFTENGTTENGIQTA

SEQ ID NO: 491477 - protein, 398 aa, unidentified
MFIMALDISKGKSYMVVYKNEYCIEEREIVHTPEQFDKLLPFLKNNQVEVVFEATGVYSKCWEHFFTKNNFSYSCLNPLEAKLQIATMRQRKSDKNDAHQLAQTHLTNKRSKTFCHSNNYNELRMYSKLYDEVHSNLLVQRNYLHSELQLVFPGLEKIYSSNMTYFVLNIMDKYTHPDTVQKTSPTKIKNYILKQTGKKLSEKQAKEKALWLKFIAKEAYSVVEEDSFMVKEVKYRLKTIRSLKQQKDRISNELIHFAETCTEFKYIESIPGIGPLTAALLIAELGDIRRFDTHKQMNAYVGIDLRTYQSGTIQHKDKIQKRGNSRARMILFFTIQNMIKKQKNIRNHFIDYYYKLKKPPYVKKHKVAMIACMNKLLKTIHYLISNNEYYDYTKSPRG

SEQ ID NO: 491478 - protein, 354 aa, unidentified
MFQKIDTSIAVVGIDIGKNSFHVMGLDSRGTIVLRQKWSRGQVEARLANMPPCVIGMEACVGAHHLSRRLKALGHDARLMPARYVRPYSKGQKNDFRDAEAIAEAVQRPTMKFVATKTADQLDLQALHRVRERLVSQRTGIINQIRAFLLERGVAVRQGLRFLRVELPRILATPPDVLSPRMVGVIEDLAGDWRRLDERVERLSGEIEAVARQDAGCERLMSVPGIGPIISSAMVAAVGTGDVFSKGRDFAAWLGLVPKQMSTGDRTILGKISKRGNRYLRVLFVQAAWVVLIKPKSWERHGLKPWIEAAKKRLHRNVLAIALANKLARIAWSVLAHGRNFEARKMDGIVTQSA

SEQ ID NO: 491479 - protein, 316 aa, unidentified
MAMHVSKSIVGVDVAKVELVIYEPDQDLLTSITNDKPAIKRWLKTLPRPTAIAVEATNVYHIDLVELAYEAGLDVYIIDGYQLSNYRKSVGVRSKTDASDARLLARYLKNEGEDLRPWTPPPAVYGKLQSLLRRRASLVQAKTSLTQSWANDASLKAVFATFLKSVERLDLLVQKKLKDVLREAGLLEEVARCQAIEGIGFLTATALVMAYNRGDFKSGDSFIAFLGMDLRVSDSGQKNGRRSLTKRGCSEVRRLLHNAAMSACRSSAWKGFYNKHLSSGKATTQVLVMLSRKLARIAFSLMKNQSDYQPKRGILA

SEQ ID NO: 491480 - protein, 351 aa, unidentified
MNILAMDLAKSKTVVCEYDSDSGECKYCKVRTSPQQMHDLIVEKSPDRVIFEISSAAGWVYDIVRSLGVEVQVANPNHQGWRWKNVKRENDRTDALKLAQLSAMNQLPTVHMPERAVRQKRALIQYRQRLIKRRTQIKNNIRAILEKEGRSMPKGKSGWTEASVGRLREMVFPLEKCGLDNLWRGQLYVELEMLDAVGKCLADVTSKLDALAKSDARVKLLQTAAGVGPRLAEVVVAFLDEPGRFASGKQVGCYAGLTPRQYQSGSMDRQGRISGRGNKLLRALLVEVSWLGLRHSPWMRETYQRILRGSSSRKKIAITAVARKLLVRCWAMLRDEQPWREQEKVVENLAA

SEQ ID NO: 491481 - protein, 404 aa, unidentified
MDNLYIGLDWSEAKHDVCMMNETGAIVKEFNIQQTAQGHRRLEQEIKGFNVTAEHCLVGLETSSNLVMDFLEPRPYTPYVIAPNQVASSRGRFTSSGRRNDRSDARLLADMLRTDRHRFSPWRADGVSVNQMRTTLRLIDDLTQSITRYSNRLRAGLLRAYPLAVCLFSDLTTQIALQFLIEYPSQALAQAITYEAFAAFCRRQGYSHPHMMPQRYAHLQEDVPQPAPTTRLAYQEQIPVLATLLLGLVQQKRQAIRRLQPLFLSHPDQAIFASLPGAGELLAPKLLVMFGDHRERFASPAAIQALAGTCPVTRQSGTKKSVQFRHACNHEYRHTAQLFAVASVPHSTWAATYFSLAQARGLTESQAYRCLANRWLAVIWTLWQRNETYDEAYHLQQVRRHRRV

SEQ ID NO: 491482 - protein, 543 aa, unidentified
MNHRDTGSTEPKSPGQGTRPDTVSTVTHPLARRALKSSPQTTVNNCAAVKNSKIEKDLSPGYNNLGGIALDGSRSTRPRLAKDSCSLPDHPAAPVSKSERIKAREAPCIRLTHDSATMPKKKGINMKPWNEITHYAGLDWARDHHAVVIVDQTGKIVSEFEFSHNLKGWKTFSEKTSAFANLAVTLETNQGIVVAQLLQRNYLVYPINPVAAESYRKRKVPSGTKTDFFDAWSLAEGLRMDGSNWKGLQPSDELTVQLRLLCRDEITLIENRTQLVNQLQQALVEYYPAALEGFNDWTMPSTWDFIIEFPTSEVLVKAGKRRWEKFLHTHKLWRPDTAANRLEIFARADQFQGSPAAIKAKSQMALSLCKLLRTLQQQLDEYRRPIETLFESHPGHELFGSLPGAKKMLAPRLLAAIGTDPNRYGNEAGVLQAFAGTAPISFESGQISKVRIRRACDTFLRHTMHLWADCFRHASAWGGVYYQNKRKAGMSHACALRCLGQRLLKIVFRMIETKTPYDAELHARNQQKHGSWILKLMDKPTAA

SEQ ID NO: 491483 - protein, 425 aa, unidentified
MNYKQNEKINQVKESTLVVGIDIGSTTQYARAFDWRGIELGKVFTFSNSREGFESFKAWMQHLQDKYRKSDVIVGIEPTGHYWFDLGAYLEDEGILLVMVNPYAVKQTKELDDNSQSKNDRKDPKVIAKLVTEGRYSAPYTPDGVYADLRIMVTNRKRLIREMTQIKNRFARWFAIYFPEYTDVFGDYEAQSSMLLLKKVCTPEAIVELGAEKINKIWRDAKLRAVGMKRATTLCETAKRSIGLKKGSSAARYEMKLLLEDYEYKKAQLDAVMEEIEKLCRKIPESEQMLAIKGIGVITVAGFLAEVGDVRRFESPRQIQKLAGLSLRENSSGKHKGQTTISKRGRSNLRAVLFNAAIPLIATNPEFKSLHEYYTTRGNNPLKKKQSVIAISCKLIRVFYAILANGVTYDPQKMLSDIHRQPQAA

SEQ ID NO: 491484 - protein, 377 aa, unidentified
MNRIIKIGMDVHSTNYTLCAMEPVIGAEDRVFANIQVTPDYKNILMFIEELKLKLGVSDTYDIECGYEAGCLGYSLYNQLTNAGVKCVILAPTTMLTQQGQRIKTDARDALMIAQCLSYGGYHPVYIPTEADDSVKEYLRMRDDHKKALKRLKQQINAFCLRHGYHYTGTKWTIVHLKWIKKLKLSPLYQETLDEYMASYDEQTAKVERFDARIEEIASQKEYTDKVKKLGCFLGIKTHTALSLIVETGDFKRFAKGNVYAAYLGLAPGERSSAEKINRLGITKAGNSHLRLLLVESAGGICKGAVGHKSKALRQRQMGNIAEVIAYADKANSRMRSKYYRLIRHGKKKNVAKAAIARELACFVWGMMTDNIDCSAA

SEQ ID NO: 491485 - protein, 341 aa, unidentified
MKNLFIGVDFSKEKVDVAIIFADGLTETAPRVFNEFKTTVSGYRQLVKWVEQNSYGIDSSQWLFCGENTGDYSKGLCNFLYGKGYDMWLENAKSIKDASGLRRLKSDRADASMIAEYAMRNYDRAIMYEPLSESLAQLRELFLYRQMVIRHRCSFQVRRGEKKLTMEKSPVKTMISQSGRHIVSELNKEVEKIDKRIAELIKSDEELTEIFTIVTSVPGIGTQNAVCLMVYTDNFRRFNYDSRKIACYYGIAPFGKDSGTSVHSDPHVHYMANRQIKAMLTQAALAAVNFNPIMARYYMRLVERGKKKQVALNNVKNKLVHLITAMVRNRQLFSPEYKISA

SEQ ID NO: 491486 - protein, 375 aa, unidentified
MNAVGIDVSKGKSMVAALQPGGKLLARPFEVLHTKNGLKELVSFVRSLDGDTRIVMEHTGRYYEPMLQWLAASDLFVTAVNPKLIKDFGNNTLRRVKTDKADAKKIARYALDNWCDLRQHTGMDTTRTQLKTMNRQFAFCMRQRTACKNNLIALTDQVYPGANTSMRLSTFTERYRKWCHRHGYNFQSDKPRMLWEKAKDLIAMLPMDKMTKSLVQTAVAQLNVLSKTVATLRTQMIELAEKLPEYPVVIAMNGVGATLASQLIAEIGDITRFPRRGSLTAFAGVDPGAKQSGTMQLRSNKTSKAGSPHLRRALFQIVSGLLMRAPDDPVYNFMDKKRTEGKPYYVYMTAGANKFLRIYYGRVNEYLAGLSKEQE

SEQ ID NO: 491487 - protein, 416 aa, unidentified
MSNDSPNIIIGVDTHSDTHHVAIIDERGKHLADEKFLAVGSGYRSILAFITRFGVVTGVGVEGTGSYGAELSRVLRNAGLAVFEVNRPNRQARRLRGKSDPLDAYQAAESVLAERGTSTPKTKDGPVECLRVLRTARSSAMKARTISINQIKGILVSAPEQVRSRFRGLSTTHLISALEHSRPTGSITDPVTATALTLKKLACRYRGLETEILDADVALAEILRDCAPLLRDVPGVGIEVASQLLVTMGDNPERIATEAQFAALVGVAPIPASSGKTSQHRLSRGGDRAANAAIHHVVVSRLSTDSRTRAYAARRTAQGKTKKEIMRCLKRYVARELYRQLTNPQAAPVVADLRLVRQELHITLREAAGHLNTWPGTISRIERGSVEMMIWQPNSVSGSTNKTTCEESVDSYRSIT

SEQ ID NO: 491488 - protein, 411 aa, unidentified
MHHKQRHIYVGIDLHKHHHTAVIINCWHERLGEIQFENKPAAFTDFFIKVRQLVPENMTLVFGLEDVGGYGRALATFLVDHGQMVKEVNPALSYAERNSYPTMQKSDSWDAECVARVLVNKLDFLPDAEPKDVYWSIKQLVTRRNALVKAQGALKNQLHVQLSHHYPSYKKFFAEVDGKTALAFWERYPSPSCLEEVRIDELTAFLQAVSHNTCSRKKAKEILELVKTDGTTTKQYQETRDFLVQSMVRDLRFKKQEMALVEGELRKLMKLLDYQLETMPGIDVVTASALVAEIGDIQRFPNANKLARYAGIAPVHFGSGGKGKDHKSKQGNRTLHALFYQLAIQQIQVAKESKKPRNPIFYEYYQRKRKEGKTKGQALVCIMRRLVNIIYGMMKHKTAYQLPNITERKVI

SEQ ID NO: 491489 - protein, 445 aa, unidentified
MASFAGGAAQAAYVARVRDLSPQRCLVVPVDVGKWTAMAVVADHYGQILGDPIEFGLTVSGVEALVTAMDGAAKRVAAGSVRVGIEAAGHYHQALAATLRDKGFDVVELNPYQVKIARAQLGQARIKTDLRDCMAMVELLVRGQGWPLHRQDGAVAEQAALVAHRRRKQAAAQALGSQIHALADLAFPGLTACFRTGLEAKTLRMLLATIADPARVAAMSPADLVRHAREHQVRMLRPKATQVIAAAAAAICVGRHQRATAERLLAGDVADFDALLAEQTACEQRLAEVLPQTPAQVLTSIPGVGVLTASYYGAALGDAGRFTNADAAYRHSGLAPTSYESAGRRSSTVRISKVGSVELRQAIIAIGTSIALHHPDFAAYKRRLVDAGKKPIVATIAVGHRAHRLAFAMLRSQQRYQPERWQDSVERQRGRSRSVTAADTTTQTT

SEQ ID NO: 491490 - protein, 403 aa, unidentified
MLLTAVSLRLPRLDDTSVDRASGTRARGVGHSPVDLAGEGVMDIMFERCAGIDVHKRTVVVCRLTRDVQGTRVAETQTFGTTTSELLRLSDWLTEGGCTPVGLESTGEFWKPVFNLLEGACEVWLLNAQHIKAMPGRKTDVKDAQWIAELLAHGLVRPSFIPPQAQRELRDLARYRTSFVRERATLVNRVHKALESANLKLACVATDIMGVSGRAILAALLAGETDPTILAELAKGPLRKKRPQLEQALRGHLRPHQSFVLTELLAQIDNLEESSVRFTAQIQAMCAQDADEAEVVALLDTIPGLSEATAQVVVAEIGTDMTRFPSAAALAAWAGLAPGNNESAGRQRSGRTRKGMSGCGPSWSRQRRPLPTPKTPRWWHATDASPPGVGTRKRWWRSRMRCS

SEQ ID NO: 491491 - protein, 415 aa, unidentified
MPTSGKEGTVSMTSATAPDTADQDVFGGVDSHADTLHVAVISDNGGHLADGEFTTAAAGHAAALAFLNAHGHVRAIGVEGTSSYGAGFTWAAGSAGLHVVEVNRPDRAERRRIGKSDPIDAYAAARAALSGRAQAAPKDGTVAGIRALHNAARSAVKARTAALNQIGSILITAPETIRAKYGRLKGTDRIDTLARLRPAGDTVHTAVLTALKSLARRARELTAEHQALVKALDSVVTLHNPGLRAAHGVGPDTAAQLLVTAGGNPERMRTEASFAALCGAAPVPASSGRTNRHRLSRGGDRAANAALYRIALVRMSSDARTREYVARQTTAGRTKKEIIRLLKRAIAREMFRCLTSTVAVPGVADLRPLRQSRNLTLTAAAQHFGVWPATISTLERGIRRDDNLTHAYRDWLQTG

SEQ ID NO: 491492 - protein, 369 aa, unidentified
MEKDTIYIALDDSKRKLVVAMLRPGATEPEEREIPKDPQHIQRLFRRLEREGPVQACYEAGVSGYDLYRQITACGVTCQVIAPALTPRRPGQRIKTDRRDARKLVRLFRAGELTPIHVPDEAEEAARDLVRCREAVRRDVVRWRHRLLKLLDRHGRLWVTEKNWTQRHWTWIRAQHFALAALQRAFEATVFALEQALARQAELDKEIEALAATAPYREPVGWLRCFRGIGTLSAMVLLAEIVDFQRFRRPRALMAYLGLVPSEYSSGETQRRGALTKTGNTHARRVLVEAAWHYRHRPTVGRALASRSQAQPEEVVGQAWRAQQRLHRRYRHLIGHGKRPPVAVAAIARELVGFLWAAMTSRETRRQVA

SEQ ID NO: 491493 - protein, 388 aa, unidentified
MSMVVIGMDPHKRSATIEVMASDETVLGKGRYGTHAYGYRAMVRAVRHWPERTWAIEGCQGIGRHIALRLIADGEHVVDVPPKLSARTRVFATGQGRKTDATDAHSVALAATRMTGLRPVADDAQLAVLRVLADRRRSLGEDHTRMVSQLHRLLLELIPGGAKKALSAAQAKALLAGVRPRDAAGKARRRVAAELVSDLERTYQRKKDADKELRELLTGTKTNLTTLNGIGPSGAARLLVEVADITRFPSKAHFASWNGTAPIDASSGDQVRHRLSRAGNRQINRVLHIMAVVQLRHRDSEGRAYYDRKIAAGKTPMEAMRALKRRLSDIVYHQMILDHQAHRTGPGGQSGTTLNSSVASSTPAASSSDKPLPGPASSHPKTAPPTAS

SEQ ID NO: 491494 - protein, 355 aa, unidentified
MKKITLKTIGIDVSFKTLDICFGQVDSERNQELSAPFTVSNNLSGFKKLLKKIKNISLPGIEILAVMEATGIYHENLAYYLKEQSIDVAIVLPTLMSNYMKSLSLKQLDDKSCSRAIAQFGLERKLEHWSAPDPNFRKLRDLTRERSQIVDERTIVKNKLHASNNKANTHNPSIKRIKERVKLLNKQEKEINIEIQQLVSSIEDIKNNVQIIESIPGMGLISAATVLAETNNFDLIRNKKQLTSYAGLDVVHKTSGTSINTKNRISKKGNKFLRKSMHFPALSAVRVNPIYKDKYIAITARTGLKMKGLVAVQRKMLELCYSLVKKQQHYIKDYEKSRAQKLDPTQDRLNLPLAG

SEQ ID NO: 491495 - protein, 368 aa, unidentified
MKMNAIKAALAASTIALKNEKSAKAKRILIGTDVHLRGYQAARKVDNGVIGVVENFRSEEALLLHVEKQCERAEQVVVVYEAGPLGYTLYRKLTARGVLCYVCAPDSSEQKRKRRKNNKIDARNLTSKLFNYLNGDEGALQLARVPTEAQEQLRLASREHDQMVEERKRLGAKGNALLLSQGFGSWSNWWRPKAWAQLSSLVPEWLLERLKIWVDVLKMLDEKICLAKVALARACSGPRPKGVGALSQIQLQSEVLDWSLYTNRRKIACLAGMVPSEWSTGDTERRGSITKVGVPAIRRIIVEMVWRIVLFQPQYKPVQKWQKVLQGTNPALKKKAVVAIGRQLIVDLWRLQTGRVSAQELNLVMVGA

SEQ ID NO: 491496 - protein, 345 aa, unidentified
MVNLNVIAIDLAKNNYQVCKIGKERQVIYNKEVSRQKLLQLLVSEKQSLVAMESCGGTHYWARKAKEAGHIVKPMSARVVKAFRQGQKTDANDALAIGIAAQQPTVKPSRLLSVNEQCLQSISAMREHFVKQKVALGNLQRGCLLELGIPIAKSDSKLIDAVESLLEDTSFNVPMAFRASLKIVNEQFKRVVKEIIALEKLIEEEIKNDEVYERLSKLEGVGPVGSMMLKVYFSCIEHFKNGREASACAGLTPVQHSSGGKEKIGSISKKSANKKLRSTLYQGALAVVSNVIKRASRTEKDEWLKKLIARRGKKVAAIALANKTIRTAFAMLKKNECYQPKLLTA

SEQ ID NO: 491497 - protein, 427 aa, unidentified
MRHLGLDVHQTFCEVAIREGKKTHSAGRVATNRETLELFAESLCPTDEVAMEATGPAMEIARILAPHVARVVVANAQDVRAISHARVKSDRFDARTLAELLAAGMLESVWVPNAETQALRRRVARRAALVRQRTRAKNQVHAVLSRCLLGRAPVGELFGAEGRAWLAAQQLGEEEAETVAGCLRQIDFLDSEVEALDAKLAQWAVGSPGAKRLMTIPGVGAEVAVTLMAAIGDVSRFSGQRQLVAYLGLDPKVRQSGEETPRHGRISKRGNAQARTVLVEAAWMAMRQPGPLCAFGERVRARRGSQVAAVAVARKLACLAWQLLSKEEDYAFARPTSVRSKLRRLELAAGAPPLRRGHGGPKVSSTPAERESDRELSERGEAAYRRLIADWKVSGPQKKGAGATPGRASGPSTGQAARQAKAPGPAL

SEQ ID NO: 491498 - protein, 348 aa, unidentified
MLHVGLDLSRRKIDVCVLSEHAEVVEEFASPPDADGLLGLARRVGRHERPVRGVIESMTGARFVHDRLERLGWDVLIADAAKVKGLAPLACKTDKIDARVLALLSHRDLVPEIWLPDPRVRRERELARFRMHLVKHRSMLKHRIHATLISFGHPCPVSDLFGVAGRELLDRLDVPRPWRGTVDASLRLIDDLDRQIDAINRQLRASGADHPYVPLLLTVPGIGWVLAFTIAAEIGDITRFPSPKKLCGYTGLCPRVYQSGDRDSRGPLTKQGPKYLRWAMLEATMHALRHPAYRERYQRNKRRLGRTRGAKVAQIDVARKLTEAIWHMLTHNEPFAPAPGGSALRLAA

SEQ ID NO: 491499 - protein, 461 aa, unidentified
MRRKGKRTKGIEEAHPFAGMSQVNPNAAGVDIGAVEIVVCVSGENNTQIVKAFGNYTVDLQAIGRWLTEHKIKTVAMESTGVYWISLFEVLESMGFKCLLISSRSLRRVPGRKSDIEDAQWIQTLHSYGLLESSFRPPADLVALRTMLRHRAQLLEHRAPHIQHMQKALLQMNVQLSQALSDVMGETGQAIIRTIVKGERSPQVLAAFRDPGCKKSEEEIGKALTGTWRDEHLFVLKQSLELYDFYTQQLEVCDKEIDRQYALIRPDWEMGELPPVPKKKQKTHSKNAPESVREIRQHLKRINGIDLSVVDGFGVSLAQSVTMEVGTDVGEKFPTEKNFCSWLGLAPKHEISGGKVLKNKTLKTKNRAGQAFRMAAQSVKKSDSVFGVMYKRFRARQGPAQATVSTAHAIARVVYRMLKYQVEYETISVNEYEKKYEEQQVKYLKKKVAKLGYQLVPVVSA

SEQ ID NO: 491500 - protein, 378 aa, unidentified
MNATTATRSSASVVGVDVAKSVFQLAVADRNWKVIETHRLTRSQFERWFANREVGLVVMEACGSAHHFARWLNGLGIEVLLLPARYVRAYVKRNKTDAADAAALLEAVRASDISPVRVKSIEQQALQGMHRIRSLWMGTRTSRINALRGFCREFGITISQGSRLGVEQISRVLADPDSAVPTLIRGTMKLLIDEIRLLEARVAQLERELTLLARQSSACTTLLSIPGVGLLTATAMVAATSGSVAHFKSARHFASWLGLTPRERSSGGTRHLGRISKQGDRYLRMLLTHGARSVLHAIGARQAAGKPLDALRAWAGALQGRTNHNKATCALANKLARICYATLRDSQPYAPKEVPLGDGLPAPRFNHKIERTAFAVAT

SEQ ID NO: 491501 - protein, 312 aa, unidentified
MPASRPEIGIDAAKDNLVIHHQGLNQTLTIDNTPQAIRQWLATLPEGCDIAIEATSTYHMDLTERAHAKGHRVYVVDGYRLSHYRKGVGGRAKTDLADAQLLARHLHKEKDELRPWSPPPKAYRMLQSLLRRRAALVKARTALRQSLSGEPELKAPLRALIAKMDRIDTLIQKRLKSAVSAAGLQTQVQRCDAIDGVGEITAIALVMAFLRGDFKNSDAFVAFLGLDVRVRDSGKLRGKRKLTKQGDTEVRRLLHCAAMSASRHPVWRAFYQRYRDRGLHTTQALVILARKIARTAFALMKQQQEYCPAKLF

SEQ ID NO: 491502 - protein, 454 aa, unidentified
MSGEPLELEAEEQEQIVERVAAIDVAKASGQVCTRVPHASIPGRRVTKVWNVQATTNAIVALAEQLAKERIERVIVESTSDYWRPFVYLLQARGLTVWLVNAREVKQVPGRPKTDKLDVVWLAKLNERGMLRPSFIPPPEIRRLRDYTRLRSDLVEERTRHAQRLEKLLEDALIKLSTVATDILGVSGRAMIEALIAGERDPEVLAGLARGRLRVKHAALVEALTGRFDDHHAELARMLLEQIDALSAKIDALTLRVEQLLAETPAAQAPGVPGKPGRGGESHDPATAPLAAVARLDEITGIGPYAAQVIIAEVGLDMRQFPTADQLASWAKLSPRTIQSGARSRSGRTGKGNRYLKAVLGEAAAAAARTDSFLGERYRRLVKRRGKLKALVAVARSILVIVWHLLADPSVRFRELGSDFYATRIDKERRTRQLVRQLEALGHTVTLEAPPMAA

SEQ ID NO: 491503 - protein, 407 aa, unidentified
MQATPTHSTFAGIDWSWQHHALCVVDNEGQRIEETTVSHTRPGLAKITTLLRRHGVERVGIERGDGPVVEHLIRDGFQVVVISARRVKSLRARYGSAGNKDDRFDAFVLADALRTDASRWVVVQPDSEETIALRMLVRARHDLIDHRIAVHNQLLAVLQHNFPGAIGLFSQLDIPISLAFLRRFPTEAKASWLSELRMTHWLKASGYCGRHTPARLVGHLREAATGRVGGAAAEASEIIVLTLVDLLTTLRHEQEQLEARIKEALLTHPDGPIFQSLPRAGTVRAATLLAEIGDCRARFPDPASLAAAAGVAPSTRQSGKHLTVTYRRGCNKQLRAALIDWAQDTPRANAWARDTYDRARSRGCRHPHAARILAQGWTRILWRCWHDHTPYDPDQHGRLSTLAQEAA

SEQ ID NO: 491504 - protein, 348 aa, unidentified
MSQIISTITVIGIDIGKNSFHVIGLDGHGALVLRQKWSRGQVEARLANMPPCLIGMEACVGAHHLSRKLKTLGHDARLMPAKYVRPYSKGQKNDFRDAEAIAEAVQRPTMKFVATKTAEQLDLQALHRVRERLVSQRTGIINQIRAFLLERGVAIRQGFRFLRAELPRILAAPPEVLSPRMVRIIGGLAEDWRRLDERIDCLSGEITALARQDAGCERLVSVPGIGPIISSAMVAAIGTGEAFSKGRDFAAWLGLVPKQISTGDRTILGKISKRGNRYLRVLFVQAAWVVLIKPQSWERHGLKRWIEAAKKRLHRNVLAIALANKLARIAWSVLARSRIFEASKLQAV

SEQ ID NO: 491505 - protein, 414 aa, unidentified
MLKIVYPICCGIDVHKSFVVATIAATNRQNITEYKTKRFSTFTRDLKALAQWLADHQCKDVCMESTGKYWIPVYNVLESSCRITLAHPKYVRAIPGKKTDKKDSRWIADLFKHDLVARSFIPEKQIRELRDILRYRFKLTNVGSSEKNRVQNSLTVSNIQLASVVSDVFGKSAQAILSHLLEHPGDTGFDVLPLLHGSMRDKQELITQAIEGTISPVQVEKIQLCQQHMSALGQLTDRIEQLAETLAKPYASAVQIIESEPGVGHMSALIILSEISADMSVFHSARHLCSWAGLAPRNDQSAGKKKTTKISRAGDYLKPVMVQCALAAIKQKDFPHYRQRYEALKHRRGHKKAIIAIARMMLSTIYTMLTNGELFNPQMYEASVKKPAYVLSPEQQLQVLAKRLGYSVAKVPDS

SEQ ID NO: 491506 - protein, 347 aa, unidentified
MVIVDSSRLIVGGVDTHRDINVAAVVDMNGGLLGVESFPTTADGHKLLAAWMRGFGTIERVGIEGTGAYGAGLARHFARASMTVIEVDRPNRQKRRQRGKSDRIDAVEAARGALSGRCEGIAKTGDGAAEALRALLVAKRSARSTRIRTIVQLRYLMFTAPDELRAKLGGLSAALLVSEAAKLRPRPGGDIVMHSVKTTAVILARRVQALDVELAVIDAQIGPLVKSAAPELLNVFGVGIDTAAVLLVTAGDNPERITTEAKWAMLCGIAPIPATSGLVDGRYRLNSGGDRHANNAIWRIVITRLGQHEPRTVAYMERRLAQGKSKRNIIRCLKRYVAREIFQALPR

SEQ ID NO: 491507 - protein, 404 aa, unidentified
MEVIYPRCCGLDVHKKTVVACVITPEGQETRTFATMTKDLLLLADWLSHCEVTHVAMESTGVYWKPVYNLLEGTGLTLLVVNARHIKAVPGRKTDMKDAEWIAALLRHGLLRASYIPDRPQRELRELVRYRRTLIQGRAQVVNRIQKLLEGANIKLSSVASDVVGVSGRAILEAMVQGMEDPQALADLAKGKLREKRLALEEALRGLMGPHQRLLLQSHLRHLDFLDAEITALDEEVAARMAPFESALVRADSIPGIGRRTAEAILAETGVEMSRFPTAAHLSSWARVCPGNNESGGKRRTTSTGRGNPWLRSALVEAAWAAARTRGTYLSAQYHRLAARRGAKRAIVALAHTILVILYHLLRTGKTYQDLGSNYFDERQRQYVLHRAVHRIERLGYKVSLEAA

SEQ ID NO: 491508 - protein, 403 aa, unidentified
MIFVGDDWAEDHHDVHLMDETGQRLAARRLPEGLSGMRDLHELIAGHAEEPDQVVIGIETDRGLWVSALTASGYQVWAINPMAAARYRDRHHVSGAKSDAGDAKLLADLVRTDRHNHRLIAGDTTDAEAIKVLARNHQSLIWARTRHANMLRSGLREYYPAALEAFDSLTDGDALAVLGRAPTPGQGTRLSLSKIGSALKAAGRQRNIEARANEIQAALRREHLTAPAALTAAFGATTTAAVHVIAALNVQIAELETALAEHFEKHPDADIYRSLPGLGVILGARVLGEFGDDPNRYTTAKCRKNYAGTSPLTIASGRKRAVLARHVRNKRHYDALDQWAFCALTRSPGARDFYNQHRTKGDTHHQALRALGNRFVGILHGCLRHHTPYDEHKAWAHRTPAAA

SEQ ID NO: 491509 - protein, 531 aa, unidentified
MTVKTNTNRRNRRKSTSKSKQRKTSTVQKASGVIGPRVKRVGGEKFAIVCVDPAKRRSEWMMADYYGNVLIQQQTLEHQAAFFKLAVAQIRETQQQHDIQDMIVVVERTGSYYLAPKRAFAKAAFDTRVVHPFVTKQYRMPANPGNKTDGTDLHAMHRAAVAGFGLCEWELESPYRELQLRARHRRNLVEKSAAMACQIREHLHLAMPGFAALFDHLLQNKSALAIARRCPSPAAVLDLGSAGLSRHLREQNVRHQIRTIDKVLAWATQAAASNTIQDGTLHHAIWTDLEELYQHARRRIRDHERELAGDLVQTPYIRLLAIPGINVVSAAELAGEMGPITRYANANAITGRCGLYPSRHQSDQTDNDRGPIIRQANRRLRCVLMRIADNLVCHCAYYRGLADVDKARKVDERAIRVKTAKKFSRLGLACVAGDQPMKHPAMREPDSIMEKLREFHRVHETPMDRGLADLKATVEQLPYHTRHREAELVAEVLRQHAGRRRGPVDVGTLLPAVLARLETRATEETKTRGRS

SEQ ID NO: 491510 - protein, 402 aa, unidentified
MNAVGIDVSKGKSMVAIMRPFGEIVSTPFEIKHTTSDIHSLVELINSVEGESRIVMEHTGRYYEVLAHQLSEANLFVSTINPKLIKDFDNDSLRKVKSDKADAVKIARYALDKWQNLKQYSVMDELRNQLKTMNRQFGFYMKHKTAMKNNLIGILDQTYPGVNTYFDSPARSDGSQKWVDFASTYWHVDCVRKMSLNAFIDHYQNWCKRKKYNFSQSKAEEIYGKAKELVPVLPKDAITKLIIKQAVDQLNSASTTVESLRTLMNETASKLPEYPVVMAMKGVGTSLGPQLMAEIGDVSRFTHKGAITAFAGVDPGVNESGTYEQKSVPTSKRGSADLRKTLFQVMDVLIKMMPQDDPVYQFLDKKRSQGKPYYVYMTAGANKFIRIYYGRVKEYLASLPES

SEQ ID NO: 491511 - protein, 460 aa, unidentified
MNPKRSKSRNSSKMPMVHPNAAAIDVGATMHMAAVRADRAPDPVRSFGTFTADLHRLVYWFTECGVETVVMESTSVYWIPIFELLDARGFTVFLVNARDAKHVPGRKTDVSDAQWLQRLHSFGLLRASFRPKGQIAELRAYVRQRERLLEYAASHIQHMQKALTEMNLQLHHVVADITGATGLRIIRAILAGERDPEALACLRHYSCHSSAETIAKALTGSYRAEHLFALEQALALYDAYHEKASACDVRIEAVLKELSIHRGHGHGSAPRASRRRNRTDQANALAFDVREALFALLGKDITTIDGLGPYLSLKLIAECGDDLSSWPSAKHFTSWLGLAPSNKVSGGKMLSSRTRRSGGRAAALLRLAAVTVGRTDTALGAFYRRLSARIGKAKAVTATARKIAVLFYNAVRYGMDYVDPGASSYEARYRTRVVSNLHRRAKAFGFVLQPLEPKVGAAVS

SEQ ID NO: 491512 - protein, 350 aa, unidentified
MNRHYIGLDVHCQFTEFAVVSSCGRVTKRGRCATTIPALVEVIESVKRPRQVAFEEGPMAEWLYRSLLPYADGVTVCEPRRNRWIAQEGEKDDPLDAAKVAQLLRGGYLKAVHHPESEHRSILKGHVSLYHDRVRQLVRTANRIIAQFRSHGVVICEEDFATRAQREQLLRRLPCDRLLHKDLQLLWESYDLAALQVEDLRRSLEQLGRNCEVLKRFQAVPGIGAVWAATFYVYVDTPWRFRSKEALWKYMGIGLERRRSGNGPAQVRVPKCVNRRLKCMILSAAQAAIHDLDSPFAAQYMRGRNAGLPHHSARRNVARTLAATLWGMWKSGHQYHPEWVGRGCNGRSGQ

SEQ ID NO: 491513 - protein, 421 aa, unidentified
MVTDQNVTAPELVAYIGLDWGDERHAVHLQAAEGGPVERVELEQKPDVLHAWVAQVRERFHGRPVGIAIEQRKGAVMHALMMYEFFVLYPVNPKALARYREAFRTSGAKDDPADAELLLDLLRKHRDQLRPWLPDTVEARTLQSLCEQRRKLVNHRVALTNRMTSLLKQYFPQALDWVGDVASLQGCDFLRKWPELAAVQRVRPNTLRTFYQQHNCRTAAVIDERIRQIASACPLTSDPAIVDPLSLSVQTYATQLRVVIEAVQAFDTRIADVFAHHPDQALFDSFPGAGPVCAPRLAAAFGTDRSRWQSATELQSHSGIAPVTERSGKALWVHHRLACPKFVKQTFHEFADQSIRFSQWARAYYDQQRGRGNDHHAALRALAYKWIRILFRCWKDRKRYDEATYMDALRRHGSSLVKNNA

SEQ ID NO: 491514 - protein, 403 aa, unidentified
MAVMVGLDWASTEHAVCIIDDQGKVRARMTVAHSAQGLAALCAGLQRFGPPASIHVAVERPSGLLIDTLLEAGYRVVPIHPNVVKASRPRYHAAGGKSDPEDAFILADLLRTDGHRFRPLRPLSDETRALRALVRTRDDLVAQRVALANQLRALLESFWPGAVGIFADIDSPIALAFLARYPTPQSAERLGEKRLAAFLAREAYCGRRPAGELLARLRAAPVGLAGESEAEAKGELVRALVTILSALVAQLQRLTAAVEHAVAAHTDGPLIMSFPRAGKVNAAQILAELGDDRARFGSEEQLAAEAGAAPVTYTSGKHRGVGFRWACNKRLRQAVVCFADNSRHSSAWAADVYRRAVARGCDHPHAVRILARAWLRVLWRCWQNATPYDPHHHRAARPFVEAA

SEQ ID NO: 491515 - protein, 394 aa, unidentified
MPKASDRPEAPAAIQTHLTAIFVSLELSRKTWLITSLSPGAGEKMSKHSVPAGDVAALLLRFAELKRKAEARTGKSFPIVTIQEAGLDGFWLHRVLQSEGVESHVVDPASIATSRRRRRAKTDSIDGEALLRALMAFKRGEPRVCAMVKPPTPEEEDRRRLSRERKVLVAERVEHTNRIKGLLFSQGIADYNPLARDRRQKLGELKTGDGRPLPAHLKTQIVRELDRVELLLDQIKAAEAERNAMLAMPKTSARQADAPPPAGKMLLNFKGIGPEFASVLWLEGLYRHFDNRRQVASYAGLAPTPWQSGSIDHEQGVSKAGNPRLRTALVELAWLWLQNQPDSALSLWFKQRVAANNGRRKKPTIVALARKLLVALWKYVTFGVVIEGAVMKQT

SEQ ID NO: 491516 - protein, 342 aa, unidentified
MKLMRIGVDLAAVFQIHGVDCHELPVWRQRLPRDRWLQTVLEKIEPGCEIGMESCGGAHHWARQLQARGFRVKLIAPQFVKPYVKSNKNDANDAEAICEAMSRPSMRFVAVKTIEQQDIQATHRIRAGLIEQRTAKANQIRGLVAEYGLVAPKELLMLRRAIPCWLEDADNGLTARFRRLLDGLWGDLRALDERVCKLDGEITAIATSEPSAVRLQQLRGVGPMIATALVVALGDARQFANGRQFAASLGLTPRQHSSGGKDRLLGISKRGDAYLRTLMVHGARSALRTAKSKEDRLSQWAVRLAERSHPNVAAIALANKTARMAWAMLRHGTDYQPNQAAA

SEQ ID NO: 491517 - protein, 339 aa, unidentified
MSIITIGIDLAKNIFAVHGVNEFGKPGLIKPKVARADLLGLIVSLPPCLIGMEACSGAHHWARLFQQHGHTVKLMAPKFVAPYRMSGKRGKNDAADAAAICEAVTRPQMRFVPIKDEHQQAILTLHRTRQGLIQDRTATYNRIRGLIAEFGIVLPQKVERLRTGIGAYLEALPGVSNQCIGDLLKWANQLTESIDRYDGLIKQLNRDNERARRLQRQAGIGPTTASALVASIGHGHEFTCGRQLAAWLGLVPGQYSSGGKQRLGRITKAGDGYLRCLLVMGARSVLSSLGEKQDRYSRWVRALEARVGYWKAVVAIAAKNARLAWAILRYGDEFTVLAD

SEQ ID NO: 491518 - protein, 316 aa, unidentified
MISCFVGIDVSKATLDVAFWPERSKPFQLKNDPEGIAQMLVCLNEIEPERVVLEATGGYENAVFKALRVAGLNATRVNPKRSRAYADAVGQIAKTDRIDAQILAKFAQHLETKTLVEPSQARDELAELVKLRDQIREHRDDDRRRAKQATSAIALAFFASHIASLEAELKSLNKHIDIATKALDRNKVERLQAIKGIGRVTTAKLLAYLPELGLLTGREITALVGLAPYNNDSGSKSSPRHIEGGRYKVRGALYMAAWVMIRHTADFKARYNALIARGKCSKKAVVACMRVLLVRLNAMMRDGVSWKEHQHKVPAA

SEQ ID NO: 491519 - protein, 398 aa, unidentified
MTESSDYESVQVFIGVDVGKDTHHAVAINRSGKRLFDKALPNDENKLRSLISDLKQHGQILLVVDQPATIGALPVAVARSEGVLVGYLPGLAMRRIADLHAGEAKTDARDAAIIAEAARTLPHALRTLKLADEQIAELSMLCGFDDDLAAQTTQASNRIRGLLTQIHPALERVLGPRLDHPAVLDLLQRYPSPEKLASLGEKKLAAQLCKLAPRLGKRLAADIAQALAEQTVVVPGTNAAAVVLPRLALQLITLCKQRDEVALEVEQRVLAHPLYPVLTSMPGVGVRTAARLLTEVACRAFASATHLAAYAGLAPVTRRSGSSIRGEHPSRRGNKALKRALFLSAFAALRDPLSRAYYTRKMSQGKRHNQALIALARRHCDVLFAMMRDGTFYTPQAS

SEQ ID NO: 491520 - protein, 369 aa, unidentified
MTDLTLFVGLDVHKKTIAVAVIEGVAGAAVRFYGTIANTPETVRTLCRKLSRDGQQLYFCYEAGPCGYGVQRRLTRLGHRCDMVAPALIPRKVGDRVKTDRRDAMMLAQTLRAGQLTAVWVPDEAHEAMRDLVRLRAQAMRDLRKARQQLLSFLLRHGRNSPYGHWTKMHRRWLGELVFAHPAQHLALEEMLQRIERAEALCDRLKQAILELVPQWSLAPVVQAIQALRGVSLIVAAAIVAEVGCFGRFESPRALMAYLGLNPSEHSSGATIRRGAITKTGNTLARTCLVEAAWTYRFPPRVSQIIRDRLKELPEPIRAVAWKAQVRLSARYRKLSAAGKPGPKVVVAIARELVGFIWAIARMVEPKFA

SEQ ID NO: 491521 - protein, 334 aa, unidentified
MENIALTSIDLGKNSFHIHCQDRRGKAVYRKKFTRPKLIEFLATCPATTIAMEACGGSHFMARKLEELGHSPKLISPQFVRPFVKSNKNDFVDAEAICEAASRPSMRFVQPRTESQQAMRALHRVRESLVQDKVKTTNQMHAFLLEFGISVPRGAAVISRLSTILEDNSLPLYLSQLLLKLQQHYHYLVEQIKDLESQLKRKLDEDEVGQRLLSIPCVGTLTASTISTEIGDGKQYASSRDFAAATGLVPRQYSTGGRTTLLGISKRGNKKIRTLLVQCARVFIQKLEHQSGKLADWVRDLLCRKSNFVVTCALANKLARIAWALTARQQTYVA

SEQ ID NO: 491522 - protein, 364 aa, unidentified
MASVQFVGLDVHKDTVDATVMSGKSGTPDFEKRYTNSPKVVQRLFKSLQQRGPVAAAYEAGCMGFELQRMLKGMGVECLVIAPGKMPRFTSDRIKTDRRDARTIAKLLKNGEVTPINVPTPEDEATRDFLRAREDLKQDSGRAKQRLMKFLLRHGYTYRGGSYWTMKFARWLSELQFALPLLKETFDSYRLKVLELKNQMRVLDERVVAIAVQKQYAQRVARLRCFRGIDHLIALALVVEVGDFRRFATAASFMAYLGLVPREMSSGGSRRQGGITKSGNGHLRKLLIEASWHYRRKPSVSKRLRERREGQPVELIGYADRAMNRLHQKYIKIVVRGKTKQTAVTAVARELAGFVWGTMTGKIS

SEQ ID NO: 491523 - protein, 371 aa, unidentified
MKKGSSCRQSPERVAKAFRLQGSITIGMDLGDKHSYCVLDGQGEVIQEGSVGTSKKAMAKVFGSMGRCRIAIEVSTHSPWVSRLLQAFGHDVVVANPRQVKLISASSRKDDRLDAQTLARLARVDPQLLRPIQHRSAKAQGDLMVIRVRAALVEARTSLVNTARGLTKSLGERLPICGTDQMGVEQTELLPAKLQQVLEPLLQQVVSLTEEIKESDRRVEQIAREDYPETRLLQQVSGVGPLIALTFVLTLEDKARFQKSRDVGCYVGLRPRRSDSGESQPQLRITKEGDAYLRKMLVQGAHYILGYRGPDTDLRRWGLKIAARGGKRAKKAAVIAVARKLGILLHRLWVTSEVYEPLRNVTVQRARIAAA

SEQ ID NO: 491524 - protein, 336 aa, unidentified
MNIKRIGLDLAKLVFQLHGVDHHERVVLRKTLRRSQMLVFFAQLEPCLIGIEACGSSHYWARELTRLGHSVRIIPPQFVKPYLKSNKNDANDAEAICEAVSRPGMRYVAVKSEAQQSMQAEHRVRARLIRDRTALSNEIRGMLGEFGLALPVGLAALRRALPEILSQQEQWDNRFIRLLCELAEELQILDDRLARYDRRLKQLAQDDDRIRRLQEISGIGPVTASALVSAVGDARQFKNGREMAAWLGLAPRQHSSGGKNRLGHISKRGDSYLRTLLIHGARAVLNACGNKEDRRSRWLQSVAERRNRNVATVAMANKNARIAWAVLSREEEYRVM

SEQ ID NO: 491525 - protein, 413 aa, unidentified
MQQIHDRVAGLDVHRDSVITCFRHPGPKGGVVREKERFTTTTSGLQVLEAWLADRDVQLVAMEATGVYWKPVLYALERRFTVWLCNARAVKKVPGRKSDLSDAEWLADVAAHGMVRPSFVPPLPIRELRELTRYRKTQIDARVAEIQRLEKVLQDAGVKLTSVASKVLTQSGRAMIEALIAGEQDPARVAALAKGKMRPKIPALTEALAGHFGPHHAVVCQRILGHLDFLDDTIAALTEQIDARTAAFEAVYKSLLPVPGFDRLTIDVIIAETGADMSRFPSAGDLASWAGVCPGGHESAGKRRRVSTTPGNRWIRRGLIEAARAAVRTTGSYFGAQYRQIARRRGPNKAAVAVAHSLIELVWHLLSTAEVYQDLGDDYFTKRQDPERRARRLIAQLEELGFKVTLEEASAAA

SEQ ID NO: 491526 - protein, 349 aa, unidentified
MRFYNQQHRFYCGVDLHARTLSLCILDGAGQTVLARTIAASPDDFLQAVAPFRDGLAVACECMFAWYWLADLCHEQQIPFVLGHALYMKAIHGGKAKTDKIDAHKIAVLLRGGMLPQAYVYPKGMRETRDLLRRRTFLVRRRAEALVHLTNTNSQYNLPPFARKLAYAANRAELDVAQRFTDPSVRKNVEVDLALIGAYDRHIGALELYLVRTAKVDDPQAFHRLRSVPGIGKVLALILLYEIHDVRRFAEVGQFLSYSRLVRCAHESAGKKQGTGGNKIGNAHLKWAFGEAACLFLRESEQAKKWLARREKKHGKARALATLAARLGRTVYHLLRKQEVFDARRFFAT

SEQ ID NO: 491527 - protein, 323 aa, unidentified
MNHKVGKDNTVARFIGIDVSKQWLDVASLPERETRRFTNDSAGQEQLSTWLMSLAPELIVMEATGGFETRVATTLAAQGLALAVVNPRQVRDFARAFGVLAKTDRIDASVLAAFAEKVHPPVRPLPDEDRRELIDLVDRRRQLVTMRAEEKTRLSQATASARQDIKEHIDWLDERLRRLDIDLTAKLRTSSLWKAKEEILISVPGVGRVTVFTLLARLPELGALNRRAIAALTGVAPFARDSGQHRGHRMIWGGRADVRSVLYMAAVSAARINPVIRSFYLRLKQAGKPSKVALTACMRKLLTILNTMLRNNQPWQAPSTHTI

SEQ ID NO: 491528 - protein, 408 aa, unidentified
MKTLLRRCAGLDVHKVEIVACLRLVEKGKVARRVRRFPTTTQGLLELVEWLEGAGCSHVAMEATGVYWKPVWHILDGHFALILANAMHVKAVPGRKSDVNDATWLADLLAHGLIRASFVPSTPIQELRDLTRTRKQLTREIVQHVQRIQAVLEEANVKLSSVISDIMGPSGRRILTAIIAGETDAEKLAALGSERLGCGRAALSEALKGRIREHHRFLFAQHLRTIEQLEESVAAFDARIAGALAPFREVVERLNEVPGLGRIAIETIIAEIGTDMSRFPTAGHLVSWAGLAPRLDESAGKRRSTRIRNGAPWLKPALVQAGWAATRKKNTYLQAQFLRLKSRRGPKKALIAVAASILTIVYHMLRDGTFYRDLGPEYFARRSPAKLAANLANRIRNLGYHVEISAAT

SEQ ID NO: 491529 - protein, 343 aa, unidentified
MKNPPVRIGMDTSKSVFQLHGVDADEVVVVRRAFRRAEMIHYYEKLPPALVAIESCGSSHHWARLLTSLGHEVRLIPPQYVKPYVKRGKNDAADAEALCEAVTRPGMRFVPIKSEEQQAACMLMTVRERLVSVKSQLSNAFRSYAAEFGIVGAAGRQNVNALIRRVLEDDTLPEMARDLFRVQAKEYSAVEARLEEIETRLRKWHREDDTSRRIATIPGIGPVGSAMLSMKAPPAESFRSGRDFAAWIGLTPRDHSTGGRMRHGGITKAGDAALRSVLVVGATALLRHIRAGRHKPTAWLAALLERKPPKLVAVALANKFARIAWRLMVSGGIYSRPSGSMAA

SEQ ID NO: 491530 - protein, 434 aa, unidentified
MSTLSKIYPNSAGIDIGSEKVFVSVENQPVRNFRTFTASYKELGVYLKESCVVHVAMEATGIYWVTLYDILEEMGFDVTLVNPSDTKNLPGRKTDVQDCQWIQQLFSYGLLRKSFVPEDLVRKLRVYTRMREDKLQIASSHIQHMQKALIQMNIRLPEVLSQTHGVSGMAMIKAILEGERDANLLLSYCTAELRKRKGSDILLALEGNYKEEYLFELGQALDGYLFYLQQVCKCDQQIESILNDYKKKSGKDYQDNKPVKPIRHHKPQIKDLHGLLLGIQGANPTVLPGLTDYSFMRLTAELGNNIKQWPTAKNFVSWLGLAPGQNQSGKMNKRSKKKAVTRAGQIFKQGAQSIMLSKQPGLGAFARRLKAKRGPAIAIKATARKLAVLYYNLFSEGIQYVEQGISKYQEKIKQQQLISLKKKADELNFQLVEI

SEQ ID NO: 491531 - protein, 365 aa, unidentified
MLHRLNSAATLIQRTTTEAPRGHMYYIGLDVHKKTISYCVKDVSGRIQQEGKVGSTRRELDCWMKTLPQPWSVGMEATIFSGWIYDHLLPHATQIKVAHPLMLRAIAAAKKKNDKIDASKIADCLCCDFLPESHMMPREIRDRRRTLRCRHLLVRQMVQMKNRVSGLLMETGVEYNKQRLHKVSYFRELLSTNEEVHPNIRPLLKLSRETIERCQKTEYALVSSLQRDPVLADRIRRLRTIPGVGSITALTWALEIGDVSRFRTIKQAISYCGLCGDERSSADKAMRMPLSKQRNKHIQRTLVEAAKLAPRQSHELAVIYEREKQKGNGNRATLAVARKMVAYLLAVDREQRDFIPAEERRTAAA

SEQ ID NO: 491532 - protein, 430 aa, unidentified
MEQTERNRLEEFRQLKREIRHSDEYLIVGIDVAKDRHHAFYGTTTGKTLLKRVVFSNDHEGFRRLLDQAEALRVQQGLKKVVYGMEPTGNYHKPLGEYLINLGRMVVLVSGVTVARNWESLDNRWDKNDGKDSANVADLISQGKCLYYEYPTAELRGLRGLLSLKKRLKKQEQGYRVRIRNHLIAQYFPEMDRDYERLGAEGLAIVRWCLPASQITQLDVDPFIERVTARRITMEKRRRLEAIWEKAGQSIGCEGVPGVEHEAKVMVEGLRQIRKMIKEIEDKIEELCKRFPEYSYLLTIPGYGPDVSSKVLGAIGDPYRFENGKQVLKLGGLDLSADRSGKDSDRAVPEISRRGKADLRYALYQAALIASFKNRDVMIYYTNKIRGREREKGIQIKMRVKLAAKLLVIGWTLMKKKEAFDPAYLKAELS

SEQ ID NO: 491533 - protein, 326 aa, unidentified
MQGKVSPERSALKRVYVGIDVCKAWLDVYLHPIGQSLRVQNTAKGFKVLLRTLAKHQVALVVIEATGKYHRSVHRALHEAGIAVAVVNPLRSRLFAEAVGALAKTDRIDAKVLAMMADSLQPKAVAPLPSELENLQELRRARQAAVDDRTALSNQLGETKGMFLQRGLKRRLEQVSEFISRLEAEIKRLIDSDPQLARRYAIVKSIRGIGPVAAVALIVGLAELGTCSAKQAAMLAGLAPVASDSGESKGARHIRGGREDVRRGIFMAAISAARGNPTLKPFYDRLIASGKLHKDAITAVLRKLGVPANPPWTENRHWQPEAPKTA

SEQ ID NO: 491534 - protein, 333 aa, unidentified
MNTASLSLPPLGLDMAKASFTARLVSPTKVHSASFTNESTGWAQLDGWLAKHHCKEVLAGLEPTGPYAAGLLWHLHCRGHTVCLINARHLKHYGRSLGRKVKTDPTDAALIADYLKANAEHLRPWQPPTQEILMLQGLVRRRQQVLGLLQAERNRTEGVTQPVIKASLQRQIGHLKTEVARLDRTIQAHVLGHPKLQHCVRLLCTIPGIGPVVAMTILAEVPALSAFTRARDLAAFAGLTPSVIQSGTSVHRRGRLTKEGSALLRKMLYMAALQAIKRPTNALHRCYQHFIERGKSKMCAIGALMHKLIRIAFGVLKHDQPFVANFAKLHSLT

SEQ ID NO: 491535 - protein, 338 aa, unidentified
MAHEFPTSSQPRRFQGIDVSKATFDVARWGDQTFRQMHVGQWPRTRNGVKDWLASLTADELAMTAVVMESTGGYCKELAGWLREACPALHVSIANPYLVACYGRSNGLRNKTDRLDARMLADYGQSKNPPAWEPLPAIQEELRALVRTRAKLLNMAVSLRTRSREHACPSVLAGQIQEAAYRFLMEQIKAIHRGMADLCMRDKQLKHWMELLMTIPGVGMITAATILGEAGDLRRFERKGQLVAFLGVSPHVHRSGTSVNGRTRMCKVGGAHARSTLYMAAVAACRLPGPLGDFYRRLVMAGKAKLAALGALMRKLLIVMRAVLIQDGPYRPVPVTSL

SEQ ID NO: 491536 - protein, 499 aa, unidentified
MRSSDRLFDPVGEILKPFVTGPNSILIPIEERKMTAEKRLRNRKERKELTRRLQSENPGLEVVHPEAAGIDVGNEAHYVAVRPDRDAESVRKFECFTADLYRLAAWLKKCKVKTIVMQSTGVYWIPLFDIMEEQGFEVYLVNARHTKSLPGRKSDVQESQWLLKLHTYGLLSNSFQPPSEIRTLRTYWRQRAEHVAGVSTCIQRMQKALTQMNLQLANVISDLSGITGQKILRAIVAGERNSLKLAELRDCRIQASQEEIVKSLEGNWRPELIFVLQQQIDIYDAYQRRIAECDQQLKKHLAEFADHRNGSLTPSPTGQGDRKKTAARHTPKFDLGGELQRIMGVDLTRIDGIDVMVSQTLLSEVGLDMSRWKTEAHFASWLGLCPDNRTSGDRVLRRGTRPVVNRAALALRIAAHSLLRSQSYLGAQYRRLRTKLGAPKAITAMAHRLARLVYRMLKYGQQFVDKGMEYYEQRYRNQQVHLLQKRAAQLGLQLVAVET

SEQ ID NO: 491537 - protein, 455 aa, unidentified
MKANRVSALRSKRGLHRVNGAEPQVVGLTPQTTDERKTDTMKTYILRDPKPVEPQKSIRSPRHQLVITAIPITVVGRPSVSAKDPVLFIGLDVHNDSIAVSLAPSDSTEVRRYGIIGGEHDDVLKLAHKLQAAHPGMILKFCYEAGPRGFALCRCLQMHHWNCILVCPSKIPRKPGERVKTDRRDADDLARLYRAGELTGLYVPEPVDEAMRDLIRARFQVGRQQHRSRQQLKMYLLRHNLRYGGQTSWTPAHLRYLAKLKMPFPTQQIVFQEMLDVISEATARLERYDQEIERAVPGWRWEPAVRALMSLRGMALLHAATLVAELGDFNRFEHPGQLMGYLGLVPSEHTTGKDRQQGGITKMGNAPARRALVEAAWQYRVPARLSPHLKKRQEGLPKAITDIAWEAQRRLHHRYTHLTRVGKKKSQVAVTAVARELTGFVWAIARQVKPVTAQP

SEQ ID NO: 491538 - protein, 319 aa, unidentified
MGTVMNQISSSVYIGIDVSGSTLDVAIHDTTEHFSVDNETAAIDQLVQRLIALGPTLIVMEATGKLELAVLRALCEAGLPAVAVNPRQVRDFAKATGKRAKTDRIDAFVIAHFAAVIKPVVRPLNDVQTEQLQALLLRRAQLIDMLVAEKARLERAHAAAKESLNDHIKWLKQQLTVADKDIDSFMRSSPAWRQKEDLLRSVPGIGPGAAATLIAFMPQLGSLNRREIAALTGVAPFNCDSGKHTGKRRIHGGRAIVRRALYMACIPALRFNPVIRAFYDRLRKAGKPFKVAMTACIRKLIVTLNAMVHNSTPWSASTN

SEQ ID NO: 491539 - protein, 355 aa, unidentified
MLADRVDYIIGVDTHTATHTAAVVTPTGAALAHRTVPADADGYLHVYRFAVEQAPGRRVWAIEGTGSYGAGLTTHLLEQGEWVVEVDRPARPARRNGTKTDDLDAVRAAREALGREHLAQPRQRGDREAIRVLVTTRQSAMQARTCAINHLKALVVNAPERLRQQLRALATDQLLARCARLRSHPTQPIEYRATIAALRRTAQRSLALAAEADELHAELDTLIRRRAPWLLAEPGIGVICAAQLLNAWSHAGRVRSEAAFAMLGGAAPIEASSGKVVRHRLNRSGDRQLNRALHTIVLSRMAYHAETRAYVARRIAEGKTAREIQRCLKRYLARRLFKLLEAPPAHAQKEKIATT

SEQ ID NO: 491540 - protein, 342 aa, unidentified
MVTIKYCVGVDIASSTFTAAVGEMPWKVILKPHTFDNAEDGYQTLLEWFTQHHLSAAESVVCMEATGVYSEGLAYFLYAKGYRVAVQSPLEVKRTFKPYGPKSDAVDSLQIAEYACRHTDKLSFWKPRSEILEQVKALLAVREQFVSQNVAHKNALQAIQRKVVRTPFAEQAYVQLIEQLKKQIQALDTEVRRLIESDPTFKEMLLLLMSIPGVKLLLAAHFILLAQVSLEYKILASFLGIAPNEHSSGTSVFKHASSRHFGPPAIRKLLYLAACSVCTHRPQFRLYLARKTKEGKPPRLVLNNVENKLIRIMCAVLQSKTAFIENYHSVQPLALQKALTSS

SEQ ID NO: 491541 - protein, 374 aa, unidentified
MEEVSTVFVGLDVHAETTAIAVAHVGREAPRFVGTVGARLGELLKALGKLGEPSTLLIVYEAGPCGYALVRELRVKGYRCEVVAPSLIARKPGERIKTDRRDALKLAAQARSGDLTTVSVPDECDEAIRDLCRARVDAVRARLKARQQLKAMLLRHGRRYTGKTSWTAAHERYLAELGFAHPAQDIAFTEYRHAISEADARVRRLTEALAQQIENWRMLAVVRALMTLRGLDLVAAATVVAELGDMRRFAHPRDLMGYLGLVPSEHSSGTTRRLGAITKTGNGHARRVLVEAAWNYRFPARISRILQVRQEDQPAAVRAIAWRAQLRLCQRYRRLSARGMQPNKVCVAIARELAGFVWDLGRQVPPQAPVIPQH

SEQ ID NO: 491542 - protein, 363 aa, unidentified
MKIVGCDLHARQQSIAMVDTETGVLTEKVLKHEGNAVREFYAALEGPVVVGIEATGAMQWFLELLEQLGIECRVGHPAKIRAAETRKQKHDRRDAEVILDLLLMNRFPDIWMPSTEQRDLRTLLRDRHQWVKMRTRLQHTLQAIALNHALREGRALWTAAGRRSLQDLTLPKYRAQRRDELLSLYTQLDKRIQQLDKQVETEARQRPQARRLLTYPGVGPVTALATEVFLGDPHRFAGANQVASYIGMIPCEHSSGKRQRLGKLSKEGNSLLRYLWIEATLHAAVKDSELKRFYRRKLVQKGMGKARVATARKLGIRLWIMLRDEIDYEEFCRRGKLPQKGKAHAGMPDYNSGPARAVTGSTE

SEQ ID NO: 491543 - protein, 367 aa, unidentified
MKKVSIAATRQSRNISQQKLTIGLDLGDRNSWYCVLDEAGQIQLEQRVRTSAKELREVFGAMPRSRMAVEIGTHSPWISRLLSELGHEVIVANARKVRLIGESRKKDDRLDAQTLARLARIDPELLCPVKHRSAQAQADLMMIRARAGLVRARTGLVNTARGLAKSYGERLRGCNVRNMNAEKAEGLSSELQRALEPLLSAIAELSQRISEYNDRIEALAQASYPQVALLKQIKGVGTLIALTYLLTLEDAHRFGKSRDVGCYLGLQPGRRNSGQSEPQMHISKEGDPYLRTLLVQGAQHILGPFGADCDLRRWGLKLAERGGKNGKKRAIVATARKLAVLLHHLWVSGEVYEPLHNSSRMTVAAAA

SEQ ID NO: 491544 - protein, 338 aa, unidentified
MKLYGAIDLHSNNNVTVLIDEQDQVVYQKRLANDLSLIGEQLSPYASSLEGIVVESTYNWYWLVDGLMGKGHRVHLANTAAIQQYNGLKYTDDDSDARWLAHMLRLGVLPQGYIYPQQERAVRDLLRKRSQLVRQKTANLLSIQNLYTRNTGLSLSANRIKKLRSEEVDDLFTLGDVTLAVKANLSVMRCLEAEIKTLEQVVKERVKLKPAFRYLLSVSGIGQTLALTIMLETGDIRRFPSVGNFASYCRCVGSEKISNGKRKGKGNTKNGNKYLSWAFVEAANFAIRFEPLIGRFYQRKKAKTHGVVAIKAVAHKLSRACYYVMRDQVPFNVARAFS

SEQ ID NO: 491545 - protein, 408 aa, unidentified
MTVVGIDVSKGKSMVAAMKPGGELVAAPYEVRHSDIELSHLALDVLCMEPDTRVVMEATGRYHEPVAAQLHSAGIFVSILNPLLIKQSGAGSLRKVKSDPKDALKIAKYGLDNWSTLREYTPMEAIRQQLKLCARQCDLYNKNIVMLTNNLISLSDKTFPGVNELFSSPEKEDGHLKWVDFYRTFWHCDCINRMSPDAFGERYKKWCKRKGYHFSADAADALYAASCGLYTTLPRDNNARLLVTVAADQLIALRENQSKLEAEMLNLCKQLPEYETVMAMYGVGKSTGPHLMAELGDVRRFPHRSSIVAFAGVDPGVVGSGKMQLSSVATSKRGSPQLRKALFQVVSTYVKCKPENEAVYQFYTKKRDEGKPFFVCTTAAANKFLRIYYARVKECLNAAESATQVEEG

SEQ ID NO: 491546 - protein, 321 aa, unidentified
MTVIGIDVSKDKLDVVCMDEQRQTQYAQVDNTAKGYAQLKRWLHKRQVQAVCLEATGRYSEGVAEYLHEAGYQVSVVNPARIRGYATSQLRRNKTDKLDATLIADFCRTQQPEAWTPPPPEMRQLQALVRHLTTLETAKQQADNRLREPAALPPLVVQQLKTQRDLLADQIKQLKQAIQNHIDHFPDLKKQRDLMDSIPGIGKLTAAKLLAECRSVSRFDDVRQLVAFAGLNPAHHQSGSSIRKKTTISKTGKPAIRAALYMPAVSAKRYNPVLKAFAQHLLDQGLCKMEVITAVMRKLLHLIYGILKSGRPFDPHFHAPA

SEQ ID NO: 491547 - protein, 338 aa, unidentified
MELYGGIDLHSSNSYIGIVNEENRVMYKDRHRNELPLILSVLAPFKSKLKALAVESTFNWYWLVDGLMDAGYPVHLANPSAMKEYKGLKHKDDKKSALWLANLLRLKILPEGYIYPKEERPVRDLLRKRLHLVRHRTSHILSIKNMFSRNLWIAMKGDDIKTLTSRDIEKLISEECHRIAIMASLSTVHHLTGQVHEIEQTILGRVRLRDEFKCLLRVPGIGTTLGLTIMLEVGDIRRFHEVGNYASYCRCVESIRTSNDKKTGEGNRRNGNKYLSWAYIEAAHMAKRYYPTIRRYYEKKAARTNGIVAIKAVSHKLARASYYVLRDQAVFDEKRLFG

SEQ ID NO: 491548 - protein, 346 aa, unidentified
MKTVTTVATIGLDIAKSVFQVHGIDAAGDVVIRQQLKRARILPFFKKLPACIVGIEACASSHHWARELTALGHTVKLMPPAYVKPYVKRQKNDASDAEAICEAVQRPSMRFVPIKAPQQQAALVLHRTRHLFVRQMTAVINALRAHLAEFGIAAPVGRNGVEELVAVIEDRNDKRIPDLVRTCLTALRIQLDTLKQQIRILDRRLLVWHRANETCRRLDAIPGVGPALATALVASVADPKAFRSGRDFSAWIGLVPKQNSSGGKERLGNITKAGDRYLRSLFCAGALAVIRYAQKHGTKHRPWLTTLLERRPTKVAAIALANKLARMAWAMMAKGESYKEPMALAR

SEQ ID NO: 491549 - protein, 489 aa, unidentified
MGTCELESGDVALAAIPIRKMTIGIAQTLLLIIDWRIAMPKRMTGRPELKPVNVGAAAIDIGSKMHMAAVNPASTDVPVRSFGTFTQDLHDLADWFKACGVTSVAMESTGVYWIPVYEILEQRGFDVILVNARYAKNVPGRKTDVSDAAWLRQLHSYGLLRGSFRPDAEIAKLRAYLRQRERLVEYAAAHIQHMQKALMEMNLQLHHVVSDITGATGMRIIRAIVAGERNPDVLATYRDVRCHSSIETIRAALVGNNRDEHVFALTQSLELYDTYQAKMLDCDRKLESLIATLTDKGAKPVGKLPKPRIKTKQVNTPTFDVRTALYGVLGVDLTEIHGLGPSLALKLVGECGTDLRAWPSAKHFTSWLCLAPGNKISGGKVLSSRTRRSSSRAAALLRLAATTVGRSDTALGAFYRRLSSRAGKSKAVTATARKIAVLFYNTLRHGMSYKDPGADHYEQQYRSRVLASRAKSLGFVLQAIPGDAEPAVS

SEQ ID NO: 491550 - protein, 331 aa, unidentified
MSFNGTSVGLDVHALSVVAHAVDEQTGRVERARLCPDHGEILDWLHRLRGPVRVAYEAGPTGFGLARALADAQIDCVVAAPSKLIRPAGDRVKTDARDAAHLTRLLRLDEITAVTVPDVEVEAVRDLVRAREDARADLMRVRHRLSKLLLRQGRVYSGGQAWTGVHETWLRRQRFDDVHTAAAFDHHFDAVLTATAARNRLDEQIVMVAASPRWADPVNRLGCLRGISALTGLALAVEIGDWTRFTGASIGAYVGLVPTEYSSGTSRVQGSITKAGNAHVRRLLIESAWHHRAGYRTRSDDAGPMGQGRPSAQGPRARRKPPFTSAVVPVQ

SEQ ID NO: 491551 - protein, 391 aa, unidentified
MTKRKTETVNDLSRCLDALDMDATLIAVIEMSQSSWLVAGIVPGVERQPLKKLAIDEGALLNLLRRWRAEAEKEGHRITRIAVAFEAGHDGFWLARWLAAQGVETHVIHASSVAVTREHRRAKTDRLDTELLKRGFLGWLRGERGHCKMVTVPTLADEDAKRPSRERETLVGEASRIITRVKAAFVRLGIRSFNPKLKTAAARLETLRTPAGEPIPPNTLAALKRDLERHRIVKQQIHEIEQTRLELLEQAPAEGRHAMVLLLARVIGIGVETADMLVQEVLSRNMRDRRAVARYAGLTGSPDESGAKRREKGLARSGNARVRRGMIQLAWRFLMFQKDSALAEWYRQRTANAPSARKTLVVALARKLLIALWRLARDGVVPEGVRLRPAA

SEQ ID NO: 491552 - protein, 397 aa, unidentified
MFKIFRNNCCGLDVHKTWIYACIGITDPNGRTEYKQARFSSFSNGLRELAAWLAKYSCTEVCMESTGKYWIPVFNILEKSCFVTLAHPKYTKPQKGNKTDRKDAKWICDLFMCDMIKPSFIPSPEIRQLRDLMRYRSKLTNMLTGEKNRAQNCLTVSNLKLDDVFSDVFGKSARSITCYILDHPGETFDVSPFVDPRCKTPVSEIQAAVEGAISPEQALKLRQCLAHIDELEAHRKEIESEILQIAEPFSVVLDLLYTLPGLDKNPMIAIAILSEIGPDMSVFPSSKHLVSWAGCCPRNDQSNQKVKSRRISRAGSYLKPLLVQVANALIKSKKHPEFKERYHRIKSHRGHKKAIIAVCKILLTAIWNMLSKLEPYNPVGFLEHRPAKQGKTLREKL

SEQ ID NO: 491553 - protein, 367 aa, unidentified
MKKVSTAAAKQSRNISQPTLTIGLDLGDRNSWYCVLEEAGRIQLEERVHTNAKALREVFGRMPRSRIALEIGTHSPWISRLLSELGHEVIVANARKVRLIGESRKKDDRLDAQTLARLARIDSALLYPVKHRSAKAQADLTVIRARAGLVRARTALVNTARALAKSYGERLRGCNVRNLNPEKADALSPELQRALEPLLSAIEELSERIVEYNDRIETLAQESYPQVALLKQIKGVGTLIALTFLLTLEDPHRFRKSRDVGCYLGLQPARRNSGQSQPQMHISKEGDPYLRTLLVQGAQHILGPFGIDCDLRRWGLKLAERGGRNGKKRAIIATARKLAVLLHHLWVSGEVYDPLHNSSQVTVTAAA

SEQ ID NO: 491554 - protein, 345 aa, unidentified
MQTVTTIGLDIAKSVFQVHGVDAQGKVIVRRQLKRRCVLAFFQKLPPCLIGIEACASSHYWSRELQALGHTVRLMPPAYVKPYVKRQKNDCADAEAICEAVTRASMRFVATKTVEQQSCLMLHRTRHLLIRQQTAVINAIRAHFAEFGIVAPVGRTGVEELLKVASDGNDKRLPDVARVCIAALGAQLQMLKARILEFDRLIMAWHRSNQVSKRLDEVPGVGPALATALVGSIADPKAFRSGRDFSAWIGLVPKQHSSGGRERLGGISKQGDRYLRSLFVAGALAVIRYAKKRGSKHRPWLAALLARKPTKVAAIALANKIARMAWAMMAKGERYKQPVALATAW

SEQ ID NO: 491555 - protein, 349 aa, unidentified
MANRREPSENRKIQRRLSLIRGFGVLVVQDEADRVILEQRLPNELPIILAQLAPHRKRIQAIAVESTYNWYWLVDGLMDAGYKVKLVNTAAVKIYEGMKYTGDEHDARHLAHLLRLGILPCGHIYPKEDRAVRDLLRKRGQLVRYRTMQILSIQVMASRNIGKGISTDAIRKLDEKGIDQLGCGNSALALAIKSNLTVLRCLDEQIAGVEAVVLKQARLRPGFRKLLTVDGIWEILGMTIMYEAGDMDRFAKVGHFASYARCVGSSRWSNGKKKGEGNRKNGNKYLAWAFVEATHYAIRYNERIRSFYQSKAAKTNKIVGVKAVAHKLARACYHVLKEQVPFDETRAFA

SEQ ID NO: 491556 - protein, 348 aa, unidentified
MGVFIGLDVSLSKTAVCVVDRDGTVLWQGKVPSEPGPLIARLAEWSGSIDLAGIEACPLSEWLHRGLREADIPVVCIEARHAQRFLSSRPVKTDRNDARGIAEMMRLGHYRPVHVKSPAAQAMRTTLAVRMQLVAAQLQIENTIRGLLKVYGLKIGAIHRNRFAARVIDLLGMASLPELAAAIQPLLRIRESMRAERKAFDRSFAALSRQDEVTRRLMTIPGVGPVTSLAFKATIDDTDRFITSKALGAHLGLTPRVYQSGEIDRSGHISKCGDRMMRHLLYEAASVLMTRTRKWSRLRAWGVSVAKRRGMKRATVAVARKLAVIMHRIWITGGEFEFGSPAAATTAA

SEQ ID NO: 491557 - protein, 337 aa, unidentified
MSVYVGIDVHRKRSQVAVVTEDGQVQLNKNVVNGSEPMLRLIGDLPSGTPVAFEAAFGWGWLVQLLEDYGFEAHLVHPLRCKAIASARLKNDKVDAAILAQLLRADLLPEAWIAPPQVRQLRALLRHRASLVRLGTQQRNRIHAVAADHGYDRSASYWTGPGRGWLAELDLPAASREIVTDCLAVIDGLAPVIDRIDAELHQHAKADPRTKVLRTLPGVGEFTALVMLAEIGDITRFPSARKLASWAGLTPTVRGSDLKVRHGNISKQGSAWLRWVMNQAAQTAKRSPDFAATYSSIAKRRGKKIATIAISRKLLTRAWHLLSEIQAADASPPPRRP

SEQ ID NO: 491558 - protein, 415 aa, unidentified
MAMLVLYARCAGLDVHKKTVVACLMLTAASGKVIREVRTFASTTAGLLALAAWLTSEQVSHVAMESTGIYWRPVFNVLEGSFQVILVNAQHMKAVPGHKTDVKDSEWIAELLRHGLLSASFISPKPIRDLRDLLRSCKTLVQQRAQAITRVQKVKDSANIKLSSVACDVLGTSGRDMLDALLAGVSDADTLAQYARGRLRAKLPALREALDGRVDATHRLLLRQQLNLIDFLQAEIEKARGEIDELLTPYEGQLSRLMQIPGIGRTAAATILAEIGVEMSRFPSAKHLASWAGVAPGNKQSGGKRLRAPTNKGNTHLRAVLAEVVWVISHTHDNYLSAQYHRLARRIGKKRAIVAVSNSVIVIIYHMLRSNQDYHDLGPHFFETLDTERQRSTAVRHLEALGYKVTLQEKQEVRA

SEQ ID NO: 491559 - protein, 403 aa, unidentified
MNAVGIDVSKGKSMVTILRPFGEIVSSPFEIKHTSSDIHSLIKLIHSIEGESRVVMEHTGCYYEALAHQLSAADLFVSAVNPKLVKDFNNDSLRKIKSDKADSVKIARYALDKWQSLEPYSITDELRAQLKVMNRQFHFYVKQKTAMKNNLIGLIDQTYPNANTYFNSPTRSDGSQKWVDFVSTYWHVDCIRKMSLNAFVEHYQNWCKRKKYAFNKSKAEEIYTKTKELVPVFPKNEITKHIIRQAIDQLNSTSVTVETIRTLMNETASKLPEYSIVMQFKGIGPSLGPQLMAEIGDVTRFTHKGALTAFAGVDPGVNESGSYAQKSVPTSKRGSSNLRKTLFQVMDVLIKTMPQDDPVYQFTDRKRTQGKPYYVYMTAGANKFLRIYYGRVKEYLSVLPDPS

SEQ ID NO: 491560 - protein, 385 aa, unidentified
MAPPARPEIVIGLDVGKSSHWACVVTREGELLASKPVLNRENAIDGLYAQYPGALVVVDQVRNIGSLALSRAKLAGMPRAYLPGLAAHGASKLFAGDAKTDERDAMVIAKTALGIPDALLAVADRPPEIEAARSLAAQRDFLTRENTRSKNRLRSILLESCPEFEAQADLSDPATLKLMAAVGGPWSISEASPQAVGALTRGCGRAKVAALVESVGSSSRPHPAAVACEDRAVRLLARRISENAAEIESLASEISALLAADETYRCLLTVPGIGPRTASELVISIDIADFAGHDRLASYCGLAPRNRRSGTSISSVSASRQGNKRLKNLLVFSCNCLARSRNRWGDYYARCRDRGMPHGKALKAVARKRLKVIYAIMRDKVPYSA

SEQ ID NO: 491561 - protein, 378 aa, unidentified
MDKLDSDKRTTPKRPTMTVYIGVDFHPYEQTVAYASDEDGEIGYRRFLHGDKASIKAFYRKFGGEAVIGVEATGSLWWFEKMLSDSGQKLEIGDPRMIRRAALSRHKNDFRDAETILDLLMRGVFPSIVPRCEESREVLDLLHYRQTLVQKRTSIANQVQAFARQKGMGKFRMPALRMRPKIESAAATDVETLLVRFRLQLFDQLTEAIKAVEERLAPLAEADERARLLMTHPGVGLINALALVHTLGDIRRFRRKEEVVAFVGLDPLEKSSGEKKRMGQISKHGSRLVRHLLGQAAQVSRDARIRKFYLEVSRRRGRPKAKVAAARKLLIHCYIMLRDGVGYEEFQRRGEVGLYEGSGEPGDSTAVSECLMVRPAIS

SEQ ID NO: 491562 - protein, 378 aa, unidentified
MLSEHIIWVGLDVGKRDTVCAIDWLDDNQELNRNKGLTSLAVKHITNTREGVKDFFTWLKANRKHIEERLHPQRKVVYRLVMESTGCYSYRLIKQLKAAKPDSYIALINPAKVPAFKKFNDIESKTDKLDAQCLARLGTTQKPDAMYEMPADYAGLKRLTRMNASLTKISTILKNQLTNLDDPGERQIFQNLLKSVEEQLDGLGVKIREYLRSHAALQERVTKLDSIPGIGMIIAATLIAEYGPEDRFQNIRQVVSFAGMNPKNKCSGTSVKSTRLSKQGAPVIRQMLYMATLTAQARIPILDALSKRLTNLTPMQKRCAVMRKLLMICWSVLCGTENYKEYQPSSKKLVPYEAPAATKRRIKRERKKRSLSPENDAD

SEQ ID NO: 491563 - protein, 352 aa, unidentified
MQYVGVDHHKKFSYLMVMDEKGNIVKEGKINNTKESLNRFLNNPHSKRPAQAVLEAGRNWTVMYDWLEEEMDDVKLAHPYKVKAIAEAKIKTDKIDAKTLARLLRADLIPEAHVPNKETRHIKNILRQRMFFVKLSTMVKNRIYLVLDRHPHLKEEFDFKDLFTKQGRRWLSIVELPERDRKLLNQELDLLKALEERLKLSNSWVTNIGKENKLVKLLMTIPGIGKFFALLILAEIDDITRFRHKNKLASYAGLIPSLFSSGGKSHTGRITKQGNKYLRWALIEAVWPAIRKDLRLRAHYQKLKIRKGSANKAKVATARKILTIVYQVLKTQKPYRSNYSGYPHFNLAKANN

SEQ ID NO: 491564 - protein, 392 aa, unidentified
MRRDFPHSCDGDEAPRLVVFEVINLKRGKGKSVEQITRGTGRGEAVRVGVDLAKRVIQVHAVDGADRVLTSRTLRRDQLIEWCARLPAGCMVAMEASSSAHHWARKLIALGLDARILSAQLVSPYRQEGHTGKNDANDAAAICEAASRPRMRFIPVKSIEQQSMLCVHRLREGIKADRTACINRIRGLLLEFGLAFAQGPRELQAVLNEVLEDASNELGTLARLTLQRAQTQWRELDQHLAWCDERIAAHAQANEAVKTAATLLGIGPVTASAVVATVGDFRQFKNGAQFGAWIGLTPRQYSSGGNSRLGGITKRGDTYLRSLLIQGAKSAVMTAHRRSDRISAWAAALRDRSGWQKAVVALANKNARILWAVMTRGAAFDADHLSVKPVSA

SEQ ID NO: 491565 - protein, 355 aa, unidentified
MSQEKYIGMDVHQATISVAVMDAHGKLLMESLLETKASTIVDFIQGLHGTLSLTFEEGTSAAWLHDLLKPHVSRLVVCDPRKAALLKEGNKSDRIDARKLAELLRTNQLKAVYHEEHGIRALKELGRSYLTITKDVTRVMNRIKALYRSWGIPCSGTSVYAPRHRAEWLAKIVEPGVRVRAEHSYQQLDSLQPLRLQARRELLRESSQHPAVKLLRQIPSIGPIRAALLVALLQTPHRFRTKRQLWAYSGFAVETHDSGEYRYVRGKRQRNRERISVRGLNDNHNKDVKNLFKSAAISASTRPGPLHDCYVARVEKGMRPTMARLTLARKIAAITLTIWKKGVSFDPKHLHRQAA

SEQ ID NO: 491566 - protein, 317 aa, unidentified
MEMSPIFVGIDVSKARLDVAIGRSGERESVVNDEAGIKTLLKRLGEIKPALIVLEATGGVERSVTRALASAELAVVVVNPRQVRDFAKATGQLAKTDRIDALVLARFAEAVRPAVRPLPDELTIELRALIARRRQITEMIVAERNRLSGASKSVRKRIDAHIRWLEAELDRADKDLDQSIRQSPIWQENQDLLKSVPGIGPVISRTLLAELPELGQLNRKQIAALVGIAPLNRDSGTMRGRRTIWGGRASVRAVLYMAALVASKRNAVIRAFYQRLRIAGKAPKVALVACMRKLLTILNSMIQHKTRWSENFSVQPC

SEQ ID NO: 491567 - protein, 406 aa, unidentified
MKRPAPVSVGSHLACVVGRPTLVGACNQAVDGATGRGEPTVRSSMASAGLIHLGMDVSMNTIVVGVLRPGEEMPVVDRVFNDEESIRRLIGRFADRRRLSACYEAGPGGYELYRLLTSMGVDCEVVAPSLIPKGSADRVKTDKRDAIRLARLHRAGELTAIRVPTPAEEAVRDLVRARADVLDDRKRMQQRLSAVLVRHGRIWRGGSKWTAVHRQWIAQQVFAEPALNRVVATYQGGLAAREAELAAVETELATWAAVPPLAATVTRLGAYRGIAALTGMTLAAEVVDWRRFATARAFMGFCGLIPSEYSSGDRSRRGHITKAGPVGVRTALIEAAWAYQHRPGIGLTLSRRQAGASAHTLARSWTAQQRLHAKYKKMTRRGKPPGMAVVAVARELAGFVWAEMTS

SEQ ID NO: 491568 - protein, 297 aa, unidentified
MNEKQWVGIDVCQKYLDVYIRPKEELFQVTNNEVGISSLVQTLSNIQPELIVLEATGGMEIDVATRLTQAGLDVAVINPRQARDFAKATGQLAKTDAIDARILAHFADAIRPEVRQISDESSRQLEDLVARRRQISNMITAEKNRRRGKTNSVKASIDKHIEWLEEQLKEIESQISSAIAINEDWQQKMKLLTSVPGIGDVVAVTLISSLPELGTISHKSISYLVGVAPLNKDSGKFRGKRRIWGGRAKVRCVLYMATLVAVRFNPVIKAFYERLLQKGKLKKVALTACMHMRSGIL

SEQ ID NO: 491569 - protein, 386 aa, unidentified
MQKLNDLSRCLTLLEPDSTVIAVIEMSQSSWLVAGIVPGVERQPLKKLAVNEAALLKLLHRWREEAEEAGYGITRITVAFEAGRDGFWLARWLRARDIEAHVIHASSVAVSREHRRAKTDRLDTELLKRAFLGWLRGERDHCKMVAIPTIDDEDAKRPNRERESLVGEQSRIINRIKATLARLGIRGFNPKLKKAAERLEGLHTPEGELIPPNTLSELHRDMERRRLVRDQIRQIESARLDRLEHAPGEGAHAMVRLLARVMGIGIETADMLVQEVLSRNLRDRRAVARYAGLTGSPDESGKKRREKGLARSGNPRVRRGMIQLAWRFLMFQKDSVLAQWFRARTENARGSRKTMIVALARKLLIALWRLVREGVVPDGVILRPAQ

SEQ ID NO: 491570 - protein, 371 aa, unidentified
MGESSKTLFVGLDVHKDTIAVAYAAEDRSTEVVSLGMIGTRQCDIDKLIRKLESKGAPFAIAYEAGPCGYWLYRYLTRRGLSCIVVAPSLIPRKPGDRVKTDRRDAVTLARLLRSGDLSAIYVPTVDDEAIRDLSRAREDAVRDLKRSKVRLKAFLLRQDIRYEGRANWNAAHLRWLARVVCPTAAQQIVFQEYVHTVTEQTERVQRLEVELHTAVKTWRLHPIVEAVQALRGVDLTGAVTLIAEVGDLTRFDTPRKLMSYLGLTPSEYSSGERRRQGGITKAGNGHARRALVEGAWAYRYPAKVSRHLQLRLENVPTEVRAIAWKAQLRLCKRYRLLSARGKHVNQVVVAIAREMAAFAWAIARTVPMAS

SEQ ID NO: 491571 - protein, 383 aa, unidentified
MLARSSREGSAGGTSWSRKVSTTVLIWRPAGIFAVRNTNGRWGSTPVYNQVLGPDPSNMAEVDMDGKRVIGIDIGKCWLDVAREGAARVERHANETSVILALVATFDPARDVVVFERCGGYERELEGALARAGVPWAVVHSARVKAFRQVQGIKAKTDTIDARLLREFGRDRLKAGQLRLGRAEDVTLNALMARLRQLKAALHAEQCRRETAAIEPVRASIARTMAQLEAELAIITAELAGHEANDAQLALKEKVMCERKGVAQATARALAAELPELGRLDRREIASLGGLASRVEQSGRSDRRRGLVRGRSAVKVILFNPARTAMRWDPEIKAFRDRLQARGKPGKVIMVAVMRKLLVRLNAAVRDALNQEEVPNPATLVAF

SEQ ID NO: 491572 - protein, 444 aa, unidentified
METFKSIHLVKEAFFMNFRPMAGIDVGKFFSEMAILSPSNEVIARMKIRHDSSSDVERAVKLLKKTEKDFDSRPFVVMESTGHYHKILFHSLCKAGFEVSIINPIQTDSIKNIGIRKVKNDKVDARKIALLYRFQELKTTNIPDEDIECLRSLCRQYYKLSDELTAYKNRLTGIVDQLMLNFKDVFPNIFSKAALAVLEKYPTPVHILKANRNKLIALIQKNSRRSLKWSTAKYELLVSKAREFAPLSINNSSNIAMLGVYISMIKTLEENLEKVLKAIRSLIAEDMAKDIPMLALTLELLQSIPGIGLISAVTILAEIGDFSAFSKPGKLVAYFGIDPSVMQSGEFTGTQNKMSKRGSRLLRRVLFTIALANIRTKRDKTACNPVLMEYYKNKCQNKPKKVALGAIMRKLVNYIFAVLRDRKPYQLRSPQEHAKNLAAKHTAA

SEQ ID NO: 491573 - protein, 352 aa, unidentified
MAMTIVENHLLSVTGGIDTHRDFHVTAAIDPNGGVLGVESFETTTGGYRRLVAWLAAFGDIDLVGVEGTGSYGAGIARHLTGKGIRVVEVDRPNRQARHRAGKTDAIDAIAAARAALSGTATGVPKTRTGPIEAIRVLTVARRSAASEWVVILNQMRHLCFTAPEEFRRRFSELSPIILVRTCAALKPRRSDDDIVRFTTLSTLRELGRRGLFLREQTQRLDAEMKPLINQIAPELLGVYGVGYHVAATLLIAAGDNPHRIRSEAAWAHLCGTAPISASSGKIQRHRLNRGGNRQANSALHKIMLTRMASDARTRAYVSKRSADGKTMGETTRMLKRYIAREVYHHLPTTMT

SEQ ID NO: 491574 - protein, 419 aa, unidentified
MKQTQNTRGYKRYFAIDTHREYHLVGGQNEDQEWVINPRRISIEKFPEWAQKNLRAGDIVVLETTTNVWDTYDIVAPLAGRVLVANAAAVGEIAGARVKTDTKDIERLLKLLFGGIVPEVWAPPAHVRELRAFISYRNRLVKMATMIRNRLQSLLHKHSLTAKGVPKEGILNQAWWDAQTSISTLEKMQIRQELALLDEIKKLQAAVNEELEKQSTGELWGKQALQLMQLPGVGVIVAMTVLSAIGDIARFEDAKHLVGYAGIGAGVHDSGKTHKEKRITKKGRKELRWIMVEAAWRAVRMSPYWKEQYEKHLKRMRKPNQAIVVIARKLLVAIWHVLSKEELDVHASEEDLAYKMLLLSWSLNENVRMGLTYKQFAKYALMKLGVENDITRFVRKEVPRRLSPREEALVRMEELGIAQ

SEQ ID NO: 491575 - protein, 286 aa, unidentified
MKPIYYVGLDVHKETISIAYALGGSRDDATYHGQCAGSVAAAVKALQKLAEKLKVEFRDLKVCYEAGPTGFVLARQLIKKGVDCVLMSPSKTERKPGDKIKTDKRDACNIARLFRNGDITQVRIPPVLDEAVRDVCRARTDATDDLTRAKQRLNAFLLRNGFNYTGKSKWTAAHMRYLRELTMPSDPQRIVLEESIQAIESCENRIERLVTKMKQILETWEWKPIVQAVMAFKGFQEVAAMTLISELGDLRRFDHPRKLMAFIGLVPSEASSGGKKRQGAITKCGN

SEQ ID NO: 491576 - protein, 341 aa, unidentified
MATQDHTVDGTEITPAPWTLPATADGQVLFRKKLSRAQFAKFMASLPPCVVAMEACATAHYWGRELSRLGHEVRLIPPIYVKPFVKRQKNDAADAEAVAEAAQRPTMRTVAVKTADQQARAMLFRTRDLLVGQRTRLVNALRGHLAEHGIIIGQGVGNIARFAACLDQDTLPDLVRDLGRLYLDQIAQISDEIGKLDKRITTAARENSTARRLQTMPGIGPVCAMAIASFAPEMREFRRSRDFAAWLGLVPRQHSSGGKQKLGRTSKMGQRDIRRLLIIGAMSVVHWRGRHGGRPGSWLSRMLARKPRKLVAIALANKMARMIWAMLAGETDYRDPTGAIC

SEQ ID NO: 491577 - protein, 318 aa, unidentified
MLIRYIDIAKRNFVIAVSSLSKTKTETNNPKGIAHTIEYLKKHKVALVVTESTGGLEIPAAKAIRRAGIAVIIANPRQTHQFAQSQPLTKTDAKDAKMPAFFAQMTAQKEDSQTMPYQPPTEAEEVLEALVNRRNQPADMRTAEKNRLHQVHETQVGSVKQLIAHFDRLIDELDKQIDDHTHTHFDGKAQVAEQIKGIGSITTATLMVMLPELGRLSHKRIAGLAGIAPHPRESGETKFKSRCFGGRSAVRKALYMATVAATRFEPLIRDFYQRLPSEGKPYKVAVTACMRKLLTISNARMRDYFAENDTAENGIRTA

SEQ ID NO: 491578 - protein, 391 aa, unidentified
MVCVGIDVAKDKHDCCILDSDGTIRADCITIPNNMDGFKQLLQTIRDCTKKSDKIKVGLEATGHYSYNILGFLLDNDLAVYVMNPLHTNLYRKSLSLRKTKTDRVDARTIATMLLSDVDLKSYTDTAYHNEELKSLTRYRFDKVRERAKLKQSVSRLVTILFPELEKLVPSLHIASVYSLISEYPGAKQVSEVHLTKLTNLLTTASKGRYGKDKAIQIRDAAKTSIGSVMPAKSLELKHTIKLIKELTSEIDEIEDSIQQIMDELHPPILSIPGVGIQSAAMILAEIGDFSNFESPDKILAYAGCSPSTYQSGKLTNCYAHMEKRGSRYLRYALYNATKYVCHWNPVFAKYLAKKRAEGKHYNVALSHATKKLVRLIYALQKSGKAYLTAA

SEQ ID NO: 491579 - protein, 339 aa, unidentified
MKSTTIAVDLAKSVFQIAVSQHPGKVSESHRLSRSQFLRFFAQRQPALVVLEACGTAHHWARELGALGHRVRLLPPHEVRSYVHRSKTDRADAAALLEAHRNERIHSVPVKSLSQQALASLHRLRSAWMADRIARLNLVRGLLRELGLTIPVGARHVVVQTLAQLETLPEPLRPALRAACAEIGEFEARIAAVEKQLRALSKETPVVERLQSIPGVGLLTATALVALVGDVERFPTSRHFASYLGLTPREHSSGLRRRLGAISKAGDAYLRTLLVHGARSALLAARRLEHPDRLRRWALQVYGLRGHNRAAIALANKLARIVWAVWRHGARFESRPGSA

SEQ ID NO: 491580 - protein, 315 aa, unidentified
MTQANTTTAGIDTSKLKLDIAVHGRTERWQFANALPGWRTLAASLVKAGVTRVGIEATGGYERGVVEHLLAAGFIVLVLQPVQVKAFGRVHLRRAKNDALDAELIAACTAAIDDPRIAPDPRLAEMAQNLTFLEQLEEDIARFKTRLEHIDEAGLQRLVNSDIVRLKARRATQMRSLAKRLRAHSDLARRFDLVLSIPGIGERTALALIIRMPELGLISREEAAALAGLAPFDDDSGKHKGQRHIAGGRGRLRRSLFAAALPAAFRWNKALIALYVRLIAKGKAHNAALIACARKLLIYANTVVQRGTPWIENAA

SEQ ID NO: 491581 - protein, 429 aa, unidentified
MTKTYILKTQTVPADRSAVETYLAPPPPSKGKIIGLDCHPDTFTAAFFVGQTPHDARKIGSRENLSLDALLKWAAAELTPQDIILMEAGSNSFELCKRLGNLGLKACVLESCHVGKHAKTYADNDKMAAARIALVYLAGNAPCVWVPDEQSRERRELLHAYRKAVDEHTAATNSIKSYLNGRGLRLGKHSLDEKTTSQWILDQADWSVLQKNILAEHLANITESKERRKRLYRLIAAEIAVDPTMMRCMKVLGVGIVSAFALLAVIGDIGRFHSPEKLVAYICLNPGQRQSGKGKDIRLGVGRRGRGDIRNLLIQGAHAIMRSGRNTPLGQWGWKLFARKGNRNVAVAAIARKLLVQVWHLLHGNPPLALESDTSFRIKLQKLAVALGSTLRTGIGLGKTLEDSVKTLISRCQTHAEPSASPCETPQPA

SEQ ID NO: 491582 - protein, 342 aa, unidentified
MSEIITVGLDLAKNVFQAHGADASGRAVLRKKLRRHQVLEFFGRLPSCVVAMEACGGAHFWGREIGKLGHDVRLIPPAYVKPFVKRQKNDAADAEAICEAAQRPTMRFVPVKSEETQGAAMVFRVRELLIRQRTQTINALRGHLGEFGQIVPQGAANASKLIAIVEDPDCELPADAIPTLKVLVGALVQLEAEIGKLDTEITRRAKENDVARRLMTVPGIGPLIATAIATLAPPPENFRKARDFAAWIGLVPRQHSTGGKQRLGATTKMGERSLRRLLIIGANSVIIKRHVHAAARPGTWLGGMLSRKPPMLVRVALANKMARIVWALMARGGVYKSPATAA

SEQ ID NO: 491583 - protein, 389 aa, unidentified
MIYVGIDVAKDKHDCCILGSEADKLFPVFTIPNNKAGFDELYEKMFSVTDDKTKIKVGLEATGHYSLNLLGSLIDKGLPTCVINPLHTNLYRKGLSLRKTKTDKVDARSIAMMLMTNKTLKPYSDTSYHNEELKSLTRYRFDKVQERAKLKSSVARLVNILFPELEKLVPSLHMASVYALLSKLPGASYITECHLTHLKNLLETASKGHYGRDMAITLRNTARDSIGSVIPAKSMELKHTIHLIEVMTEEIDEIEDSIKSIMDTCNSPIMTIPGISYRMGAMILAEIGDFTRFNYADQILAFAGLSPSTYQSGQLDSSYSHMEKRGSRYLRYALFNAAKFVCKWDENFGAYLSKKIGEGKHYNVAIGHATKKLVRTIYRMELTGEAYRR

SEQ ID NO: 491584 - protein, 342 aa, unidentified
MTMIGIDPHKATHTAVAVDDDENVIGEFTLEASMDQVERLCGWAEGLGKREWAVESANGLGYLIARQLVACGETVFDLPPVLASRVRLMGSGRSQKNDPNDARSIAIAALRSDRLATVRRDDHVVVLRLLAKRHRDMARLRNKHCSRLHALLGELEAGGIEGTISVSNASELLDRITVTDETARYRILVARELVEDITRIDDTLEASKKRIADAVAASGTSLTNIVGVGPIGAATIIGYTKDVTRFPTKGHYATYNATAPIEASSAGNTRHRLNLRGNRILNHAIHIAAVTQLRHDTIGRTYYQKKIAEGKTPKEAIRALKRRISDAVYRALVVDAARPAAN

SEQ ID NO: 491585 - protein, 420 aa, unidentified
MGTLNETDYVAFIGIDWANAKHDVCIQGAGSEQREFAVIAHQVERIEEWAQAMKQRFGSPIAVAVELTKGAIVSALQKYDFFVIYPVNPTTLAKYREAFTPSRAKDDPTDAELALDLILRHPERFSPLQPQSVEMRTLATLVEQRRRLVDDRKRITNRLRDALKQYYPQTLDWFEQIDTVLFCDFLTRWPTLQQARRARKNTLKRFFNAHNMRFEHVLEARLTSIKAATPLTLDEAVILPYRLQALVLVEQLRVALDAIKQFDKEIERVATRHVDYVLFSALPGAGPSLAPRLLVAFGEQRERYKSAAEVQKYAGVAPVTERSGNKHWVHWRWQCPTFLRQTFVEWAAQTINKSFWAGEYYRQQRAKGCTYQASVRALAFKWIRILYRCWQTRTPYNESVYLKALERRGSPLLNQIGAAT

SEQ ID NO: 491586 - protein, 358 aa, unidentified
MKRKIKELDFSSQLISVGIDVHKKSWTVTIQIAGQQVRNFRMNPDPVELSKYLHRNYPGGIYLSVYEAGFCGYWIDRQLQALGIKNIIVNPADVPTSNKEKARKTDSVDSRKLARELSSENLCGIYIPTEDEEAERILSRLRIQLTKDQTRLKNRIKSLLNYLGVHLPENIELKHWSGGFISYLHKLEFKYDPIKQTLEQLLKQLSDLRRQLTEVLKLLRKSVKQNERAQKIVTHLLTVPGVGFVTAVTLYTEIMNINRFRRFDELSSYVGLAPSTHSSGEKEIVMGMSQRQNVHLRNILIESAWVAVRKDPAIIMAFGKLSKRMKKQEAIIRIAKKLLSRIMHVWKYEEDYVLAVVE

SEQ ID NO: 491587 - protein, 370 aa, unidentified
MGKSVLYVGLDVHKMSVDVAIAETGPAGEVRFYGRIGGDLEALDKVTRKLQAQGAELRFAYEAGPCGYQVYRHLTARGLECLVAAPALIPRRPGDRLKNDRRDALALARLLRAGELTPIKVPDEDDEAMRDLTRAREDAICVERRARQRTVAFLLRHGRVYQGKTTWGRGHWAWLLQQVMDHPAQQIVLQEYLDAVREASARVLRLTGQIRDLVPQWRQAPFVAAYQALRGVSLIVAATVVAEVGDLDRFNNPKELMAYLGLVPSEHSSGASVRRGRITKTGNSHARRVLVEAAWAYRLQARVTRHLLKRQEGLPERVRQLAWKAQLRLCTRYRRLLARGKARQTIVIALARELAAFLWAIGRAVAPATA

SEQ ID NO: 491588 - protein, 346 aa, unidentified
MNAAAIASIGIDLGKTNFHLVALDCHAGVIVRKKFSRSQLLAYTANLPWSLIGMEACSGAHFLGTKLREQGHEVRLIPAQFVKPYRKSNKNDFIDAEAIAEAVTRHNMRFVPIKTDDQLDLQALHRVRERLVRRRTALINQIRGFLLERGLVFAKRPANLRRQMPLVLEDADANLTPRLRRLLNDLWQEWKQLQVDIDALGDEMERITASDAACQRLREIPGVGPVVATAIVAAIGNGAAFGNGRQFAAWLGLVPKQASTGGRTKLLGISKRGNAYLRRMFIHGARAVLWRVKYDIGALREWTNQLQSRAAKNVVVVALANKLARIAWAVLSSGEHYRLRPPVMAA

SEQ ID NO: 491589 - protein, 412 aa, unidentified
MRRVIGIDIHRTFGEVVIWEDGKLRSFGRVDMTRTALEGLGRKLQPADEVVIEATGNAMAVSRVLSPFVRRVVIANPLQVKAIAYAHVKTDKVDAGTLANLFAAGFLPEIWTPDAETERKRRLTARRYQVVRHRTRIKNEVHSILHAYLVPKCPHSDLFNRPGRAWLDRQALPDDEREAIVRHLRELDRLAEDLAVLDREIAEGALDDGAAKRLLTITGVNLTVATGILAAIGDIRRFDSPGKLVSYFGLNPRVRQSGLGAAHHGRISKVGRSHARAMLVEAAWAVAKAPGPLHAFFVRIRARRGHQVAAVAVARKLAVLCWHVLTKDQDYLWARPALVANKTRAMELQAGKPQRKGNRRGPAYAYNVKALRDQEQQLAEQAERNYARFVDRWRARLPKGEARERLNPARNE

SEQ ID NO: 491590 - protein, 358 aa, unidentified
MRIIGCDLHARQQTIAMLDTDTGELEEKTLEHEGDTVREFYSALPGPILVGIEATGSMQWFLELMEELGIKCRVGHPAKIRRAETRKQKHDRRDARLLLTLLAENRFPTIWMPSSEQRDLRTLLRHRHQWVRLRSRVQHTLQSMALNHGLRRGRSLWSQAGQDELRALPLAPHASERRAALLSLYPRLQESIDQLDQQVGQQVDQHPPARRLMTHPGVGPITALATEVFLGDPLRFIDGKALASYIGMIPSEHTSGRRQRLGAMSKQGNALLRYLWCEAAMHAVERDPELKRFYRRKLVQKGLGKARVAAARKLGIRLWIMMRDQIDYQEFCRRGKARQESGSVRAGMPDRNSGPAAQ

SEQ ID NO: 491591 - protein, 336 aa, unidentified
MFIIGCDFHTRFQQIAMVDSPTGEIIERRLDHESGEARKFYEALPSPARVGMEATGHAHWFERMLAEQGHELWVGDAAQIRAGIVRKQKTDARDAFQILKMLLENRFPRIWIPSPAERDLRQLLQHRVRLVRFRTSVMNQLHALAMGQGLCRRKKLWTTVGRKELEGLPFGPWANRRKQELLEMLDRLRPSIEELDLAVEKEAASRADAVRLMEQSGVGPVTALAFVLTIGPIDRFPKSKQLVSYLGLNPTESSSGGKQRLGSISKQGNSMMRYLLVEAAHVASRFDAELRRNYLRLMFRRGSAVAKVAIARKLAVRLYWKLRDVSQPSAAGSHAG

SEQ ID NO: 491592 - protein, 453 aa, unidentified
MGSKKHIAMEIVNSSAAGIDIGSRSHFVAVGQNDDDVREFGVYNEDLKAISNWLKENQIKTVAMESTGTYWQSLYSVLLSDGFQVILCNGKFTKNIKGKKTDVQDCQWIQKLHSIGLLSGSFLPDLQTEQLRTYCRHRSNLIHTAADTSRKMQKYLRLLNLRLDVVVSDICGLTGLQIIQSICEGETSPEKLAAFRNGNCKKTEQEIAKALQTNGRKDYLFALKQEFETYNQLQEKIEKCDQEIKAMLDDTINNNDDKKQHYIDKKAHKKVNKNAPKNIDLNLLGYQYFEGVDLLKIEGLSHATLLAIISEVGLEGIKKFPTAKHFASWLRLTPNNKISGGKVLSSKVPKGSNRLKNALRNAANAIGNLKESTPLRDFFHRINFRKGRVSAISATARKLGIIIWNMVVKNTPYHNPENYLYADEKRKLGIVKRIRKQIVKLNIKPEDLNLSIT

SEQ ID NO: 491593 - protein, 340 aa, unidentified
MVHVGVDLDKHNSQIAVLTDDGEIVQQRLANEATLLEKFFAQLPRQTPVAIEASGTWWWLVDLLEQLGHRPVLSNPKQTKAIAAARLKNDRVDAERLAFLLRGDLLPTVWIPPAALREAREFVRHRIQLVWLRGVIRNRLQAMLARRNLQPTSGKSWLTQRGQRELQQLPLPEAPSRIREDCAALLPTLDAQIRRLDVDLVTRWGQDPRVQRLMTIPGIGPFIAIVLVLELGDIHRFATAKRVASYVGLTPRVRGSAGRVRAGHITKEGNRLLRWVLVLAATQAVRRPGPLRAWFHAVKKRRGKKVARVALARRLAEIVFHVWRQECDYFTVVRHGVVRG

SEQ ID NO: 491594 - protein, 451 aa, unidentified
MAKKKLEMDIINPHCAGIDIGSRSHFVATGQALEDVKEFGVYADDLIEICEHLNAHGITSVAMESTGSYWQNLYVELVKHGFDVVLANGKFTKNIKGKKTDVKDARWIQKLHSIGLLTGSFLPDDQTETLRTYCRQRQNWLDLAVEATHKMQKYLKLLNFRLDVVVRDVCGLTGMTIIKDICKGNLNPEELAKHRHFNCRKSQDEIAKALKGNNRTDYLFGLKQEFESYEFYQKKIAECEKMIAAFLKSQINTNPQKKKLKTTDKQHKRLNKNAIKGIDLNQASFQYFGGVDLMAIEGLGHSTVLSIISEVGPEGFSKFETAKHFTSWLRLAPNNKISGGKLLSSKTPKGSNRLKIALRNAANAIGNLKDTHLSNFFNRVCYRKGRTVAVSATARKLAVIIWNMVVKQIPYQPPTQYLFLDEKRKLGMVKRIRKQMDRFELTNADLGLAIK

SEQ ID NO: 491595 - protein, 389 aa, unidentified
MFLVGIDISKYKHDCCIIDSDGVVIREPFSFKNDADGFAMFLDTLHSLPDSEDIRIGFEATAHYALNLKLFLEKAHYAFMEFNPLLLAKFNKSQSLRKTKTDAIDCYSIARWLAAVEFKPHTTGFYHIYSLKSLTRLRDSLVRQRSFYLVKITNVLDVTFPEFKPFFNNRFGATALYLLENYGTAEKMSHLNSTSYENLRKLSRGKFSIQKFMKLKELATNTVGESNKVFIIQLNSLLSLYRKCVSEIKSIEAQITKLISDINPRCMTIPGIGPLSAAVIYAEFGDLSKFNSPAQMLSFAGLEPGYYQSGISEHRGHMVKRGSSHLRYTLMNLCIPLIQYNYVFAAYYDKKRSEGKPHRVACSHLVKKLIRVIFHLEKNGIDFDSSKLY

SEQ ID NO: 491596 - protein, 371 aa, unidentified
MKMARRDSPVHPGSRQTEGERGTSRRRDHKPEQLRGPQRARIRRKVGPLIFQEGSNMNGHPCVGIDVSKEQLDVAQEPRGSSQRMANTPAGIDQLVTYLQTLQPTVVVLEATGGWERAVLRALVAAGVPALAVNPRQIRDFARATGQLAKTDALDAHVLAQFAAAVRPAVRPVPDQATDMLKALLARRRQLIEMLTAERNRLTTTLVSVRRSLTAHVSWLEAQLAEIDKDLDQAIQQHPLWRVQEELLQSVPGIGPVLSRTVLADLPELGTLNRRQIAALVGVAPMNRDSGRLRGRRTIWGGRAPVRAALYMAALVATRFNPLIRVFYQRLRAAGKLPKVALVACMRKLLTILNAMVKQQTRWREPVQVVA

SEQ ID NO: 491597 - protein, 359 aa, unidentified
MIVVGIDPHMKTHTAAALDALTGQALGDKTVRCTEPGREALLAWAREFSSDRVFALEDCRHVSGRLERYLLSRGERVVRVPPKMMAGARRSARTYGKSDPIDAACVARAALRDTNLPEAALSGPERDARLLVDFRDDLVGERARIQKRLRWNVHDLDIGLELPPRVLDRYVWLDRLEDALSSLSPATLVRIAIRQTRRCRELTKEINSLEREIESLTRVLVPELHEIAGCSAIGAAHLVGQTAGASRFSGEAAFAIHNGTAPLPVSSGKSERHRLNRTGNRTLNSTIHIIAVTQARMHPPAIAFMARKRAEGMSNREALRCLKRHISRVVFKAMLRAEKARAGEVLHVDFRADSGAIAV

SEQ ID NO: 491598 - protein, 341 aa, unidentified
MQITTVGIDLAKNVFQVHGVDDHGQVVLRKALKRSQVMTFFAQLPVCLIGMEACGSAHYWARKLQALGHTVRLMAPQFVKPYVKTNKNDAADAEAICEAVQRPSMRFVAVKTAEQQAVLSLHRARQGFVKARTATANQIRGLLSEFGITLPPGIAHLNMVCERMAEEALPASFRRLIDDLLCHYRQLDTRIIELEREIHAWHRSSDTSQRLAAIPGVGLLTATAVVASVGDARQFKNARQMAAFLGLVPRQHSSGGKPTLLSISKRGDVYLRTLMIHGARSVLHHAAARPNADQLWHVQVMQRRNRNIAAVALANKNARTMWALLVRAPAYDPQHRAAQAA

SEQ ID NO: 491599 - protein, 344 aa, unidentified
MEITTIGLDLAKNVFQVHGINSAGKVVVKKTLRRSQMRGFFEQLDPCLVGIEACGTSHRWAREITRLGHEVRLMPPAYVKPYVKRGKTDASDAEAICEAVTRPTMRYVAIKSPEQQAALALHRTRDLFVKQRTQLVNMIRGLLAEFGIEIPRGIGQALTLAKRIAAGEVPDTPRLAAKVIAGLAGQALDLQARLREIELELLAWLRSNDIARRLATIPGIGTVCATALAASVTDPHQFRSGRQFAAWLGLTPLQHSSGGKERLGRISKMGDKYLRRLLVVGMTSLIRRAKYKPEAVDPWLADLLSRKPTRLVTVALANKVARVVWAIMVRGGVYRMPAGVTTPA

SEQ ID NO: 491600 - protein, 409 aa, unidentified
MDVVISRCAGLDVHQATVVATVRVPSPTGGRDVVTATFGTMTPDLIALREWLQAYGVTQVALESTGVYWKPVYYVLEDGFTLLLINMQELKRVPGRKTDVKDSEWLAQLLECGLLRASFVPPPPIRELRDLTRYRVQQVRDRAQEVNRLCKVLEDAGVKLSTVATNVIGVSGRAMLQALVEGTTDPAVLADLARGKLRKKLPDLRRALTGRFRPHHAFLLEQVLAKIDFLDEALDRLMAEIEARLGPFASMLAAVDTIPGINRVGALSLLAETGGDMTRFATAAHLCSWGAMCPGQNESAGKRHSGKTRKGNRYLRAALIQAALAASRAKGTALQAQYLRIRRHRGHKKAVVAVGHQILEIAYYLMRDGGSYHELGPSYFDQRNKERTIRRHLKQLEALGVHVTIQEAA

SEQ ID NO: 491601 - protein, 308 aa, unidentified
MTLLCVAGIDVSKARLDVFVLPQRIGLAVANGAEAIAVLSRRLKNLKVERVVLEASGGLEYPVARTLTDAGFEVARVQPGRVRGFRAFLGRRAKTDALDAELIARFALVMPDEDIRAVPSERAEAIRSLSARRRQIVDLAAQEKTRLRMARDRFIIESLRGVIAQLAAERTRVEAALAEALEADAETKRKYALLCSVPGIGNAVATTLLTDLPELGTLNRHQTASLAGLAPHPEQSGTSKASAHIRGGRACVRTALYMAAVSAIRCNPPFRAFYKRLVDSGKPRKLAIVAVARKLAILANAIVRTNQP

SEQ ID NO: 491602 - protein, 345 aa, unidentified
MRHYAGLDVSVQETSICIINETGRVEFERKVTTHPEDLLKILTNPCYGFVRIGLEAGPLSQWLYSGLADAGLPVVCIETRHTKAFLKAQINKTDRNDARGIAQMMRVNLFRPVHVKTLTSQKHRALLTARKLLQEKAIALENDMRGLLSNFGLKVGPIGTGKFEERVRELVEGHQELSEITDALLSARRVLREQFSKLHRCLLSIVRSDVVCRRLMTVPGVGPVIALAYRSTIDVPARFGSSKSVGAALGLTPVQHQSGESNRIGRISLCGDDMLRTLLYEGAQSVMKRNVKWSWLKAWAMNVAKRRGIKKSIIALARRMAVIMHRLWIDGTTFQWTKEALSTSP

SEQ ID NO: 491603 - protein, 456 aa, unidentified
MKKKALNPTHDFVNMPMVHTHAAAIDVGDTLHSVAIPEGIFSERVKTFGSMTCDLEAIAAWLSSASITSVALESTGVYWKPLFSMLNKKGFEVYLVNARQTKNISGRKTDEGDAVWIQKLHSCGLLKSSYLPDDEQEALRTLVRYRHTLVQDCSRFKNRMQKSLELMNIKFHTLFSEISGKTSTSFIEAIINGERNPQNFLPLVDSHIKATKEQILKSVEGNWRSEHLFTLSQSYEMSKIFQQKITVCDVAIESTLQCYGAFINDGEYEAPIENKQIVKPVAKKKKYRGAPTFNVRSYLQKIYHVDVLSIYGLSEMSGLEVLAETGADLTKWPTANHFKSWLNLCPNNKMSGGKLISSKLLKKKPNAASQAFRIAANTVQRSNHWLGDYFRRMKGKGGNKFAVVATANKIATIFYKMVTEQKEFTPVDLEAYQQKYKNAKIAFYEKKLQQLKAVAA

SEQ ID NO: 491604 - protein, 363 aa, unidentified
MTIAMREQRNEISFRGQKIYVGIDVHLKSWSVTVLSETSVLKKFSQRPSPEALHGFLTRSYPGAEYRSVYEAGFCGFWIHERLTALGIDNIVVNPADVPTKSSEKLRKSDAVDSGKLARSLRANELKGIYTPDSVSLEMRSLIRLKNSITKDTTRQKNRIKSQLRYLGIGIPQEFLEPFSNWSKRFFAWLKEVETLTPSGRQALDIQIRHWEELRRQKLEMTRALRTLAKTDRFREPLRLIMSIPGFGQATGMAFLSEICDITRFRNAEQLAAYIGMIPMCHSSGEKDGTGDITLRKHAVMRCNLIEAAWVAVRQDPAMNLFFTEQCKRMPKSKAIVKVARKLVNRLYFVLKHQTEYVNSVVS

SEQ ID NO: 491605 - protein, 358 aa, unidentified
MEYFAGLDVAMEETAICVIDREGKVALETTATTDPDAIVTVLRPYVAKLRRVGHEAGSLSPWLQVELKQRGVPAVCLEAWHARAALAAMRNKTDRADARGIAHIMRTGWFREVHVKSEESYRLRLLLTQRRNLKRKFLDIENAIRHSIKTFGLRVGHVSRGQFEARVRELVADDPLIAGLTDCMLRARAALWQEYVRLHKVVVDFVRRDELCRRLMRIPGVGPISALAFKTAIDDPRRFRQAKTVGAYLGLTSRRWQSGTSIDIAGRISKAGDGDVRHTLYEAANIMLTRFRGFCSLKAWGLRIAKRRGHKRACVAVARKLAGIMFAMWRDGSEFQFKAQRQADGNATGMPKLIGTAA

SEQ ID NO: 491606 - protein, 457 aa, unidentified
MPHGKRSRPRRDLSPIHPAAAAIDIGATMHVAAVGPDRDADPVRTFRTFTDDLHRLADWFARCGVKTVAMESTGVYWIPVFEILEQRGFEVMVVNARDAKHVPGRKTDVSDAEWLQRLHEYGLLRPSFQPQAEIAGLRAYLRQRERLLDYAATHIQHMQKALMQMNLQLHHVVSDVTGVTGMTIIRAIVAGERDPNILASHRERGCHASVETICQALIGNYREEHVFALSQALELYDVYQTKVAACDKQIEAILKRLKKSATPPASKLLPPRHRSCQPNAPAFDARAALHAILGVDLTQIHGLGPYLALKLVGECGTSLTAWPTAKHFTSWLGLAPHNKISGGKVLSSKTRRTSNRAASLLRLAAVSVGRTDTALGAFYRRLSARAGKAKAITATARKIAVLFYNMLRHGMSYADPGAIYYEERYRQRVLGNLQRRAKSLGYVLHQADRDLSQVVVS

SEQ ID NO: 491607 - protein, 344 aa, unidentified
MMETVYCGVDIHSRMQTVAFCDTRDGEIHLAQLDHHKDDVRGFYAQFTGKVLVGWEATGYSTWFEKMIDELGHEGWIGQPAEIRRRANWRQKNDRRDAELILELMLRGEFPRIHRREVTSTEILRMLRYRHRLVKIKTMIANNLQALGISAGLPKISMRTKKAKERLQGAPMTEAMRRQCEEWISLLDPLNERVKGAEKWLEEAAEADDQVKLLRTHPGVGLLTSLALVHTLKPIDRFGNQRKVVAYVGLEPMERSSADKKRFLGISKAGSRVLRFLLGEAANSAAKEDEELRRFYYRLVFRRGRSKAKIAVARKLLVRSYIMLRDNIDYAEFRRRGLEARSAR

SEQ ID NO: 491608 - protein, 371 aa, unidentified
MSIVMGVDQHRAQITAEWIDLANGEITRARVSPADRVGVRRFLERFAGEQLEVALEATTGWRFLVEELRAMGAVVHLAEPAETAARRGTKRRAKTDRADARHHRELLLAGRLPESWIPPDHILDLRAQVRLRHTLIEQHTEWQQRIQAVLYHHGSPQRRQLMKGDGRDWLASLALPAVARQQITVSLQMTDALDALLAPITKELRDYARRQTACRALVDRYYGIGELCAVTILAELGDCRRFQNSRDAVRYGGMDITVFQSDRRRAPGRLSRQGPPALRWALYEAAHAARRPGSPDRDYYVQAAERLGGNRACLALARKLLKRCYHTLRELGDDALAEPAAGSGAARRASSSSTSRAEGPANHERADALAA

SEQ ID NO: 491609 - protein, 332 aa, unidentified
MNLVSTLGIDLAKNIFSVHGVDSNGIVVMRRTVARGKLVELIAQLPRCLIGMEACGGAHEWARRFSQFGHTVKLMAPKFVVPYRKSGKNDGNDAEAICEAVARPNMRFVPVKSAEQQADLSVHRVRQGFVEERTATLNRIRGLLAEFGYVLPTGAEQLRRQVSNLIDQLPVRVVRCVRDLLEHADRLAQKTLEYEREIKAGVTTNALARRALSRRGIGPITASALVATVGNGRDFKNGRQFAAWLGLVPRQYSTGGKTRLGHITKRGDPYLRTLLVMGARSVLQRAARETDPLSRWALSVRERRGYHRACVAVAAKNARVTWALLAKEAVAA

SEQ ID NO: 491610 - protein, 402 aa, unidentified
MANSPTRFFGLDIHKEYFVAVGVNADREVVFGPQRVSNYQLDDWVSRVLTLNDAVVLEMTTNTYLFYDTLLPQVHSVIAVHPPNVALVTNAQVKTDKKAALALAQLHAAGMLTGVWIPPHKVRDLRALIARREKMVRLSTIAKNRLHSILHRNHVTLPEKPFSPEQRTWWEGLPLSETEQFLVRSDLDTLAFAQKQVEQAEECLQKESAQDERIPLLVQLPGVAMLTAITILAAIGDSARFPTAKNLVGYAGLGTRVHNSGMTYSSGRITKTGRRDLRRAMVNAANHAIEHHPHWKKEFERLEPHLGRSKAVVAIARKLLVAVWHVLNKKAADRFADPRNVACSFFALAYRVGVRNLPEGQSALLFTREQLDRLGIGKDLQEIPWGSMHHKLPPSKLLIEKK

SEQ ID NO: 491611 - protein, 456 aa, unidentified
MMAKQKTERPPTIETVNIGAAAVDIGSREHMAAVNPDVTDAPVRAFGTFTHDLHDLAYWFKSHGVTSVAMESTGVYWIPAYEILEQHGFEVILVNARYAKNVPGRKTDVSDASWLRQLHSYGLLRGSFRPTAEIATLRAYLRQRERLVEYAAAHIQHMQKALMEMNLQLHHVVSDITGVTGMKIIRAIVAGERDLDVLAAYRDVRCKASTETIKAALNGNDRPEHIFGLTQSLELYDFYQAKMLECDRHLEATLAALGAVTEHDPSELPRPRTKTKQVSTPSFDVRAALFGVLGVDLTQIHGMGPSLSLKLVGECGTDLRAWPSAKHFTSWLCLAPGNKISGGKVLSSRTRRSSSRAAALLRLAAVTIGRSDTALGAFYRRLAARAGKAKAVTATARKIAVLFYNTLRHGMTYKDPGASHYEERYRNRVLGNLKRRAKSFGYDLQKLPMEADMAVS

SEQ ID NO: 491612 - protein, 427 aa, unidentified
MNCSTQNEKIELLTDEWLIVGIDVGSEKHFARMFNNRKVELSRKALGFENDEKGFAQLNGWISNQLRTSGKKYVMCAMEPTGHYWYNLAYYLQGHGMAVVHVNPSHVKKAKEFDDNNPSKNDRKDPKTIAGLVTEGRYMFPYMPEGIYASIRELNNMRMRTTESVVIVKNRLARWFSIYFPEFKAVFGDLKAKSARLLLTEAPLPEDVVKLGVEGVNQIFRNAKLRSVGMKKALQIVEAAKHSIGRKESPWAAREEISELLEDLDRYLAREEKLMTRLHEEVMKVPNVERILEIKGIGIRTAAGFIAEVGEIRRFEDAKSIQKLSGYAIVADESGKHNGQSSISYRGRKILRYFLFHAAISVIGKNPEFAAIHEYYTTRKKNPLKKMQSVIAVACKLIRVFYTILTKGVRYDGQKMLNDIVRPEAIA

SEQ ID NO: 491613 - protein, 403 aa, unidentified
MEGPLISLDVSKGKSNYRFFENGTDRKGKKGVIRHDIQGFDSIRDEAEKMEERLRIKPSVIFESTGVYSDVVEKYFTDKGFDVYVISPLLSASMRKEGVRPAKNDSLDTLSIAKVFYSKDDLRKCSENDKKAERLREMSYELDMMNRRIRPMKCQFLRLLDKVWPCLDEVSDYSSRFMLDFIIAFGHPENIKTVKGVLSVIRKSEMGTAGRKDKIAQDLFDYCHTHLSAVSKDSSYVELLKRMAIELKAMAKKKSELIDRMAEEARNKDEFARLLTIPAVAKTTALKIMARVGDISRFRNAEALVAYCGLDPRVYQSGKMTGEHRTITKKGDCILRSTLFLAVKLMVMLYPDTKVARFVAAKAKNGLSYKQAVVAGSAKLAKIIYSMLTHHENYVEFNADIVA

SEQ ID NO: 491614 - protein, 414 aa, unidentified
MADQFAWYVGIDWGSEAHVLCLLDAQGELCGIQDVAHTAGAVHEAIQWVLQQTAAAPADIAVGIETPRGALVDTFLEYGFPMFAVNPKQLDRFRDRFTAGGAKDDRRDARTVADGLRTDRRAFQRIQADDARVIQLREWSRIFEELQDEEQRLANRLRGQLYRVNGAWLTLNPAADDPWLWTILADTPHPDAWANLPRRSISAALRAHRIRRLTPDDVITVLRRPRLHVGDGVADAVEASIMSLIPQLRLVHDQRLTAERRTDRLLESLATEAREAESREHRDVEILRSLQGVGRMVAATMLTEATGPLADRDYGTLRAHAGAAPVTRRSGKRALFVHMRYACKRRLREALYHWSRTSIQHDPAARAYYDALRARGRGHARALRSVGDRWLRILIAMLRTGSLYDASRFAEGTV

SEQ ID NO: 491615 - protein, 383 aa, unidentified
MRHGGILIEANDSEGEAMKKHTTNNQSLSADVSACSTVAVDLAKRVFQVAGEDALGLLIFEERIKSREAFQVFLRELPPSVTVLVETGPGAQAWARLLQMQGNPVRILPAQLVASHRSGPKNDRNDALAILRAGRDCKISAVPIKSAAAMAMQALHRARQGYVRRRTAVGNQMRGLLLEHGVAMAQGEIAISQLVPRILEDATQPLPDLLRELIAELLGEWSQLGDRVNVLTGRLEMAAKEDETAKRLMTVRGVGPIIATALIAKQTEPERFANARLFAAYFGLVPSQHSSGEKTRLGKMSKHGDAYLRSLTIQGAHAVLRQLRPDSQQPDDQRLQRWINRLGRKEAAVRLANRNLRILWVLLQNDQTYRRQPGNGQEATMSH

SEQ ID NO: 491616 - protein, 408 aa, unidentified
MQVLYTRCAGLDVHKDTIVACVRCVSPPMHQEVRSFGATTTQLLALADWLAEHGCTHVAMEATGVYWKPVWHVLEAEFELVLANAAHIRNVPGRKTDVNDAMWIADLLAHGLIRSSFVPPQAIQQLRDLTRTHKQLVREVSQHSLHIQKVLEDANLKLGSVLSDVLGKSGRAMLDAIVAGQSDPALLAALAQGTARNKTAALREALRGRITEHHRTMLRLHLQVIDALQRTLGELDAAVGKALAPIRQRARLLATMPGVSDLTASVVVAEIGVDMSRFPSAGHLISWAGLCPRSDESAGKRRSTRVRKSGTWIKTALVTAAWAAVRVKTSYLRAQFLRIKARRGAKKAILAVAASMLTAAFHMLRDGTEYNDLGSEHFDRQDRSKTIRRLLKRLQDLGCELPVVAHKG

SEQ ID NO: 491617 - protein, 329 aa, unidentified
MEIKEVIGIDVSKLTLDCCIHKSQEFKVFNNDSGGIEKLIEWSLKKSKLDKENLLFVLEHTGLYSDHLVRLLDGGDCLMNIVSGLEVKRSLGITRGKDDRTDAKRLALYGYRTREEFSPNKIPSSTLARLKRLMSMRRKLVGQRAGHMATLREQKRVLEEDPLLFWVQEDVINLLRWRISDLEREMDKLIQGDLELKQMLALLTGIKGIGKVTARFMIVHTVGFTSFATWRKFASYCGIAPFPHTSGTSVRGRTRVSRLANREGKALLHQCSLSAVKCNPEMKTYYKRRIEIGKSKMSTLNIIRNKLVARAFAVVSRGTPYVQLMGHAS

SEQ ID NO: 491618 - protein, 339 aa, unidentified
MQVKTIGVDLAKNIFQVHGIAGDEVVVFNRPLRRAQLLPFFSKLEPCLIGMEACSSAHHWARELTTLGHDVRLIPPMYVKPYVKRGKSDAIDAEAICEAVTRPTMRFVAIKTVEQQALLSLHRARALLVRQRTQLINGLRGMVAEFGVYIARGLARVIGFAEDILAGEVLDLPEIANEVIHNLCEHLMALHARIRWYEERLKLVAKEDARVRLLRTIPGVGVVTASAIIASIGDGHQFRNGREFAAWLGLTPANKSSGGKEKLGRITKMGDQYLRSLLVVGMTSLVRQTKSHPERASKWLTSLLERKPARVATVAMANKTARIVWAVLTRNQPYTPHTA

SEQ ID NO: 491619 - protein, 366 aa, unidentified
MTMKEYYIGMDVHKDTVQMAVFADKGEEPIYERRLKNITCLLVKEATAFSEKGKTEVAYEAGSCGYVIYRAMKEANITCHVLPASKVAKKRTDRIKTDKRDARLIGRELRSNSIRPISVPDEADEAARDLLRCREAVSEDLRRAKQRLLKFMVRHGYSYAGGGNNWTLLHWQWMDRRPFRNEHEKLVYEEYRSQVRSLEERLVRLEKQVIETAESPRYKEAVNRLRAFKGIDYIIGLAVVCEIGDFHRFANAKAFMSYLGFVPSENSSGGKRNQGGITKAGNGHLRRLLIEGAWHYTKNAQPGRRLEKRRQGYPADLIDTADRALHRLNKKYFRLVFSGKHVNKAVTAVARELAGFIWAVQVSKSA

SEQ ID NO: 491620 - protein, 391 aa, unidentified
MVSVGIDVAKDKHDCFILNSEGEVLANGFTVPNTMGGFQCLLQKIRECTTPQDKIKVGLEATGHYSYNILGFLLDNGLATYVLNPLHTNLYRKSLSLRKTKTDRVDARTIAAMLLSDVGLKPYTDIAYHNEELKSLTRYRFDKVKERAKLKQSVARLVCILFPELGNLVSSLHTASVYALLEELPGARQIAEAHLTHLKTLLSDVSRGRYGRDVAVAIRDAARNSVGSRMPAKSLELQHTIRLIRELDTEIAEIEDTIDTLMDELQSPITTIPGIGTRMGAMILAEVGDFSRFDSPDKLLAYAGMSPSTCQSGQLKNCYPHMEKRGSRYLRYALYNATKYVCLWDPTFAAYLAKKRAEGKHYNVAISHAAKKLVRLIYALEKSREPYRPAA

SEQ ID NO: 491621 - protein, 414 aa, unidentified
MDVLHERCAALDIGKKDLKACVRAPSPSGRRSRRQEIRTFATTTNALLELRDWLVAEQVALVVMEATGDYWRGAFYVLEDCLNVILVNAAHAKGLPGRKTDVADAAWLCQLGECGLLKASFVPPEPIRHLRDLTRYRSTLASEVSREAQRLEKELEDAGIKLSAVATDILGVSGRSMLAALIEGERDAQALAQMAKARMRPKIPDLVQALTGNFGEHHAFLCRLHLERIDHLKATIAELSERIEEEMRPFARQLDLLETIPGVGRITAEVLIAETGGDMSRFRTAGHLASWAGVCPGHHESAGKHKSGRRRHGNRWLGAALGTAAMAASRTRDRTYLGARYMRLMPRLGKKKALVALEHSMLTAVWHILTQDTAFHDLGGDYYIKHDPERALRRITRQANALGMTVRFEPIEAA

SEQ ID NO: 491622 - protein, 444 aa, unidentified
MWHVSDTAVVTPEPAWAAFVGLDWGSQKHAWILAPAGGGMREQGVVDNTPEAIAVWAANLHRSFGGQPVAVALEQKRGSVVNLLLPYAHLVLFPVPASMSASYRKTFVPSGAKDDPSDASWILDLLLRHRDRLRRLEPEEPNTRLLRMLVEDRRQLVDDKTRLALRLQDCLKQYFPQLVQWFDVDTALVADLLKRWPDLQHLQRCHDGTLRTFFRQHHYGEDLTAKRIDAIRAAVAATHDPAVREAGSMKALHLTESIATLRDQITRLERRRDELVASHPDAPLFASFPGAGRATVPRLIAAFGTRRERYQSACEVACDSGIAPVHIRSGKLDRVSIRRACQDFTRQTFHEFAGQTIPRCPWAKAYYQAHCRTPEQHHAAVRALAFKWIRILFRCWKDRTPYDEQLYVTSLRRRCGLLGHALASATSVGWTTVAGFSQLSEKNS

SEQ ID NO: 491623 - protein, 448 aa, unidentified
MFIMHYKRLLTFIDGVSSYLSVGLDVGADFTWMSIALPNGSFIGKPFKIIHSDPRSRELAVTKIKEAQETYSLKSRCFLESTGIYHIPLLCFLRDKGFDCSVINPIITKNSTNINIRKLHNDKFDSKKAALVGLNASLKTSILPEDSVVDLRNLVRDYYYFKDLQSAVALKLTAELKVSFPAYAKVFSKVTTQSSLKLLSSYPLPEDMLTAPKDDIVKIIRSTARFGEAYALRKYDAIIAAAQDAAVFGRALPSNAVRIRLYIDTYQEYQKHLDALLKALHETVEKLQDTLIYDQICLLQSLRGIGFLTAVVLIAEMGDFKLFSSPKKLYAYFGLDPAVKQSGKLNGDKVHMSKRGSSLARRVLHMVALNNVKVDKGSGTPVNPVVYDYYTRKCSGKKKPVAMGAVMHKICNIIYAMLRDNKPFEIITPEEHCRRFAAEHPDKIRKAA

SEQ ID NO: 491624 - protein, 363 aa, unidentified
MSGRETAITTIAQSEPIRVTVGVDTHGDVHVAYATDQLGRHLATTRIATTPRGYRALLDWARGLGQVAAFGVEGTGCYGAGLARFLGAQGQVVVEVNRPDRQARRRRGKSDPVDAEAAARAVLAGQATAIPKTGDSMVEMVRCLRVARATAMKARTQAANALRALLVTAPVELREQLRDLDPSKLAATAARLRPGAIVTPTAATKLALRTVAERQLALTAELTTLDAELDRLTAQAAPALRELCGVGAEVAGALLVTAGDDPARLRSDAAFSMLCGASPIEASSGKTVRHRLNRGGDRQANTALYRIVVVRLRWHEPTRNYMARRTTQGLTKKEIIRCLKRYVAREVFAALMKTSPNGLVQAP

SEQ ID NO: 491625 - protein, 504 aa, unidentified
MTQKNTSSKFGLLLTWPVGKIQRIQEVSNMNLKGTKKKNQVSNANIFEQQELLKKIEVVRENLTASTWHELETKGKFDKNAKLSFICDDMLILGCDVGSETHYLRAIDTRGRELSKSAFSFSNNVDGFSKAKEWAVKIAAEYDKKQIVLGLEPTGHYWFCLATWMISNGISVVQVNPYAVKQTKELEDNSQLKDDTKDPKLIANLVKDGNFGMPYLPEQLYADLRRLSMFRDQLNEDRIRSINRLHRELKIYFPEYKEALGKTEGTFSLELLKQAPFPDDLAALKEDGIRQIWHNAKLRGRGYSRAGEILEYAKASVGIREGKETGKLVVQWFVQKILELDEELALIETQINQKCLEIPHTDKVLEICGIGENTLSGMVAEMGDISRFDDVKEIQKLSGLGLVASSSGKHKGETKISHRGRKRLRYWLFQAAKSAVAHAEEFKKLHVYYTTREQNPLKKMQSLIAIACKLLRIIFTILKKGIKYDPRKMLKDIRRESRQESLAA

SEQ ID NO: 491626 - protein, 449 aa, unidentified
MTADKDLACTKGLLVTWLPARRSGWPASAPEGLKLSTTTNTGAAREGSSFGVFCGLDVGKGDHHAVALDPAGGRLADRPLPNDERALRSLFGELQAHGEVLAVVDQVASIGALAVAVARSMGIVVAYLPGLTMRRLADLHPGEAKTDARDAFVIADAARALPHTLRRIASDEQTVAELTILAGYDDDLAAEVTRLANRLHDVLAHVHPGLERLLGKHLNRSGVLELLAASPTPIQLRALGQSGIQAALAPRSRKLAVRLPEQILSALDEQTVVIPGTETFGRVIAGLARQLLSARDERDSIAEQLTARLEAHPLVEVLTSMPGVGVRTAITVLIHVGDGTAFRSAAHLAAYAGLAPVTRRSGSSIRGESASRRGNKQLKRALFLSAFASLRDPVSRTYYDRKRAQGKTHTAALLCLARRRTDVLHAMIRTGKTYQPPALQPAEDPSVAA

SEQ ID NO: 491627 - protein, 391 aa, unidentified
MSQANDLTRCLGPYDQATTLIAVIELSLSSWLIAGMVPGLERQPLKKIAPDEAELLRLLERWREEAVKAGSVINRLSVAFEAGRDGFWLARWLRTRGIDAHVIHSSSVAVSREHRRAKTDRLDTALLMRVFIGWLRGERGHCSMVAVPSIEEEDAKRPNRERENLVGERTRIINRMKSALARLGIRGFKPELRKALQRLDTLLTPEGTPIPVNTLDEFRRDFARLVLVREQIDAIERTRIARLEAAPKTGPHAMVRLLANILGLGIETADMLVNEVLSRNLRDRRAVARYAGLTGSPDESGKKRRERGLAKAGNARVRRGLIQLAWRFLLFQKESALVLWFRARTESAAGVRKTKLIVALARKLLIALWRMVTTGEVPAGVVLRPSTQSGP

SEQ ID NO: 491628 - protein, 347 aa, unidentified
MAIVEVTRPIVGGVDTHLDVHVAAAIDPIGGLLGVESFPTTPAGYHALASWLGAFGPIDRVGVEGTGTYGAGLARHLAASGITVIEVDRPNRQERRRNGKSDELDAIEAARAALSRRARGHAKGGTGNVEALRALLVAKRSARSIRIRSTGQLRHLVITAPDDLRVRLSGLTSKALIAQASVLRARPGSDPVRHATKTAIITLARRVQAINAEIAVLDSHIEALVKATVPGLLGVYGVGADTAAIFLSAAGDNPGRIRSEAAWAKICGVAPVPAGSGKTNGRHRLNQGGNRQANHALWRVVLTRLGQGEPRTVAYMHRRLAEGRTKPEIIRALKRYVAREIFQQIPT

SEQ ID NO: 491629 - protein, 378 aa, unidentified
MLTTTRSSESSVRPAVLFVAFELGSTQWKLAFAVGLGTRPRLVQIPAREVMRVAKEIARAKTRFGLPTDAPVRTCYEAGRDGFWLHRALLAQGVTNVVVDPSSIAVDRRARRAKTDRIDAIALVTQLILADAGDRRGWREVHVPSVEAEAARQLHRERDTVRAALRAVGNRIQGLLLLHGVLVRAGRLSAEDVRQLRDWAGAPLPAAVQARIEREADAWQALAARLRVVDRGLHARVTADTDVVAQQARTLTRLRGVGELGAVTLSTELFAWRAFTNGRQVGAIVGLTPTPYCSDQSQREQGISRSGNRRVRTLLVEMAWVWVRWQPLSALTQWYQARFAQHGRARKIGIVALARKLLIALWRWVDQGVVPAGAIVRA

SEQ ID NO: 491630 - protein, 402 aa, unidentified
MNAVGIDVSKGKSMVAIMRPFGEIVSPPFEIKHTTSDINSLVELINSVEGESRIVMEHTGRYYEVLAHQLSKANLFVSAINPKLIKDFDNDSLRKVKSDKADSVKIARYALDKWQNLKQYNVMDELRNQLKTMNRQFGFYMKHKTAMKNNLIGILDQTYPGVNTYFDSPARSDGSQKWVDFASTYWHVDCVRKMSKNAFIDHYKNWCKRKKYNFSKSKAEEIYEKAKELVPVLPKDNITKLIIKQAVDQLNSVSTTIESLRTLMNETASKLPEYPVVMAMKGVGTSLGPQLMAEIGDVSRFTHKGAITAFAGVDPGVNESGSYEQKSVPTSKRGSSVLRKTLFQVMDVLIKTHPQDDPVYQFIDKKRAQGKPYYVYMTAGANKFLRIYYGRVKEYLSSLPES

SEQ ID NO: 491631 - protein, 385 aa, unidentified
MKKDSTAKNTQKTVSKTHRNRVREMAAKQRLTIGIDLGDRTSRYCILDEAGEVVSEDQLPTSQSGLSALLERMPCSRVALEVGTHSPWVSRHIASLGHEVIVANPHKVKLITQSVKKNDRIDAQQLARLARVDPKLLSPIRHRGAEAQADLGVIRARAELMEARTGLINSARGLAKPMGERLKKCDADQVKEGLADGLGEAVRRVIGPLLKSVEAISEQIGEYDKKIEAIAKRYPETELLTQVYGVGTLIALTYILTIEDAQRFKHSREVGPYLGLTRKQRDSGDSEPEMGISKSGDRLLRSLLVQGAHCILRQGAPDSDLKAWGMAHLENSGKKGNKKRKKKAVVAVARKLAVLLHRLWVTGEVYDPLYNRKAVTAGKAKGKAA

SEQ ID NO: 491632 - protein, 405 aa, unidentified
MNLTQNDRLKQVTSDTLIVGVDVGSQTHFCRAFDWRGFELSRRVFKFSNTGMGFLTFLRWTEELMNKTEMKKVIVGCEPTGCYWLTFQKFLQDHDVQLVTVNPFTVNRSMELDDNSPEKSDLKDPKTIALLVKDGRFSTSYLPSGVYAEIREASVCRDQIMKQHVRLSNQIQGWLQKFFPEYFECYADWDSTSGLMLLREAPLPQDILKIGAGGINQIWRDAKVRAAGIKRAQTLVEAAQNSVGLEAGEAARLEIWVLVNDYILKAEQLKRLDEYLEEKVKEVPNVEKLLAIKGVGMSTVIGFIAEVGDIGRFTDPKQIQKLAGLEIVKKSSGKKKGQPRISKRGRRKLRRTMYESARALMTWNPAFQDVFLYYRNRTKKPLGGMQAKIAVACKAIRICSIENRL

SEQ ID NO: 491633 - protein, 420 aa, unidentified
MRNAGIHANSLLEVRRMYNAVGIDVSKGKSTIAVLQPGGTVIRKPFDVSHTSQNLNELADYLSSLDGTTKIVMECTGRYHEPMVKVLSEAGLFVSIVNPHLIKNFGNNSLRKVKSDPADARKIARYTLDNWTELRQYSGMDNTRTQLKTLNSQFSFFMKQKVAAKANLIALLDNTYPGVNKLFDSPTREDGSEKWVDYAYSFWHADCVRKIGLKAFTERYKSFCKKHHYIFQQDKPEKLFNASKELVAVFPKEKTYKLLIQQSIQQLNLASEHVERLRREMNELASTLPEYSTVMGIYGVGKTYGPQLIAEIGDVSRFTHREALTAFAGVDPGVDESGQHKSKSNRASKVGSARLRKTLFQIMTTLLQNAPEADPVYRFLDKKWSQGKPYYVYMTAGANKFLRIYYGKVKECLRNLEQTE

SEQ ID NO: 491634 - protein, 431 aa, unidentified
MPPTAGPTPLVPLAALIGIDWADQHHDVALQVAGTVTVEHSRLTHEPNALAAWLTGLAQRFAGQRVGIALETSRGPLVHALLEAPFVVLYPVNPRSLQCFRETFTPSGAKDDAPDARLLLELLVKHRDQLAPWVPADAATRTLRALVERRRTAVELRTQLTLQLQATLKDYFPQALTWAGTDLTSPLACAFLTQWPTLAALQRARPSAVRRFYLTHRCRRPALIATRLAEIATATPLTHDPTIVEPNALFVQLLARQLAALGPSLAALDAEIAACFAAHPDAELFRALPGAGAALAPRLLVAFGTDRTRFPSAADVQQCAGIAPVTVRSGRSCQVHWRWSVSTFLRQTFHEFAHHSILHTPWARAFYHAQRARGKTHHVAVRALAFKWIRILWRCWQDHTPYDDARYTRALILRGSPIAAHLQLAATEAAA

SEQ ID NO: 491635 - protein, 356 aa, unidentified
MNKSNKLDFTGQPIYIGLDVHKKSWSVSIFTQHCEHKTFTQPPEVDKLAYYLRRNFPGAQYYSVYEAGFSGFWIHDQLRAKGIDCIVVNPADVPTRDKERAKKRDPVDCRKLARSLRSGEIEGIYVPSRGKLEDRSLIRTRQSMVRKQTRCKNQIKAILFFYGVVIPEEREMGHWSRRFIRWIERIRMERTSGDIALKAHLEELSHLRQLIASLNRAILRLARTEEYRSLVRLLKSVPGISTLTAMILLSELGEVTRFPSLDELSCYVGLIPDTQESGEKEYVGGMTQRRHSQLRWLLIEASWVAARKDPALLMAFQEYCKRMRKTKAIVKIARKLLNRIRYVLKNQAEYVPCVIE

SEQ ID NO: 491636 - protein, 343 aa, unidentified
MPHYVGLDVSQKTTAICVVDAQGKRLWRGVCATDPGPISARISQHAGVDAKVGIETGSMTPWLVHGLRAAGLDVACLDARRVKAALQMQLNKTDENDAEGLAQIMRTGWYRAVHVKSLDAHRARALLGARAQLVGMTTRLSNMIRGVLKTFGLLPGAGRGLRFDRKVEALLEGAPEIALVVRPLLATWRQLRQQIAVFDKAVLQQVRADPICRLLMTVPGIGALSSLMYVSTVENPSRFSRSRAVGAHLGLTPRRYQSGETDRSGHISRCGDGLARTLMYEAAIVILHRVKRSLHLKDWAEAIERRSGSGKARVALARKLSVILHSVWRSGEPFRWAAPVIAA

SEQ ID NO: 491637 - protein, 337 aa, unidentified
MIHVGVDLQQRFCYVTVMDARGKILQQRAVGNEAGELKRWARSLPCPAQVVMEACSFWPAFQKNLSGEVEKMVLVHPARVKAIADARLKNDRVDSETLAHLSRCDLLPEAWMADEATRQARQRVRLRVALGQQRARSKNLLQAVLHQEGQKKPVTDLFGKKGRVWLEQVELSTAGRESVDTYRELIEHYDRLIGERQQKLEQAAEQSAEARWLATIPGIGPYLAMVILAEIGDIARFRDKKALCNYAGLAPRVRESAGKRHYGGLMYQGSKLLRWAMIQAAHGATRGSPAVRAWYEKRRQRKRPQVARVALARKLLTCVWALLRHGVGFEETVFATR

SEQ ID NO: 491638 - protein, 352 aa, unidentified
MEIIALDAHKRYSQVCVQKKDGRLLCEKRINHSKGQIGQFLSRWTAGSPVALETVGNWYWIVDEIEQADMKPKLVHAHKAKLMLGSVNKTDKLDARGLNKLQRAGTLPCVWIPPGGIRDQRELPRTRMVFANLRTRLKNRIHSVFDKYGLHTDFDGISDIFGRRGREQMALTIKQLPAETRYTVRCLLRELDMVEQQIRRIEKRMKKVFSKTEQVKRLMTLPGIGFILAVTIANEIGDISRFATPQRLASYAGTVPRVHSSGGHTRYGKLRNDVNHYLKWAYSEAGNSTAVNHKRFPFRHTSKLYKRIRERKGHAKAVGAVGRHLAEASFWVLTRNEDYKEPEIKSVSPTAV

SEQ ID NO: 491639 - protein, 353 aa, unidentified
MRTYYVGMDVHRATIAMVVLNGAGKVVEQLVVETSATRVRSYLKQLQGRVYVTFEEGTQAQWLYDVVQPLVTEVIVCDPRHNKLLKAGHKSDRIDAQKLAELLRNGALKAVDHRDHGVRALKELVRNYDCLVSDTTRVMNRLKAMFRRQAIACSGHEVYRQDRREVWLAKLRERGAKERASSLYRQLVALKALRHEAKLAMVREARRRAAYVWLMSVPRLGAVSVAQLLAVVGTPYRFRTKRQFWSYVGLAVVTRSSADMEVVAGVLRRSRRPVATRGLNRNHNHLLKRVFKTAATSACQSEPFKQHYERRLQQGMDPALARLSVARQLSAITLSLWKRGEKFQAERMKRQAA

SEQ ID NO: 491640 - protein, 355 aa, unidentified
MKKVMAGIDLHSNNVVIGIMDSDGKRVASQKLPCELKAVAQYLAPYKKRLRQVAVESTFNWYWLVDGLQAAGYPVVLANPAKMDQYSGIKHADDTNDAFFLADLQRLNILPTGYIYDRELRPVRDLLRRRLSLVHQRSALMISFKSLFTRTTGQELKLSRLKALAPAEAEALYEHPANQLIARVQKEHIEQLDASIARIERAVLGNVRQLPYYHKLNTLPGVGRILGMTITLEVGAIGRFKTAGHFASYCRAVAAQRLSNEKSKGPNNRKCGNKYLSWAFVEAANFAKRYDERSRRWFDRKAARTNTVLATKALACKLAKAAWHVMAQNVDYDENRVFGRAADSQQKGLVKTLRD

SEQ ID NO: 491641 - protein, 380 aa, unidentified
MKQTIRSFVGMDVHKETISISVAEDGRSGPVRFIGVIPNTPEAVHKMAKQLTRHGELDFCYEASGCGYGIHRQLTRLGHRCTVAAPSMIPRKPGERIKTDRRDSEKLAILHRSGDLTPVWVPDTTHEALRDLVRARVDASMHLMRARQQLLAFLLRHGRSYPTGKHWTQRHRSWLAGQTFQEHAHGIVFQDYLETVWTAQQRRDALIERISAMVGSWSLGPLVEALRGLRGIDMISAATFIASTGDLSRFESPRLLMGYLGLVPSEHSSGGTIRRGGITKTGNREARRMLIEAAWSYQYPARIAKDKAEILIRLPKKIRDIAWKAQTRLCIRYRSMIARGKKPTVVVAAIARELAGFIWAIGQEMRISMTSCQRVEATAS

SEQ ID NO: 491642 - protein, 338 aa, unidentified
MKKAAMPQSAAATAAAWVGIDISKRALDACLIRDEGRPLFREFDNTPAGFTGLLRWVQSHVPPAGCHFCMEATGSYGLALAFFLVEAGHRVSVINPFRAKHAALSRGAGNKTDKADALVLADYCRKEDPPLWRAAAPEVRVLVALMRRLQNLKDQLLQETNRLSDPGLLKAVQRSLRKGVRFLKGEITCLEHAIEEHVRDHPRLKEDRDLLTSIPGLSDTTAHWILAELPDVGQFASAESAAAYAGLAPREHRSGTSVRKATQLSKKGNAYLRRSLYMPTLSALRHNPLVRAFFERLVARGKPRMAAVGAAMRKLLMIAYGVLKSRRAFSTEPVKLPA

SEQ ID NO: 491643 - protein, 322 aa, unidentified
MASFLGIDVSSLSLDGWVRPQAVRIAVSNNPAGFEELERTLRKFSIKRILLEATGDYERDVLRFLQDAGYKVIRVNPARARKFADSMGVKAKTDAIDAEVLAHYAEVIPDQPTLQISPDRALLRELLMQRDRLVQQRDDDRRRLKQAQSLVVANFLKANLQHFRSQIRLVEQEINQQAAKLNDERIARLTQVKGIGMVTAGKLVALLPEIGRVESREIASLVGVAPFNHDSGKSLGKRFITGGRFEVRRTLYMALLVAVKYNPAFKARYEALRGRGKLAKVALVACMRTFIVRLNAMIKTGTPWRDLILPQPAGTTQIEKAA

SEQ ID NO: 491644 - protein, 408 aa, unidentified
MVVEAARVTSSTVVVAVDVGKTEFAFSVSDGARVSLLKPRTGCPMTGPSLAQVVADIARVLPGGAGVKVGIEAAGHYHRPLLRAPWPVDWEVLELNPGHVTEQRRVLGKRTIKTDVIDLQAMTELMLAGRGQPVRDRSLVLGGLAAWSAHRTGRVSLRTATKNQLLGQLDRTFPGLTLALPDVLATKVGRLVAAEFADPARLAALGSSRFIRFGATRGLQIRRPVADRLVQAARDALPTADAAVARAVLAADLALLSDLDAQVDQATDQLARLLPSSPFAPLLTVPGWGQVRAGTYGGALGDPARFDNHRQIYRTAGLNPIQYESAGKRRDSVISREGSVELRRSLIDLGVGLWHCDPAAKVYGTQLRARGKKGLVIACAMANRANRIAFAMVRDQCPYDPTRWLQGA

SEQ ID NO: 491645 - protein, 344 aa, unidentified
MAEIIMIGLDLAKNVFQAHGVDGTGQVVMRRQIRRAQMEKFFTGLEPTLIGMEACGGAHYWARLAQSHGHEVRLMPPSYVKPYVKRNKTDGRDAEATCEAMARPTMRFVTVKTEQQQAMLVLHRTRILLVRQRTMLANALRGHLAEFGIVAAQGVKGLRGLIERMQTPCAAGVPELARDALLVLAGQWQALDTQIRALELKIVRSVRENAAARRLMAVPCVGPIIAGAMVASVGDARAFRSARGFAAWLGLTPRQRGTGGKQRSGSISKQGDRTLRTLLIVGASAKLRQELVRGVSDPWLRELLARRPRKVATVALAAKTARIIWAVLAKGEDYRDRASVPAAT

SEQ ID NO: 491646 - protein, 402 aa, unidentified
MNCVGIDVSKGKSMIAVMRPFGEVVVSPFEVRHTANELSELAGLLKSLDGETRVVMESTGNYHAPVAWLLHGAGLYVSVVNAMLVHDYGNNSLRRGKTDKKDAVKLANYGLDHWLTLPRYVPDEDTRLMLKTCYRQYQQYSKVQTMLKNNLISLLDTAFPDANRLFTSPPRADGSEKWVDFVATFWHCECVCGLSKKAFTAKYQKWCRKHGYNFSQDKALDIYASACGRFGVMPKTNTAKLLVEQAISQLQTTSAALAALKQEMQSLAASLPEYPVVMEMFGVGPTLGPQLIAEIGDVRRFHSKKALVAFAGIDAPPYQSGQIDVRSRSISKRGSASLRRTLFLVMGVLLQCAPMDEPVYQFMNKKRSEGKPYRVYMMASANKFLRIYYASVKAYLDSLEHD

SEQ ID NO: 491647 - protein, 311 aa, unidentified
MNTQDCFIGLDISKDTLEVAVRPTEARKTFANQEDGLSLMIDFIKPFSPRLIVLEATGGLEKAAVCACAVEGLPVVVVNPRQVRDFAKAKGILAKTDKIDAGVIAQFAEAIRPEVRPLKAEEAQKLDALLSRRRQILQMLTAEKNRLQSAPVWTRKDIQKHIAWLQKELDQFNQDLDRMVKESPIWRAKDEILQSVKGVGPVLSVTLISQLPELGALKGKKIAALVGVAPLNRDSGKYRGRRTIWGGRAEVRSVLLMATRIAIRFNPVIRAFFERLKKAGKIRKVAETACMRKLLTILNAMMKNNTRWQPA

SEQ ID NO: 491648 - protein, 351 aa, unidentified
MAATAQSAIAVIGIDIGKNSFHVVGLDGRGAIVLRQKWSRGQIEARFANMSPCLIGMEACVGAHHLSRKLKALGHDARLMPARYVRPYSKGQKNDFRDAEAIAEAVQRPTMKFVATKTADQLDLQALHRVRERLVSQRTGIINQIRAFLLERGIAVRQGQRFLRVELPRILATPPDVLSPRTVRVIEGLASDWHRLDERIEGLSSEIEELAKRDAGCERLMSVPGIGPIISSAMVAAIGTGDSFSKGRDFAAWLGLVPRQVSTGDRTILGKISKRGNRYLRVLFVQAAWVVLVKVKPNRWQGHGLKPWIEAAKKRLHHNVLAIALANKLARIAWSVLTHGRAFEASKLQAA

SEQ ID NO: 491649 - protein, 356 aa, unidentified
MDKYIGFDIDSKKTVACMVEKGKKERYATIGSDVQSMRNYLKGQKSDGSRIHLTFEVSGQAGFLYDSLIDCADTITVSNPSKMTWIYRTAKKNDRIDSRKQAILLSIGEIPKVHMPGAEIRQWRNVILHRRNLVNKTTEVKNRIRAVLRSQGFSEPYQKGSWWKRSNRLWMRGLSEQQVSSIELWRMNLCHLMEQLDLLDGQVKRVTEYLDLYLGRGAGGKLLMSIPGVGPRTAEAILAYTDDVSRFGRTKQYCSYFGLTPRLDESGTSRRLGHISKLGPSVVRWLLCESSWKVIRKSSAMRAFYERVKAGQAGRKKIAIVAVCRKLLSIMRAMLETGELFNEELVCRECEVKRAC

SEQ ID NO: 491650 - protein, 414 aa, unidentified
MEQKMIYVGIDWADDHHDIVITDDSANTLDQFRIDHTCEGFALLHSHIANHQTSPDLVLIAIETSRGLLVHELLQKGYVVYAINPKSVNRYKDRHVLSKAKSDALDALSLGHILRTDRHRFQPLKPLPEDYRLLDRLCTDLRKVVDEKSRVTNQVISCLKEFYPKALETFSLDSQIFIDFLKAFPDHRALSACTKKAFLAFLKKHRYPCPAKADELWKTIQSPTLQPDKVTARSGRLRLGMLLDQLENLKVHIIHYEQEIQDILDKLPESNSVKSLPGVGDRLAPELVATLGPNNKDGHHRFQASDEIAKLSGCVPIVRESGKWRTVSLRYACVKSLRRTFHDWAFTSINYSSWARAFYDYHKERNQSHCTILRNLGKKWIKILFAVWSQGTSYDETLHIQNLKARNVPWAMTL

SEQ ID NO: 491651 - protein, 354 aa, unidentified
MQIHTIGVDLGKTVFHLVGLNLRGEVVVRRKCSRTQLLQFTANVQVTLIGMEACAGAHFLGRALREQGHEVRIIPAQYVKPYVKTNKSDFIDAEAIAEAVGRPSMRFVPIKTDDQLDLQSLHRVRERWVIRRTAVVNQIRGLLLERGITLRQGRRHLEAALPGILEDATVRLSGALRMLISQLKHELEELANFIGEADGMLERTSRDNDSCRRLLAVPGIGPVTATALIAAIGNGAAFRKGREFSAWVGMVPRESSTGGKQKLLGISKRGNPYLRKLFIQGARAVMLRRTKQSIGLRTWIENIALKKHHNVAAVALANKMARIAWVVLAKGEAYRPSLLVDSEPNLRGLQMTPA

SEQ ID NO: 491652 - protein, 327 aa, unidentified
MAKRTTICAGIDTGKRKLDIALDGSSEQLQIDNTPEGYKTLLVWLRRHRVKRIGIEASGGYEQAVVAELRRRRFVVVVFQPAQVRAYAKFHLQRAKNDKIDAALIAACTAAVKTIHAPPDARLLPFAEHLTMLDQIGEDIARLKNRLETCRNPRFQQTWKEDIARLAKREKIEFKALVAAIREHRDLAERLDLIVSVDGIGLPTAVAILVRLPEIGRISREQAAALAGVAPYDDDSGDHAGVRHIDGGRERLRRAIYTAALPASFRWNPQLMALYRRLIAAGKEHKPALIACARKLLIFANTVVARGTPWDHERPPIASLTAVPQPG

SEQ ID NO: 491653 - protein, 420 aa, unidentified
MPSHPSDFAAVIGLDWADRKHDICLLETGQENPEYSVLDHDPVAIDAWATRLRKRFDGRPIAVCVELARGPIVSALLEYDFFVIFPINPAMLARYRRAFTPSRAKDDPKDAFLALDLFRHHFDRLAPLRRERPAMRALQRLVQARRTLVDDRCRLINRLTYALKEYFPQVLRWFRDKDTDVFVDFVLRWPTLDAAKRAHRDTLVEFFHAHNVRYGKTTERRVEAIKAARALTSDPAVIQPNQLMAESLLAQISALSKAVSRFNAEIAARTAELPDFKFFAALPGAGAALAPRLLAAFGENRDRFPDAASVQKCTGIAPVVERSGNKSWTHWRFIASGFLRQTFVEWAGETVPHSFWAKAFYESRQAKGVSHQAILRALAFKWIRILWRCWHDRQPYDEARYLMALQKRHSPILAHAAQSP

SEQ ID NO: 491654 - protein, 337 aa, unidentified
MEYFAGLDVSMEETHICILDREGALIREGKASSAPKAIAAFLVAGPPCSKVVFETGRMAPMLFHGLTELGVPVVCIESRQAYQALKSLAGHKTDRNDARGLAHLARTGFYKPTHVKSLSAHAIRALIAARKKLVGLRVTIDNQIRGLVVVFGVRLPRALSPAFKDAALKVSDGVPGLNAALRGLFAAREAILRAVAAIDSDIKLMTRKSAVCARLMTVPGVGPITALAFAAAIDDPKRFKRSRDVGAYLGLVPRRHQSGEVDYTGSISKRGDVRVRTMLYEAANVMLTRYAGPLKLKSWARAIGQRSTMRKARVALARRLAIILHAMMRDQTEFQVA

SEQ ID NO: 491655 - protein, 335 aa, unidentified
MKHYAGIDLSMETSHVCVVDGDGRKIGALCVDSTPEAIAAALERYGPIDCAVIETGRMTPSIALGLRELDVAIVCIDARQAHQSLKAMKANKTDPHDAAGLAQLARTGFYKQVHVKSPAAHGVRSVITARGHLVEARVRLDNTIRGLCATFGIRLGIGQGERFLARMREAASIPGLGDAVASLLGVRERLVEEIRQMDRQLKAISAASPACQALMSIPGVGVQTSAAFAAAVDDATRFRRSRTAGAYFGLVPRRHQSGELDWTGRITKQGDSTVRKLLYEAANSILTRTRQTFALKSWALKIAKRRGLRKARVALARRLAVIMHAMLRDGTLFEA

SEQ ID NO: 491656 - protein, 438 aa, unidentified
MQVVHARCAGLDVHKKTVVAWARLLAPDGTLTTELRTFSTMTVGLLALVDWLLALGVTHVAMESTGEFWKPVYNLLEGSLTVLVVNAQHIKHVSGRKTDVKDAEWIAELLAHGLLRPSFVPPAPQRALRDLTRQRTHLVQERATVVNRMQKVLEWANIKLTSVVTDVTGVSARAMLEALLAGQTDVSVLAELAKGRLRTKRAELEQALQGTLAPHHAFMLAQHLAHLDFLEEQITAFDAQISAAIQPPAPPAPPATPSDGTEPPASAPHDPSWRSAQAICDAVPGIGPRVAEVIIAELGTDMSRFPDAGHAASWARLAPGQNESAGKRRSSRIGKGNRYLRAALIQAAWAAVKVKDSSLAAFYRKLVTKRGAKKAIVAVAHKLLTIVYTLLKTGETYQERGAAALDERQQERLLARMQRKIEQLGYTVHLEPKAVAAD

SEQ ID NO: 491657 - protein, 350 aa, unidentified
MLIIGCDYHPGFQQIAYVDTETGEWQERKLAHPKEAEEFYRALHEQWDGIRVGMEASGHARWFERLLAELKIELWTGDAAKIRAKRVRKKKTDREDARHILNLMLKDDFPKIWVPSWDNRDLRQLLWHRHRMVQMRTRIMNQLQAVALNEGLRCKKRLWRKHGRPQLESIRLAPWASRRRRDLLELLDRLNPTIAELTQLIEQEVAKNPLAQRLMTHPGVGALTALAFVLIIGEAERFECGKQIAAYLGLVPEEDSSGESRRLGHISRQGSGLMRFFLVEAAQVTVRSDAEWRNKFFHLAMRRGRKIAKVAMARRLAVRLYWMWRKQWDYEQLKKFGPHAGQPGTGVGVQ

SEQ ID NO: 491658 - protein, 421 aa, unidentified
MPNIEIGVDSMVKENFIYVGIDLHKETHTAVMIDCYNQKLGEITFPNRPADFPKLVTKVKKCNTDGKEVVYGLENAYGYGRALAVWLIDKGYLVKDVNTAISHRQAKHRGAMYRKSDSDDAEAIALATLNMLDKLPDACPKDAYWSLGQLVHRRDNIMKQRTRLVNQLHEQLCIAYPSYKQFFNDISRPTALYFWEHYPSRKYLKGKSVEDLRAELVPVSHNKCSTRTCEKILDAIAGDKVKNNAYQDARDMVTLSIVSDLQHYDKQLAEVDKMLEQMYKMLGCTLTTIPGVNVITAVKILAEIGDIKRFSNANKLAQFAGIAPLHLSSSGKGKDVATKQGNRRLQATIYFLAIQMVQVSSKGTPRNSVVRAYYEKRKAEGKTSQQALICISRRLISVIYGMLKNGTEYRMPVVENAGEKL

SEQ ID NO: 491659 - protein, 391 aa, unidentified
MPMYFVGIDISKYKHDCCIISAADQQIISKFTITNDKDGFEQLLTALNSLSNPEDIKIGFESTAHYALNLELFLENAHHSFMEVNPVLIKEYKKSTTLRRTKTDSVDCESIARWLITVEYKPHSKGFYHAYSLKSLTRLRDRLIRQRSFYLVKITNVLDHTFPEFKPFFNERLSKTALYLLENYGSAEKMARMNSASYDKLRCISRGKFSIQQFLRLKELAANNVGVNNSIFDLELNTLLTLYKSLSDEINTLETEIIKLIEEVHPHYMSIPGIGPISSAVIYAEYGDISNFSNPGQMLAFAGIEPGINDSGTESHGGRMVKHGSSQLRYVLLNACLPLIRFDLTFATYYEKKRAEGKKHRVAITHVAKKLIRVIYALERQDVDFNAQKLR

SEQ ID NO: 491660 - protein, 426 aa, unidentified
MKLEEKELEKPIRAWIGIDWADEKHDVSQYEVATRKQETFEIRQSPEALQEWLGQLRAKYEGGYVAVVLEQGRGGLLNALMSCEFLVLYIINPKSLSSFREAFYGSGATSDPVDAELMRDMVRQNPSRFRAWRPDDVLTRSLRLLTEGRRHLVNQSTALRNQLTALLKGYYPQALAWVGTLDTAWACDFLEQWPTLQSLQASSRRQILRFYEKHLRASLDLNEQLKQIEDARALTQDEAVLESSALMVQALVSQLRPLSASIAEFDRKIAMIFRKHPDRPIFESFPGAGAALAPRLTAAFGTDRDRFQAATEMQELAGIAPVSEKSGKKSFVHWRYACPKFMRQTFQEFADHSRRWCKWAKAHYELLRQRGKSHNAAVRALAYKWIRILFRCWKDRQPYQDEVYTKSLLKHGSPLSSLLAKPVENP

SEQ ID NO: 491661 - protein, 366 aa, unidentified
MKKSSTLAIEGMQIFKDNQLTIGFDLGDRTSRYCILNEAGEVILEQELPTTPKGIEQVFRTIPRSRIALETGTHSPWLSRQLTELGHDVIVAHARNVRLISESSRKDDRLDARTLARLARIDPGLLGPVRHRSAKAQIHLTVIRARATLVSSRTALVNAARGLTKSYGQRLRKCGTEQMNRESAKELSQELRDALDPLLAEIESLNERIAEYDRRIEQIAKEVYPQVAVLKQVKGVGPLIALTFVLTLDDPHRFRRSRDVGCFLGLRPGRRNSGMSEPQLHISKEGDRYLRTLLVQGAHYILGPFGQDSDLRRWGLKLAERGGKNAKKRAVVAVARKLAVLLHKLWVSGEVYEPLRNNHKVVAAVA

SEQ ID NO: 491662 - protein, 434 aa, unidentified
MSNLSKIYPSSAGIDIGSEKVFTAIENQPVRNFRTFTASYRELGAYLKEHKITHVAMEATGIYWITLYDILEEMGFDVTLVNPADSKNLPGRKTDVQDCQWIQQLFSYGLLRKSFVPQDVVRKLRVYTRMREDKLQMASSHVQHMQKALIQMNIRLPEVLSQTHGASGIAMIQAMLAGERDAAKLLSYCSSSLRKRKGADILLALEGNYKGEYLFELQQAYDGYMFYLDQVRKCDAEAEKILQEYSNKANKNYKDDNLIKPIRHNKPNIKDLHGLLLGIHGANPTVLPGMTDYSFMRLTAELGNNISQWPSVKNFVSWLGLAPGKNQSGKLNKRSKKKAVTRAGQIFKQAAQSILLSKQPGLGAFARKLKARRGSAIAIKATARKLAELYYKMFSQGMQYVEQGVKMYEEKLKQQQIKFLIRKATELNLQIVNV

SEQ ID NO: 491663 - protein, 348 aa, unidentified
MALTIVEDTRAVTGGAGTHAGMHVGAALDPVGGLLGVGEFPATAAGYARLLGWLGGFGTVCLAGIGGTGSYGAGLARHVTAAGIRVVEVDRSDRQDRRRQGKSDPLDAVSAARAAQSGRARGAPKGRDGAVEAIRALMVAKRSARSERTQTINQARALIVTGPDDLRARFARHTAAGLVSELAALRPRPGATVGYATRIALRELGRRAEFLDGQLGRLDELIVPLVTARAPALLALHGVGPDTAALLLIAAGDHPHRLRSEAAWAHLCAVAPIPASSGKRTRHRLNPGGNREANHALWRIVITRMSSHAPTRAYVERRTKEGLSKKEIIRCLKRYAARQVYRHLRPAG

SEQ ID NO: 491664 - protein, 311 aa, unidentified
MPQDTIGIDVSKDQLDVCRLPEGQRARFDNTAVGYRNLVAWMGEGVARVVFEPTGPYHGALEQALSRQGIPLVKINPRQARRFAEGIGQTAKTDRLDAELLARMGMMLRIEPRPAQTQALWELKELHQARAALVKERTAVRNRQEGIHLPLLKRLNADHLRQITHQLVKVEAEIERRIRADTDLSRRFDILLSIPGIARLSAFTLLIEMPELGSMKAPQVAALTGLAPLVRQSGHWAGHAFIRGGRAPVRRALYMPALVAVRYNPGLKAKYERFLADGKPFKLAITAVMRNLIVLANALLKADRPWSPIPA

SEQ ID NO: 491665 - protein, 418 aa, unidentified
MIDDVQWFVGIDWATQSHRACLLDVEGRHVSEHDFAHDGAGLTELRDWLLEKTKAAPGQIAVAIETPHGPVVEMLLDHAFLVFAINPKQLDRFRDRFTVAGAKDDSRDARVLGSALRTDRHAFRRLVVDDPVVIELREWSRMADELQQERIRLANRVRQQLWRYYPQAVELTDDVADDWFLALWQQVPTPATAAKVSAKTITRILKDHRIRRLDAATVLLTLRKTPLFVAPGTTEAACAHIRNLAARLHLVNQQIKEAHRALDGLCAKLEAATENPLGQIREQHDVTILRSWPGIGRIVLATLLTEATEPLRRRDYHALRALAGTAPVTRRSGKQCFVIRRLACNKRLQNAVHHWSRVAIQHDTAARRRYDALRRRGHGHARALRTVGDRLLYALCTTLERQMPYNPNCQTAQVTVGL

SEQ ID NO: 491666 - protein, 424 aa, unidentified
MKVTYQTCCGVDVHKSFLVATIVKTTGGIEPSYQKKRFSTFNNSILEFKQWLLDNDCHDVCMESTGKYWVPVFNLLEDDINVVIANPKWVKAVKGNKDDTKDSKWIGDLFRLGLVKGSYIPCKKVRILREYTRYRYKLVSCRSSEKNRYQNALTVCNVALDSVVSDIFGKSSTSIIDYLLEQSGSSINHEEIASKLLRSLKSKEDAVIESVEGYQMTDAQKYRMRLVRAHMDYITAEINDVDKMIENMISSNTDFENAVQFLCTIQGVKCDSAITIISEIGTDMSQFSSSRRLCCWAGLTPGSNESAGKRKSVRFTRAGVYLKPALVQCAHAAVKSDKSPYYKKKYESLVKRRGKKRAIIAIARMILTAIYQMLSTGEQWNPSDLYKIDMPVALVEKQKAKAIKQARKLLQREGLLPPDEPFAS

SEQ ID NO: 491667 - protein, 413 aa, unidentified
MTDETICWFAGVDWGSEQHQVCILDAAGKVRGERAFPHSGAGLVALCDWLVSIAGSSGCVAVAIEVPHGPVVDALQDRGFAVHAINPKQLDRLRDRFSVAGAKDDRRDARIAAAGLRTDPQLFRPVRIGDPMVVELREWSRLAAELQQERVRLGNRIRQQLWRYYPQLLELTDDVAAEWVLELWLMAPTPAKAARLRETTLARLLKQHRIRKISAETAIGTLRAPALTVAAGVTEAAVLHLRSLFTRLRLANREFRQADRKLDDLCATLTQTETSSETAPSDAAILASLPGVGKTTLATLLTEAPGPLIGRDYKALRTLSGVAPLTKRSGKSCIVVMRYAAHARLREAVFHWARVAVQNDPKSKRRYEALRARGHSYGRALRGVADRMLGVACVLLERRELFDPQHGMTTTIA

SEQ ID NO: 491668 - protein, 343 aa, unidentified
MGEISMIGLDLAKNVFQIHGVDASGQVVLRRQLRRNAVEKFFAQLPACKVGMEACGSAHHWARVIGQYGHQVRLMPPGYVKPYVKRNKNDGRDAEAICEALGRPTMRFVPVKSVEQQATLAVQGTRALLVRQRTMVANALRAALSELGIVAAQGLEGLRELMAKLEAPSGEIPEIMRGALLLLAGHWQALDVDERALERQIAKAARCNQDARRLMAVPGVGPIIASTVLAKVPDAKVFRSGRDFAAWIGLTGRDHGTGGKHRPGRISKQGDRVLRALLISGASAYLRQQKRRGINDPWLRELLARRPYKVAMVAVAAKTARILWAMLVKGETYRDRASAPAAA

SEQ ID NO: 491669 - protein, 346 aa, unidentified
MEQYVGLDVSLKLTAICIVDRTGKIEREGVVASDPEAIAAFVKSHAPHVARIGLETGATSTWLWTELNKMELPVICIDARHAKAALKMQINKSDRNDAVGIARIMQCGWYKEVRVKDLDSHAIKALLVSRALLVKIKRDIENQIRGLLKNLGLVIGRAKMNVFAVRAAELAEARPELAAAVEPLLKAREAVGRQIADLDRKVMRLARNDAQVRRFMTAPGVGPITALCFLATIDDPTRFKRSRSVGAYVGLTTRRYASGEIDWTGRISKCGDKMLRSYLYEAANVLLTRVVKWSTLKAWGVRLAKRSGLRKAKVAVARKLAVILHRMWIEGTEFKWSSKEVANQPA

SEQ ID NO: 491670 - protein, 350 aa, unidentified
MTMVGGFDVHRQQITFDCVHDDGLVRWGQIRPATRKTLRDWLAEHCPDGDGEFALEGCTGWRYVAEELAAAGLGVHVGDPAETAALRGPKKRAKTDRADARLLRTLLLQGRFPESWIPPAHVLEIRVLGRLYCTLMDERRAWQQRIHAQLFHQGCPPIRALLTETGRDALANAELSAAGRQYVDTALRRIDELTTETEPLRAQLVSFAKRQAGCRALQCHYGIGWLGAAIIWAEIGDARRFSSSDQLVRYAGLDVTVYSSDGKCSPGHLSRQGSPELRWAAFEAGKCAARRGSPDYVYYRQLAAKHDGHNGKNPALAVERKILRRCYHTLRELGDAALALPVPEREEVAA

SEQ ID NO: 491671 - protein, 352 aa, unidentified
MQNNVKVLGVDVAKNVFQIHGVDARGKEVFRRKLSRAKLKPFMATQQKCLVGMEACGGAHHWAREFRAMGHEVKLMAPQYVKPYVKRNKNDAADAAAIAEAATRPGMDFVAVKELWQQDILMIHRVRERLVKQRTALMNEIRGLMQEYGIVMATGPHRLRQGVAALLTSASCCLTDMAREILEQLVAEWREMDERLAMYTARLEQIARSNDICRELDKLPGIGPITATAMVATIGDPRLFRNGRQLAAYLGLVPRHAGTGGTVRLLGISKRGDRYLRKLLVHGARVLLLHAERRSDQQSRWILKVIDRRGFNKACVAMANKNARMCWAVMMKCVNGETPTIEAPPRQRSRAA

SEQ ID NO: 491672 - protein, 423 aa, unidentified
MKSQSDMEFTVFVGLDWADKKHDICLQAAGCEDREFDRFAHQVAAIEQWALSLHQRFGGRIAVALELAKGPIVYALQKYDFLVLFPINPSMLAKYREAFKPSRAKDDPTDAELALDLLVRHRERFQPLQPQSEPMRTLQYLVEQRRRFVDDRVRYTNRLGIALKQYYPQALDWFADQDTVLFCDFILRWPTLMQVKRARKASLVNFFRAHNMRFPKLIEKRICAVKAAAPLTQDGAVITAYKLQAQVLVEQLRVTLQAIRRFDQEIATITPKLPDYALFHALPGAGPALAPRLLVAFGEQRDRFAGADECQKYFAVAPVTERSGNKTWVHWRWQGSTFLRQTLVEWAGQTINKSFWAGAYYRQQKEKGSSHQAAVRALAFKWVRILYRCWQTRTPYDESKYLEALRRRGSPLLKQLGESMENT

SEQ ID NO: 491673 - protein, 403 aa, unidentified
MRTIGLDVHRHFAEIAILEGKEERQLRISTEPEALREFARTLGPDDQVVLEASANTWPIADLLAERAGRVVVSNPLRTRAIADAKIKTDKVDARTLAQLLAADFIPAVWVPDPATRALRARIARHRALVQQRTRLRNQIHAALIRSLVACPYSDLFGRAGRGWLAGASLASHEREGVESALRLHDGLEAEIAQLDRELGRTALADADARLLCTISGIGAVTALALVALIGPISRFNRPNKLVGYLGLDPTVRQSGDRAARLGHISRAGQAHARGLLVEAAHDAVRSPGPLAAFHARIADRRGRAVAAVAVARKLAVIIWHVLSDRTEYRFVAPTRLADKRRRMELSAGAPRRHTRSVTTLSRTERLQLERAELIAAERAYRKLVSERRARGKQGAAAATGERP

SEQ ID NO: 491674 - protein, 372 aa, unidentified
MRKNIIATKSPRGKEGNRQSERITIGMDLGDKTSRYCVLDDGGEVIAERSVASTKNGMLRSFAAMKRCRIALEVGTHSPWISRLLSKLGHEVIVANARQVKLISASSRKDDRLDAQMLARLARVDPRLLAPIQHRSEEAQADLNLIRVRAALVEARTSLVNAARGLSKSAGERLPKCGTDQLDVERLEELPAALGEVLRPLVEEVKSITGNIKECEKKLEQIARDKYPETKLLKQVKGVGTLIALTFVLTLEDKTRFAKSRDAGCYVGLRPKRSDSGESQPQLRITKEGDIYLRKMLTQGAHCILGRFGADTDLRRWGLKLAERGGKNAKKRAIVAVARKLAVLLHHLWVSGEVYEPLRNAAQRSGLKKAAA

SEQ ID NO: 491675 - protein, 341 aa, unidentified
MSLYAGLDISVKTTAICVVDGNGQVLLETKVDSSPDAIAERLREFDQPLERVGLEAGPLSQWIYGGLVDIGLAAICVETRHMHAALSARINKTDRNDARGIAQMMRVGLFKAVHVKTPASQHRRLLLTSRKLLQRKIYDIENDLRGSLRNFGLKVGVVGAVKFEDRIRELVADHPVVAAIVGPLLEARAALRVQFTKLHHMLLELVRTDPICRRLMSAPGVGPIVALTFRTCVDNPARFSRSKCVGAHYGLTPRLYQSGEVARTGRISRCGDVMLRSSLYEAALVVLTGPGRWNPLKAWGIAVARRRGMQKAIVAVARKLSIVLHRMWRDDTDFRWTAATA

SEQ ID NO: 491676 - protein, 349 aa, unidentified
MRFYNQQHRFYCGVDLHARTLSLCVLDAKGSIVRQQTITAGPHAFLQAVAPFRDGLAVACECMFAWYWLADLCEQEKIPFVLGHALYMKAIHGGKAKTDKIDAHKIAVLLRGGMLPQAYVYPKGMRETRDLLRRRTFLVRRRAEALVHLSNTNSQYNQPPFAKKLAYAANRAQLDIVERFSDPSVQKNVAVDLALIDAYDTQIADLELYLARTAKVDDPQAFHRLRSVPGIGKVLALVLLYEIHDIRRFPEVGQFLSYARLVRCSHESAGKKQGTGGNKIGNAHLKWAFSEAACLLLRESEQAKKWLVRREKKHGKARALGALAARLGRAVYHLLRKREVFDRKRFFAS

SEQ ID NO: 491677 - protein, 407 aa, unidentified
MFYGGIDVAKHSHEVCLVNDSGDIVLRMHLDNNHKGMNKLLQALERLGLKPDDVKFCLEATGHYWLPIYCYLTNQGFELHVINPIQSDALRNLYVRKTKTDQKDALLLADLLRLGRAPETRLPSETTLKLQSLSRLRFEFVRQVGGLKNRVLGILDRIFPEYPDCFSDVFIRTSRELLKSYPGPEELAEVDLSELSAFLKEHSLGRFGEERAKKIQSLAKGTFGITLALDAFTLQLRLLVEQIEFIEEQIRVIEDAINEVMEELRPSKDTPYRHVIETIPGIGPVLAAAIIGEIGDISRFPNPRALVAYAGLDATVRASELFEGTRNRMSKRGSPVLRNSLWLAAVSARRFNPALRAYYDQKRSQGKHSNVATGAVARKLVHLIYSLWKDNRPYDPDYQWSPPGKNA

SEQ ID NO: 491678 - protein, 400 aa, unidentified
MLLFFEVITMIFVGIDVAKDTHYAAVSDDSGAVLVKTFAFQNNAEGFCLLLKKLSEFDRSKLLIGLESTGIYSENLICFLYESGFRLAVINPIQTATLRKTAIRKTKTDKVDTMLIIKSLMVNSYRLYSQRDADSLKLRTLCRFRQNLKNSKARLKIQLAGYVNLVFPEFGKFFKSGIHIAASYALLKKYSSPKEIAALRTSTLCTLLSKASHGRFGKDTAEALKSLALSSVGVKNPYISIQIAQTIAQIELLEQQIKDLNSAIEEAMESINSVLMTVPGIGAVNAACILGEIGDIKRFSKPCKLLAYAGLDPTVRQSGQFTAKSTRMSKRGSALLRFALINSAWQLTLNDTTFKAYYDLKRSQGLNHYGALGHVAHKLTRVIFKLLTSDTPFNPAKLVA

SEQ ID NO: 491679 - protein, 369 aa, unidentified
MNDITYVGLDVHKATVCVAIAESGRGGEIREVGVFENRPDVLRKMVARLGKHRRRLNFCYEAGPCGYGLHRLLTGLGHDCVVVAPSLIPMKAGDRVKTDRRDALMLAKLHRAGELTPIWIPDAAHEAMRDLVRARATAVRALSKARQHLQGFLLRHDRIYHGARAWTLAYRRWLTTVRFDHPAQQIVLQDYIHAVEDAESRRDRLTRQIEELMPSWSMAPVAAALQAMRGVALVVAVTVVAEVGDFRRFTNARQLMAYLGLVPSEHSSGSTVRRAGITKAGNALARRVLIEGAWTYRMSARVSRKLHDRLEPLSAAIRDIAWKAQVRLCARYRRLAAIGKPKVVVTTAIAREMVGFIWAIARVAQPEPI

SEQ ID NO: 491680 - protein, 348 aa, unidentified
MQQVSRIGLDIAKRWFQVHGVSPSDELVIARKLGREEVLGFFAALVPCDVALEASGSAHYWAREIGKLGHRVKLIPPAYVKPFVRRGKNDANDARAICEAAARPDMRFVPVKSEEQQAALLLHTTRQLMIERRTALVNSLRAQLAEFGIIAAKGLAHARSLVKAVMEDADAMVHSLPDTIKSILRLIVGQLQDTDNAIAELDHKIKDWQTRSPQGQVLSTVPGFGPLITAAIAATVPDPNVFRSGRDFAAWVGLVPKQRSSGGKERLGRISKQGNPYLRKLLVLAAATHLRWLHKWQGPLAVWAQQLLKRRPPKLVMIALANKLARIAWAIMKTGEIYRQGSAHQTAA

SEQ ID NO: 491681 - protein, 343 aa, unidentified
MQAVTTIGLDIAKSVFQVHGVDAHGKVVVRRQLKRRYVLAFFKKVSPCLVGIEACATSHHWSRQLQALGHTVRLMPPAYVKPYLKRQKNDAADAEAICEAVVRPNMRFVETKTADQQSCLMLHRTRHLFIRQQTAVINAIRAHLAEFGIVAPVGRNGVEELLDVVADPDDDRVPEVAGECLSALGKQLRMLKAQILEFDRRIMAWHRSNETSKRLDEIPGVGPALATALVASVADPKAFRSGRDFSAWVGLVPKQNSSGGKEKLGSITKRGDRYLRSLFTAGALAVIRYAKIHGTKHRPWLTALLARRPTKVAAIALANKIARMAWAMMARGERYKEPIALAA

SEQ ID NO: 491682 - protein, 343 aa, unidentified
MQTITTIGLDIAKSVFQVHGVDDAGQVIIRRQLKRRSVLAFFQKLPPCLVGIEACASAHHWSRELQALGHKVRLIPPAYVKPYVKRQKNDAADAEAICEAVTRANMRFVPTKTPEQQSGLVLHRTRHLFIRQQTAVINAIRAHLAEFGIVAPVGRHGVEELLNVLTDPNDKRVPEIARACLSAFGAQLCRIKEQILEFDRLIRAWHRSNEMSMRLDEAPGVGPVLATAVVATVADPKSFRSGRNFSAWIGIVPKQHSSGGKNRLGNISKQGDRYLRGLFVAGALSVIRYAKIHGIKHRPWLTALLARRPTKVAAIALANKIARMVWAMMVKGERYKEPVALAR

SEQ ID NO: 491683 - protein, 408 aa, unidentified
MKRYYMGVDWGDRLHQVYVDDEDGKKVREMKLQESPEGLAEIGRWLDEKRAEGFELWAAIEKPAGRIVDFLLDHGVEVYPFNPKAVDRARDRYRMSGSKSDAFDAYVLAEFLRTDQAHLRALRPSSEKAQELKMLSRDQRRVVRHKTRFLNQLTTTLKEYYARPLEVFEDLETEIALDFLKQYPTPAHLSALTRKQFNRFATKQHHLSKQRCEELWEKLNKPQLAVPEHVVRAKAQLVEVLIEQLRASIKAVKIYNHRVESFFASSPAAQFAKTLPGGKSGTLVAAVWAELGDAQGRWESSRHLQAEAGAVPVTKASGKSRVVHFRFACNKHLRYTMYWFSFVSLNHSEWAKLYYRGQRDNGHSHHQALRALGAKWLKIIFVMWRDHKPYDENYHLANIARQKMRQAA

SEQ ID NO: 491684 - protein, 346 aa, unidentified
MEYVALDVHKNYTWARVENSQGARLYESRLAHGHGTIKNFVNRWSGGSPVAVETVGNWYWVVDEIEAGGGTPQLVNARLAKLMMGNVNKSDKLDCQGMNRLQRTGTLPTVWIPSSSVRDGRELARTRMVLSRQRTQLKNRIHATLGKYGYTVKGASDAFGKKGREIIEELLLKLPPHTQQALRLILDELDHVTDNLKAIEGHMIEIFSPCPQTQWLKSLPGVADILAVVIWTEIGTIERFNRAEQLASYCGLVSRENSSGGKIRLGPVRRDVNVYLKWAFVEAANSALLNAGRCGYGHISRLYERIKPRRGHGKAKVAVARHLAEASFWMLKKGEPYREPMPSTQR

SEQ ID NO: 491685 - protein, 311 aa, unidentified
MNSNVFVGIDVSKNKLDVWLKPDDHYFSVSSDSEGLNTLVERMKQWDPQIIVVEATGGYENPVMTALAEQELPLVLINPRQIRDFAKAMGKLAKTDRLDAETIAHFAQTIQPAPKKLPSKEQQELKEMLSRRHQLVSMLTMEENRLNVASTKIKRQISANIESLNKQLRDIDKDLDDFINNNSTLKQKADIVKSVPGVGPAVTKTLISHLPELGTLNRKQISALVGVAPLNRDSGRFRGKRKIWGGRKKIRSQLYMAALVATRHNPVIRSFYQRLIESGKESKVALTACMRKLLVILNSMVTHGTKWDPGF

SEQ ID NO: 491686 - protein, 358 aa, unidentified
MTRFHVGVDVGRAHHVARVLDASTGQMNRSFQIPVGYEGFERFRQYLEGFSPDQQDFFVAIEATGAYHVALAGYLWDCGYTLALVNPARSKSFRKAEGHVAKTDRVDAGVLCRMISGVNLRPTIPKPEEQERLRILTRWYFRLQQDRTKVLNRVSAAVDMVFPEFWQVFSKITQVTPRMALRTYATPDELVRADTEALTCLMKSASHGRYRRKDADLLQTLASRTVGVHTLYTPVAFQIRQALAQVDLIDQQIRELTPQIEEAFHTMGFTAEEFPVGGVITLATIVAHLPSPQSTPSLKSLHAFVGWCPRDRQSGQYKSSRPRMAKGCPPLRWGSVRTFTRLHVLCDSLQGVYYQTES

SEQ ID NO: 491687 - protein, 342 aa, unidentified
MTIAVLGIDLGKNSCSLVGLDAAGRVVLRRRMRREGVIAFGAKLPGCVVAMEACCGAHHMGRALAEQGHTVRLMSPEYVRPYVKAQKNDDRDAEAIAEAATRPTMRFVALKSEAQLDVQTLHRVRDQLVGERTALTNQIRSVLLERGHVVAQGRAKLTACLAALLDTDAGASLTPRMRTLMAEVRERWQELDQRIAALDAEFAEQARISDDARRLTTIPCIGALNATALVAAIGDVASFARGRDLAAWLGLVPRQVTTGGKPRLVGITKRGSKYLRKTLVQGARAALPSLRQSDTHLGQWLRGLLARSHVNTAVVALAAKMARIVWALLRHGRVYEPAAVAA

SEQ ID NO: 491688 - protein, 355 aa, unidentified
MYGLKHQKEKHNMDHFAGLDVSVKETSVCIVDNTGRIVREVKVPSEPEALLAVLKNPAYHFKRIGLEAGPLSQWLYSALAEAGLPVICVETRHMRAVLKAQINKTDRNDARGMAQMMRVGLYRPVHVKTLRSQKLRMLLTHRKLLQSKAIAIENDLRGTLRNFGLKVGMAGTVKFEARIRELVENLPDLAALVEPLLIVRRVLHEQISVLHRRLLAIVRDDAVCRRLMTIPGVGPVVALTYRATIDVPARFKNSKAVGAVFGLTPSKYQSGEINRTGAISKCGDAMMRVMLYEAAQVMLTRTNKWSWLKAWAMKIARQRGMKKAIVALARRLAVIMHRIWVDGTEFRWTRKVVAA

SEQ ID NO: 491689 - protein, 456 aa, unidentified
MKTLPVINPHAAAIDVGSEKLCLSIAGDEPVVFGTVTDEVYRLRDYVKQQGVTTVAMEATGVYWLYVYSVLEAAGLEVIVVNGRYVKNLPGRKTDMTDCQWLATLHAHGLLRGGFVPPAEIRRLQDYQRLRADHISEAGSQVQKMQQALERMNIKFHDVISDLTGVSGMKVVKAILAGERDPERLLELCDGQIQKKKKEQVIASLRGVWAPEHLFALRQALSVWEFYKKLLAECDRELEVVLKELAGPSPSAPPQAPEAVEAKAKAPKPPGKNAPQIDDLHALLVRICGGRDPTSLPGIGDYLWLQLVAETGMDMNAWASEKHFTAWTGLAPGTRQSGKRKGSVKRQRNRAGRLFCLAARTLIQSVDKGLGGFVRRISRRKGGLVAVKALARKLALLYYRVLRYGLEYAERGLQDYEQQYQESQRRLLAKLAAKHGFKLISEEALALQASLQPAQR

SEQ ID NO: 491690 - protein, 338 aa, unidentified
MAIVFVGIDLAKNVFAVHGVNQAGKADLVRPNVPRAKLHELIATLPPCTIAMEACSGAHHWARLFQALGHTVKLMAPKFVAPYRLSGRRGKNDAADAEAICEAVQRPNMRFVPVKSPEQQGQLMVHRARQGYVEARTATINRIRGLLSEVGIVLPLKADTVRREAHALLEDLPGWVNTVIGDLLGEVTRLDERIAEYDRHVALMARQNDQAQQLLRLRGVGETTATALIAMIGNGREFHNGRQLSAWIGLVPGQYSSGGKTRLGRITKSGDAYLRSLLIMGARAVLNAAKGKTDGISRWATALAERVGYWKAVVAIAAKNARMAWAVLAKGEAFAMPA

SEQ ID NO: 491691 - protein, 370 aa, unidentified
MTHEHGVAGIDPHKKSATISILDHRGGVLGSESFSISEEGIDQLLTFLLGIELTIDRIGIEGSGFLGRPLVLALTAAGYDVREVQANRTAERRKRRRRAKTDIEDAEAIARETLADPHLPPAGKHASPSPAWRTLTVLRDWRASLVLQRVRLLTEAEAVLVTLPIAIRDKLPATSRVLPQLVILAEVHVGTGELAPADRLKLERLATSLIDITTMTRRIKELDRQIPAILAELGSTLTDLHGIGAVTAMDLLVEIGDPHRFTSEAQFARWCGIAPVPTSSGEGHGPARRHRLDLGGNRAVNSILHIIHVTQARCHPPAKEYLARKVSENKSKREARRCHKRQLANVVIRHMWNDAERHAQTAVTDLLAAA

SEQ ID NO: 491692 - protein, 346 aa, unidentified
MSTMTNPGAHVTVGVDTHLETHVAVALDQVGRVLAQQSFPADPPGYRSLLRWSRALGHVHAFGIEGTGCYGAGLARAARQAGHRVIEVDRPDRRSRRARGKSDPVDAEAAARAVLAGTATGVPKNRDGDVESIRALRVARRGAVRIRIQVANQLHALVISAPEPLRENLRRLSTRDLVTTAAALRPGPALDPTAATKHAVKILARRHQDVDHDIAVLDDLLRQLVPRACPGLLELFGVGTDTAGALLVTAGDNPDRLHSDPAFANLCGVAPLPANSGKTTGRHRLNRGGDRQANAALYRIVLCRLRYDPVTRDYVERRTTEGLTKPEIIRCLKRYVAREVRHALLA

SEQ ID NO: 491693 - protein, 344 aa, unidentified
MNNMHYVGLDVHKKTIAFCIKLIDGKIVEQGTVSTNKNELAAWAKTLPPSCIIAMEATMFTGWIYDFLQPYALEIKVAHPEMLKAIATGKKKNDKLDAKKIADLLRCDLLPECYMAPTEIRELRRILRYRNLIIRQAVQMKNKISGLLMELGAEYDKKRLHGQKYFYELLENLHDVPQSVINLLKLSRSNLEMFKTSQKRLLLFLQNNPIIQHRVELLKTIPGIGEVTALTWILEISDPYRFAKNRQAISYCGLCSAEKESAGKSSRGPISKKRNKHLQHVIIEAAKIAPIWNEQLALIRTKAIEKGADCNTATLEVARKLVSYMLSVDKSGRPFEYRGLKKAA

SEQ ID NO: 491694 - protein, 407 aa, unidentified
MQVFLGIDWSHTHHDACWLNAHGQILSRLTVPHTLEGLNQLDVACQQLGVSHTECWIGLETAHTLLIDFLWEQGYSQVFVIPPGAIKGARRRYRQTNAHTDQSDAWVIADVLRTDPATLHPWRPDGVIVRQLHTKVSLLHFLTKEIRRFSNRLRAVLARYYPAALHVFYDPASPISLLFLQAFPTPQAAAALTRQAFGQFARAHRYRQPDSVLSAAYARLQAAYPVASATTVAAYGEEAVWLAQHLLATIEHKKVELARLQDLFLQHPDHELFASLPGTGDFLAPALLAKFGDDRERFPDPQSVQCLAGTCPVTEQSGKSRRVHFRQACDHEFRQIVQQWARASISQSSWATTYWHNVREHARSNSHAYRCLANRWLAIAWKCWQSHHVYDEAVHLQNRARRLATRA

SEQ ID NO: 491695 - protein, 323 aa, unidentified
MQGKVMPEPSAMPEVYVGIDVCKDRLDVHLHPLNQRFAVANDAGGWRRLKRRLAAHQVVRIVMEATSKFHRAAHRSLTASGYPVAITNPLRSRLFAEATGQLAKTDGVDAAMLARFAEQIAPPATIPAAEALEELRELIHARSAGVKDHTALKNRLSAATSELVKREISQMLENVAASNRRIDEAIAAHIANDPALARRSELLRSIPGIGPAVANTLLADMSEIGTMTPKQAAALAGLAPYPRESGAKAGQRRIRAGRGTTRRALFMAAIVAARFNPCMNAFYRRLVEQGKAKKVALVAVARKLVILANTLISEDRPWQPKPA

SEQ ID NO: 491696 - protein, 366 aa, unidentified
MNNEYYTTIGMDVSDRTTKVCVMAKAGGTRQIVEETTIPTTKDGLRAYLAGKSADWPVVFETGTHCRWMKREVESLGMKAIVANPAKLRMVTESNTKNDRNDAREIARIALADAELLHPVRLRGERCQQVMRILKARDMLVKVRTMHVNQLRGFAKSIGFRLPSCPANKVHALGKSGWPADFESVAWPLMDMLETVDLKIRAYESRIRALAGSPELKEKVERVREVYGIGLLSGCAIVASIDADPSRFRKARDAGAYFGLVPRQRQSGDVDEQCHITKAGSALARRLMIEAAQMVLRSSSRDTDAKLKGVRMCARGGRIAKKKALVAVARCLVVTAVALLKKPAAEYVPLSEAARREFEAMRAAAA

SEQ ID NO: 491697 - protein, 355 aa, unidentified
MESVKYLGFDVHQSTISVAVVNADGKLVMQSVIATHAATILDFIHGLRGTLHLTFEEGTHSAWLYDLLARGVARVVVCNPRQNALLKAGNKSDTSDARKLAELLRAGLLAPVYHGEGSTRTLQELVRSYAALTEDTTRVMGRVKALYRSQAIACAGKKPYGRRHRREWLSKLSEAGLHRRAERLYEELDALQGLRRAAKRELVLESRKHAAAKLLRTVPLLGAIRAALLIGRVQTPHRFRSKRQFWAYCGLALETRSSADYRFEDGQLVRAKKPVFIRGLNRNHNHDLKNLFKSAATTASALHGPFREFYEGLLAKGMQPAMARLTLARKIAAITLSVWKKGESFDAEQLKPQAA

SEQ ID NO: 491698 - protein, 435 aa, unidentified
MSNIIKFDSFISIGIDVGADFSWMSIALPNQTFVGKPFKILHSDLNSLSMAVSKIKEAEEMYSLESRIFLESTGIYHYPLFCYLRDKGFLVSIINPIITKNSTNINIRKVHNDKFDSKKAALIGLKPDLKVSIIPSDLALDLRNLSREYYDLVDNRSAYINKLQAELRMVFPQYLKIFSKITVNTSLTLLEKFTSADDFLNASKDEIITSIRATARFGISYAEKKYNAIIKAANEAKTFGYSVNSNFKRILLYIRFIRQYNAEIEFILSDMRDIVESNEDTDFVKQIRLIETFKGAGFLSAVSLMCEIGDFSAFKSPKQLFAYFGLDPAVKQSGKFNGTDVKMSKRGSRIARRVIHTMALVSIALNRNGSANNPVLRDYYLKKSESKPKMVALGAIMHKVCNIVFAILRDEKEFKIITPEEHQTNYLKAKCDIAA

SEQ ID NO: 491699 - protein, 407 aa, unidentified
MVLRDRKGEWEVSNRIMQRSRRPNRRLEASPNRSCLAEETYGGKKMSKTEETRRLCVGVDLHKTQFTVSALTEDGEVVLQEEYRTTPDGYSEFIEEMHRYEEEDGCSIELAVETTGNARFFKNQMEKEFFYVTVVNTNKFKVITYSTKKTDANDALTLAMYLQKEMLPEAHLCSQTSEEIRRMLKTRRILVQSSVKIKNQIHGMLLGYGIETNAAQFQSKRKRQDLINDLADHDYSEFTASSLEVMLNILDVLAEQIKDVEEQIEKMVEDNEDVELLKTIPGVGKIGAATIASYTEDLERFDGNFKRFAAYIGIVPSVHNSNETVHLGRITKHGPQELRTAFVQVALGMIRASKQTSEWRLIEDYRRKKTEKGSGRAIIALTRKIARIVFVMLENRETFNPELMLSK

SEQ ID NO: 491700 - protein, 320 aa, unidentified
MLAVFHRMDHCYNQFENAKSGLKKLNQWLLQQEGFAFNKALFCMEHTGIYTRRLVEFLLPKGAKVWMESALHLKRSLGMIRGKNDKVDSYRIARYAMVNVDQVKLISPSNQTLQLLKDLLASRTRIDKSIQSIRVSVRELQKVDKLSGGELAKLNKPALEGLRKSKAAIEKRMLELIDTDPELKQIFALATSVKGVGPVLATQLLIYTHKFTRMTGVKQLACYCGVAPFTHCSGTSVRGKTRTSHFANMALKTTLHLAAMSSTQYVPDLRDYFQRKIAEGKSKMCVINAIRNKLLHRILAVVKRGTPYTLNYPEINLVKS

SEQ ID NO: 491701 - protein, 397 aa, unidentified
MFYLGIDIAKHKHYASIIDQTGKSITKPFPFHNHKEGGQPLLNWIYQYIESPTEILIGMEATGHYWLAIYSFLLDHGFSVIVLNSIQTNAWRKGTEIRKRKTDAIDATMIADIIRFGRFVETPLVDKKMFALKQMSRFRHALVSNMSDLKRKALVVLDQIFPEYQSIFSDVFGKTSSQLLLEYTSPSDYEQISIDDLTKIIEQASRNRLGKKTANTLIQLASNSFGITFCKDAFSFQLKILIEQIHFIEDQIKDCEEHMSQLLVDLDTPITTAPGIGSILGATILGEIGDIHRFDKPSKLVAYAGIDASVSQSGQFESSGMSISKHGSSHLRRALFQAAITAHKHDPVLKAFYEKKRKQGKHYYVCIGAVARKLCYIIYAILKNNKPYEIPRYSKEV

SEQ ID NO: 491702 - protein, 417 aa, unidentified
MDGTDPISVVHPRCCGLEVHKQQVQACLLLSTPSGQVRQEQRAFSTMREDLLALVEWLRAAGCTHVAREATGVYWNPLYNLLEGHVEVLVVNAQPIKNVPGRKTAVNDAAWIAGLLRHGLVRPSFVPDREQRELRELTRYRKSLVDERSAEVNRLQKTLEGANIKLAGVAKDIMGQSGREMLERLVAGQTDPTLLAQCARGKMRRKIPDLERALAGTFGPHQRFLVARQLAPIDDLDETIAEVGAEIARRVAPCEEEIALLDTIPGVGRETAEALRAEIGVDMEQFPSAAHLASWAGMCPGHHERAGKRTSGKTRKGSRWLRALLVVAAQAAGRTKTTALGARFRALTARRGRKRAAVAIGHAILLLAYHVLTRREPYDDGYLRRTQEPRPPSPAHLVQQLRALGFDVSLQPASPAA

SEQ ID NO: 491703 - protein, 339 aa, unidentified
MHKLDRCVPLNRHVKGGAVDILGIDVSKADCHAFLLSERGNAKKNFPNSLVGFRQLDTWLKNRGVRSLHACMEATGGYWEALAQHLHDAGHIVSVVNPSRTKAYAQSELLRTKTDAVDAALIARFCVAHDPPAWTPLPPELRELQALERHLQHLKDARSHELTRLELPGLPDLVESSTRGVIRAFDVEIEQIERTISDHINRHPDLRRKRDLLTSIPGIGEATANSILAEAPQLEEFRSGKAVAAYAGLSPRERQSGTSLRGKVRHLCKTGNARLRKALFFPAITAIRYNPIIRDFAARLTASGKAKMLIIGAVMRKLLILAYGVLKSGVAFTLEPERG

SEQ ID NO: 491704 - protein, 408 aa, unidentified
MEVLYARCAGLDVHAASLTACVRVATGAAVTYQHRTVSTTTRGLLDLGEWLAACGCTHVAMEATGVYWKPVWHLLEGRFTLILANAMHIRNIPGRKSDMNDATWIADLLAHGLIRSSFVPPTPIADLRDLTRTRKQLVREITRHTQRIQKTLEHANVKLTEIISDILGTSGRAVLRGLIAGETDPHRLADLTSGRLKASRAQLVDALEGRVTGHHRFMLQLHLTQIEALETAVYDLEMRISDALAPFRAAVSLVTTMPAVKATTAAVILAEIGTDMAQFPSAGHLLSWAGLCPRLDESAGKRRSTRTREGARWLKTTLVQAAWAAVRKHDSYFHAQFVRLKRRRGPKKAILAVAASMLTAVYYMLRDGVEFHDLGSQYFAHHDKEQLTQQLLRRLRDLGVEVEVKKAA

SEQ ID NO: 491705 - protein, 455 aa, unidentified
MMAAWRLPITRIWKVILVSKSKAYSASDVNKVDVSRLIAGRQGQRAWIGLDVGKYEVMAVLRWSDERFERPWKIKNPEQLGQFLRVVKELSAALKSAGGELLGVGLEPSGTYGDAFRQALFDGGVPTRRVSPKIAHDYAEVFDGVPSQHDGKDAALVADLCAIGKSDPWPYVEPDAVEQEIGYWADCLDVQRRLSQVWYGRLEGRLARHWPEVTRLLRTSSATLLKTLAEFAGPAALAAHADAAGKLKGFGGRHLTEQKAQEVIASAKSTVGVRTTAWDRRRLKELAEHALDARKQIGEARRQLRRVAKDHASIQAMATVVGLPTACVLWVCCGNPGAYTCANAYNKALGLNLAERSSGTFKGKLKISKRGKAMSRRWLFFAAMRWINDPRVRPWYECKKARDKTGMLALIAVMRKLGKTLYHVGGKGSTFDPARLFPGIAAEKKAGAKQKAATT

SEQ ID NO: 491706 - protein, 338 aa, unidentified
MKAYVGIDLHSTNSVIGIIDENNNKLFLKKLPNKLEQILLALEDFKEIIIGIVVESTYNWYWLVDGLLENNFKVHLSHPCGNVQYSGLKHSDDKKDSLWLANLLRLKILKEGYIYPKKDRPVRDLLRRRVMFVQQRTAQILSFQSMITRNLGIKKSSNDIKKMQIEEASKLFEDPHLFVMARCYLEIIKNLTTQIEIMEKEILRVANLKKEFESLLTITGIGKILALTIMFEVGDINRFAKVGNYSSYCRCVSSIRKSNDKKKGEGNRKNGNKYLSWAYVEAANFSRRYSEDAQKYYQRKKSRTNEIVAIKALANKIARASYYIMRDQVPYDSKKIFN
